United States Patent Application Publication US 2019/0348154 A1 - sequence listing, part 38

SEQ ID NO: 139975 - DNA, 1680 bp, Enterobacter cloacae
atgattgctgctgaagcatggcaacccgccgatggactgactttggaaccaaatgcaaaacgagcagcaaaagcgcgtaagcgctgcttggcactcaccgccggaccaggtgcgggtaaaacggaaatgcttgcgcaacgagcagacttccttttgcgtacaggaacatgtcggtaccctaagcggattctagcgatctccttcaaggttgatgccagccgaaacctaaaagagcgtgtcgaacggcggtgcgggaccgatcttgcctcgcgttttgatagctataccttccatgcatttgccaaacgtatcatcgatcgtttcaggccgatgctcacggggaaagatgccctggatgcgggttatacaattgtagacaagaaaaatggcccctctcgtactcaaattgaattcggcgatctggtccctttggcaatccagatattgaaaacctcaaaaattgcccgtcatgcaattcggcaaacttacagcgatattttcttggatgagttccaggattgcacgaatttacaatatgacttagttaagcttgctttccaagggactagtcttcgccttacggcagtaggtgatactaaacaaaaaattatggcttgggctggagcgctggacggtattttccaaacctttgccaatgattttaatgccgtaccacttaacatgtatcgcaatttccgttctaaaccacaattgctgcgggttcagaacgaaattattcgtacgcttgatcctgactctgtcatgccagatgaacaattgggtggcgatggaggtgaggtttatgcctggcgttttgaagacagttgtaaagaagccgtctatttggctgatctaataaatggttggataaatacagaacaattaccaccggcagaaattgctgtcttggtttctaaacagttggaactttatgctgaccaccttatgaccgagttggaagcacgcggtattccatatcgtaacgaacaacaattgcaggatatcactatagaacctgcagcacgtttgatcgtagattatttatcatgtctctacggtaagcgtgaacctaaggcttggattagattgatgaatcaattgatttcttttgccgatgaagaaatacagtcaagtgcgagaaaggatcttgatcaattaattaaaaaacaacgtaaaaaagtatctgatgctaggcatacagactcacctttttcggattgggtacaattagcaatagagttcctgaagtatatcggctccaaaattttggttgctttatcacctgattatgaaactcgttcgcgtttaaatgatgttatccgtgaaacttttgcccggattaaagaattgcataaatcagaaccagatttgccaaaagcgttgggacgttttgcggatgatcaggctgtacgcattctgaccattcataaaagtaaagggttggaattcgactctgtcattatcatggcagtagaaaacgagattttctttggcgatcaggatgagaatcgttgcgcttttttcgtcggtgtttcacgagcgaaaagacggttgattctcacacatgccgatcagcgagaacgtcctgctaacgccagacgttggaatatcaatcgaactgctcaatctgagtattttagttatgttactccatttgtagcgggtaacaagtttaagtga

SEQ ID NO: 139976 - DNA, 864 bp, Enterobacter cloacae
atgagaaaacctgaagatcttcagccgctgcagaacatactttccaatctacctcagtgggtatctgaacgtatattgcagcagataaatcagttaactcattacgagccagtgatcggcattatggggaaaaccggggcgggaaagagtagcctttgcaatgctctgtttgtcggcgaagtatcgccggtcagcgatgtcgcggcctgcacccgtgaacctttacgatttcgtctgcaggtgggcgagcgctttatgacgctggtggatttgcccggcgtaggagaaagtggcgctcgcgataccgagtatgctgcgctgtaccgcgaacagctttctcgcctcgacctggtgctgtggctgattaaagccgatgaccgggcgctggcggtggatgaacatttttatcatcaggtgattggagaggaataccggcataaggtgctgtttgttatcagtcagtcggataaggccgaacccaccagcggtgggggaacgttgtccacggcgcagaagcagaatatcagccgtaaaatctgtctgctgcatgagctgttccagcccgtacatccggtgtgtgccgtgtcggtccgtcttcagtggggactgcgggtgatggccgagcgaatgattaagtgcctgccacgtgaggccaccagcccggtggtgtcgcaactacagtcttcctttcgcacgacggtagtccgggagcaggctcgtagcgattttggtgaaaccgtcggtgctgtactcgatagcatcagtgcctttcccctgatacccgccccggtgcgggccgtcattcaggccgtgcgcaccaccgtggtgtcagtggcccgtgccgtctgggatttcttcttctga

SEQ ID NO: 139977 - DNA, 573 bp, Enterobacter cloacae
atggcttttaaattctcagaaaaagaccgcactatccgaatttataacctccgcgcagacacccgggagtttattggcgcgggtgatgcctatataccggctaatacgggtctaccggcagactgcaccagtattgcaccgcccgacgtgccggagggaaaggtcgccgtattcaatggaacaacgtgggcgctggtcgaagactaccgaaatcaaacgctctacagcaaagaaacaggcgagcgcgtttatatcgccgcgcccggtgctttacctgctgatgtgacgaccattgcccctgacggtaactttatgcgctggggtggcgaaagctgggagaaagacacggaggcagaacgcgccgcagcggtgtcatttgcggaaggtgaaaaaaaacggctgatgcaggaagctacgctcacgattgaaacattacaggatgctgtcgatttgggggaggcgagcgagaatgaggtcagcatgttgacggtgtggaaaaagtaccgtgtttatcttagccgggtttcccctgatgccgcgccggatattgaatggcctgcactcccggtgtga

SEQ ID NO: 139978 - DNA, 351 bp, Enterobacter cloacae
atgacggtgcgttatctgggaatgaacagccagaccggtctcagtatctcggaggtcgagcacatcaggcaaagcgtgcgcgacattctgattacgccggttggctcgcgcgtcatgcgccgtgaatacggctcgcttctgtcggcactgattgaccagccgcagaccccggcgctgcgcctgcagattatggccgcgtgttattccgcgatccagaagtgggagcctcgcgtcagcctgacaagcatcacctttgagcggtcggaggatgacggcgggctgtatgtcgacatcaccggcacgcgcgcggccagcggccagcccttttccctcaccattccactgagttaa

SEQ ID NO: 139979 - DNA, 528 bp, Enterobacter cloacae
gtgagtgtaccaataaaggataaattatttagtttttcagcaatcgctatcgctgttggtgcggcaggttttgtatccgcaatcgttacaatgtttgttgatacatcacaacaatactccgtgagagtcattatattccttgcatggctttttttatcaatcttagtggtattaattaaggtcattaatgacctttcaaacattgaaattacacaacccacgtcaccacgagaaaagccaataaaaatactaagaaatggggagttaatattaataaggaaaaacgatttattcatcaacaacgcaatagttggttgttattgtgttgaggatgattttgaaagtttaatttatatagctgtagtctcccatgtacaggacaatttccttcaagtaaaggttattgcagattttagagatgatagggcaaagcaaatgctaacaacaagaggtgtggattgcatggtaatcagacctactataccatatgaggcattagccctgataggagtagcttctaatgaataa

SEQ ID NO: 139980 - DNA, 423 bp, Enterobacter cloacae
atgaataataatttttttgcgaaaatagttaagatcgacgataccaatactgagtttattataaacaaaggaagtgctgacggtatcagggatcactctgagtttgtaattattgaggttggagaagaaattttcgaccctgacactggcatgagcttaggtaaattagagatcgtcaaaggtaaggttaaagtcaaacacattcaagaaaaaatgacaaccatagtttctaatgagtatagatatgagcctgatagaaaagagatcagaaaatccgtcattaacaacccaacattatcaaaacttatggcatcagcactaataagtcgcgattccgatatagagattattattccgggtggaaaaaccataaagtctattgaaggtgtaaaaattggtgatttcgtttcaaaaataaactaa

SEQ ID NO: 139981 - DNA, 453 bp, Enterobacter cloacae
atgagtgaatttaagccctttgacgacaggctcaatggtctgattgctgccctgtcaccggcagcgcgccggaagctggcaggggagatagcgaagcaactgcgcgcggcgcaacagcaaagaattaaacagcaaaaagccccggacggctcgccgtatcaggcgcgaaagtgtcagcctctcagggctaagaccggacggattaaaagggcgatgttccagaagttacgcacaagccgctacatgaaagccactggccgtgaaaacagcgcggtggtggagtttaccggcaaagtgcagcgcattgcgcgagtccatcaattggggctaaaagatcggccgagtaaagacagcgaggatgtgccatatccagagaggagacttctaggttttaatgatattgaccagaaaaacgttgaatttttgattttagagactttgacctcgaaatga

SEQ ID NO: 139982 - DNA, 603 bp, Enterobacter cloacae
atgacaacctcaacaacactcaacactgattacctggtgaactcaagcgataagatcatccctgtctctgatgtcagtggcataggtatcgttgaaaaccgtctgtactttattggccgggcaagccgcgcactgcacattgagcattttgattcggacgaggctgcgaaagccgcatttaccgtctatgccagcattttcaaaagcggtctgtctgacgaggctatttacgaaggtaatcactgcattgcccgactgagattcgtatacggcatcagcctgtttcagaacgacgagcaggctatcctgatgctgattaaccgctatggcggcaccctcgtcagtgaatcagccaaatctgacactcttgatgatgcatttcaggaactggctatcgctcttggcggtcgcgaatttgaagcaatgaacttccgttggttacatgccaattgccttctctcctcgagactcctgccgatggtagaaaagaccccaaatggcgtggttattaaagtaagcgataagtttgtttcgttcgtcgcgacccacgacgatgaacacaaagagcaactttttgcggatattcgcacagcccttatctga

SEQ ID NO: 139983 - DNA, 1524 bp, Enterobacter cloacae
atgaacgacaaaatcagtcaggacacgatcaacaaagccctgtgggccgcgtgtgatacgttccgtggcaccatcagtgctgatacctataaagactttatccttaccatgctgttccttaagtacatttcggatgtctggcaggatcattacgatgaatataaaaaacagtatggtgatgcaccagaactcattgaagccatgatggcgaatgaacgtttcgtattgccgaaaagcgccagtttctatgcgttgtatgaacgtcgtcatgaaccgggcaatggtgagcgcatcgaccaggctctgcatgcgattgaagaagctaatggcaccaaactgaaagacgccgggaaaagcgtgttccaggatatttcgtttaacaccgatcgcctaggtgaagaaaaacagaagaacaccatcctgcgccagctgctggaagactttgcgggtgaaaatcttaacttgaagccgagtcgtgtaggtacgctggatgtcattggtaatgcttacgaatatctgattaaaaactttgccgccagcggtgggcagaaagcgggggaattctataccccgccggaagtctcagacctgattgctgaactgctcgatccgcagcccggtgataccatctgcgatccggcctgtggttccggttcgttgttgatgaagtgcggacgtaaaattgtctccgggcatgacagccgtaactatgccttgttcggtcaggaagcgattggatctacatggtcgctagcgaaaatgaatatgttccttcacggcgaagataaccacaaaatcgagtggggcgataccattcgtaacccgaaactgctcgataaaaatggcgacctgatgctgtttgatatcgtgaccgctaacccaccgttcagcctggataagtggggacatgacgaggccgagaacgataagtttgggcgtttccgtcgcggtgtaccgccgaagactaaaggggattacgcctttatctcgcatatgatcgaaaccctcaaaccgggaacgggtcgtatgggcgtagtggtgccacacggtgtgctgttccgtggctccagcgaaggcaaaattcgtcagaagctgattgatgaaaatctgctggatgccgtcattggcctgcctgaaaaactgttctacggtacgggtattcccgctgcgattctgattttcaaaaagcagaaagtggatgaccaggtgctgtttattgatgccagccgcgaatttaaggcgggcaaaaatcagaaccaactcagcgcagaaaatatccagaagatcgttaacacctatcgtgaaggcgataacgtcgataaatacgcctatcttgccagcctgaaggaaattcaggacaacgactataacctcaatatccctcgctatgtcgataccttcgaagaagaagacgagatcgacctgctggcagtacgtgctgagcgtgagcaactgaaagcggaactggcgaagctggaaacagagatggcaggttatctgaaggagttgggttatggtgcctaa

SEQ ID NO: 139984 - DNA, 810 bp, Enterobacter cloacae
atgacgatgtgtcgggtactgaatgtcgcccgggccgggttctatgcgtggctgcacaacccggtctcggtgcgtgataaagataaccagcgtctgctgatgcttatccgcgactcatattcactgagcggaggcgtatacggttaccggcgggttcatggcgatctgaacgaaatcggtgaaacctgcggcaaaaaccgggtgggtcgtattatgcagctgaaccagatcaaagccgtacgaggctataaagcaccgcgtcgtatcgctggccggccttcagttgttgcccctaatcgcgtgcagcggcagtttaccgttgtccgggccaatcaggtctgggtcacagacatcacttacatccgcacctggcagggctggttgtatctggcggtagttatcgatctcttcgcccgtaacgtggtcggctggtcgatgaagcccacgctctcacgcgaactggcgctggacgcgctgataatggcggtctggcgtcgaaaaccggacggcgaggtcatcgtgcatagcgatcaaggtagccagtatggcagtgacgactggcagcgcttctgccgggccaataacctggccccgagcatgagccggcgtggcaactgctgggataatgcggtggccgaatcgttcttcagttcactgaaaaaagaacggatcagaaaacgtatctataaaacccgggatctggcccgggcggatatcttcgattacattgaagtgttctacaaccgggcccggcgtcacagtcatctcggtggcgtcagtccggaggccttcgagcaggcctcgtcgtga

SEQ ID NO: 139985 - DNA, 630 bp, Enterobacter cloacae
atgttacaccaaaaaataacagaaattatactttatgaacctcggccattgtttcgcaatgcggccaaaaacagcatcgagaccgccaacagttccctgttagtgattgaaccagacacgcttatagaggaggtcaccccctttaatgatcaaacgtctttattcgctgcaggccttagtggtgccggtgaagaaatctattctctgttacggctaattaaacatctaataactcagggaaaagacattatcgtctgggtcgcaaaacgcgatgtccttcttatcagactgatgtacgagcttggtgtacagacgctactctgcgaaaattatttggaagaagaactcgctcagtgcatgttatccaaaaatttcagatcaggatatttgcctttacgcaccgtgctaataaataacatgaataaaaaaaataggctcacacactctgaactgaatattctgatcgactgtgcgcgaggtctgagtgcctatgagatcgccagtctgcgccatatgggatataaaacggtctttacccataaacaaaacatccggttgcgtctgggactgcaaaagtcagccagttggctggatctgcttaaccgtttggatcagatttactcagtctga

SEQ ID NO: 139986 - DNA, 612 bp, Enterobacter cloacae
atgtttacttttactgtttgttcccgtgtggttcatccgactctactgaacgggtttgtatccagcctgaaggcttttcgcgaacaaaaccccgaatggaattatgaacttacacggcatgataacgcacgtctgactttgcttgatttcactgcatatgacacgcttacagatgtctccgccgcggagtatgaagatctctgccggcaaggtgaaggaactgctctggttatgctcactgcgtgtcaggagaagctggcgcatcagctcatgaggtcataccggtgttcgctgctttgtgtggatgaacggctgctggaattacgtgagctgataaaatacagtatgaaaaaacaacgttatatcagtgctcacttcctgcgactgcgggagcaggacaataatataaccgacggtatgatttttaccgatgcagaaaaaaaagtacttattggcctgaaaagcggtaaaaccgggattgaattatcacgcgaaatgtttcgaagtcagaaaacgatcagtacccataagcgaaagattatgtcaaagctgggggttaagaatgatctgcaactgcgcaaagcgatacaaaagctccagccgccgcagtga

SEQ ID NO: 139987 - DNA, 609 bp, Enterobacter cloacae
atgaaacctgaaacacatttcaatgccctgatccaggcagcctctgacaccaggcggatccagagtgctaaaccacgccagctcatttctctggagaacaaaaccgagccagtaacgtttatcctgcatgagggagtggttgcgatataccgaagcagcgatcggcttctaatcaaatatatcagagccccgatgattactggcatgaacgaattaattgacaccaacgccgacatttttataaaggcctacagaaatgttagctatgagatcctgcccacaaaagagatgctcgacgtcatcagtacgcagggattatggaaagaggccgcctactgttatatgtatgccgtccggcaactgctggtcgcccactattcatccgtcgggctctccacctatgagttgatacgactgaatttgattgccttgatgaatgaagatgaagcgctgagtgctcatgtcaacgtcagtgattacattctcgaaaaaacccgactttcacgcagtcgtgttatgaaaatactgggcgatttgcgtatcggtggttatatagagattaatcgaggtattcttataaaaatcaataagttgccagaaaaatactaa

SEQ ID NO: 139988 - DNA, 486 bp, Enterobacter cloacae
ttgaaagccacattacgcacattaactggctgcgatgcaattgcccttatttataaatcctgtgacactgtcaatattggcggcatccgttttttatatgaaacggttaaaaaagaagtttcattaagcgtgcacaacccggacgataaagagtcgatgcacaggctatgcgtcaaggcgatcccgtctgcgcctcgggaaaatactacccaacagattgccgtctccactaatgtcaaacttatcattcgttctgatgcgcttaaagatgccgactcagaaaaacagagcgataagctcaactggcatgttacaggcgagcggcttgaacgaccttctaatgaggcctacagcgacggaaaaacgggggctatcgatgctgacaagtcgacgtttcaaatccatacacgcgctttgagtatgggcgttggcgccacacgcggtaagatcagtcctgttattgccatgtcatttgcatacaactga

SEQ ID NO: 139989 - DNA, 3075 bp, Enterobacter cloacae
atgagtgacaacaacctgcgcctgcaggtgattcttaatgcggttgacaagctcacccgcccattccgatccgcgcaggccagctcaaaagagctggctactgcgcttcaaactacccggaacagtttgaaagaactgaataaacaggccggacgtattgatgaattccgtaaaacccggtcacagcttgcaatcactgcaacaaatctcagtgctgcacgcgaagaagccgcaaaacttgccacgcagtttgctgcaacaaatcgcccaactgctgctcaggctaaattatttagccaggcaaaaaaccgtgtgcaggaactgcagcagacctacaacggcctgctgggttcggtacaacggcagcggcaagctctgaaagaatccggcattgatactaaacagctcagtagcgcccagcgggaactgcgtaaaaatgccgacgaaacccggcaggcgctggaacgtcagcagaaatccctgaaacgcctgggcgaacagcaagcgaaaatgaatgccgcacgtgagcaatattcacgccgtcttgaggtaagggatcgcattgccggggcaggggcaaccaccacggcagcgggtctggcaatgggcgcgccggtcatggcagcggtgaaaagctactccagcatggaagatgccatgaaaggcgtggcaaagcaggtaaacggactgcgggacgataacggcaaccgcacgaaacagttttatgacatgcaggatgccatcaaggccgccagcgaacagctgccgatggagaacggcgctatagactatgccgcactggttgaaggtggtgcgcgtatgggcgtaatcaaccaggacgatccatacgaagaccagaagcgtgacctgctggcttttgcatccacggcggcaaaagccgcaacggcatttgagctacccgctgacgagctggcggaagggctgggtaaaattgcgcagctgtataaagtaccaacccgcaatattgaacagctgggcgatgcgctgaactacctggacgataacgctatgtcgaagggcgcggatattatcgacgtgctgcagcgcatggggggcgtggctgaccgcctggactatagaaaagcggcggcccttggttccacgttcctgtctcttggcgctgcgccggaaattgccgccagcgcctcgaatgccatggtacgcgagctgtcaattgcgaccatgcaaagcaagcggttctttgagggtatggatctgcttaaactcaatcccgctgagattgagaagcagatgaccaccgacgcaatgggcactatccagcgcgttctggagaaggtcaacaaactacccaaggataaacgcctgtctgccatgacgatggttttcggcaaagaatttggtgacgatggggcaaagctggctaacaacctgccggagttgcagcgccagctgaaactcacatcaggcaatgaagcgaacggctccatgcagaaagaatctgatatcaacaaagactctttatctgcgcagtggttgctggtcaaaacaggggcgcagaacgctttcagtagtctgggcgaaacgctgcgccagccactgatggacattatggattccgtaaaacgcgtcaccggcgcattacgtcgctgggtggaggccaacccgcagctggcaggcacgctgatgaaagttgctgcagcgactgccgcgatcaccgttgcgctcggcacactggcagtggcggtagctgctgtgctggggccgctggcggtgatccgctttggcatgtctgtgctgggtgtaaaaactttaccttctgttactgccgcagtgacccgcaccggcagtgcgttgtcatggctggcaggtgctccactttccctgttgcgtcgtggtatggcctcatccggcggcagcgccaggctgctgagcgctccccttaattccctgcgccgttctgccggactggctggaaacgcactgaaagcggtagcaggtgcgccgcttgccatgctacgcgccggaatgtccggtattcgtaatgtaattggtatggtgatgaatccgctggcaacgctgcggggcgggttgtctgctgccggtggcgtgctgcgttttctggtatccggtccactggcattacttcgtttcgcgttatatgggatttccggcctgctgggtgcgttgctcagcccaattgggctggttgtggctgcgctggctggtgtggcattggttgtctggaaatactggcagcctatcagcgcatttttaggtggtgtggtggagggttttaaagccgctgctgcaccgatcagtgctgcctttgagccattgcggcctgtttttcagtggattggcgacaaggtgcaggctttgtgggggtggtttactgatttgcttacgccagttaaatccacttccgaagaactgaacagcgcagctgcaatgggccgcaggtttggtgaggcactggcggaaggtctgaatatggtgatgcacccgcttgagtctctcaagtcaggcgtgtcgtggttgctggaaaaactcggcatcgtcagtaaggaagcggcaaaggcgaaactacctgaacaggttacacgacagcagcctgctacggtgaacagtgacggtaaggtggtgttgccgccaggcggattcccgccaatgggatttgctggcatgtacgacacgggcggtattatcccgcgagggcagtttggcatcgttggggagaacggacccgaaattgtgaacggtccggcaaatgtgaccagcagacggcgcactgctgcgctggcgtccgtagttgcaggcgtcatgggcgtagcggcagcgcctgcagaggctgctcctctgcatccgtacagcctaccggcaatggcatacaaacaaagtcaacctgcgaaatctgccagtgtaccgccagtgatccgttatgagattaacgcgcccattcatatcactgcccagcctgggcagagtgcgcaggatattgcccgcgaagtcgcgcggcagcttgacgagcgcgaacgcaaagccagggctaaagcgcggagtaatttcagtgatcaagggggatatgaatcatga

SEQ ID NO: 139990 - DNA, 219 bp, Enterobacter cloacae
atgatgaattgcccaaagtgtggacatgcggcgcacaccaggagcagctttcaggttactgatagcacgaaggaacgttactgccagtgccagaacattaattgcggcagcacatttgtcacccatgaaacggttgtgaggttcattgttacgccgacaataattaacaatgccccgccacaccctacgcctggtggtcaagggcacatgaatttttaa

SEQ ID NO: 139991 - DNA, 483 bp, Enterobacter cloacae
atggaagaaatgcattttgtttacatcaatgctaatgcacgcattggtgcacactcgataagtaatgttagccacagcgatagccacattcaggggatatgccaatcagctcattcgattcggacgtttcgtaaggatagaatccttcaggaattcgcttcagcagatgaagctcaacagtcctgccaatctttcctccctgagaactatctccatttaaccaaagtaattaagcctaaaaccctcacttttgatgtctgctttacaggtttcaaaaaggcagataaagagcgtttgattgaagttgccgaggcgaacagcctaaccgtaagaagttcagttactcagaatctgcagatgctctgttgtggatacaatgctggcccttccaaagtaaatgctgcacgtatgaagggaacgatcgtcattgatgaggaaagttttgtgcattttatagaaacgggtgaaattcccgacgcataa

SEQ ID NO: 139992 - DNA, 258 bp, Enterobacter cloacae
ttgctaggctattttgttaatggcaagtatacatttaataaaaacccttcctcagagacttttattaaattttgtatttactggatctttatgacagcactgagtagtttttttctttggtcttcgaaagaaatatacagtgtagagggaaatgttagtgtcacatttataagtaaggttctggtagaattacttttgttttttatcagcttttttcttgcaaaaaaaatggtttttactaatgaaaacaatacgtga

SEQ ID NO: 139993 - DNA, 975 bp, Enterobacter cloacae
atgaaaacaatacgtgaagatattaaagtagctgttgtcattccttgctacaaagttaagaaacatattttggatgtgataaataacatcgggagtgaggtttctattatttatgttgttgatgacaagtgtccagaactgtctggagaatatgtccagcagacttgcatagatcctcgagttaaagtgatatttaatgatgagaatcaaggagttggtggggcagtaataagcggttacttagctagcttaaaagataatatggatattattgtcaagatagatggtgatgggcaaatggatccatcactgattggtgattttataaatcctatctcaaaagagtttgctgattatacaaagggcaatcgattttatgatgtggaaagtttaaagcctatgccgaagatcagactctttggtaacaccgtactttcttttatgactaagttttcatctggctattataatatatttgacccaacaaatggttatacggcaatttcatccgtcgccttaaaaaaattaaatcttgaaaaattaagtaaacgatactttttcgaatcagacatgttgtttagattgaatctaattaatgcaaaagttgtggatgtcccaatggatgctatttatgaagatgagcagtctaatctccatattaataaaataatacttccttttttgaaaggacatttaaaaaatgcaaccaaaaggattatttataattattttttgagggatttttcagttgcctcaattgaattattttgtggtcttttattatctacgtttggtgtgttatatggattgattggctggtataaatctctgttttttaacgaattagccagtggtggtactgtgatgctgtctgcgttacctattattttaggtatgcagcttttattaggttttatccaagccgatattgagcgtcagcctaaaaactcaataactgaattgtttaataagtaa

SEQ ID NO: 139994 - DNA, 1389 bp, Enterobacter cloacae
atgaacattagtataaaactagccaccgacaaatatgcaaagttggataatatactttcgtacattttcgccgttgttatagcctacgctgtgtattatgttctatgtcctggctttatttcgtatgatacccttgaacaatacaaacaagctgcgggaataataccagtatacactgctcatccggtaataatgtcatatttctggatgttactaattaagttgacagataggccagagttgctgttcctcgtgtttcagttattatactggggctcagtagcaatgcttgcaaatgtattgacagaaaaaatatccaaaagattccttatcatgttttttgtcggtttttggcccccattatttttaatttcattaaatgtctggaaagacgtggtaatgatgtgttcgttatcaatatctggaatatctatatatgcttattctcgtacgcttaaacgattctggataatcatatgcttattttgtttattgatagctacagcagtcagggtgaatggatttattccatcgatgtttatttctgtggggctttttttaatatattttataaatagtaaaaatactttagttaaaagcttttttaaatcaattatatgcacaatcatatttttattgacatccttgctatttgtttctgcgattaatagtagtgcagtaaaaactcctagcttaggtgctttggttggttgggattttgcctgcatttctatcgatgagaataaaattgttatcccagattatatgataaaagggaaaaacaaagatactcttattcaagaaatgaaaaatgctaacagtagagaggctaatttccctgtattttcagttatttccactcatattgatgctgaagaccaaagcaaacttaaatatgactggataaggatcattatagagaatcctgaagcatattttaaacatagatggcatgttttttctgtgttatctggtaagtctgtaagtggtcatacctattatccattccacccagggatacaaagcaatgatcagggtttttactttaagcatatcaatgaagatacagctaataagttgattggatttttcacgttagttgcagatacaatgccatttaaggtgtatatttactatattatttcaatattaattatgattagatgtgtttataatatcgtgaaagccaaagggaatagttatattaatattgctatttttacaatctgcataagcggggttatgagcaatctctcattgttattcttggccacagcggctgacttcagatattcaatatggcaaatattatctgtggttattgctacgttgatgatgctatcttcatcggtacaacaaaaaaaatctgaacatcaaagaaaagtatag

SEQ ID NO: 139995 - DNA, 498 bp, Enterobacter cloacae
atgacttccttaacaagaaaaaagagcaatttatttataaggttatttttggttgcatcctcatttatattcatgggatgtggtgaacagcactcagaaaaattcaattctctaccggaaaattataaatctattgattgcgcaggagggatagaaacaattaatgccaagagaatttcatcatccacatcaatagaagacaatgaaaatttagtcataaatggctgggcagttttaaacacccatgagggaattacatttgataaagtacaaatagccattacgatttcacaagataacattgccagatatagtacatttaaaaccaaaagagatgatgtatctgcttatttcaagcaaggacttgatgactcgggctttacaacattcatccccacatcctcagttaagggaatagttgtccttgatgtgataggaattaagggacaacaatattatttatgcaaaaaccttcaacaaagaaccaacatacattaa

SEQ ID NO: 139996 - DNA, 1557 bp, Enterobacter cloacae
gtgtataagagtcagactccgttccatgaaaccatcgccgaaaaacttcacaccattatggacagcggcctggacagcataacagatgacataaaaggtcaaccgggtgaaatggccaaagaagcgggtgtggatttcataaaaggcgagaactggtacgagattttaaaaaatcagggtaagaagctcctgaagcctgcggaatggaaaaatctggccttcgatacggcaaaaaatgcggctaaaaaagtcagtatcgaagccactccctggctgcgcgataaccccacggtagccgatatgctggtgactggtgttgatacccgtataacctccacaaaaataacgtttgaagagggatacaaggaggccgttaaaaaaagcccggttcccatcaaactgatctctgtctctctctttggcttcgaccttggtgccacccttgcccgtaagttccttgatgcactgctggaagatctctgccagaaacagggagacaaatacgcttatgagggaataccagttaatattgtttttaccggcctctttgactgttcacggcgtacgtcggccagtaacaacaacggcgtggattattttatctctgcgtttggtgggccggtaaaaggcatcagcgtgttgctgggggataaatccattgaccaagacacccccctgcctgaggtggtaaagaagagtctgcatctggtcgcagcccaggaaacccgcgtctggcgctgcctgtaccgcaccggcgataacccggcgcataaggaagaactctatccgggatgcgctgaagatatcggcggcggtctgaaaccggacgaacagaaacccagtgcggagctttgtcgcgtcgcgctgcacaggatgtaccgtgaggcgacgatggcgggcgtgcctttcccggattttcaaagtctgaaatcttattctgaaaccgtagccagctatttcactattcaggacaacgtcaaaaaccgttccgtcctgcaatgggcgaaggcgtaccagaatgcattgccctcttcttcattaagcacttctagccagaatcaccacctcgacagctatatcgactggctagggcgacagtactatcagtaccgcattgaatgtatgagatacgaaaaacagcgcggcgatacgttggcctctgctggcgcatctgcggggtttgcaggcattacgcaggaggcgaaagagaccgccgggcagtacgcaaatgagctgtccgtattacagaaaaactggggctggcttgatgacgtgaaggatgcagcgataagaatgcgaaacagtatggaacagaaccccatggacagacgcagggaaatcgttccgaacgtttatggaccggcgctgtggcgtgcgaagcgttttctcgactacttccacgcggcaaatctcggtaaaccccagccgttcccgatcgacactgccccacccgagatgtacgcatggtttgtacacgacctgcaaacggtggacaaaggcgcaggtatttcgcaggacttttttgttatccgctcaatggaaatgcctgaagcctga

SEQ ID NO: 139997 - DNA, 981 bp, Enterobacter cloacae
atgacgcaaaacaacaatagccaggtcagccgaagcaatgaccatgagcaaattgatttacttgatttagtgctgcagctgtggcgtgggaagtgggtgatagcagcctttgttgttgtttgtatcgctctggcaattggatatttatcggtcgcaaaggaaaaatggacctcaagcgcgattattgcacaacctgatgcggctcagattgccagttactccaatgctttaaacatcctttatggtactgaagcgccttcaatgctcgacaaccaaacgcgcgctattggtcgttttaacgcctcattctcagccttgtcgcaggctcttgaaaatcaggctgtgcccgaaaaacttactattgagcccaaggttaaagagcagccgctcccgctaattgtgtcgtataccagtacatctgcagaagctgcgcaaaagcaattggcacagttcatccagcaggtagatgagcaaacggcgaaagaactggccgctgaccttaatgccaacatcaaagcgcagataaacaccctgaatgattccctgcaaaaccaggagaaagtcgctcaggaacagaaagatctgcgtatcaaacagattgctgaggcactcaagaacgctgaagcagcgaaaattacttcgccgcaacttcagcaaacccaggacgtgactcaggaaacaatgttcctgttgggcagcgaggggctaaaatcgatgattgacaatgaagcttctcgtccattggtcttccccagagcctattaccagactaagcgaaatctgctggacatccagaatctgaatgtaaagccggaaacgatccacgtttaccgttatgttatgaagccggaactccctgtacgtcgtgacagcccgaaaaatgcgatcgttctaattctggccgtgctgctgggtggaatgattggttctggtgtagttcttggccgcaacgcattgcgcaactacaaaccaaaagtctga

SEQ ID NO: 139998 - DNA, 672 bp, Enterobacter cloacae
atgaaaatcagtaaagtattctcttcattatcatataataacgaatcagttaatgttagggtgttattacgtgttttatttatgacaatcagaggaggctttctttcgacattttccttgaataggatcgcttttcctgtatttgtatcaagaaatgttaaaattgttggtccttacaaaaacattaacactggtaaatttgttaaaattgagtccgatgtcataatccaaacggaagcaattaaagggataaaaattgggaggtcttgtactattggttctggtacaagtattagaccatccagttattatggtggagaaagaggagaaggattggttttaggagagcgtaccgctattggtgttaattcttatattgggtgttctggctatattgagattggcgatgatgttattattggacctcatttcactattatatctgagaaccacaattattccgatcgggaaagaaaaataaaagaacaaggtgtgaagcgcgctaatatcaagattgataatgatgtttggattggctgtaatgtcactattcttgctggggttaacattggtggtggaagtgttattgctgcaggttcagtcgttacaaagtcgtttccaccaaactctcttattggtggtgttcctgcgaagttaataaaaacaatctga

SEQ ID NO: 139999 - DNA, 1044 bp, Enterobacter cloacae
atgagaaaaattcatataattggtaccgtaggggttcctgcttgttatggtgggtttgaaactttagtcgataatctattagatgatactcgctttgatattactgtatattgtagttcgcatacatacaaaaacagtaaaattacaaattataaaaatgcaaagctagtatatgttccattgaatgcaaatggtatacagagtgttgcctatgatatgtattcaatgatgtatgctatcctaaaaaaagctgatgtgattctggttttaggtgtttccggatgtctctttttacctgttatccgaagaatcagcaatgctaaaattattacaaatattgatggcttagagtggcgaagagacaaatggaactccttggcgaagtcatttttaaaaaaatcagaagagttagctgttaaatattctgatattgtaatttcagataataaagctattgctgattacgtcaaaagcgaatatggttgtgagagtaacgttattgcttatggtggtgatcatgcagttaatagtgcccttacttcgatagataaggattatgcatttactgtatgcagaattgaacccgaaaataatatagcaatgatactaaaagcttttagtatggttcgtaaaaaattaataatagttgggaactggaataatagcagatatggtatggatttgcgtgaggaatataaaggttatggcaatatacatatgctagatcctatatatgataccgccaagttagcagaattacgtgcgttttgttcatgttatatacacgggcattctgccggtggcactaatccctcattggttgaaatgatgcattttggtaagtctataatatgttttgattgtagttataatagagagacaacagaacatagagcgctttacttcgaaagtgaagtagcattatctgaaataataaattccggggagtattttggcgataataagcacatgcttgatattgctagagacaaatacacttggggaaaaatacgcgagcaatattatgaattatttttaatataa

SEQ ID NO: 140000 - DNA, 1119 bp, Enterobacter cloacae
atgaaaagaattgctatttttcatcctgtagatgacagctacggagccagcaagattttagcttatgttataggttttttatccgaaaaatatatttgtgatgtctatattccaaaaaacaataatgtcatagcaggaatgttagtaagttataaaaatataaacttctatgaattaccgtctctgcctgtaatacatcgtggtatgtataatttcaaaggtgtattaaaatggctaatgatgaatatcaagttgtttttacttatgagaaaaacgagagggaaatatgatctaatatatataaatacattagctttgttcagtattgttattatagccaaatcgttgaatataaaaagtcttgtccactgtcatgagtatttaaatggcagtttatacggtcggctgattaagaggaccgttcaatactgcgcaactgtgatcgtaagcgtatctaaccatgttgcctcatatatttcggattttaaatcgaatagccacgtcattcataatggtatacctgatctgggtcttcaaaaaatagcacttcttgataacggttttgttaattttgcaatggttggtagagtcatgcctgaaaaagggcaatggtttttactagaagctttgaaagcaatgcctaaagaaagtttggcaaaaataaaagtccatgtgtatggtgatgctccgccgacaagaaagaaattaatgtcgaaattcatagaggatataaatctggcacgtttaaatgacactgtcattgtatatggttttgatcctgaagcatctgagaaaattcagcgattggactgctgtcttgttccatccttaatgcctgatcctttcccgacaacagttttagaggcaatgagagcttcaaaaattgttattgcaacaaaccatggtggtgccaaagaagtaattgatagtggggtcaatggattttctattaatccgaatgatgtaaaacagttatcttcagttttaagtgatgttgcttgtatgacagttactgaaagagaattgatgggtatgaatgccagaaaaacctactctaatgaatttacgcttgaacagttcaaaaagcgctttcttactacattaagtttgtacttgtaa

SEQ ID NO: 140001 - DNA, 456 bp, Enterobacter cloacae
atggctactatcccaacccttacttttttagatcatcacgacgaatttatctatcagctaatctctcatccgcttccctctaacgcagatctttttgatgttgcagatttcagcgccgcgtttgcgagcgtgcttgtcgaaacggacgattcagcaaaacgcaatgccttatgcggacgcttactaaatgcgcttatgcatatggaaaggctttgcgaaaatgatctgccagtacatttacttgacaagcttactgcggaagaattacccgcttccactatgcctgattgctggcgggaaacggatattccggtttactatgcaatagctcttacacaggctctgctaggtaacaacctgcctgacccagtagaaaaagcactgacagggcttttgcatgacttggtttacctgttggctgaatatgtgaaagaaccatatcttcctcagcattaa

SEQ ID NO: 140002 - DNA, 747 bp, Enterobacter cloacae
atgaagatcgacaatccagcagaaagactcattaatttcatgaataaatcgctgaaaatcattaatccacacacaagaagtacagtatcagctctacgagagatttttgagctttcccaaaacgaaggccatgatgtgcttttgatgagaacaggagagctatttcagttaccaggaaaaatagaagccatcgttaaagaacactttgagcatgaagaactttattccaacacatggaaggaatccatacttaatagttttcgtagtatgaatttatcaggagcatttaatagtttaactagtacgattgatcaatcggctttacgagagatcaaattaatgtcaatgatgtttaaaactaagggcacacttgatattatcgatgaaaataaattggtcaattggaaacaagatttatttaaactgaaatctgaagtcattgagagcgatgaatattcattagaactaaaaaaacaactcatacgttatataaataaattaatcattgccatagaaagctatcagatcaatgggaatgaagccttgatggatgcgatggaagccgcaaccgggcatatgctcctcgaccctgaatatcgtgaaactgtaatgaatgaacagagtgggccagctcaacaatttcgagatattctttcttcaatagccgatgctacatctatcacaacagaagcaattattcctctacttagcgctggcgtgcattttttccttaattattcatcttaa

SEQ ID NO: 140003 - DNA, 573 bp, Enterobacter cloacae
atgaaccctctcaatattgaccatcacttgctaatccaagtcgatgctatatgcattaatcaaatcacaatgcggaacattgattgtacgtactttacgtattttccgcttatggtgaaattcgcaccttggaatatagattttcatagagttttctgtttggttttctttatcaggtcctgtagatggttttggcgctggtctttgcttgctgattgttcttgcctatcgcctgtggtggaaacgtcgatctgttgctacggtgttgaacctataacaaaagcaggtgccagttttttgatggtcagggggatagggcgatttgaggtgatgctggcggtagttgttgtgctggaatcgacgacgccagtatcgggtttgtatggggctgctggcctttatcgcctttactggctgcgcaggttctggacatctgagaccgagggctgcgcggtcagtctggagttggttatggtgcagcgatcactaccgcaacgcggcggttttcagcgcgcccttgcggagtactgttgctcgcaaccgggtatttttgacctaacccccgcgtggtga

SEQ ID NO: 140004 - DNA, 444 bp, Enterobacter cloacae
ttgctgttcggcgccagcgggctgggaaaaagccatctggcggcagcgatcgtggatggtgttgtagcccagggctaccgggcccggttttacagcgccggagaactgctgcaggagctgcgcaaagccagagcgcagctgaaactgaatgagctgttactgaaactggatcgctaccgggtgatagtggtggatgaccttggttatgtcaaacgcgacaacgctgaaacgggcgtgctgttcgagttaatcgcgcatcggtacgaacgcgggagcctggtgatcaccagtaaccatccgttcagcacgtggggcagcatcttcgtggatgagacgatggcggtggccgctgcagaccggttgatccatcacggatatatgttcgaactgaagggagaaagttacaggaaaaagatggcaaaggcagtaaccagcgcggcttaa

SEQ ID NO: 140005 - DNA, 129 bp, Enterobacter cloacae
atggcaaaacatgcccttagcttgttgcttaaaataatgctgttttatgtggttatgctgatcgtcgctaaggccattccttccgacggcttcgtcagttcaatctcggtgattgagcactttggttag

SEQ ID NO: 140006 - DNA, 375 bp, Enterobacter cloacae
atgaagccgaccgcaggcccggttccggcgggtaaatactggattgttaatcgtcctgaaggtggactccgatcgcacgttaatgccggtgttcgggatcgttacaaccaggtcatgaatggtgcgacgttcaggcacaggcgggatgattggggaatcgacgatgacacatggaatgagggggttaaacgcggtaacttccgtttgcatcctggcgcgatatcaaaagggggtatcactctgctacatgcttcagattttgccatgttgcacaatgcgttactaaaaacaccgcaggtggatgttccttgtatgagtaaactcaaggcatacggcacaattgaggtgatcgccaatggcaaaacatgcccttag

SEQ ID NO: 140007 - DNA, 1074 bp, Enterobacter cloacae; identical to SEQ ID NO: 101378

SEQ ID NO: 140008 - DNA, 330 bp, Enterobacter cloacae
atgaatggcatctcttctgacgacatccttctgctgaaacagcgccttgccgaacaggaagcgctgaaccgtgccctgctggaaaagctggcagaccgggagcgcgaaatagaccatctgcaggcgcagctggataaacttcgccggatgaacttcggcagccgttccgaaaaagtctcccgccgtatcgcacaaatggaagccgatctgaaccggcttcagaaagagagcgatacgctgaccggtcgggtggatgacccggcagtacagcgcactctgcgtcagacccgcacccgcaaaccgttccccgaatcactcccccgcgattaa

SEQ ID NO: 140009 - DNA, 579 bp, Enterobacter cloacae
atgagcgagaaaagcattgttcaggaagcgcgtgacatacagttggccatggagctgattacactgggtgctcgtttacaaatgctggaaagcgagactcagctgagccgtggtcgtctcatcaaactgtacaaagagttacgtggtagtcccccgccgaaaggcatgctgccgttttctaccgactggtttatgacgtgggagcagaatattcatgcttccatgttctgtaatgcctggcagtatcttctcaaaaccggtttgtgtagcggcgttgacgccgtgatcaaagcgtacaaactttaccttgaacaatgcccacagcaggaagaaggccctctgctggcgctgacccgcgcatggacgctggtgcgttttgttgagagcggaatgcttgaactgtcgcgctgcaactgctgcgacggcaattttattacccatgctcatcaacctgcaggcagcttcgcctgtagtttatgtcagcctccatcccgcgcagtaaaaagacgtaaactttcccgggatgctgccgatattattccacaactgctggatgaacagatcgaacaagctgtttaa

SEQ ID NO: 140010 - DNA, 837 bp, Enterobacter cloacae
atgactaatgagaaaattaattcagaatccctcgacaaacttgtggctgagtttgattcaagtgataatgctagctatagatattcgagtgagaaatccaccaagcagattatcaaagatatacgagatgctgttttttttattaaaagagaaagtgaagataaaaaatacaatgaacaatggaactcttccgttgcgcttaacatattagctattatagcaatattaatatttatcttttctacatccaatagctctgattccgaatttattgaaacactaaaattacccgcatacattatatcaattatgttatcaacaatatggatcggaattaatattgaaagaaccttaatattcaaggagctttggagattcaaaacggcaaaaatcatactatccctgtctttcaccgggttgattgtatattgcaccgccgaggcatccgcaataataaatgatgtttttaatattgacccatcattcttcccgtttacaagaggttttctagttgcttatcttttcttcaaaaaaatttctattctggtttatctactggctattgtaggtgttttttgtataataaatattatttcttactttaagtcgaaatgggacggaaatagtaatattgaatttccctttggggcactcatttatatattctttacatgtgtttttagttactttgctttggggtgggttgatagtaatttcaatgatgctgtacttaataaaaaagtatattcattagccggtaatgactccaacttactgatagtgttttatgttcagataatgcccgatgactttgtcatgcagctccaccgattttga

SEQ ID NO: 140011 - DNA, 1389 bp, Enterobacter cloacae
atgcaaaacgtctggtaccacctgagacgcccaacgctggtacggcgaattattatcgcccagttgctgctgcttaccctgctgtggtgtctatttttaaccttcattctgtgggaggacctgcgcagtcctcccatccttacgggcagtcatacctacgacaccctttttaccctggtcgagcggatggacgaacacccgcaggatcgcaccgcggtgctggaagccttcagcaaggcgctgcgtgagggctatggcggcggcgaagatcccgcgctgtcaatcaacttcatcgtgcgcaaaaataacgcgattattttttcatcgcctgatgcaccaacgggggtaaccaacacccggtttggggaaatgcagcgtgttcagagcgatggtcgtacctggaccagccgaacccttaaatccgctcattccgacgtggaggttacccttttcaccccggccggcggctggaacttctttatctacctgaactcgcgcggctactacatcatgccgctgctggtctgcttcccttttcttctgtttcccgcgtggctgtcaatccgcattgcgatgcgcccctggaacaaggtggtcaatgaaattacgctacgcacgcctgacgatctctcccctttaaaagccgttcccggacacagggagcttcgccagatggtggatgcgatcaatgacttccttgccagggtgcgtgaaagcgcggaaagggaacgggttttcattgcggatgccgcgcacgagctgcgtacgcccctcgcggcgatgcgcatcaacgtggaagcgctgcagtcctgggtcattagcgagagccagcaggaactgcttgcgggggtgattcgcagcaacagccgggcagcgcgtctcgtcaaccagctgctgctgatgatgcacagcgaagcacgcattgatacggaaatggagaccgtgccgctgacgacgctcatccaggagcgaatggccgagctggaaccgctggcctctgcgcgcaggattgagctggaattcttcgccgaggatgacatctggatccccggcgtcagggaacgcctggtatcgcttattgataacctcattgagaacgctgtgaagtacagtcccgagcgcgggcggattcaggtcgatatctgcgtagcagatggcttcgcgcggcttcgcgtttcagatgcagggcccggtattccggttgaactgcgcgagcgcgtgttcgaccggtttttccgcgatcccaatcaggtgcagagcgggagcgggctggggcttgccatcgtcaaagcggtggcgcagcaacacaacagcagcgtaaacctgagtacttccgctgaaggtggcctgatggtgacggttgacttcccgaaccgcacgttttgctaa

SEQ ID NO: 140012 - DNA, 915 bp, Enterobacter cloacae
atgaacacccggctgttaaaggcgtttttgatgctggctgaaaagggtaattatgccgatgcggcgcgggcgctgtttatctcgcagccggcattgaccaaacagattaatctcctcgaatccctggtgaatatgtctcttttttcacgaggtcgtcacggcgcaatgctgacggccagcggcaggcgtttgctgccagaggctgagaaggtggtcaggcagacccagcaatttatgcagcacgctgagcgggtatcgaaaggggttgaagggcatatttccgtcgggttcggactctcaagcttttatctggcaccacgctgtatcgctgactttcgtcgagactacccggaagtagaaatgtcattgacggatctgccttccttccagcagtacgagcgattgcaaaatgatgagctacaggtcggttttgtcagggttcctccccccgtggcgcttgaatacctgccgttatttaccgatcggctggttctggttgcgcccgccgcgtcgccgacactgtctgccgcagagtggctgacgaaacgccctctgttgcggctgtatgatgagcgagggcggggtttaaacgcgcagatagaccgtttcctgcatgacaacggtcttttcgtctcatcgactcagctgactgacgatatccaaactatcgtcgcgatggtggttgcgggtatcggtgtggccattctgcccaccagcgtgacgcatatcgcgccgccggagctggtgatgattccgctaacggggggggcaatcagctggacggtgggcatcgcctgggacgcaggcagggaggatctcatccgtgacaacttcattgctagcgtagctgctgcgtttccgggccagccatgctgcgccgccatgccccgggcgcctgaccatactgacgcttaa

SEQ ID NO: 140013 - DNA, 981 bp, Enterobacter cloacae
atgaacgaacagacatccttaaaggcggcaaccgtacagtttcagcatcaggccagtaacaaaaaatacaatctcctgataatggagaaatttattgaacaggcggcgcttgagcgggtgaacattctcactttccctgaaatgtgtatcaccggctactggcatgtccctaagctcaccgcagcggaggtgtctgcgctggcagagccaattgcagacagcccttccctgacgctcattcgttccctggcgataaaacatcaaatgcttattggcgccgggcttattgaacgcgccgacgatgggcgactctacaatgcgtatgttgcctgcatgccggacggctcaatgcacacgcatcgtaagctccatgcttttgaacatccggccatcagcagcggggacagctttaccgtttttgatacgccgtggggcgtgaaggtcggaatcctgatttgctgggacaataatctggtcgaaaatgtgcgcgcgacggccctgctgggtgccgatattcttctcgcgccgcatcaaacaggcggtacggattcccgcagccctcacgggatgaagcctattccgctgacactctgggaagagcgggaaacgcgtaaggaagaaattaccgctgcattcaaagggccaagcggtcgggaatggctaatgcgctggctgcctgcccgtgcgcatgacaacggattatttcttctcttcagcaacggtatcggtgccgatgatgacgaagtgcgcacgggcaatgcgatgatcatcgacccctatggaagggttgtgaatgaaacctgggcggctgaagatgcgatggtgagcgctgaactggatttaagcctgcttgctatgagtaccggacgccgctggatccacggtcgtcgtccagatttataccagatactgacgcagccgcaggggtatgaacgtgatgcgatcagcgcacgattttcgaatgtgcccccttctcgctag

SEQ ID NO: 140014 - DNA, 177 bp, Enterobacter cloacae
atggtgaacaactttactatcgctacccattttctatggttcgtgcattatgtgttctctggctgtttggtgggttgcgtcgtgatgaaattttgcggatgcgaacaggctgtatacgctggcaaaatgatgaacatcagggcggctctcggatatgtttgctggatgtccccgtga

SEQ ID NO: 140015 - DNA, 2928 bp, Enterobacter cloacae
atggatatcagccaacgaaccggaaccgccttttctgataatgcgagcctgtttgcgcgttccgctgcatcaatgcgtgaatatggatacagttcacagcaagtgctggacgtaaccgaggctatttccaccggactgaaattatccggggccagcacgtcagaagcaagttcagttatcacccagtttagtcaggcattagctcagggagtgctgcgaggcgaggaattcaactcggttaacgaaaacggtgatcgagtgatacgcgcgctggccgctgggatgggagtggcccgtaaggatctgaaggcaatggccgatcaggggctgctaacttctgataaagttgttccggcccttattagccaacttggcactatgcgcggtgaattcgaggcaatgccgcagaccgtgtctgctgcaacgacaaaaattgaaaacgcttttatggcatgggttggtggcgcgaacgaagccactggtgcgacaagtactcttgttgctgtattgaatacagtttctgacaatatcgacactgtggctacggctgccggagctttggctgcaataggtggagctcgctatcttggagggatgtttggcgatcttgggaaccaaacggcgcaattaatagatgccagaaagaacgaaattgcactcgcatctgcaagggctgaatctgctacccaatcacaacgaaaggcggctgcagatgcaattgctgccgagcgtgcttatcagctctcgctatccgagctggaacttgcaaaaaacacaaatgcagaagcgacagctacacaaaattctattgccaaaaggcgcgcaatgatagccgccaatgctactctcgttcagtcaaatagagcagtatcagcgtcgcaagaagcactcaaccgatcaacatcggtaatgaatttgttcaaatctggcgctacgggtcttttgtcgttagttggtggtttgcctggaattttaatgttgggggctggtgcgtggtacacgatgtatcaacgccaagaacaagctagggaatctgcaatccaatatgcggacacaatcgagcaggtacgagataatctgaaatcaatgtctcagacgcagatatccgccaacctcggacaggcgaatatttcactggatgctcagaatagtgcgattgaacagcagaagcagaaagttgctgaattatccaatcaactttataacgcaaaattagcagccaattctgcttcagagggaacgtggctgtataacgatgcggttgagaaagctgcagactttgcctcagaacttgctgttgaagaaggccgacttgagcaaatgctcaataaaagaaagcaaacacaacagttaataaacgacataactgatcaggctataaataaaacagtagaaatggctggcgccgtcagttctcttacagagatgtatgaccggctgaacaaggtttccaggcagtctacagcagtgtccccaccaaaatatgcaggacctgtacttcctgctcttgataataagcagcagcaagccatagacaaggcgcagcgacagcttgagttgtccggccttaagggattggacaaaacccgtagacaggcggaattcgatgcatctgaccttaatctaccggctggttggcgtgagaagtatgtcagcatggaagttgagtctgccaggcagttgcaagcaattcgtgactccagccgccataagggcgggaaatccgaggctgaaaaaacagctgatacctatgacaagctaatcaaacagcagaaagagcagatagcgctggcaggtcagaataccgaactggcaaaactgaaataccaggtgagccagggggaactggcgactcttacagaggcccagaaacaaactctgctgcaaaatgctgcacttattgatcagcgaaaaattagggaacaactggcggcgtatgaggcaaaccttgccgatgctaacgccagtgcacgcgcatcaaaccaggctgaactcactgggtacgggcagggtagtcgtatgcgtgagcgtatgcaggaaatgctgcgtatcagggaggaatttcagcagaaaaacgttgatctccagcgtcaatatcagtctggcgatatcacggaagatctgtatcgacaggaattggacctgaataaacgctatctcgatgagcgcctgcgtgatcaacagggattctatactgcatcagatgcccagaggagcaactgggccgccggcatgaaagagggctttgctaactgggcagatactgcgtcggattacgcctcacaatctgctgatctggttaacaacagcatgtctgggcttgtggggaatatttctgaagctcttgctggtaacaaggttgactgggaggactggtcgaaatcggtgctggcatcaatgcagaaaattatcctcaacgcgatgctcgtcaactctctacagtcttctatgggcggtggtggttttcttggcggcttgtttggaggttctgctggtggatcaacaccgtctggttcttataattcggcagtatccggccttcagctcaacgcaaaggggggcacttacgcttctgccagcctcagctcttacagtaacagcatagtcaggtcacccacatactttgcttttgcgaaaggcgctggattgatgggagaagcaggcccagaagctattatgccgctcacgcgatctgcagatggttcactcggcgttcgggtaacaggagctcaaacggccccgggaggcggcggagaaatccatatcacgcagcatatcaatgtttctggtaacggtgacgccgcgcttaatcgtgccatgcaggaggccgcgcgtcagggagctgccgatggcgctaaaaaagcgcgtcaggacatgctgagtgattttcagaccaacggtcaggcaaggaggatgcttggcgtttaa

SEQ ID NO: 140016 - DNA, 2709 bp, Enterobacter cloacae
atgcctgctgcaatccctatcatcgcgacggtagccgctggcgccgcggcagccaatggagcctacgctatcgcaatggcaatcaccattgccgctcaggtcgccacacagatgatgacgaagaagccatcactggggtcttaccgggacactgcagaacgtaagcaggtgctgcgtgcggctgccagtcctaaaacggttgtttatggcaggaccgtatctgcaggcactctgtttttcgctgaagaacagtctggcgagcagactgatggtgaatgggttcaccttgccattactctggcgggacacccaatttcaggcacgggtaccatttacctgggcgatgacgatattggctcgtatggcgagagcgccacgtatgaagtgcatatcgaccgacagacagcagatccgttcatgctggcaaattgcccgtcgtggaaagttgacatgatcggcaaggggatttcctggctgcgtctgtctctgaaatacaatgctgagaaattcccgtccggcatcccgaacgtgaaggttgagaagacgggccggaaagtatatgacccgcgcaccggccgcacggagtacagcaacaatctggcgctgtgtgtgctggactattaccggagttacctggaagtcgccgatgctgatattaactgggatcagtttcaggaggcggccaacatctgcgacgagctggtgacaaacggcgacggcacgacggaaaaacgctacacgctgaacggggaatttgatctcagcgaaaataaagcgagcattcttgaggcgatgctgacagctggcgcagcagagccaacctacatcgccggtaaacatggcatcctcgttggcgcgtattacggtcctgcaaccgaaatcattaccgagagtcaactggccggtgatatcgagatcatgcctgaggtgtcgcagtctgagcgcgttaacaccatcagcggtacgtttgtcgatcctaaacagacctactctgaagccgatttcccttcagtatctgtcagtgagtgggtaaccgaagacggcgtggaaatatcgcaggatattaagctgcgtttcgttacttcagaatttcaggcccagcgcctggcggacatcaagcttaagcgcacccgcatttcccgcacaatgaatctcacgctgaacctcagtggataccggtaccgacccgggatgtacgtaaaagttaattttccttcacttggtatcgttaacgttgagatgcgcgtgacagactggaaatttggcgtgcagaacggcgtgcaaattacactgaagcaggaaaccgctgacgtgtggggggatgccatcggtaagcccatcgatcgccccgattttaccaatctcccgcctggtggtgtggctcagcctcagaatctgaagtacaccgtagaggaaataggtcaggtggtgcagggggttctttcctggcagaacatcgggcagtttgtctataaccaggttgtcattcgcaggaatggccagccggtgctcacagctcaggttcccggctcattcacgcggttaactggcctgctgcaggacacctacactgcgcacgtcaccgctgttaatcagatgggggcagcttcgccagaggcatatcttgaattcagcattcaggcaccgccatcgccgactggagtcactgttgagcaggcattctttgccgtgatgcttattccccgcctcgcagccgtgacaaacgtatccactcagtttgatttctggacgtctggggagcatccgcttgccaatacagatacggcgaccgttgaggccggagccacgcgcgcgggtatgggtacgacatggaccagccacaatctgaaaaacgggcatacctattactggtacatcagaaccatcaatgcattcggtgcatctgctttcgtcgaggtagccgcgctgtgccagaccgataccggtgaactcatcgacatcattgatgattccgttcgcgattctgacgctttcaaaaatgtttctgaaggcgtggacatcaacctcgaagcagccatgcagaatgccctggcaaatcacggaacggttgaacaccagtatcagcagtacggggaggtgcgcgctgatatcctggtcgttaaaacaacggtcgcagaagtggataaaggccttgcagacctgtctacctacgtgcaggcccaggtaggggatttgaccgcagctgttaatcagaaattgacggcagaagtaaacagtgatgggacaggaaaggcgtcctatacgctcaacctcgggatagtcagaagtggggtgaagtacaacactggtttcgggatgtctattgagccatctggcggtacctataaatcaacagtggtctttgctgccgatcagtttggcatctactcgggaagcgatccgggaaattaccaggctgcattttttgtctataacggtcaggtgttcatccgtgatgcctttatccaggatggcagcattactaacgcgaagattgggaattacatccgatcaacaaactatgtcgctggtcccggcggcgcaggctggaacattgataaatcagggaactgcgagatgcacggcgcgctgtatgccgccagcggtaatttcgcgttcaccgggaacggtaatggcgtcacgattgacggaaagggagtaaaaattgatctcggcggcggtaacctgattgttcttggagagtggtaa

SEQ ID NO: 140017 - DNA, 954 bp, Enterobacter cloacae
atgccaaaaggattgcgtattacctacgccgatggcggcccggcaatggaaataactgccgggcttcgctgcccttcgttttgccagaacgtcagcgaagcatgggatgttaaccagtacacgattaatcagcgggtggatggcagccagatcgtcgttatcccgcgtaatacggtttacaaacttaaccggggtacaaacctcattcccacgatcggcatgctggatggatttaccgtatcaggtaacaccatcaccatgaatacctggtggagtgataactgggggcgcgcaaaaacctttgacgcgtctatctggcaaatcctcccggcctcatccgggagagggctgctgattcaggacagcacggatttcctctcaatcaccgatgccacaatgtcgggctactgcgtctggcgcggtaccgtcactttcaccgggagctgggccaccccaacgacaaatatttcccgcgatcgctatctggtattcgctaaatggagtgccgataacgtcaccatcgagtttgacggtttaaacattcttgcgacggtagatcattctggtctcgatcaggccgcgaccgtcaccatgcagatcgcgatttttgccagtggcgtaagcccgatcccgggaagaggcctgaatatcataaagggtggtgtctgcgtgttctccaccacgcgcaggccatttgtgtaccggaaccagacctatacaccatcatggtcaaataccgatattggcgagggcatgattttgcttggccgctacggatataacagtgaagtctacactggctgggactacatcaaatgggctggcctgatccgcagcggcaatctggtgcgtgccgggagaggaagaaatgccgcttcatggacctcgcaatacagtgtcgtagggcgaaggctgacaagcctcactattcccgtcattgatgcaatttactga

SEQ ID NO: 140018 - DNA, 1278 bp, Enterobacter cloacae
atgtcagcaggaacgattaccctgacaaacgggtccgctgttgttggcggtaccggaacttcattcacagcagagctggccgcgggtgatttcattgtttcgacagtgggcggtgtgccgtacacgctgcccgtaaaatcggtagagagtaatgcgcaacttactctggtcagcaactttaccgggccaacgcaatccggcgctgcctggtcagctgttccccgtgtggcgctgaacatggtaactgctgcgctggtggcgcaaagtactgaagcgctgcgtggactgaattacgacaaacagaactggcagcaggtttacagtgccgccggaaacatcacagtgaagctgccagacggcactaccttcaccggcccgtcatggaaatatctgtctgacaatatggcgactaagaccggcggggccgtacctgttaaccagggcggtaccggttcgacaaccacatcaggcgcccgtacaaacctcggtttaggagatagcgccaccaggaacgtcggaacagcagcgggaacggtggccgcaggcgatgattcgcgctttggtaccgtcaacggtaagaccggcgggactatttccagcggggtaacggtaagcggaaaactaaccagtcagaatggcaccgccggaccgtatattaatgcgctcaacgctccaggttacaaacaatttgtaaccaacgataccagcgcggttagcgcggttttcgggtatacaaacggatataacaatggttctggcttcgaactaactacgggccttggcgctgttggaactggtaattcttcatggcctcagactgtattgatgcaggcggcaaataacggtgattacggtgccagaatctggttattctcaatgtctacaggggacttagtctgcaacggaaccgggagccagggcggttcctattctttcacaaaatccgcaatatcggacagagcgctaaaggatgatatccaatacaacgacggcttacagtcctatgagaatgtaaaaaaattcctgccatgtacctttatctataaggatgacacggaagggcgtacccgccgtggggtgatcgctcaggacatccgggagattgatgaagagtatgtgaaggagattccaaactacttcgatgagacaagtacgctggcacttgataccaatgtgcttttgcttgatacgatgctggcgatgaattacgtcattaaacagctggaagctacccagaaagaacttgcagaccttagaaataattttgctggttcataa

SEQ ID NO: 140019 - DNA, 267 bp, Enterobacter cloacae
atgttcgttgagctggtttatgacaaacgaaatgtagaggggctcgaaggggccagagagatcatactggccgagctaacgaagcgggtgcatcagattttccctgatgccgaagtgaaggtgaagccgatgcaggcaaacggcttaaatagcgatgccagcaaaagtgatcgggaaaaactgaaccgcacgctggaggaaatgttcgaagagtccaatatgtggctggtttctgagttcccgaccgttcgccaggttggcctataa

SEQ ID NO: 140020 - DNA, 753 bp, Enterobacter cloacae
atgacaacattaaaatgggatcacgctgttcagtttgtgaaccagccggacgaggcgattgcaacgtttgccgggcaggggctcaacgcgtttgccggtgggcgtcaccctggctggggaacctggaatgcgctcagttatttcgggcttaccttcatcgagtttctcgccatttacgattatgttgagctggcttcggcgcaggccgattttttgctctcccgtgatgcggcgcaactcttgcccgaaaaccaggtgctgcaccgggtagcgttgcgcacggatgatattgaccagacgcatgcagagttgcgcagtcaagggttacaggtctcgccaattgttaacggccagcgcaacgacccgcaaggaaacgtcattagctggcgtatttttaccattgatggggattttaacggcctgccgtatccctttgttctgcaatggggagaagatgataacgcacggctaacgcggctacgcgctcaggggctcgacaagccgcatccggcaggcgaagtgacattacagagcgccatttttgaggtgcaggatccgcaggccgcgcgtgagcactggcacgcgttgttcggttttaatgaactgtctgaaggtctgtccgcacgacagcagcgctttctctttcgtcagggggaggccaatcgattagtcgaactggtttttaacgcctctgatccgtcgctgaaaggccagcgttttcgcgtcggtcgcggtgaatatcgctttcaataa

SEQ ID NO: 140021 - DNA, 327 bp, Enterobacter cloacae
atgtgctgcactgacatgcctgcgggggcgctttctgcgcaggttgaggccttccagacagtaaatccggtgtgttttcttgtggttaacaggccagccttcccgccgcagctgaatatgaatacgcgggcaaccgtagcggatccgggtttccgctatttcccggatacgcagggttatcgcccgatcatcccgccggctctaccagtggtaaacggttctgctctgcatcagcagtccgcatccccgccggacactgatacggtaagcctcccgcagaaaatgcaccgcctgacgcttctgagccggcctcagaactttttttga

SEQ ID NO: 140022 - DNA, 1263 bp, Enterobacter cloacae
atgctcagactttcacctcttcaagttcgtcaaaaagtgacaattgatgacattttttctgaaccagacgatcttggtttactcgtagtcgaaccattaaaaatatattcctctacgggtaatctgcctgtaagcagattagaagaaattaatgcattttatgtggttcatgggcgtccacctctacccgattcggaggaatttaaggaaacgttgctagcacaacgtttgagggctctcaaagataacaagcaatatcgcgagatgttgcagccatttgatattcatggcttactcgcaggcgaaaataacgaaaatccacttgaatcatctgtatcattctcagttcctcccgttgaggttgataggtcggagttggtcacctctctggacgatatctttgctgatgacgatgatggattgctctcatttgctgagcccgatattttcacgttaaaacatgttccgattgaaaagaaaacacagcctgacgaaattgccaaacgacagccgtgccctgatttttatcgattttccccactgtttgagacagtccaaaatggtctgaaagcgggggcgttttcatttgttcgcttccgccatgagttaaaaattcatgaaggtgatttttttattctcaatggggttatgggctatgtagataaagttggtgagcggttggaggaatatggaccttggaatgcacgtttacatttggtgtttgaaaacggaactgagatgaatatgcttttcctctcgcttacgcacggtctggtacgagatactgaaggtcgtaaagttgttttaaatggacaggcaattcgtcctgatgaagctccggttccgacaggatatgtctatgtccttgccacgcatagcgacaagccagcgcttcaacgttttaaacctgatttgtataaaattggctttactgaaggaactatcgaagagcgcatcaaacacgctgaaaaagataaaacattcctcgaagcacccgttcgtatagtcatgattacgcaatgcttcaatatcaacactcacaaatttgaaacgcttattcacggttttttaggtaagcaacggctcaatatcacattactgggtttagatggacaaacttatcatccccgcgaatggtttcatgcgcctttagcgactgtgctctctgtgatcaagtacattcttgacggtacaatttcgcaataccggatggacaatacaacagggaagattgtggctaagagagatactggtcactcttga

SEQ ID NO: 140023 - DNA, 693 bp, Enterobacter cloacae
atgtctcaggggccacttgaggatatggctttggctgcaggctacagtatgcagcatatttttgcagttgcgccacatctaatggagcaattggtcagacacagcccgctgacgtacgacgattttgtcgcacaaattgataaagatttaaataacgtcatcaccattactgaatccggcaggcagcaccacatggataaaggggaggatgccctcaccgatcacattctttctcagctcaagcaactatacccgtcagcacatcatgatgcgcaaagcggcggtcactgcgactattactttgaggtcagaagtgcccacggtgagctctatcagtgggtcgcggaagccaagttgtggaacgggttcgaatatgtctatcagggacttaattctcagttaattggaagctatgccaaaggtggcgtgaacaattgcagaggggggttaattttctattcgaagctctcaaatggtgccaaattcgccatggacgaatggcatacaaagcttggcgacaaagggattcattgccataacagacgttctgacggcttgcgctttgacaccgatcataagctcaatggtggaactggcgcagactttttcgtcaggcattattgcgttgatctttatcatgcaccgactcaacagaagctggacaaagcggcggcaaaaatgcaggcccgatga

SEQ ID NO: 140024 - DNA, 447 bp, Enterobacter cloacae
atgaataatgttgcccaggtcaagaaattgttgagcgaactggcgaagtcggatacgtcgtcactgtatgcggtctgtcaccagattgcagtttatatcgaacgtcatcccaaacagatcaatcttacaattggcgggcttagggctgctctgcagcgcactgcagatggtgatgatttgctcatccgcgctgctttcacactgtctctgcacccgtttcaggcgctaaaggtccgttacaggctgtatgacgaaaatctctctgaagtaattcaggaaatggagcatcctgattatatggttgcagtttcccaagaagaatttgttgattcagagggtaaccaaatctcgctcagtgatctgcaccgcaggacgtttccttattttgtaaatatgttcaaggccgaacccgatcctgaatctacagcgagtaggaggatggattga

SEQ ID NO: 140025 - DNA, 1089 bp, Enterobacter cloacae
atgtctacatcttatcaacacaaaattgacacacttttagcaaggtacagctttaatttcgcaaagagtcagataaatgaagtgatgtcgctgaagtcccgttcaaaagaggtgttcaagcaggacatcctctctgcagtctcaggaaatcagaagctgcaggaaaaaattaatacactgggactgctggcccttcagcttgatacccgccaagttgaagtcttcttcatccgcgatgagatgataaagcagaatttaacctcattcttgaacacatttcggatctcaccagagaaggttattagcgatgcgttcccgtttccggttgaagacgttgggctgctgagtctcttaaaaagaggcaagctttaccccgcactttctgatgaagttgacattagtaacgaacgctttcgccgcctggtagcctgcacagttgttgatagagacattgaggaaccagttcctgtagatcatttgtctaatgaaggcagaaaacttcagagtgcagacacggtctacatgatgaaacggactgttagaacgcagcttttccacgtgatctactggcaaccggaaacgtccaagctgatcttatctgtggacagaaattcgctgtctattatggctagtcaggatcaacttttcatgctgaggacgtttcttatgcaacatggaatagactgcggacaggccacgaatgtattcagtgctatcgaaccgctatacaacgcgccggatggatttattaccaaattggggcacgtaactaccaatggtaacccagtgcgtattcccctaaagagtaaagaggaatgcctgaagaaagatcactatcatcgggccggagaaagcggcgggtttgttcacgcaaaatttatggtagcgaaaaagtggaagtttaaagtcgacgcatccatcagtaccgttgatgttgaggtcggcctgatgggacagcctaaaatgctggatacagcccagcctctatccgacttcactgtgagtgatgtaaaaagacttgaagatttctgcttcgcaatagataaagtattatctcatattcctcaaccacagccaaaagccagctga

SEQ ID NO: 140026 - DNA, 612 bp, Enterobacter cloacae
atgcttaatgatatttatcttgaccaacgtcatgccccattcaatacaacgtatttgcaacggatgctgggtgtaattgataacgctatagcacaacacccaaggacaatggctgtccgtgtcgatctacgtctgcctgatgacaactgtaataggaatagtggtctgatatcccgtttcattgaatcgcttaatgcaaaaatcgatgctcggtaccgaaataaaataaagaatggcatcaggagctacccatgccagttgcgttacgcctgggttcgggaagtgggagaaataaacgagaagtcccattaccacatggtacttttcgtgaacaaagacacattcaatggacttgggagctatggagaagggggaacgggattagccagcctgatacgtgaagcctggctgagcgctttgcaactaggcccttaccccgaataccgaacgttggtccacatcccagataatcccctgtattatctggatgccaacgccacagactatcgtgcggtttacgataagctcacttttcgggtcagctattttgcgaaagaacgtactaagttatacagtcgggatgaacgctcatttggttgcagtcagtcctga

SEQ ID NO: 140027 - DNA, 207 bp, Enterobacter cloacae
atgaaaactaaacctgcactactggaagatgagttcatcgatatgaagtttatcacacgccttactggcctgagtgataaatggttctataagttgatacaggaaggggtatttccgaaacccattaagatgggtagagcttctcgctggttaaaaagcgacctggaggagtggttgcaggctaaaattaatgattccagaaattaa

SEQ ID NO: 140028 - DNA, 384 bp, Enterobacter cloacae
atgcttaggtatgacgaagtgagagaggagttcttttccctttacgttctgagtctgtattacaacgaagattacattaagcaggcgagtaatttcgacacgcctgaggaatttcaaaaactcattaatcatatattgaacactaaattcctattcaataatgaagcaatacaaagtgcgcgtacttacttgaaaaaacagttccattacaaaatcattgacaaagagaagttcgattgtttcaaaggttctgatagaggatcgtggtttgccttaatgtatatatataacaacagaatcagtcctgaaacctcctcgagcgtgaatatctttgcacaagataatatttacaacccgaactcaactcctgcatcctttttttga

SEQ ID NO: 140029 - DNA, 630 bp, Enterobacter cloacae
atgcataaagctgctcggattagccagagttatattaataaatccttaattccgatgctttgtcggaaagctggtgttccaaacaaagatatcaggggaactatcactagccacagagcgcgggcaactatagccagccagctgtttaatgccagggaaccactaggattatttgagttacagcgctggctcggacattcctctcccagttcgacacagcattatatcgatatcacaccgacaaaactggcagggtctctgtctaaagcaggatactttgagcgaaaccgtcgtatggtttcggtgctgatcgatcaggatgcaatttcgtccggacaaatgcagaaaggagaaccatggcgatattatgaccttgggcacggattgtgtagttatgacttttttgaacagtgcccacaccgtatggcttgtgcaaaatgttcgttctacctgcctaaatcatcatcagaagcgcaatatatagaggggcgtcagaatttactcaaaatgatgcaggagatcccgttgacggatgatgaacaggcagcagtaaataatgatattggtgcgatagacaaattattagagaaattaaaaaatattgaaacaccagacaagcaaagaagataa

SEQ ID NO: 140030 - DNA, 519 bp, Enterobacter cloacae
atgaatgtaactggtattaataaaaacaataaggaatggatgattgcgataataattacctacctttttattctgttatgtctggcaacatacgctattggggctatgtctctggggtggttgcctgcaccttacgcaccattaagggtgccactgatgtgtggtgccattgcctatattggtggttgtttatattgttttcgtgcaatttacatcaataaatgcattagaaaacaatgggatccagattggcatgtatggtatttcatccgcccacttaccagtacaattgcaggtgcaatcagttacttatttcttaaagcaggattgttagttctggaatctagctccaatgcagggtccagtgaaatgggtttctttgcattggcgtttattgcaggctttaatgtcgataagtttgtcgcgaaaattgaggaagttgcaaaggccgtgtgggggattgaaaaaacaagaagtgcaactaatcatgaggtaaaagacttagataaaaaagaataa

SEQ ID NO: 140031 - DNA, 861 bp, Enterobacter cloacae
atgattgataaaatggtgcgaactggtcattggggccaagagagacgacttgaattcatcgattttcgcctactgtgggaaggtcgacttaaccgtgcagatatcactacatttttcagaatttcagtgccgcaggcttcgttagatttggctaaatatcaagagattgcaccaagaaacatggtgtatgatcgaactcagaaggcttatgtaactactccagatttcaaacctgttttttcaagttttgacagtaatcattacctgaatgaactattagggcgagaaaatggaatagtggatccttgtgatagtttcattggatgggcccctccggttgccagccttcctcttccggctaggaaagtacaacctgaaatattgattgatttaatccgggccatgcaaagagaacaggctttggttgttgattatcgttcgatgactaatgaaccagcggttcgtatgttatacccaactgcatttgcacatgatggtcatcggtggcatattcgcgcctattgttttaaatctgcaatgtttaaagattttgtccttggcagattctttaatattattgaatttgtttccccaccgacatcaattccacaagatgttgactggaatacatttattgatgtggtgataggtccaaaccctaactacgatacgaatagacggctatctattgagcatgattaccaaatggtacatggcgaggcgaaaattcggatacgtaaagcacaattatattatcttaaccgtcggttaaatttggatgtgaaaatcgattcttcaatagatgataagcagcaaatcatcatgctaagaatagaaaaacctgaagattctataggataa

SEQ ID NO: 140032 - DNA, 1182 bp, Enterobacter cloacae
atggcagcaaaagttacttttttccaggtcggcaacggtgatatgacactggtgcgtttggctgatacccagggtacatccattctgactgatgtacatatccgttctgctgctgatgaccccaaagatgacacacctgatgttgcctcggcgctacgtaacagattgaagtacgataataacgatcgcccttttgttgacgtctttatgctgagtcatccggatcaggaccattgtgggggtctacgtaaacatttctggctgggccgtcctgaagactatccagatgaccatctgaaacgttcagaaaaacgcataatcatccgagagttgtggtcatcaccattgatttttcgacgtcgttcgaaaaatcacacactttgcgaagatgctcaggcatttaatacggaagctcggcgccgtgtaaaatactggcgggaacatggttacgcatttagcggtaatcgcattcttatcatgggtgaagatattaacggtaaaacggatgatctgagtgccattcttattaaagctggagatacattcaccagaattgacgggcaagtttcagacgttttctctgcacagcttctggcacctgcaccacatgaagatgatgaaaatctggaagaagccctttctaaaaatgaatccagtatcattatgaatatgaaaatactgccttccgcatattctcgtaatcctatgcactttttactcggtggggatgcagaagttctcatctgggagcgattatggaatcgttacaaaagcaatcctgaggtgctggagtatgatcttctcctcacaccacatcattgttcgtggcattcactttcctattatagctggtcacaatggggagaagatgctctggtttgcgatgcggcccgtaatgctttagggcaagcgcgttctggagcgacaatagtttccagcagcaaacagatacttgatgacgattatgatcctccgtgtattcgagctaaacgtgagtacgatgatattctggataatgttgatggttggttcagttgcacgggcgaccttaaagataaaactgttcttgagtttgaagtggcacgagatggaaaattgattcccgctattgttggtgcagtttctgctgcgacaagcgctgctacggcagccgcaccccgggcaggtgtaataaaccaatga

SEQ ID NO: 140033 - DNA, 2229 bp, Enterobacter cloacae
atgatcgaatatttcgaattgggtaaacgcctcgattcatcggggcgtgatagcctatatccgcaaacaatctcattgcttacagcatgcgaacagcatccctatataactgttcgagaattacgtttatctgagcaaaacaatgaccgctcggaatacctagtcattgatgttgctgatggtacagtaacttctggcaataaggctggcattcgtcgtaaagaacgattagctattgagataaaccctaagttcactatcccgatcctagttcatgcattgcgtaaagattttcctgttttatctcatcaacatgcaggtgtaccagactctccaaaaattctttgcctttatgatgtatcttggagcgccgtcgaacgcaactggacacctgaaagatttattgagcgaatattttggtggctcagagaatcagctgaacaacgtttgcatcgagaagaccaacctcttgagcaacttttttatatgagcccctatcaacttattttaccagcgaattatcttgattataatcatgccgcagctcataaactcagcctccagatggtcagcaatggtaagccgataattttaagggctgtacctgaacattctaatcagggcatcagaccatttcgcttattaaccattgccgtcccaccagttgaagcctcattagttgcttcatatcctgacaatctgaaaaaactggaagagcagcttcaatcctggggaagtgaacttctccagccactcgctgatgctgtttatgatgctatacctgatacaggtcttcgccctagctctggtgaaaaggaaggtttgctaattctgctatgggttcctcgtttaagggatggtaaaacagaacgtactgatgttatgggctatatcgtggaacgctcactctacgaacttgccagcgtattagacatacttgcccctaggaatgagcggggaatacagcaccgtttccgactacttggtggcgtaagaggtacacaatggcaacaattaccactgttacctgtcgaaatacgttcggctatgaatgctgcacgagcaagagacatttctgctgttgattctgataatgcatctttctatggtgttctggctggcgttggggctcttggcggcacattagctgatatctggatacgagtcggctggggacactggacatttatcgatcctgacaaactccttccacataatctgccccgccatattggggttgatgatcatattggataccctaaaactgatattcttcggcacctcgcaggtagtatttatccacatgaacctctccccggagcgatcaataaaagtattcttgatgacgatcatgatattgccagagctgtgaatgaggctcacttagttgtggatgtcagtaccacctttgaggtgcctaggaccctagcgttaaaagatgatatacccagaacagttagtctgtttctgacaccatcaggcaaggccagcgtgatgttaatagaggatacagacagacagtgccgaattgatgcaattgaggggcaatactaccgggcaattttgagcagcgagtggggaaacactcacctacagcacaattatggtgatcgttgggtcggtggtggatgtcgggatatttctgtacgtatgtctaacgaatgtattcacgttcatgctggtatcctgtcgcgccaactacggcagaccgtccttaaggatgatgctcgattatgtatctgggtgtctgatgaaaattcaggtgcagtgagcgctcatgaaattgagctttaccctgtggtatctgtaattgctggcgaatggattgttagatacgatcaaggcttagaacaaaaactgagacacacccgtttacaggccctaccgaatgaaaccgggggcgctattgtgggcataactgattttaagaacaagactattattctggttgatgtgctcccagaacctatcgacagtaaatcctcaccagccttctttgtccgaggagaagagggacaaaaggaagcattagaacgggttcagcagctgaccgctcgtgttgtcgattatgttggtgaatggcactcccatcctcaaggattttcagcgaaagccagtaatgaagatgataatttaatcaaaaagttacatcaaaaaatgagtgtggaaggtttacctgctgtgatgctgattgttgcggaaaacgatatcaatattatagtcagatga

SEQ ID NO: 140034 - DNA, 246 bp, Enterobacter cloacae
atgaagttcgcttcatctgcatcacagtgttacttgcaattccacataatcggcacttcgcgctattacacagccgtcgttgttgctaagaacaacaacaggtttgttccgcaggtcgggacgaaaaactttctcgcagctcgcatagaacgaattcacatcagcgagcgcaaacatcagttagtaccccgcgtcttatgtatgaatgccatcaccacgccgaatatctgcagttcctccgggtag

SEQ ID NO: 140035 - DNA, 423 bp, Enterobacter cloacae
atgatcctttttgtcactcccgcatctgaaccagcactgtccaccgcaccacttttcacagagcgctgtccggcaggttttccgtcaccggccgcggactataccgaagacgaactggatctgaatgcctattgtatccgtcgccccagcgcgacctactttgtccgggccattggcgactcgatgaaagatatgggcctgcactccggcgatttaatggttgtcgacaaagccgaaaaacccatacagggggatattgtcatcgcagaaacagatggcgagttcaccgttaaacgcctgcagcttaaaccccgaatcgccctgctgccgatgaatcccgcctaccccaccctctacccggaggaactgcagatattcggcgtggtgatggcattcatacataagacgcggggtactaactga

SEQ ID NO: 140036 - DNA, 822 bp, Enterobacter cloacae
atgtccagaataaaatgtcattacagcatgctatcaatcgcaattgctactgtatttaccgtaaccacttcaggaatggcaaccgcggcagaacaaccaataaaaattggtttactggaagatgcttcaggtaattttgctttaccggttattcctaaaattcatgcgactgagcttgcaatagacgagattaatgccaaaggcggaatactcgggagaaaaattgatttaatacaatacgatacgcaatccgacaacacacgttttcaacaaatggcccgtcgtctgattaaaaacgataaagtggatgtgatttttggggcattttccagcgcctcgcgtgaggctatccggccgattatggatcgtgaaaaacagctttactggtataacaatcagtatgaaggtggcgtgtgtgactctaatgttttcgtcactggtgcggttcctgaacaacaattttctacattaattccatggatgatggcgaagtatggtaaaaaagtttataccattgctgccgattataatttcgggcaaatatcggctgaatgggtccgcaaaattgtgaaagaaaatggtggtaccatggtgggtgaagagtttatcccactgagcgtctcgcaatttggtcaaacgattcaaaatatccagaaagccaagcccgattttgtgatgacattattggttggggcgaaccaatcttcctattatgagcaacaagcggcggcaaaactaaatttaccaatggcgagctccgtcaacgttggccaggcttatgagcataaacgggctttgttgaataaatcgaacttttgctga

SEQ ID NO: 140037 - DNA, 213 bp, Enterobacter cloacae
atgattttctccgtagcagaaatcgtctcttatgttagccattatatgacgttaaagcccggcgatctcattgctacgggtacccctgccggagtgggtttaggcatgaagccggtgcctgtctggctaaaggcgggtgaccgaatccgtatccatattgagaaactgggatatcaaaacccactggtaacagaacagactcccattcgctaa

SEQ ID NO: 140038 - DNA, 684 bp, Enterobacter cloacae
atgccaccgacagagcgtcgctacgacagactggcggtcaggctgtcgttgattatcagccgcctcgtagcgggtgaaacgctggatatgcaaaagctcgcgaccgagtttgacgtgtcagtccgcaccctctacagagactttcgtgaacggctgatttatctggatctcgaatgccatcagggctgctatcgcctacggacaggggccgggccgcagggcgagctggatgtcctgacgtttgcccaccgtaccggcatcgccggcctctttccggggctggaccgtcggctggtgagcctgctgctgaactgcgagggtgccccctgcctgaccggagatgcggtttctgtgggctcacctgcgacccagctgtccttttaccggctggtacaggctattaccacctgccagcgcgtcacgttgctgactgacggaaatcgttgcgaaagactggccccttacaggctgattgcccagcagagccactggtacttggttgcggagcatcacgaccgtccggtggtgttttcgctcagtgatattcaccttgtgcagcccctcactgagagttttaaacgcaacgagcgcttttaccgactgacagaagatttaagttttatccgagcactgccgcattttcagtttattcaacaggcaatcaccaacataactacaacctaa

SEQ ID NO: 140039 - DNA, 408 bp, Enterobacter cloacae
atgatctggaatttaactttccatcagcttattgatttgctcgaatggattggcctcaacatcaatggaacagaatacggcgaaaagatcaaagcctgtaacttagtagtaaacgtatacaagcatggagacggcgctgcacatcaaacactatcatccaactatcctcagtactacccacaccctaccgatgttcgagggacgcagatcgtacctaaccatgatgatttacacgtctcagaagagcagtttgttgaatttgctgatgcaataactgcattctggaaagcagttccagagtattgctactattcagatctcgaagatgagcctaaatggatagaaaaagttttagcaaacattgagcgaaagaataaaaaaggtaatagcaatcataaagcgccgtga

SEQ ID NO: 140040 - DNA, 2967 bp, Enterobacter cloacae
atgccccgccgttcgatcctctccgccgccgagcgcgacagtctgttggcgttgccagatacccaagacgaactcatccggcactacacgttcagcgagcccgacctgtcactgatccgccagcggcgtggcgacgccaaccgcctgggtgtcgcggtgcagttgtgcttactgcgcttccccggtcagggcctactgcccgatgccgtcgtgccggttcctctgctgcaatggatcggacggcaactgcgactcgacgcgacgtgttggccgcagtatgccgagcgggaggaaacccggcgcgaacacctgctcgaactgcggacgtacctgggcatggagccgttcggcctggcgcactatcggcaggctgtccatgccacgaccgacttggccttgcagaccgacaagggcatcgtgttggccagcagcgtcctcgacgctctgcgacaccaacacatcatcttgccgacgctggatgttgtcgagcgcgtctgtgccgaagcgatcacccgcgccaaccggcgcatctacgactccttggccgaaccgctgtcggacgcacatcgccgccgcctcgacgatctgctcaaacgccgcgacaacggcaagaccacttggctggcctggctgcgccagtccccggccaagccgaactcgcggcacatgctcgaacacatcgaacgcctcaaagcctggcaggcgctcgacctgccttccggcatcgatcggcttattcaccagaaccggctgctcaagatcgcccgcgagggtggccagatgacgcccgccgacctggccaagttcgagcctcagcggcgctacgccacgctcgtggcgctggcaatcgagggcatggccaccgtcaccgacgaaatcatcgacctgcacgaccgcatcctgggcaagctgttcaatgccgccaagaacaagcatcagcagcaattccaggcgtccggcaaggcgatcaatgccaaggtgcggctgttcggccgcatcgggcaggcgctgatcgaggccaagcagaatggcggcgatccgttcgccgccattgaggctgtcatgtcctgggacgctttcgccgagagcgtcaccgaggcgcagacgctcgcgcagcccgatgacttcgatttcctgcaccgcatcggcgagagctacgccacgctgcgccgctacgcgccggaatttctcgacgtgctcaagctgcgggccgcgcctgccgccaaggacgtgctcgatgccatcgaggtgctgcgcggcatgaacagcgacaacgcccgcaaggtgcccgccgatgcaccgaccaacttcatcaagccgcgctggcagaagttggtgatgaccgacgccggtatcgaccggcgttactacgagctgtgcgcactgtcggaactcaagaactcgctgcgctcgggcgacatctgggtgcagggttcgcggcagttcaaggacttcgaggactacctggtgccgcccgcgaagttcgccagcctcaagcagaccagcgaattgccgctggccgtgaccaccgactgtgaccagtacctgcacgagcggctgacgctgctggaaacgcagctcgccaccgcaaaccgcatggcgcaggccaacgagctgccagacgccatcatcacggaatccggcctgaagatcacgccgctcgatgcggcggtgcccgacaccgcgcaagcgctgatcgaccagacggcgatgatcctgccgcacgtcaagatcaccgaactgctgctggaggtggatgagtggacgggctttacccggcacttcgcgcacctgaaatcgggcgacctggccaaggacaagaacctgctgctgaccacgatcctggccgacgcgatcaacctgggcctgaccaagatggccgagtcgtgccccggcacgacctatgccaagctggcctggctgcaagcctggcacatccgcgacgaaacctacgggacggcgctggccgagctggtcaacgcacaattccggcatcccttcgccgagcactggggcgacggcaccacgtcatcgtcggatggccagaacttccgtaccggcagcaaggccgagagcacgggccacatcaacccgaaatacggcagcagccctgggcggacgttctacacccacatctccgaccagtacgcgccgttccacaccaaggtcgtgaacgtcggcgtgcgcgactcgacctacgtgctcgacggcctgctgtaccacgaatccgatctgcgcatcgaggagcactacaccgatacggcaggcttcaccgatcacgtctttggtctgatgcacctgctgggcttccgcttcgcgccgcgcatccgcgacttgggcgacaccaagctctacatcccgaagggcgacgccacctatgacgggctgaaaccgatgatcggcggcacgctcaatatcaagcacgtccgcgcccattgggacgaaatcctacggctggccacctcgatcaagcagggcacggtgacggcttcgctgatgctccggaaactcggcagctacccacgccagaacggcctggccgtggccctgcgcgagctggggcgcatcgagcgcacgctgttcatcctggactggctgcaaagcgtcgagctgcgccgccgcgtgcatgccgggctgaacaagggcgaagcccgcaacgcgctggcccgcgccgtgttcttcaaccgcctgggtgaaatccgcgaccgcagtttcgagcagcaacgctaccgggccagcggcctcaacttggtgacagcggccatcgtgctgtggaacacggtctatctggagcgagcggcgaacgcgctgcgtggcaacgggcataccgtcgatggcaccctgttgcagtacctgtctccgctaggttgggagcacatcaacctgaccggcgattacctgtggcgcagcagcgccaagatcggcgcgggcaagttcaggccgctacgaccgctgcaaccggcttag

SEQ ID NO: 140041 - DNA, 291 bp, Enterobacter cloacae
atgcgaccgtctgttgtgcttgacatgaagcgaaacgcagtgcgtgaagtggtaggccgtttccgcaccgcgaacccacgcgttttcggttcggtgctgcatggcaccgaccgcgatggcagcgacatcgatctgctggtcgatgcgctgcctggtgcaacactgtttgatctgggcggcctgcaagacgagttggaatcgctgctcggcctccacgtcgatctgctgacccccggcgacctgccgccgaaattccgggccaaggtgctcgcggaggcgcagccggtatga

SEQ ID NO: 140042 - DNA, 390 bp, Enterobacter cloacae
atgagcgagaaccatcgactacccgactacctcgaccacatccagcaggccgcagccgatgcctgcggcttcgtggagggcttggccaaggaggactttcttgaggacaagcgcacccagcaggccgtcatcatgagcctcatcatcatcggcgaggccgtcacgaaggtgatggatcgctatgccgagttcgcccaggcgcacgggcaagtgccgtggcgcaatatgcgcggcatgcgcaaccgcatcgcccacggctacttcgacatcaacctcgatgtggtgtgggacaccgtgcaggcagcactacctgagttgctcaagcaactgcccgccgtgcgtcaggatgctgacgacgaagactgcaacgactatgggatggaaccatga

SEQ ID NO: 140043 - DNA, 360 bp, Enterobacter cloacae
atgtctattgcagcaagaatatttgcgatttcggagtttgcccgcccatctgatggcgagcctattcgatcggtggtgcttgaaactgaagagtccacaatcgttgtttggcatgttcgtccagggcaagaaattgccgctcacgttcatccccacggtcaagacacttggactgttctttctggttctgccggttactaccaaggaagcggtgtggttaccaagctccaggccggagaaattgccgtagcgaaacctgggcaggttcacggagccatgaacaccgactcgaaggaatccttcattttcgtttccgtcgtggctccaggcaatgctggctttgccttggctgaaaaatga

SEQ ID NO: 140044 - DNA, 915 bp, Enterobacter cloacae
atgcttcttaaatatctttcaaacagcttagttttaacacctaaatttatttccaacattgcagataccgcaagcgaaagatataacaaatttagcattagcaaagacaacggtaaaaatagagttatatatcaaccacaaaaagagctaaaattattacagcgtgttttgcacgatgattttttaggacggattattcctcatccgtgttgtacagcataccgagatggcgcatccacatataaaaatgcaattcagcacatagaaaacagatatttacttaggttagattttgtggatttttttaaatccattacttcaaatgatatatttctttttcttaaagaaaactcatctaaacttcatccggaatggtctgaagaagataacgagctttttttgaaaatagtttgctataaagggcgcctaacgatgggtagcgttactgctcctatagtttctaacttagtctgcaaagaacttgattacaggatttctgatttatgtgcagcaaaaggaatcacatatacaagatattctgatgacatgtatttttcgacaaataaagaaaacatccttttaaatcttactccagagattataaatataataagaaatattcattaccctaagcaccttataataaatagttcaaagacaaaacattcatcacgaaaaagaaaaatgtctgttacaggattagtaattactaatgataaaaaaatttcattaggcagggataaaaaaagagagattagaagtcttgtacataaatgggacacattagactctaaacgaaaaaaatacctccaaggttatctttcgtattgcgcaagtgttgaacctctattcattaatagcttatgtattaaatttggggcggcaacaatcagtaagatacagaagtacaggtaa

SEQ ID NO: 140045 - DNA, 942 bp, Enterobacter cloacae
atgtggattcttcatccaaaatacaaaaacgcacgcaaagactttataaataacttctctgcaagcgaattaactcaactaagttattcgttacctaaaatattatttatttgtggtggtgaagagaaggcctgtagtaatagaggaactctagagagatatataaaaagacatcataaagaatatcttacatttagggcagaattagcatgggatgtcatcagcaatagtaaaacaattaaaaacgttaacgctttggcgttagaagaatggcttgcagacttttctgatattgtaatcattcttgttgaaagttatggtacagtagctgaactaggtgctttctcattaagcaatggattgagaaaaaaattacttccaattttagataaaaaatatgaaagggacctttcatttataaatactggccccgtcatgtgggtgaataatgattcgaaatttaacccagctatttatactgatttctcaacaattttaacctgtatccccgaaatcaatgagagattatccagaaagctacgttcttcagtttccgaagataactcatatggtaaatatagatactcaccaaaagtacttctcttttttcttctctatgtcatcgcttccttaggccccatacctgctaaagaaattacaacattagcaattgaaatcattgagttcaaagaaaaacacagaggaagagatacaattagctttatgttatctttgggcattgccttaggccttttcaaattatcatggaaaggtgatactccatattattcgtgtatagattttgataagttttttaaccatgattctacaaaaaaactattagaaagcattttaaaaagtagagcaagagcattatcggatcttattcttatcaaagaattcaaaaaagaactttctatggtgatgaaaaatgcttcttaa

SEQ ID NO: 140046 - DNA, 702 bp, Enterobacter cloacae
atggcaagatgtacggctcctgttcgtggacatagctcagcagcagccgctgctgcctgtcccgcatgtcgtaatcgcagcggttatcgccgtagtagctacagttatgatagctacccttcttactcatcatcaggctttagcggtagcggaagttatggaggcggtggatccagcagcagcgcgaagccacgttggtcaaaatcagggtcttccgtttcttacacaacatcccaagtacaatcacttacgccaattcgacaagtggtcgagaaacttgtcgttgagcaacctgatctgcgtgatgtcttcctttgccatgcttgggatgaccgacaaggtattgccaaagagttacacgatttgctcgaagcggcaggtgtcaaagtatggttcagcgaaaaggatcttgcccttggcgttccgatgatgcgtgccatcgataaaggattagcaaactctcgaataggcttggttttagtaacaccagcattgttaaaccgtcttcctaaagaaggtgttgctgataaagagctttccgctttactggcaggcaaccaactcgttcccatcgtgcataacacgacgtatgaagctctccgtaatgtcagtcccttgcttgcgtcccgaagcggcctcgatacgggagaagatacattggcagttgttgcaacaaaaattgcagagctgatcactgtttag

SEQ ID NO: 140047 - DNA, 318 bp, Enterobacter cloacae
atgagcaacatcacttggggcctgcagcgcaatatcacgccgtgcctgggagcccgccttgtgcaggaggggaaccggctgcactacctggctgaccggaccagtatcacaggtaagttcagtgatgccgaatgttttaagctggatgtggcatttccgcactttatcagtcagatggagtcgatgcttaccactggtgaaatgaaccctcaccatgcccactacgtaatcctgtatcacaacggtttcacctgcgaagccgatacccttggcagttgcggctatgtatacgtcgctgtttattccactcaacgctaa

SEQ ID NO: 140048 - DNA, 195 bp, Enterobacter cloacae
atgacgatataccgccagcatcctgagtcccgaatctttcgctactgcaccggcaaataccagtggcacggtagtgtctgtcattacaccggcagggacgttccggatatcacaggagtcctggcggtatacgccgaacgtcgccaggaccgcaacgggccttatgcctgcctgatgagcatcaccctgaactga

SEQ ID NO: 140049 - DNA, 156 bp, Enterobacter cloacae
atgaaaagagtacttttcttagatgtaatcgtggtttcgatgatgctggcagcatgccaggttaataatgtccgcgataccggtggcggggcagtctcaccgtcatcaacagtgactggtgtcacgctcggcagtgaaacagatggcaatccataa

SEQ ID NO: 140050 - DNA, 270 bp, Enterobacter cloacae
atggtgaatgatatggacaaaaagaacattactgaatataccgaagctgaatttttggcttttgttaagaaaatttgtgatgcagattatgacaccgaaaataagcatacagaagctgtcctgttgtttaaaaaattaactgaacaccctgacggttctgatctcatctattatccaaaacccggtcatgacgacagccctgaaggtattgttaaaacagtaaaagagtggcgagccgcaaatggtaagcctggctttaagtcagagtaa

SEQ ID NO: 140051 - DNA, 2289 bp, Enterobacter cloacae
atgagtggtaacggtggcgataacgcccacaacagcgcattcggtggcgggaagaatcccggcatggggaatacaggctcaggcagtaattcaggatcatccggcagcggaaatacaggcagtcattttaatggcccggcagtaacatacggtccggacgggtctccgcgtattaacctgtctgatgccggctcttcacagcccggtggcagcggtggtaataacggcggtgatcgcggtggaaattcaggctctcagtcgggtaacaataattcttctgatccgtcgaaaggaaatggcaccggtggggtacccacgacatgggaccgtacggcaaactattacagcagcagcgatcaggtctcacgtaaggcgcttaaaaatatgtacgaggaagcggtcaggacgggaaatatcccagcagccgcccgtggtagtctccgtgcaaacgtgcaggcaatgctggatgaagacaaacgtctggcggatgcccgggccgctgcagaagccgagcagcgtcgtctggctgctgaaactgagcgtcagcggcaggcttatgacgctgcggttaaagctgatgccggtgccatggctcaggcagcggcagcgctaaaatcagcagatgatgctcgactggcagccgaaaacgcacttcaggtagcgcgttcccgtcaggcttcgattggtaatctacccggtacgtgggaccgtacagctaattattacagcagcagcgatcaggtctcacgcaaggcacttaaaaacatgtatgaaaaagcggtcagtacggggagtattcctgctgccgcccgcggtaatcttcgtgaaaaagtgcaggagatgctggatgaagacaaacgtctggctaatgcccgcgcggcagctgatgctgaagttcaacgtctgaccatcgctctgtcgaacgcccagcaggcagttgtcgccgcccagaaacagcaggcggatactatcgctcaggctgcggaaaaagcgcgtcagcgtcaggccgaagaggcggaacgtcagcggcaggctgcggccgcagagcaaaagcgcctggcagacattgcggctgaacaggcccggattgcagctgaacaggaaaaagtccgtcaggccagacaggctgcggtgaataaactgaaatccagcggtatccagtccgtgcgcgggctgccgacgacggcggcgccggcagcctctccactaacctggtccgtagcctctgccggtggcatttctctaggcagtgatgtggcaggtgcggtctggtcacgtatctctgcggcacttgctgaactgcgtggcattatggccgccagcatggctgggccggtggcggtaaccgttgctggcctgctgtattcacgtgatgttggtgtgggaagtgacgtcgttcccggccgtgatatcagcgcgatgatgccgggggatgcgttttcactgcctgatactgcgacgctggacgcggcggctgacggaaaaaccggtgtcagcatgccggtgcgtggtcgtatggtattgcgtgatgatggcaccctggagacgcagttggtcagaacgactgttgccggtaatgttccggtggtgcggggcgtgctggatcctgccacaggctactggagttatgcgttgccggcgatggccggtgttcccggtcagactattctggttagcccgtcggatgcgcccggtatcaatggtccactgggactggcggggcctgttccgctgccggaattcattgtgcataccggtggtgaggattccgcaccgcagggagtgactgttacaacgaccccggtgacggaagatctggattttaacgaccttattctgatattcccgtcagactccggcctgaagccactgtacatcatgctgcgtaacccgcgtaacattccgggtaccgcgagtggtaacggtcagcaaactggtgataactggctgggtagtgctggtactggtgatggtgctcctattccgagtcagattgcagataagctgcgcgggcgtgagttcgggagttttgatgcgttccgccgtgccgtatggggtgaggttggaaaagaagaaacgttgagtagtcagttcaatgaaagtaacaagaaagcccttcgtaaaggatattctcctttccctcctgaagctgagcaggttggtgggcgcactcgttacgaactccaccacatcacgcctattaaagatggtggggccgtttataatattgacaatattagaattttaacgccaaaaaggcacatcgatcttcataagaatggtgaatga

SEQ ID NO: 140052 - DNA, 441 bp, Enterobacter cloacae
atggcatggcacacagttcaggacgcactgaaattaacaggaaaatcgcgttcgcaattatatcgtgacatggctaaaggccttgtcagctatcgcacagggaaaaatgatcgccgggagttcgagaccagtgaactgattcgggtctatggtgagctgcgcactcatgagacaccaaaaaggcacaataagggacaccctgaaaatgatagtatccacgaggaaaatccgcagttagaggccattcagcagaagctggatgcacttcagaaaaccgtcaccatgatgctcgaggataaaatcgcgcgggaaacagaaaagcgagtgcaggaagaggagcgcaatcaactgcaggcggaaatcagtcggttgacggacgcgctggagcaggaaaaaaagcggggtttctggtcgcggctgtttcgctcaggttcagagtaa

SEQ ID NO: 140053 - DNA, 864 bp, Enterobacter cloacae
atggaaaacaaatctcaatttcttactgttgaaactatctgtataaaatatagtattaagttagaaaatataatagagctttggtgtgataataacatccctctctatatacatcttgaaggaaatccgtgtcaattatcatgttctattcgtaaagacgatgagtctcacttaaaggaggtgttaaacgatattcccaccgagattggctcgcctaatagttcactagataatatcgaacagcataaatattgtattgaagaccgcaaggttgaaattattaacgaagttgatttatatcaaaaagataaatcccctctaactaagataagacagtttcgaatgaaaaaaggggcgggtatttgctatattcccatcggcgatgatcagttttattacgatggttacgcatatggatattggcggattaagcctggaccaactacacggttcataaagggtgattataaaatatctaattcaaatcctttgttgtcggatgacgatgtttcagctttattgaaagtcataggacatgatgaaggggactttttgatatttaaagaagcaattgaagttaataaacgtgagctatgtatgaatgttgatgacattgaaaatttagagtttgcattgactggttcatcgaaaattgaaaagaaagaaagtgaaagtcgttattctaaggtagagcatttggctttatatattttgctaaatgagtattgtttggaaaatgatggtagtgttaacttcacaacaatggcaggtgttttaaccagtctgaataaaaataaatatggtggagaatatgaattcaaacctgagactattcgctgttggttaaaaaacattccaaagtaa

SEQ ID NO: 140054 - DNA, 159 bp, Enterobacter cloacae
atgcgcatacaatcaatatcaccgcaagttacaaaagcccagatttaccgttccgttgccagctcaacagctatcgaaacgggcgtttctgtacaaaagattgagcagcaactaaaaaaaaatcaggcacaggcgaaagccgttggcctcgcccgctag

SEQ ID NO: 140055 - DNA, 843 bp, Enterobacter cloacae
atgagtgtgtcttcccgttttccgcctgaggtcactgcgtggatggagcgctggcgcctgctgcgcgacggcgagctgctcaccacccactcgagctggatacttcccgtccgccagggggacatgccggcgatgctgaaggtcgcgcgcattcccgatgaagaggccggttaccgcctgttgacctggtgggacgggcagggcgccgcccgagtcttcgcctcggcggcgggcgctctgctcatggagcgcgcgtccggggccggggaccttgcacagatagcgtggtccggccaggacgacgaggcttgcaggatcctctgcgacaccgccgctcgtctgcacgcgccgcggtccggaccgccgcccgatctccatccgctacaggaatggttccagccgcttttccggttggccgctgagcacgcggcacttgcgcccgccgccagcgtagcgcgccaacttctggcggcgccgcgcgaggtgtgcccgctccacggcgacctgcaccacgagaacgtgctcgacttcggcgaccgcggctggctggccatcgacccgcacggactgctcggcgagcgcaccttcgactatgccaacatcttcacgaatcccgatctcagcgaccccggtcgcccgcttgcgatcctgccgggcaggctggaggctcgactcagcattgtggtcgcgacgaccgggtttgagcccgaacggcttcttcgctggatcattgcatggacgggcttgtcggcagcctggttcatcggcgacggcgacggcgagggcgagggcgctgcgattgatctggccgtaaacgccatggcacgccggttgcttgactag

SEQ ID NO: 140056 - DNA, 276 bp, Enterobacter cloacae
atgatcctccagcgcggggatctcatgctggagttcttcgcccaccccgggctcgatcccctcgcgagttggttcagctgctgcctgaggctggacgacctcgcggagttctaccggcagtgcaaatccgtcggcatccaggaaaccagcagcggctatccgcgcatccatgcccccgaactgcaggagtggggaggcacgatggccgctttggtcgacccggacgggacgctcctgcgcctgatacagaacgaattgcttgcaggcatctcatga

SEQ ID NO: 140057 - DNA, 795 bp, Enterobacter cloacae
atgattgaacaagatggattgcacgcaggttctccggccgcttgggtggagaggctattcggctatgactgggcacaacagacaatcggctgctctgatgccgccgtgttccggctgtcagcgcaggggcgcccggttctttttgtcaagaccgacctgtccggtgccctgaatgaactgcaggacgaggcagcgcggctatcgtggctggccacgacgggcgttccttgcgcagctgtgctcgacgttgtcactgaagcgggaagggactggctgctattgggcgaagtgccggggcaggatctcctgtcatctcaccttgctcctgccgagaaagtatccatcatggctgatgcaatgcggcggctgcatacgcttgatccggctacctgcccattcgaccaccaagcgaaacatcgcatcgagcgagcacgtactcggatggaagccggtcttgtcgatcaggatgatctggacgaagagcatcaggggctcgcgccagccgaactgttcgccaggctcaaggcgcgcatgcccgacggcgaggatctcgtcgtgacccatggcgatgcctgcttgccgaatatcatggtggaaaatggccgcttttctggattcatcgactgtggccggctgggtgtggcggaccgctatcaggacatagcgttggctacccgtgatattgctgaagagcttggcggcgaatgggctgaccgcttcctcgtgctttacggtatcgccgctcccgattcgcagcgcatcgccttctatcgccttcttgacgagttcttctga

SEQ ID NO: 140058 - DNA, 1005 bp, Enterobacter cloacae; identical to SEQ ID NO: 31749

SEQ ID NO: 140059 - DNA, 336 bp, Enterobacter cloacae
atgacaagcaacacactgaacgctgttccggcgaccgtgctggagacgatggcagaacgccttaacggtcagcctgaaccgctaaaaatccgcagcaacgatgatcacgccgcgctggctgcagatgtgctctggaaatttgcccgtaaaaccgggctgaacagggaaagcgaaagcgtgcaaactgttatcacggattttctggccaatctgctgcacctgtgcgaacagtgcgagccggacggggctggcattgagggatttaatgccctgctgaatatggccatgatgcactatgagcaggaaaacggaggtgacagcgaagaaccgatctga

SEQ ID NO: 140060 - DNA, 318 bp, Enterobacter cloacae
ttgaaaaaaatattcatcctatcggcagcgctgatcatggcaggatgcgcaacaaagcaatatccacaggccgcgaacgtcaccggtccagaatcttccgcaatggattgcaaagcggtagctctggaaatcgcaaaaacgcgcagtgtacaacaagaaattgaggcaaccggcgaatttgacgggcgcaccgtattaggtttcctgggtgattttgggataggaaatggcatggcaaaaggcgaagcccgcaaaaaagcagctaaccggctaaatcagctggaagccctgaaggctgcaaagtgtgcagttcaataa

SEQ ID NO: 140061 - DNA, 228 bp, Enterobacter cloacae
atgaacctttgccccgatgaacgtctgctctttgtgcggatgatttccgctatgcttcgccgttcgggcggtgatgcgggtgctgttatgtttgaggcgtatcgccatattgtgtccgataccaatcaagctcgtcgttcctgcatgctcgacctgctcgaaagcgtcaggcaggactatgtacagggtggatgcgtgtcgcttacaccagatatgctttccagctga

SEQ ID NO: 140062 - DNA, 696 bp, Enterobacter cloacae
atgaccggctggctgtcaggctgtcaggctgtcaggctgtcactgataatcagccgtctggtggcaggggaaacgctgagtgtgcgtaagcttgccgctgagtttggtgtgtcggtgcgcacgctgcggcgtgattttcgtgagcggctgatgtatctggacctggagtatcagtccggatattgccgcttacgcactgcgggcagtgagacgcagatggtgcccgacgtgcttatctttgcccaccgcagcgggatggccggtcttttccctggctttgaccgtcgtctggtaaacgcactgctgatgtgcgatgagcctccctgcgtaatcgcacccgccagtccggctccttcgccctcaggcgcattgtctttctggcgactgattcaggccattaccgggcgcaggcgggtgactctgattgccgaggggcagcgctgtgagcggctggctccctgccggttacttatccaccagcaggcctggtatctggtggcagagcacgacggacatatcgccgtattctccctggatgaaatccatctggttcagcccctgcaggagactttccggcgtaacgacagtctgtgtcgtcttgttgaagacccgggctttattcagtccttaccccattttcgctttatccagcagtcactgcttacgtttgttccggccaacagctcaccagaatag

SEQ ID NO: 140063 - DNA, 132 bp, Enterobacter cloacae
atgattgaaaaattcgatatgcttgtacatggagtcagaattgtaggtgatgtgaataaattgagagtcggaaatcttactttggggggagggaaggtttcaggctgtgaaattggttttaaaattggttag

SEQ ID NO: 140064 - DNA, 1050 bp, Enterobacter cloacae
atggctaaccgcaaaaaccgcagcaaggcaccgcgcggccagaccgccaccgatacggccaacatggtgagcaatgcaaatgccgaagcgtttgcgtttggcgatccgatccccgtaatggaccgacgggagttatttgattacctggagtgtgtacagctggaccgctggtatgaaccaccgatcagcatggatggtctggcgcgaacctaccggtcagcggttcatcattcaagcgccatacaggttaaacgcaatattcttaccagtacctacatcccgcaccggttgctgtcaaagcaggccttttcccggttcgcccaggactttctggtattcggcaatgcctaccttgaaaaacgcatgaaccgtttagggcagatcatggagctgcgcgcctcgcttgccaaatacacccgtcgcggcattgaaccggacacatactggtttgcgcagtatggctacaattcgcagccctatcagttcgatgaggggagcgtgtttcacctgatggaaccggacgttaaccaggagctttacgggatgccggaatacctctccgccattccgtccgccctgctgaatgaatcggccactctgtttcgccgcaagtattatcaaaatggtagccatgctggttttatcatgtacatgagcgaccccgcagccaatcagaatgaagtggacagcatacgcgaagcactgaaaaaatcgaaagggcctggcaactttcgcaacctgtttatgtacagcccgaacgggaagaaggacggcattcagatcatcccgctgtcagaagtcgcagcgaaagatgagtttcttaacatcaaaaacgtgagccgtgatgacatgctggccgctcaccgcgtgccgccgcagctgatggggattattccaaccaataccggcgggttcggtgatgttgaaaaagcagcgcgcgttttcgttcgcaacgaactgacgccgctgcagggccgcatcacagaaattaacgagtggctgggtgaagaagtgatacgttttaacccatacctcaccgatgaagactga

SEQ ID NO: 140065 - DNA, 396 bp, Enterobacter cloacae
gtgctcctgtcagggatttttttctgtctcaacgttagctggattgtggcaaaacaggttttcgatgagggtgttgtgacgcttcatcgcattcgcggcgccatggttatctatctgaatatctcacttttgttcgcgctgctggactgtttactggtgggattcattccagatgcatatacaggaatatcggacgataattcaattgaaacgatgctctacttcagcctgaccacgctaaccacccttggctatggagatattctggcaatacatccttttgcacgtaatctggcgatgcttgaagcggtgatgggtcaattctatatgggaacaatgatcgctattttagtcggtttacatatagcacagaggactcctgcgtcaaaaaaatga

SEQ ID NO: 140066 - DNA, 237 bp, Enterobacter cloacae
atgttcgccaaattgcgcaccactaaatacctgaaaaccgcagccactgcggactctgccagcgtgcagtttgagggcaaggtgcaacgcattgcccgcgtccaccattacggcctgcgggaacgtgttagccgtagaggtccggaggtacgttatgcggagcggaggttgctgggcattaataatggcgtggaggctatggtaaaggatacgttatttaaatggttgcgtgtttaa

SEQ ID NO: 140067 - DNA, 1206 bp, Enterobacter cloacae
atgctggctaagcaagatctgaatggagctatttttaatacagaactaaatgatttctgtaggaaatatttcattaaaggacaagtagaaccaacaaggaatgaagttcttgcattcccgtataaatacaatgaaataaaaacatcattatttgaaagtctaattcttcacaataaagtcaactttaaagttgagggtgaaaacatacctctatgcgtaatgcttaatgaattaggattgaggggcgtcgaggaattaattgatgaaggtgccctcagttttaccttgtggtccccgatggttatgtttttagtcgataacttatatggtgtagaccctctatgcgctggaagacacaataatggggtatatgtcgacccagaagagtcgataatttcaggtctaggattcatgagaaatggactcaaaaaaggtgagattagagcaataacacgcaagctacgagatctttatcactcagtccctaaaggtatagaaaataattgtgtaagtataacaatgtcagctctcgaaagtggaaagcttgaacaactcggattaagtttgcaggacaaaagcaagcatgatcttaacgaaaaagaaaaaaagatattaattaattgcgcatcagatttgttaggctataagtatcttatacaaaagagagcacaagtcagcccaaccagtaacatacaagtactacttaaagactcaatgaaaaaagcgaaagagttttctaaggaagagatattttccgcaatagtacagttcgaaaatatacctgacattcgcacatcatttcaaaacatgggccttcctatggacgaactgatgaagctcaggaaaaataaaaattgcaaaaaatttagaacatggctctcaaatctcaataatatatctaatccattagaagcacaaaggtactatgtggatagcatacaatcagccaaaggcttctttgatacatggttgggcaaatcaacaaaaagtgttttcatgatgatcttaggcgcatctgccggttcatatgtagattcaaacttaggcccaatcatcggagccgcagggatgcaatttgcgaatcctgtgacagattatattttagacatggctgatgaatatctgatgtcagaactgacaaagggctggacaccaaaattattcatttccgaacttgagtcgctcaactttaaatattcagtttaa

SEQ ID NO: 140068 - DNA, 1266 bp, Enterobacter cloacae
atgcaggaaggcgcttaccgatttatccgcaatcccaacgtttctgccgaggcgatcagaaaggctggcgccatgcaaacagtcaagttggctcaggagtttcccgaactgctggccattgaggacaccacctctttgagttatcgccaccaggtcgccgaagagcttggcaagctgggctctattcaggataaatcccgcggatggtgggttcactccgttctcttgctcgaggccaccacattccgcaccgtaggattactgcatcaggagtggtggatgcgcccggatgaccctgccgatgcggatgaaaaggagagtggcaaatggctggcagcggccgcaactagccggttacgcatgggcagcatgatgagcaacgtgattgcggtctgtgaccgcgaagccgatattcatgcttatctgcaggacaaactggcgcataacgagcgcttcgtggtgcgctccaagcacccacgcaaggacgtagagtctgggttgtatctgtacgaccatctgaagaaccaaccggagttgggtggctatcagatcagcattccgcaaaagggcgtggtggataaacgcggtaaacgtaaaaatcgaccagcccgcaaggcgagcttgagcctgcgcagtgggcgcatcacgctaaaacaggggaatatcacgctcaacgcggtgctggccgaggagattaacccgcccaagggtgagaccccgttgaaatggttgttgctgaccagcgaaccggtcgagtcgctagcccaagccttgcgcgtcatcgacatttatacccatcgctggcggatcgaggagttccataaggcatggaaaaccggagcaggagccgagaggcaacgcatggaggagccggataatctggagcggatggtctcgatcctctcgtttgttgcggtcaggctgttacagctcagagaaagcttcacgctgccgcaagcactcagggcgcaagggctgctaaaggaagcggaacacgtagaaagccagtccgcagaaacggtgctgaccccggatgaatgtcagctactgggctatctggacaagggaaaacgcaagcgcaaagagaaagcaggtagcttgcagtgggcttacatggcgatagctagactgggcggttttatggacagcaagcgaaccggaattgccagctggggcgccctctgggaaggttgggaagccctgcaaagtaaactggatggctttcttgccgccaaggatctgatggcgcaggggatcaagatctga

SEQ ID NO: 140069 - DNA, 708 bp, Enterobacter cloacae
gtgctgtttgacgcgcagttcagcgtgaaggatggcgaagcgctggtagagaaaattagccgcagcggtaaaaccctgaacaagattgtgatcacctccggcgatccggatttctattttggcctgcagccgctggtcaaagccttcccgaatgccaaagtggtggccacgcagcatgtggttgaccatattaaagccaccaaagacgccaagctcgccttctgggggccacagatgaaggacggcgcgccaacggagctggtcgtcccgcaggtgcttgcctccaccacgttcatggttgacggggaaaaaatcgatatcgaacagccggacagctatgcggcctatgtgtggatcccgtcggcaaaaacgatcctcggcggcaccggggtagcctggggtattcacgtctggacggcagacacccagacgccggaaagccgcaagcagtggcaggaaacgctggagaatatggccgcgcacaaacctgagcgcgtgatcccgggccactacctgggcaccccaccagcgggtactggcgcgattgagtttacccgcgactatctgcagcgctttgaaaaggctttagccgcgcataaagattccgcaggcgttatcagcaccctgaaaaaacagtatccgggcctggctgatgaaagctcgctggaattaagcgccaaagtgaatactggcgaaatgaagtggtaa

SEQ ID NO: 140070 - DNA, 249 bp, Enterobacter cloacae; identical to SEQ ID NO: 130632

SEQ ID NO: 140071 - DNA, 249 bp, Enterobacter cloacae
atgaatattttaacaggggaaatgttatcagagatactttatgatgtgttgattacctgtgaagttgaagactatgttaaaagtggaaaaggaaaagatgtatctgagatcaatatagatgagttaaaggaaacgattttatactggcataaagagcatattattgaacttgtactgaaaaacataaaaccggatgatgctgatgagcgtatatactggaagttaaaaatgactgtgaatcagttttga

SEQ ID NO: 140072 - DNA, 303 bp, Enterobacter cloacae
atgggccagtatcaccgccgccgcattgaaatacagggcgcgtttgaccacctcccggggatgcacctcggtgcggttaatcgtgccggtgaagagcgtttcatgggcaatcaactgattctggttgtccagatacaacacccggaactcttcccgctcaagcgcggccatatgcagtcgcagccattcacgtacggcgtgggtagaggtgaaggctacgccgggctcatgcaggtggcggtccagagccctgagcgcccgctgaatgagacgccggtcctgtggcgtcatctcgccgggtaa

SEQ ID NO: 140073 - DNA, 546 bp, Enterobacter cloacae
atgtatctggacctggagtatcagtccggatactgccgcttacgcactgctggcagtgagatgcagatggtgcccgacgtgcttatctttgcccaccgcagcgggctggccgggctttttcccggccttgaccgccgtctggttaatgcactgctgatgtgcgatgagtctccctgcgtgatagcaccagccaatccggttccttcgccttcaggagcattgtctttctggagactgattcaggccattaccgggcgcaggcgggtgacgctgattgcggaggggcgacgctgtgagcgcctggctccctgccggttactcatccaccagcagacctggtatctggtggctgaacacgaagggcatatcgccgtattcacacttgatgaaatccatctgattcaacctttgcaggagacttttcgccgcaatgacagtctgtgccgtctgactgaagacccggtcttcattcaggccttaccccattttcgctttatccagcagtcactgcttacgtttgttccggctgacagcccaccggaatag

SEQ ID NO: 140074 - DNA, 690 bp, Enterobacter cloacae
  misc_feature (269)..(278): n is a, c, g, or t
atgaaactacattttgaatctgaccttacctatcagcaaaacgccataacttcggtctgtgatttgtttgaagggcaagagaaatgggaaagcgaaatgactgttctggccccagctcagggtgcactctcatttgaaggcgcaacaggttcaatgcctgttaacccacaaatacccgaagatgatgtactgcttaaaaatctgaacaatgttcagttgaaaaatcagcttcctccctcacctgtgctcgacagtcatgattttactgnnnnnnnnnngatggaaacagggacaggtaaaacgtatgtttacctccgcactatgctggagctgaacaagcgctatggcatgagtaaattcattattgtggttccttccgttgctattaaggaaggcgtctataaaacgctacagatcactgaagaacatttcaaaagcctgtatgcgggtattccatacgaatactacctgtatgattctgcgaaacctgccgatgtccgtaattttgcgaccagttctgttatgcagatcatggtgatgactgttggtgcaattaacaaaaaagaagttaacaaactttatcagtccagtgaaaaaacgaccgttgacgatctggataaacctatcgatcttatccgggctacacgtccgataatcatcgtcgatgagcctcaaagtgttgctgaatag

SEQ ID NO: 140075 - DNA, 240 bp, Enterobacter cloacae
atgttcgttgaactcgtctatgacaaaagaaacgttgaagggctggagggcgctcaggagatcatttttgcagagttgactaaacgtgttcataccgtcttcccggccacctctgtccgcgtaaagccgatgcaggctaatgcagtaaatagcgactgcacaaagacagagaaagagaagttgaaccggttaattgaggagatgtttgaagaggtcgatatgtggcttactcttgattag

SEQ ID NO: 140076 - DNA, 1680 bp, Enterobacter cloacae
atgcgtagaacagtcatcattccggtcgtcctccacgccctggtagccgttgccacgttgctgtggttgctgtggtatttcatcccgacaggcaacgtttttaaaggcctggccactctgctgatcctctttctggcaggctggactgtttttaaaaactgtcggagtgaagagcacacatccgacgttaccctcccggctgctgaactgccattactcgacacccagggccccgttgtactggtgtgtggtgacatgctggaagcgttgtttcagggaggccctctgcgtaaaacagcccagggatggtggcttcgggccggtgacgtcagccggttaactgacgttgtccgcagcatacagaaacaattccctcgacaggttggtcagctttcggtgatgtatcgctgcctgccagatgaacatcaggatgaagcggtactgcgctccacactgaaaacgctccgccagcagtgtaaacaaattaaatccctgacgggtttcacactgccggttgtggtgaatgccgaattttccgggcccgaaacgccgtggatcatcgttcgcggtgacaagccgatagtctgtccggttaatgattcgcctcaggcgtttattgactggcagcaggcggaagacaatatcctgctactgccaactgtcagccaggcattttcctttatccgtaatacgctgactgatgagctggagaaaccggaccggctaacgccgcctgtacgtgttttttccgtggccatgcgcctcggcgtggtcaatcctgaggctcagtcagtctggtccacctggctttgtgcccggacctgcttgcagttttcccgccagcccggtcagtcagttctggcaacccttttcccggatgccgttctgccacttctggcaccttttgcatcaaccgttcagggggggcagcgtacccgccgcctggtgctgctgatgtggctgtgcgcgctgaccgcattgggtatttccgcgctcaataatcgtgacctcatccgtcaggtgagtgccgatttacagcgctggaacgcgatcccgatgaatcactaccgtcctaaagcagactcgctggctgctctgaaacaggatgcactcctgcttgaacgctggcaacggcagggagagcctttacgttacagcctgggctattacccgggacaacgcctgtggctggccttgcagcaggccattgatacctggacacctccacctgcccctgaaccaaaaccggtcccgaaaatagttcgtctcgatagcatgtcgcttttcgattccggcaaatcagcgctcaaagaggggtcaaccaaaatactcgtcaacgcgctggtggggatcaaagccaaaccgggctggctaatcgtggtcagcggccacacagacaataccggtagcatacagctcaatcagaccttgtctttacaacgcgctgaagccgtccgtaactggatgcgtgataccggggacgtaccggagagttgctttgccgttcagggctacggcgacagccgaccgattgcttcaaacgatacgcctgatggccgtgcgcataaccggcgtgtcgagatcagtctggtaccgcaggctgacgcctgtcgtctgccaggcgcaaaacacgcgtcacaggatgtacgtgacgtttcaactcaagaaatggagaagtaa

SEQ ID NO: 140077 - DNA, 786 bp, Enterobacter cloacae
gtgaaaatcaattctttaatgcttctttttttattgtcaggttctgcacttgcaaattgcgacgaacattgggaaacattttctcagacacagttcataaataaaaacatcgttcaatataaatctttctattattctgcgccatccgaaaaacataagttaccagatctctttttgattaaaggggatgattttaactcttatttaaaaagtaatggttacacatttggaacgtacactaggaaaaatgggactgttgtaagtggctggctaaaatctgaaacattagttgttgtcccatctaaatcgtcgaattctccaccggaagtgtcaaggtccgactttgtcattatttcgccatataaaaatatcgagctaggtagttcatacgagcaattctataaaatatggggagactgcgaagtaaataaacaacctgacattggaatttcaggtaattttattactgcggggaatgaaacgtataaatattttgataacttctggagtggattttcaattcgctcatcaaacatcaacttccagcagacaggaactgattacgacgcttatagaataacgacaattaccgtcaacaacaaaaaatacatgaccagaagaggcattaccataggggatacaactcaaaatataattgctgcctatggaaatcctttgaaattagacaaaaataaagtgacatataaatttaaaaataacgaactgtcatttgctcttaaaaatgatgaaatcaaaagcatagttatggatgaaaaagtagagtaa

SEQ ID NO: 140078 - DNA, 138 bp, Enterobacter cloacae
atgatgggcgggaaaatttacccggcactggctttcgcaaaacaggttgaaggctggtctctgggtatttgcagcaaagtgaaccgatggcacgaaactgaatccttatccccatgccagtttatgacctttcggtag

SEQ ID NO: 140079 - DNA, 1254 bp, Enterobacter cloacae
atgcgttttcgctttattgccctggctttatgccttctttctggtagcaacgttgcagtatctgcgggatttgattgttcccttgtaaatttatcacagacagaaaaaacgatatgtagcaatgagtatttatcagggcttgacagtgctctaaacaattttttcaaaaagacctatgacagttctttaagccatggaagcctgtctgagcgtcaaaatgaatggctaaaagagagaaacaattgcaagagtgatgtaacctgtattaccaacagctatttaatacgcaatagaaatctgtcaggaagcaacaccctccagaatgtcaatgatatttttaatcgcgatggcgacaaactggacgaagcattggatgccccaattaagaccaaatccggatttacaataactgactctccatggcatgtaaaagaaatattttcttctgaaagcttcgagggtggaattaatcttgagagcaagaatgtatcgtcaatactaacataccagataattaagaatgatttatacatttacatttctgttagcgggcggtaccaggataaagacactacactgctcgtagagcttaaggacgatacttaccctcgcatcattcaacaatatgacggtaatataaatttaatatcccgtgccagagatgcacaaggaaacgctttagcctatttttctattggcgatgatactcataaagactatcattatttatttatatctccgagtggcgaaaaaggcatttctgatatatccccagagcaagctgattccttaacaaaaaaaaccacaccatgggctgggtattgtggcagctcagagtgcaatgcttcattgatatcacctgatggcaaatggcgacttacttcaagtgatggtaacgttaaagatccagatgaaggtatgtacgtatttccggccaatcgtccggacctgggtttgaatgtttttgcagacaaagcggataactctatcactgacgatatatttggatatacacggcaatatgtctggggagatgacagcaattcattttattttgataatagcggcgctttaggttgcatctggaaaaccgatattggcaataaaacaacaaagcggattattcccgtagaaggtattttagatccattttatataaagtatgacggagaagatctgattctttctgtttattcatattcttatcaagatgattttaagtcagaaatatacatagcaaaagaacctaattaa

SEQ ID NO: 140080 - DNA, 522 bp, Enterobacter cloacae
atgctccccggcggtgaccgcgtcgttacgcacgctgaccgtcgcatccatcggtgtggaggctgtccggtagttataatcccgcgtggcgaccgtgccggtggcaagggtgtgccaggttcgtacatcccagaccgactcttccgcaccgtcaaacaaacccgatggctcgctgtagggcaggcgcacatcaaactggtagttgagctggctgtcggccagtatgtacgtatccagaccgcgcacgtcgtccatcaccgtacgccagtaaatccccacttcagacagaatgcgccggataaactcaaggtccgtttcccgccactgggtgataatttcacgcggcgggtacgtgcgctccagtctgaactcaaaatcaggtccctccagcccgtgtttgcgcagcacctgctcaaccacctcaggaacggactggttctgatataccgcacattgccgggtgtatcccaggagcgccaggcgggaactgagcgtaagacggtagtgggaatgatcctttga

SEQ ID NO: 140081 - DNA, 501 bp, Enterobacter cloacae
atgccagcccagcgtttcaccggcagtcggcttcgccatccgcagccacagatacccaaagccctgctctgttccttcgcggtcgaagtccggctttacccggtagcgaccctgctcatccaggtgcgcgtagatatcatttttctcccggctctcaatccgggccggaagcgtacccgggatgaccggacgcgggacttctacaggacggaagcagtaacgctcggtgtaaggcattccccacaccgacacatgcagacgggaatcacgggctccccggtaggtcaccagggtgaggataacgccctctttcagggcagttatgacatcgccctgcggctcaagcacctgtcccggtgcaaggtgggcagcgttgctgaacaggtgaatgcgggccgttctgttcagctcccgctcatgatgaagccgggcccagaacgcgccggattcggtctccggctccggactggtgtcatcacctgcgtcacgataaggcgctga

SEQ ID NO: 140082 - DNA, 558 bp, Enterobacter cloacae
atgttagcgctttttgacggacagacccgttactttctggatatcaacgacagcctggtaaaaccggatgttctgcgatttcggggcagggaagtactgagcgaaccgttcaaatgggatattgagttcacgacccaacaggcgaatatcccccctgaacaggtcctgatgaaatatgcctctttccgggtgcggagcggtaaaaatgtccacagcattattacccgcctggaatggctttccacctcaaaggatcagtcccactaccgtcttacgctcagttcccgcctggcgctcctgggatacacccggcagtgtgcggtatatcagaaccagtccgttcctgaggtggtggagcaagtgctgcgcaaacacgggctggagggacctgattttgagttcagactggagcgcacgtacccgccgcgtgaaattatcacccagtggcgggaaacggaccttgagtttatccggcgcattctgtctgaagtggggatttactggcgtacggtgatggacgacgtgcgcggtctggatacgtacatactggccgattaa

SEQ ID NO: 140083 - DNA, 1287 bp, Enterobacter cloacae
atgaactttccaaccggcgttgaacttcataacggaaaaatcaggatcacgtttacctatcgcggcattcgctgccgcgaagttctccgtggctgggtggttaacagcagcaacatcaagaaggctggaaacctacgcgcggtcatcgtgagtgaaatccagttcggccagttcgactacgcggcgcgcttccctgaatcaaaggcttttaaaaaattctcatcaactaaacggatcggcacgttcaacgatctatgtgaattttttattgatactaaggcgctggaggtctcagaagctacattgcattccattgtctctgtggttaatacccttaagcgtgtcgtgggtgagagcactcgcctggttgatattcagcacgctgatgttctgaattaccgtaaagaattgctgaccggggaggttgttaatccttcgatgcccaatcggagcaaaaaaggtcgcgcgccttcaacagtcaataaacagatggctgttttatcagaaatgctgaagcttgcgaacagaagccagtttatattacacgctccttatgagggagtatcgaggctcaagctatcaaaggcagatcctgatccgcttttacttcatgagtatcatgcgttaattgctctcctccctcgtaagtgggttttaatcatcattgtgtctgtccatacaggaatgagaccaggtgaggtttgtgctctggcatgggaggatattgacctgaagaaaggtgaaattcacgtatcaagaagcctgacgaataaagggttgtttgtgccgcccaaaactgatgccgggataagaacgatcactctgctgaagcctgcccttgatgcgttgaaggagcagtacgaaatcaccggcaattgtcccaggcagcaaatcatcttccatcatcgggagcttggcaaaaccgaaacgcaaaatctacgtttcgttttttctcctgagaggtgtacgtcgggcaagaaccgatatttttcgaagaactcgatttcatatgggtggaaacggggcactaaactatccgggatccgtgaaagaaatccataccagtcgcgacacacctacgcctgctggacgcttatggccggtgctaacccttcctttatcgccagccagatgggccatgaggatgcgcgtatggtgtacgaggtttattcgaagtggatcggcgatatgaaccaggatcaggtcaatatgctgaataatcagatgccgactgcaatgcccccaagacgcccccaaggcattggtagcattaaaaaagtcatttaa

SEQ ID NO: 140084 - DNA, 216 bp, Enterobacter cloacae
atggcgcaaatcatttttgatgaagagtggatggtggcgggaaagctaactgaaaaaacggggctggatgacaggcaaataaaagcttatcgcctcggatgctggattgaaggggttcattttaagcgagtacccgcggtacccggcggagaaagcaaacgcgctttggtctggtacaacttcccgctgattaatagatttattcaggaagcatga

SEQ ID NO: 140085 - DNA, 231 bp, Enterobacter cloacae
atgcctggctccggtcattgccgtggccacgtaactacgggggcggttaacaacctcaaccgtaatttttctcccttggaacttgatggtgtaaaaagtctgcttgacgctgcgaccatgcgcgccatatttctcaaaatggcatttgagcgcggcggcgcatgctggcccgccgatgctgtctcccttgctacggttaatcagacgcacaggagccttcctggtggttga

SEQ ID NO: 140086 - DNA, 1911 bp, Enterobacter cloacae
atgtccgttgagttaaaagtatttggtggggcttatttcccaaaagataaagcattaaaaaaacacccagatttaaaaccgcttgcaaccgcagttaatgcggccacaaaagccatcgccgaggccgttattttcggcaagctggcggctgagcaccctgaacatattgatgattattttaaagtgaaaatctgggagcaccgtgatggtttgccgtgccctgagcttgatgttttctcacctaattttttcgataccgtggctatctggaatgtgaatgcaggtgaaccatctgcggcgccacagcctgaatctgaagaaaagacggaatgggacgacaacaaggcacaggaagaaattaaaatcgttgcgcagctcgaccaggcatcccgagcagcttgtctggcactgttcggcccggtccctggaatcacttctgcgcagtacggccagatcgtcgatctgaagaatgatgatgaacccagctttgcccgcgagctggccgaagcactctccaaagaaaaacgatcactggccctggcaccggaacggcaggagcaattactcgcctgggtacgtgagaacacaaaagacactgtacagtggccggacattaaaaagcagatcgctaaatggatcgatacgccgattgataagcgacctcagcctgttagcactaacaccgaagaaaaccgcacggacactgactccactctgggcgggggaaacaagacagaccgcagcccggatctggcacacaacctgtctacgctaaagatagaggttgctgttgcgattctgggtatgtacgacgagatcgatatttactggatcccgaatagattatttattccggcgaaagccatggcggaagcagaacaggacccccgctttactgcatggtggaaaaaactgcgcggcacccccggcattctggattattcccgcgcagccatcatcgccttgattaaatcagctccggaagaactctggttagatcctgtcgcattgcgtgagtacatcaatcgcgagttggttgaatgtgaccacgcgcacccagatcagaaaacggttgatacggcttgccgcccaaaatctcgtgccaaccctgaggggaacgaacatgatgaagccaaaccgcctgtacctggcgaaactaagccaccagcagtttgccctgccaaagctgcgcagctcgacaaagaactcaatgaggcattcgctcagagctccgcgccagtgcagcaggccacagccacagaccagccgaaggtggagaacctgggcggaggcgtcttctctgtcgatgcactgataaacacctccccctcaaatgaagtcgaaaaacaggaagtgccaccagcgctaagtgttcgcgagattgaaatcgcccatgcattaaacgagctgatgtccgggcgcacaaacatctgtgaccaggatgatatcgaaaacctcatcaccaccacgggtaaagacatcgagcatattttcccgttactgatcgcagatatcaccacgactgaattctgtctgtcgcctgatttcagtgatgaagaagtacaggacgttgctactacgattcttgaacagtggtctgacgatatcagcgttcgtcagaaaatcgctcttgatgcgagcgtggaataccgccgaccggaaccaccaaaatctgtcgtaatcgatccgccggcctttactgcaaagcccaaagcagagccagaaccagcacctgaaacaaacgctccgctttcttctgttacctaccttcagcaactgaccattgcagcactgcagggcttatgttccaacccggcatattgcaatcagtatgaggaattaccggctatggccgccgggcttgcgagcagcgtgatcaaccaccaggaaggctcctgtgcgtctgattaa

SEQ ID NO: 140087 - DNA, 273 bp, Enterobacter cloacae
atgaaagcaactattactaccgtagaattgagcctagtaatcgtaaataaaaaacttgccaccttttattttaacggtgctatttcaggcgtggttcatttgccatcctctgtccctgttaccgttgtgattgatggtggctacatactcggggagttcgattgccctgcctgtgccgttaaacacattagtttgctgcctgtgaaaatcgcagaagcgcagaactcctgtggtatgtcctattacgcccataagcgccaactatttaattga

SEQ ID NO: 140088 - DNA, 255 bp, Enterobacter cloacae
atgcgcggagtcgtcgtacatcatgagcaccgcattggatacatcgttatccgtgaccaaatcggagaattcacagtcgctgagctgctcggtgggtatgacatcgagaaggggcacgtcatatccggtgatttccatagcctcggtggcgaaactttcatgaacgagaccgaagaagaagagattgaggtatttgttcagggttacggcttgtctgaacagcaatcaattctcatgatccgaggcactcgttaa

SEQ ID NO: 140089 - DNA, 396 bp, Enterobacter cloacae
atggacacaaaagaaatcaggcgtaaacgcctagcggcatggttttccagcagaaccctgccggagaaagagaagagctacctttcacagctgatcaacggcaaagcgtcgttcggcgagagagctgcgcgccgtattgaacgagattacggcatggctcccggttatcttgatgaagaacctaagggtgaagagataagatcccctcgcccatttgacgcgcgccatgaagaactgctagaccttttcgacagccttgctgaatgggaaaaagagcagcacatggtaaacctcagggcccaagttaactccatagacaatgagctcaaggcaaggctgaaaggcaaaagcaaacaagaaatccttcagatgctcaaagacctcgaaatagactaa

SEQ ID NO: 140090 - DNA, 258 bp, Enterobacter cloacae
atgcaactctatgactttttgaaagccggtgggccaaagatccgcaagacgctggagcaacaccttgggatatcgaaatcttacctctcacaacttgcaactgggcgggctgctatttcgcccagtcgatgcatcgttattgaaacctttaccgatggaaaagttactcgttctgacatgcggccaagcgattgggctgaaatttggcctgattacaagccaaaaaataacacaacagctcaggaggatactgactga

SEQ ID NO: 140091 - DNA, 453 bp, Enterobacter cloacae
atggaaatcaaaaaactggcatatgagctggagtcatgggcacaggaaaagggctggaagacggttacacagctgataaccccgcatcactttggcgatctgcttcagccattggataacgtgactgaacctgatgagtacgcgcggcgcttgcacaacaacaagcagattattcagcgtgcattccgcaacgatacgcctaactacctgaaacaggctgaagccctgagctatgccatccgcaccgccattgataacgagctggagcagaaggactgcatgcactaccgggcggcaagggttaacaaagagtgtatcgaagccaccaatgcggtgttcaccggcaaaccgcaaccggtaatccgccgcgagactctggaagctatcgacgcgctggcgcagctggtcggcgtcaaagtgaagctggtttcgacttgttcaaacgtagcctag

SEQ ID NO: 140092 - DNA, 657 bp, Enterobacter cloacae
atggaatcagtaatcgacgcactgaaagcaatgggtaaagcaacctacctcgatgtagcagcccgcctggatatcgagcccgtagaggcactgaaaatgcttcgcgagcagaaggaagaagggttgtgcgatttcttcgatgggtcatggtcggtcggtaccgcgaaggagcatcagccgaagcgtatcagacccaagcagccatcgccgctggtggagagggtattggcagcaatgcagggccagggagctatgagcgcaaatcaggtcgctgaaaagctgggtaaaggttcgcgagccctgaatgcatcgcttggtgcgatgtgcaaggacggtctggtcctgcgtcatgtagacgggaaaaacatcacctggagcctggcgaatgaaccggcaatacagccagatcagcaggaacccgcagtagcggaagccaaggccgcatctgctcaggagagcaaaaccctggaagaaattattggggatatccctgctttcgccagccgtccggatgatctgattattccatcatcgcgctatatctcgaccgaaatccgacgcacgaaagcgaagctggctaacctgcagcgtctgcaaggagccgttcgcgagctgcgccgccacaaacatctgctgcaggggctgagaaatgactga

SEQ ID NO: 140093 - DNA, 132 bp, Enterobacter cloacae
atgccaagaccaaaaacgcatgaagagctcacagtgataattaataggattgtcgagctggtgaaagagcaagtgcgcattacaacgaatgacgtcgttaagatgtttgatctgaagcgtttttcgcactaa

SEQ ID NO: 140094 - DNA, 1017 bp, Enterobacter cloacae
atgctagaacgtaaaaaacaaaacgaacaattgactctcgctttagcgaagttgagcacacatatttcttttaattctaaacaatctatgtttgacaataacagggtgatggagacgattcttccaaccttactaaaccagttatatggctatgcactgatggatctaaatacgattaagcataaccatcctgcaatagatttgggggatgctttcaaacgtctagcagtacaaattacatctgatggtagcaaggataagatggttaccacattggataaattcaaagcgcatggcctagataaaaattacgacacgatttggtttttaatcatttcaaatgcgcaaaaatgtgagtttacacgcaagggatttaatatcagtgttaagaatctcgctgatattgcccaagacatttgccagttgccgaaggagcgatttgaaccgatttttgctttctgcaaaaaccaattcaaagactatttccaagaaaatagtgtaagtgtactagctccagctgtagtttcttccagtaatccagcagagaccataactaactttttaactgcaaacgatctggttgacttgtcaacatggcaaacaaatgcaactcacgaagatatacgcaatgacttaatagacttgaaacagcgactatcagagttgaacgacgatcagcgttggtttatctaccaagttatgaaatggtctattgagcatcagaacatgcctgaatactgtatggttcctctttctgttattaaatcaggaaaagatagggccgaccaggaagttgtgcgaactacagtcgaatctcttgaaagtatcaagatggcgtactacgttgaagaaagctatgaattaaaaatgaatgccttttcagtgcattttgtaaataatgaacatatagaagaattcgattacttttcggcaattgcgacgttcttgaaaaaaacagagcaaaaagatcttcttgaccgtatagttgtccattgcgacttctcagttatcgactaa

SEQ ID NO: 140095 - DNA, 339 bp, Enterobacter cloacae
atgtggggttccattatgggcttttcatctccagcaacagattacgcaaagctgacattcactttcaccagtcttcgcggctatgacggcaacttccgaaccatcgaaacatcagccgggtacgcaattataaacgttgccagaaagccggaagcgggtgacttagtcatggttttgttctgtggccgtctggacttagtaaaagtccaagggaaagcgctgataactcaggatggagaggctattgagggcgatgcgctggatgatgcaacagttatgggagtggtgacgcacctcctgaatcgtgtgactgatactgacaggcggcctgtgatttaa

SEQ ID NO: 140096 - DNA, 219 bp, Enterobacter cloacae
atgaaattaaatgaatttgccgcgagtttaaccaaagacggattacttgttttgaatctgtccgatggtgaaataacagactacctcgttaccaataacgctttacgcacgttgattcgccgggaaggtaatcggatttcagcgcgggtcctcagtgatgatgagcggataatcaaccttaagtccctgccagaagcacttaaggttctcaagccgtaa

SEQ ID NO: 140097 - DNA, 297 bp, Enterobacter cloacae
atgaagaaagcagatagcctccatctttcgcgtgtggccgcactaggctgcatcgtgtgcagaaaccagaacctgggcgagacgcccgcggaaattcaccatatccgaaacgggcagggcacaagccagcgcgctgaccatcgaaaatcaattcccctatgccatatgcatcatcgcaacggcggttatggtgtggcgattcatgctggccgccgcgcctgggaaatgaagcacggcaccgaagcagagctgctggtgcaggttctctattttctgggagagcctgccgatgaataa

SEQ ID NO: 140098 - DNA, 366 bp, Enterobacter cloacae
atgcgtgatattaaattgattttagaacgttggggggggtgggccgcaagcgatagttctggtttagattactcacgaatcgctgctggttttaaaggactacttccccaaacaagtaaatcccggctttcatgcactgatgatgatgccctgataatcgaggagtgcttagctcgactacaaaagcgtaagccctatgagtattcgcttttagttgcacattatctttatggcatttcaaaacgtaaaatagcgaaagcttacaagaaagacgagaggctaatacgcatagagattcaaatggctgagggtttcattgaaggctgtttaagtgtattaaatatcaggttggatatggaacattag

SEQ ID NO: 140099 - DNA, 1956 bp, Enterobacter cloacae
atgataactactctcacttctattagtcgttacaaaggttttgaactagagtctccgttcagctttaaagattatatttgtttagttacaggcaaaaatggttctggaaaaacgcgtttattagagagcatatcaaacggtagtattgaagtaaaatttgaagaaaacataattcctacagccagcattttaacaattgatatgacatccagccaaagcattgttttacagtacaaccaaaaccatgacttcgcaaaattagccgccagagggatttttaaccatatatatagagatggctccctgggaacaatcccagaaatatgccccctgcatacgaaccattatggcggaatgcattcctctgaagaattcttatgttttgaaattataaaaagagcagaaaatcttttccaaaaaaatatagataaaatatctatagatgagttagaactttcaattatagtacacaaagaaattgtaaatggtagagcccaacccaaaagcataggaataagccccttaacggtaaattatttccaagcattccgtaaaaatcgcgaacttaagtttttagcaacagaaggcgaaaatgtaaggtattttgatgatacagagattcagaacttaatgggagatgatagtcctgcggtaaaattcaataaaatactccacaacttgttcagaggtaaattttacatctccttaccttcgggtaaaaactcccaccttgattaccaacctcaactaaaattaaaaagcaacgatgaacccatagaaattaacaacctatcttccggtgagaagattatcttctggcttgcagaaaaaacgtttgaaatgacttattccgatcctattaatattttttctaatagatcactcatattaatagatgagcctgatgcacatttacatcctttaatgacgtcagatttatttaattgtttgaaagaacttcatgaatcactaaaggttcggttttgcataaatacacactcacctactaccgtagcactttgtcctaatgaacaaattataaaccttatccatcacactcagaaagacatacaccaagcagatattgttgataaggattctgctatttcccaactgctcgatggcatatctcagctatcaatcaacccaagcaaccaaagacaagtttatgttgaaaacatcagtgataaatacatttaccaaagagttttttccgcactaaaaaatagaactgataatattgatatcaacatcaacttagagtttattaattctggtgctaagattgcagaaagcgaattaaaaaaacatatagcacgagaaatagacgatgaagaaaccataagtatgattgtaggtcatattaacagcggtggtaactgtgaacaggtgatcggggcggtagaaagcttaagtgctgctggtaattctacggtaagaggattgatcgattgggataataaagacagacaacataatgaaaaagtcagtgtatttgctaaacagtacgcttattctattgaaaatgtaatctatgacccaataagtattttcactttttactctgtacatcatttgaaacatgaatcctttcaagatactccattatccaataaaaactataaagaagttatagcaagcgagcaagacatgcaacttgtttatgacatcgtgacagagaaagtactaaaacgaactaatagccgtaaccataagattgaatatatgaataacataactctatttggtgacacagattattttattccacaaaaaggagagaatggccatgactttgaatcaaaagtactatcaaacttcgcagaaataagaaaggcaagaatgtctaacaatccacttgcctttcattttttaacaagtgtgactctaggaatactggactggggttttatacataaagtttttgaacaagcttttattgaacttcagaaataa

SEQ ID NO: 140100 - DNA, 396 bp, Enterobacter cloacae
atgtcggatcctgtttttggcacaacggtaacggcagctggtctgatgggggctagcatgttcggcttggccaccggtatcgattacggtgtggtatttggtgcttttgctggagctgtgttttacgtagctacagctgtaaacattagccgttttaagttagttggatacttcatcacgtcattcatcttcggggtcttaggcgcaccactacttggctcttatttctccaaatggacaggttacagcgacaggccactggatgctctgggtgcggtaatcgtagccgcagttgctattaagttgctgacattcgtcagcagtcaggatttgggggggctgtttggaattctttctcgcctacgtggtggagggaccagcaatggtggcaaatga

SEQ ID NO: 140101 - DNA, 282 bp, Enterobacter cloacae
atggtggcaaatgatccttcagcaatggcgaacgcccttatctgtgcggtgatcgttattactctgatgctttaccagcgtggtggggcgagacaccgtcctctgatgtcactaattgcttatttaacggtgctggtatatgccagcgtccctttcagatacctgttcggcctgtacaaagaatcacactggtttgttgtgctggtcaacgtcctgatttgcgccgccgttctctgggctcggggaaacgtagcgcgcctggttgatgtcctgaggcactaa

SEQ ID NO: 140102 - DNA, 273 bp, Enterobacter cloacae
atgagcatcatcaaaatgattttaggcggtattggtgcgctggtggccgtcgcgctcagcggttttgttgctggcaatattcgaggcagcggaaaggcaaaggcaaaagccaaccagcagcgcactgaagaaaatgcagcggcgaccgttgccgcggcagaacgtaaggcggaagtcacgaaagaggccagcaatgtacagcagactgttaaccacatgcctgataacgatgttgatcgcgagctgcgcacagactggacccgcaagggttga

SEQ ID NO: 140103 - DNA, 375 bp, Enterobacter cloacae
atgcctaaagtaaagaacatgctggatgaaattttggtcggttctcagcaagatacagaaataaatcttgtttatatcgttagttatgatttgacgaacgcggctaatgaatatgcaaaaataaatgcgattttagaggatgctggttattcaagagatacaagcttaggggttgatacaataccagaaaatgtgtttgctggtgaaaaattgcagtcccataggcctggcgaagaagcaacgttgctcaataaagaatcgtcaaggtttttggcggaagtaattgaaattattgataaagaggcgcccggtaagcgcaaaaggctttttgtttctgtgtcgaagaaagatgcaacctcttatcgcttagagtaa

SEQ ID NO: 140104 - DNA, 153 bp, Enterobacter cloacae
atgcaggtcactattgatggtgtcccgtatgcacccgactacgtgatttcatcgtggatcggcattgcaatgacgacatatcagcgcgaagacgttctgaaacgagcgctcgaacagcacctgaggcacctgcctgccagcgcgctggcatga

SEQ ID NO: 140105 - DNA, 498 bp, Enterobacter cloacae
atgaatgaatcctcaagaagattaacaaatttcacgagtgtactattactgatcatcaaagagatccgacttgaaaagagtatgcatcaagctcaactcgcagaaagaatcaacaaaacccctagtgctttggcaaaaattgaaacgggtaaaagccccttgtcaatggaagtatttttagcctactgcgctaatctgtcggtatctccatctgctgttatggccactgcagaacgttatgctagcttgttgaacaacaacggctggactttgcttaacagcgccttagaggagaatgacgatgagcttctcaaagaggctcaagagtactacgcctcatccgcctataaaaatcggattagcattttccaatcagctttaaatggaccgacctattaccctaacggtaatgtcgatggcttagcagtattcctttttgctatatcaccacaatacaaagctcagcaactagcccaacctttgcttagcggaaggtga

SEQ ID NO: 140106 - DNA, 489 bp, Enterobacter cloacae
atggaccaggaaatttccactttaaaactcaatatcaaccagctggcagggattaccggcgtacaccgtcagacggttgccgcgagactgaaaaatgttgaacctgctccaggcagcaacagcaagttaaagctctatctggtgaccgacattctgaccgaactgatgatccctaccgtttcggccaacatcgatgatatgcccccctctgacaggctgtcccactggaaagcagagaatgagaggctgaagtttgaacaggatacggggcagttaatacccgcagatgaagtggcgcgagaattctcattgatggcgaaagccgtcgtcatggtacttgaaacccttccggatgtgctcgagcgcgactgtgctttaacgcctgctgcggtagttcgtgtgcaaagcgttattgatgatctgcgcgaccagatggcggagagggtgcaggtcgctgaaaaagaggaggaagagcctgaggaggactga

SEQ ID NO: 140107 - DNA, 327 bp, Enterobacter cloacae
atggctaagaactatgcgcaggacgggaaaacgatccctctggtaaacagtggtacaaccgacattcagagcggcgatccggttgtggttggcaaacttatcgctgtggctattacggatattcctgtcggcgataccggggacggcattactgaaggggtattcctcctgccaaaagtccctgctgatgcagttactgctggggcgcaggtgtatctgaaggacggcaaaatcacgatcgaagaaacggatgccgttgccgcaggtatcgcctgggaagaggcaggggcaagcaccaccgttgttgaagttaagatcaatgcctaa

SEQ ID NO: 140108 - DNA, 432 bp, Enterobacter cloacae
atgtttctgaaaaaagagaagttcacctggcaaacagaatccctgaccatcttcgagctgtcggcgcttcagcgtattgagttcctcacgtttatggtcgcagaggaaagggccgtcagtgctgacagcgacggcatcagcgatcaggaaatgacggccaggctgattggctcaaatattcgctgcggtgcgcgtttgatcgcgatgtctttgtggcataacgatccggctggcacggatgtggagacgctttatcagcaggtgcttagcggctggccgccggaggcgatcggtaaggcagaaatggaaataaagctgctctccggcatgctcgttccggttgatgatgacaactctgccgatccggatgcctcagcggaggccgaaggcgcagaacccgttacggcggaaaagcccttgccagcgagctga

SEQ ID NO: 140109 - DNA, 3573 bp, Enterobacter cloacae
atgggtgaaaaaatgcagcttcttgaacaagaaaccatcctgcagggtgccaaagggggaggtggcagttcacatactccggttgagcagcctgacgatttgctgtcggtcgcaaaattgaaaatgctcattgccgtttctgagggagaaatacagggcgacctgaccgcacagaacatttttctcaacgatacgccgctggcaaacgacagcggggagtacaacttcagcggcgtgaaatgggagttccgtaagggcacacaggaccagacctacattgccgggatgccgcaggtcgataacgagctggcggtgggcacaactgtcaccaccaccgcgccctggacacgccagtttaccaatctttccctggatgccatccgcatcaagctcagccttccggtccagtatctctataaagataatggcgatatggtgggcacggtcaccgagtatgcgatcgatttgtctacagacggcggagcctggaaaacggttgtaaacggcaagtttgacggaaagaccacgacggaatatcagcgtgaccaccgtatcgatctgccaaaatccacgtccggctggtctgtcagggtcagacgtattacggctgatgcgagcggatcaaattcgaaactggttaacgccttcaaggtgttttcgtatgcggaagtcatcgacagcaagcttcgttatcctctgacggcgctactgtatgtcgaagtggacagcagccagttcaacggcagcgcaccgaaggtgacctgtaagataaagggcaagctgataaaggttccggataactatgatccgataacccgaacctattctggctcatggtccggcggttttaaaatggcctggtccaataaccccgcctggatattttacgatctggttctggatgaaatttacggcatgggcacgcgcgtggatgcatccatggtggataagtgggcgctgtactcaatagcccagtattgcgacgaaatggtttccgacggtgccggtggcaccgaaccgcgtttcacctgcaacgttttcattcagagccaggaggacgcctggcaggtacttaacgatctcgccgcggtatttcgtggcataacgttctggggcaacgatcagatttatgtccaggcagacgtcccgcaggacgatgttgactgggtttataacgcctcaaacgttatcgatgggctgtttacttatgcgggtggctcatacaagaatcgctacagctcctgcctggtgtcctggtccgatccgcagaaccattacagcgataccgttgagggggtctacgattcggcgcttgtagagcgttacgacgtccggcagacgtccctgaccgcaatcggctgcacctcgcaaagtgaagcgcatcggcgcgggcgctgggtactactctccaatgccaaagacggtaccgtatcatttggcgtggggctggacggttatatccctctgcccgctgaaattatcggtgtcgccgatcctttccgttccggcaaggagaacgggggacgcatcagggcggtcaatggccgccagattacgctggatcgagaaatagactacgcggcgaaagaccggctggtggttaacctgcctgacggaaaagcccagacgcgcacaatcagcgcggtgagcgcagataaaaaaacggtgacagtggccaccgcatttagtcaggcacctgtggcgggtgctgtctgggcgatagacagtgataacctcgcaatacagtatttccgggtcacttcaattgcggctaacgacgacagcacaggcggtttcactattacggccgttcagcacgatccaaacaaataccgttacattgatgacggcgttcgggttgagtcgcccccgatcaccgtcacgccgataagcgtcctgtcagcgccgaagaatatcgtggtgactgagagcgatcatgtttcacagggcctgacggtagcaagcctggacgtgtcatgggataaggtagagggcgcaatccggtacgttgcccagtggcgtaaggacaacggggactggataaacattccggttaccagcgcgcagggtttctcggttcagggcatttattcgggcagctatgacgtgcgcgtccgggcgctgaatgcgcaggatacgtcgtcaccatggggatacggtgaaacaacatatctctccggtaaaacgggaaaaccgggtactccgctcaacttcctggcgaccgaagatgtggtctggcatatcgacctgacctggaaatttccggatggctctggcgacacggcctatacagagattcagcgcgccacaactgccgactacgccaatcctgaactgctggtcctggtgccgtacccggctgcagattatcagcatggccccatgccggccggcgttcgccagtggtaccgcgcgcgcctgattgaccgtatcggtaacgccggggactggaccgactgggtcatgggcacgtcctcgatagatgtcagcgaaataaccaatgacattctggaggatatgaaagagtcggaaacgttcaaagacctgatcgagaatgctgtggacagcaatgaaaaaattgctggcatggctaacgatatcaaacaggctaacgacgaactggagcagcaagcgaaagatatcgccaaaaatgcccaggacgtcgggaaggttcagaccagcgttaatgagctttcgagcacggtcgggaatgtttcgtcttcactcagtcagcttgagcagaccgttgcgacggctgataccgccctgggccagcgaatcgacaacatcagcgtttctatggacggcatgacgggcggggtgaagaactcagccattgccattatccagaacgggctggcgcaggtggctgcgcgtaaaaccctatctgcatcggtcgccggcaacagcgcgaatctggaccgtattgatgaggtgattgtcaacgacagggaggcaacggcgcgctcgctgctgagcctgcagacggacgtcaacggcaacaaggcatccatcaacagcctgaatcagacgttctccgactatcagcaggctacggccacgcagataaacggcattacggcgaccgtgaacgggcatacctcagccatcacaactaacgctcaggcgatagccaacgttaatggcgacctcagcgcgatgtacaacatcaaggttggtgtctccagcaacgggcagtattacgccgcggggatgggtatcggcgtggagaatacgccatccggcatgcagtcgcaggttatcttcctggcagaccgcttcgcagttaccactgcagccggtaacagcgtggctttgccgttcgtgatccagaacgggcagacattcatccgggccagcttcatccaggacggcaccattgagaacgccaaaattggcaactatatccagtcgaataactatgtggctggatcggctggctggaagcttgataaagggggaacgttcgaaatcaacggtgtggccgggggcgggaggatgctgatatcgagcactctcattcgtatctatgacagcaacaacgtgctgcgcgtcagaatggggttatggtaa

SEQ ID NO: 140110 - DNA, 297 bp, Enterobacter cloacae
atgccacagggtttgcaatgctgggacggtgcaggtcgggttgcagtggatttaagcgattacgcgatccgttacatgggcagcgcaacggtttcgcttgcttcaggagagacgtcaaaaaatgtcgccttttctggcgcaacgcaggacgggacgtttgtcaccatcgtttcaactggcgtgactgtaaacgagtatttttgccgcgcttataacggcggctttactctctactatctccccacgggtggaagtgccgcaatcactctcaatgttgaggtttataactttcaatga

SEQ ID NO: 140111 - DNA, 642 bp, Enterobacter cloacae
atgagcggattcgaagtttacaacagcgacggaaaactgctggtggattcacaaaacagatcgaccctgttttatgatcagcgcacgctgggtgccgtcactgataaaggcgcctaccgcgttaacagcccgtttggtgatggcagtacgctcggctttacgcagcagtccttctggaatgacgggcgtttaaggtggctgcagctgggcacaaacaaatacggttttcctggtgctgatatgcttgaagataatgctggtagcatgatccgaactacgcgaaatattggcttgcagagtggttatctcgatgtgtttgatagtgccggcagccttatctggagcgctgcatcagcctctaagatgccgagagtcgttgggttctttgacgtaccagctaactatgacctgcagaacaataccttttcagtcagtttaagctttaacccctggattctggttaacaactgccctggaaacctcagcgatgatggtacggttgtcgggtattcaggtgtggtgctcaaatggactggctctcagctgcagggcagatacatttcaaataaccagcgcagctggagccaaacgtttcaggggcggggcttacgaatccccatcgctcagtttgttggcatttga

SEQ ID NO: 140112 - DNA, 363 bp, Enterobacter cloacae
atgaaacttttatttgctgcagcgcttttgctgttggctggatgtacaaacaaacacacagaaaacacattccatatggattacccggtggatgccgctcgtttatcgctgggtggtgatattcacgtaaatatcgactgtgccaccagagaggtggaagttatttcagacagcagcaatggaatattcagccgccacattaataaacggttgagtaatatttgctataaaaaaacggataagctggacgtgatttatcgctttaattcagcaaagggcgtgaaacaagatatgatcgcgactcattacccgcgcgttcctcccgtatcaaatgccaacaaactgagcgatggggattcgtaa

SEQ ID NO: 140113 - DNA, 1269 bp, Enterobacter cloacae
atgttcgcgctctgtgatgtgaattcgttctacgcatcatgcgagacggtgtttcggcctgatttgagggggcgcccggttgtcgttctctcgaataatgatggctgcgtaattgcgcgcagcgccgaggccaaagccgccggaatcaccatgggtgagcctttcttcaaacaaaaggagcttttccggcgtgctggcgttgtttgcttcagcagtaactacgagctgtacgcagacatgagcaaccgggtaatgacgacgctggaagaaatgagccctcgcgtagaaatttacagcatcgacgaagctttttgcgacctgacaggtgttcgcaactgccgggacctgacggaattcggcaaagagatccgcgctacggttctgaagcggacgcatctgacggtcggggttggcattgcccagacgaagacactggcgaagctggccaaccacgccgcgaagaaatggcagcgccagacgggcggggtagtggacctgtccaacatcgaccgtcagcgcagattgttagctctagtacccgttgaggacgtatggggcgtcggtagacgcatcagtaagaagcttaacgccatgggcatcaaaacggctctggacctctcagagcagagtacgtggattattcggaagcactttaacgtagttctcgagcgaaccgtccgggagttgcgcggcgagccttgtttggatctggaggagtttgcaccggctaagcaggaaatcgtctgcagtcggtcattcggcgaacgcgtgactgagtatgagcagatgcgccaggctatctgcagctatgccgcccgtggtgctgaaaaactgcgtggtgagcatcagtactgccgctttatctctgcgttcgtgaaaacctctccctttgcacttatcgagccgtattacggtaacagtgcatctatgaagcttcttacacccactcaggattcccgcgacattatcaacgtcgcggtaaagtgcctggacaaaatctggaaagacggtcaccggtaccagaaggcaggaatcatgcttggggattttttcagccaaggtgtggcacagttgaacctttttgacgagaacgcgccgcgggctggaagcgaaaggttgatggaagtgctcgatcatctgaatgctaaagacgggaaaggaacactctactttgccgggcaaggcatacagcagcattggcagatgaaacgcgagatgctttcacctcgttatacaactcgggtttcagatatcctccgggtcaaatag

SEQ ID NO: 140114 - DNA, 957 bp, Enterobacter cloacae
atggaaagttatgtttttgaacttcaaggaaatgtatttggtttctttcaaagagatgaagaagactgctatatatatatagataacggtatgttttcgaaaatacattattgtaattggagtcattgggttcgtggccaggaaaactataaagaaaattatcccgaacatcaagagaatgaagaaatagctaacgctataggttacttttcatggcaccaaatctatgaccaatgtaaattccgaccagtcgtcattaacatagctagaaaaaacaaacaaggcgagtacttctcaagaataaataaaggggagcctgccttattttcacaacaagctattggcaaacaaatacttgacgagataataactttcaataatatttgcaactcattaaatgagttattcaattacattgaccctgacactgaaaacctaaattgctatggtagtaaaattcgtgaaatattgattcttgcctgtaccgaagtagaatacctcttgcaaaatctccttgtagacaataattacgaggccatcaataacagatacactacaaaagactatgttaaaacactagacatattaaaattaaacaaatattctaccatattatctttctatccagacttagaaaactggagcccatttaaagaatggaatccttcaaaaccaaccaccagcttagcatggtatgattcatacaatgcagtcaagcataatcgcggagctaataagcataaggcgacacttaaatcagcaataaatgccgtttcagctttacatatattgctcgaatctcagtatgggaaagaaatctttaatagcccgatgcagtccaccttttctagcatttttaaaacagtccaatatcctacattcacagttaacgaacttcaatgccctttgattgataacggtaaattagtttggaatgagcagataaatttattttaa

SEQ ID NO: 140115 - DNA, 1170 bp, Enterobacter cloacae
atggtgggggggcgtgatagaatacgccgccttgaagttcaatgtcgtgagtattccatgtcagataacagccagaaaaaagtgatcgtcggcatgtccggcggtgtcgattcctccgtttccgcctacctgttgcaacaacagggctataaggtggagggcctgttcatgaagaactgggaggaagatgatggcgaggaatattgcactgctgctgcggatctcgccgatgcgcaggcggtgtgcgataagctgggcattgaactgcacaccgttaactttgccgcggaatactgggacaacgtcttcgagcttttcctggaagagtacaaagccggtcgtaccccgaacccggacattctgtgcaacaaagagatcaaatttaaagccttcctggaattcgccgcagaagatctgggcgcagactatattgcgaccgggcactacgtgcgtcgtgccgatgtgaatggcaaaagccagctgctgcgcggtctggatggcaacaaagatcaaagctacttcctttatacactcagccacgaacagattgcgcaaagcctgttcccggtaggcgagcttgaaaagccgcaggtgcgtaaaatcgccgaagagctggatctgatcactgctaagaaaaaagattctaccggtatctgttttatcggcgagcgcaaattccgcgatttccttggtcgttacctgccggcacagccgggcaaaatcgttaccgtcgatggtgatgagattggtcaacatcaggggctgatgtaccacacgctgggccagcgtaaagggctgggtattggcggcaccaaagaaggcagcgaagatccgtggtacgtcgtagataaagatgtcgaaaacaatattctggttgttgctcagggccacgaccatccgcgtctgatgtccgtcggcctcatcgcacaacagctgcactgggtcgatcgtgagccgctgaagggtacgctgcgctgcacggtaaaaacacgctatcgccagaccgatatcccttgtaccgtcaccgcgctggatgatgaacgcattgatgtgcgtttcgacgagccggttgcggcggtcaccccaggccagtccgccgtattctacagcggcgaaatctgtctgggcggcgggatcattgaacagcgcctgccgctgccggccgtttaa

SEQ ID NO: 140116 - DNA, 1035 bp, Enterobacter cloacae
atgcgtggtgtttatcaggccacgtacttacagactttttctcaaaggctaagtcagacaggtttcaaacagtctgaccctggttctgccttcgatctactggtaggtaccagtacaggaggaatcgttgcctgcgcattagccgctggtattcatcttgagaaggttcttgagctttaccagacttacggtaaagatatttttccacggcagcaacttcgtgcccttccttttgtaggtaaatacgttcgcgggttatgctcgggactagcttcaggtgactttgccttacgcaaagtgcttaaagatacctttggtgaagaaactatcggcaaagtttatgaacgccgagggatcggtttagccatcactactttagatttaaatcgtcactcttcaactgtatttaaaacaccgcatatggctcgcctaaatggacgagacaatgatcgactactggttgatgtatgtatggcaactagtgctgcacctatcctccgatcaattgcacgccttgaggagccaggctctggcggagcaatcgtcgattacgttgacggtgggctctgggctaataatccaggtgctgtaggtatgatcgaagcccatgaaattctccagttcaggggcgagactgaacgccctgtgcacttattcatgctgggcactcttcctgtccagggaggtgaggaacttgccagtagcaatatgttgcaccgtggtgctttgggatggtctggcggtctcaaagcaatcactgcgagtatgaatgcccaggcggttgcttgcgattatatggctcggaaaattgccgagttgagaggcaatggcagttttgcataccgaatgccagctcagtgcccctctggggagctacacaaatatctcgaaaatatggatgacgcacgcccaagagtactaaatgcattagcccggcaggcagtgtccgacgttgatcacgcttgggctctggccgaatcgaataatcacatgaaagaatttcgaaccgccctgtcgattaaatctaatacctaa

SEQ ID NO: 140117 - DNA, 1065 bp, Enterobacter cloacae
atgacgttaattgactgcaataaagaaatgaaagggtatcattcagaaaaagtaactctgtcaaataccgaccagtctgaaatgcgtgaacgtcgtaataatggaagaaaacggctcgaaaatggcctgactcgcttatcccatccattgccaaaagactttagctctcaaggttcttatgcaatgcgcaccatggtgcaggacgatttatgtgattatgacattgatgacggcatttatttcaacaaagaagaccttaaagatggagacggtaattatcttggtgcgcaggatgcacgaaagcgagttcgaaaagcgttgaaagacgacaggctggcatatgacgctgttgttatgacaaattgcgtccgccaactctaccctgatggttatcacatcgatatcccagtataccgttcatttatcacaaaggacttttggggtaacgaaacaactgaatatgagctcgccagtggcgatgagtggactaaatctgatgcccgcaaggttacacgatggtacaacaatgctgttgcttcagagcttaaaactggtcaggctgataccagccaacttcgccgtgttacaaagctgaccaagaaaatggctcgttcccgtacctcatggaaaaagaaaaccacaagcggtatttgtatttcgaaattagttgtagatcattttgtttgtcaggcgggccgagatgatgatgctttacgtgaaacgtggaaggtcatcaaatctcagctgacatatagccagcgcatcgggcatccagtgtttgcagataagaatcttgcagaagaaaacgatgaggccgtaattttctttcaagagtgcctaactgaggcgctaaatgcacttgaagtgcttgaagagtataactgtactcgtgaaaaagccgcgcttgcctgggataaggttttcaacactgactatttcagtacagaaatcgctcaggacaccaacatgtccaaatctctcatgcgcccagctgtcagcgcatcggcatctctatccttccccgctcaccccgtcacacctaataaatcagcggggtttgcatga

SEQ ID NO: 140118 - DNA, 1770 bp, Enterobacter cloacae
atgatgagttggttactggagaatcctgcgcgctttttgcatgagcagaaggagctcaaacgccttgagagtgagcaagaatggctaaatatggctttgcgctttcagcgtgatggtaagttgtcagtagaaataaacatgactattcatggtcgtatttatgaagggaagatgacttatccggactcgtttccagattctccaccctatattcgtcccagagatcgttctgagaggtggtcaaaccatcaatatggtgaaggggggtcactgtgtctgcaatggcgagctgataactggcagccttacataaccggggcggatatggtgctcagtgcatttgagttactgaatacagagcagcatcccgaactaccaaattcagtcccttcagcacatcgtttaacagaaggccagattttgcggggttcgatccggcgcttaatactaaccaccgatatcatggaaacttggagtaatctcccccctctatccagcgccagtttaaaaacagctaccctgttcagttatgacaaggctgcaacattcatcactcagatttccgatgcagagaataatttaaaaaacgtcgaagacgttccacaaagtcttggatcattcacttacttactttcactatccggagaagggtgggtgttcaaaagtgaaggatttgacttgaaattgaaaattaaatctgcagaagatttaattcaggcgatatcaaatgagggatttgatacagtagacattctggttcaggaagataataagtacaaggccagaacgatagtgttactaggccgagatggatcgtcattgagaagtttttaccttaaccctggtgatgaacccactatacacgaattcagtattatttggccttcatccacagagcatagattatcagaggaatcacaacggctgacgaagatcagaatcggaataattggcctaggctcaatgggtagtaaaatcgcaacatcgcttgcccggtcaggaataaagcgatttttgttagttgatgatgattacctagctaccagcaatatagtgcgtcacgagctgtactggaatcatgttggcgaacataaggtagagggcgtaaaaagtgcactttcactgatttctgcaggcattgaagtcgatgcaagtattattcgtctggcgggacaagaatcctcggtatttatggcttccatccttaatgacctttcaaaatgcgatctgcttattgacgcaacagcaaaccccgaggtttttcttcagttatccgctcttgcgaaacgctataagataccgctgtgttggggggaaatctttgcaggagggtacgggggaatgattgctcgttcccgcccgggttatgacccaaaccctttggccgttcgcgacgcattttatagtcatctttcaactcttcctaaagcaccttttgatagcgcccaaaattacgatggaagtgaagaacagcctctgaccgcatatgacagtgatgttggatttatcgctacagcgctaaccaggcttgctattgatacagcattatcaagagatcccagcgtattcccttactctctatatttactcggcatgcgttgtgagtggatttttgagcaaccttttgacacgcatccagtccatgtgtctggagctggatgggataccgatgacaccagcgccagtgaggaggatcatttagctgccctacaagcgatactgcaaatttatgaaggagaggaacgtgctgaacctgatacttccggctga

SEQ ID NO: 140119 - DNA, 462 bp, Enterobacter cloacae
gtgctgaacctgatacttccggctgaacaacaggcagttataatggacgctctatctaaagccgggcgccgcgaaattggtggggttttaatgggggaacatattggacctaatgaatttatagtacgtgaaatgacagtacatcgttgtggtacatttgcctactttgtcagacggtttgaagaagcaatcagtgggttcagtaaattttttaacgaaacaggtcataattatcagatatttaactatatcggtgaatggcactcccacccatcttttgaaccgtaccccagcagtaaggacgacaggtccatgcttcaaattgttcaggataaaaatgttggggcaaacttcgcggtccttgtcattgtaaaatcaggttcgaaaggtgagctaattataactgctcacacctatctcccaaatggaacgaaaagcgaatcagaaataactttgttatga

SEQ ID NO: 140120 - DNA, 285 bp, Enterobacter cloacae
atgactctgtattatatttcggcagttcgcatggatgccagtaaccagcacattgagtatgtgaaaatcatcaaaggtggtaaaggcgaggctgatacaacaatcaattctaggcagtttgttgcagaattgatcaacgacggagcaacaaaatttaaaactatcaccaaaaaagatggtaagtgggttaacggggcagatgttcacgttatcgatgacatttacctttcgacagaccgtaatagtaccaaacgcgataatctgggtaacttgccgaagttttaa

SEQ ID NO: 140121 - DNA, 906 bp, Enterobacter cloacae
atgtctgagaattcaatcccccttccgtggtcgcagcctgtcgcgggcttgcccgattttgcgcactattactcaacggttgatggggttcgtctgcactatgtcagaggcggacagacgcaaggtgaaacaatcgtgctgcttgcaggcttcccgcaaagcgggtttgcctggcataaggtgatggctcttttagccgatcgttacgatatcattgcactcgacctcccgggccagggcgactccgataagccacagtctggctacgatacccttacgcttgccagttcggtttttgggctggtgcagacactcgggatcacaagacattacctggccgcccacgatgtaggtgcatgggttgcctggccgtatgccctgcgttatgaacagcaggtaatcaagctggctctgcttgatgccggtatcccgggtattactttgccggacgccctgcccgcgacgccagaaaaagcctggaaaacctggcacttcgcgtttcatcttctccccgacctgccggaagccttaattagcgggcgtgaagatatttacctcgaatggttcctgcggcgaaaaaccgccagtccgatggcctttagcgatgcggatatcgcccggtatgtccgcctgatgcagcaaaacggggcgctgcgtgccgggctggccccttacagagaagcggcggtctccgctgttcagaaccggacgctggctgaaacgcaaaaacttcgggtgccgctgctggccgtcagtgccgatcagggttcgattgccgatatggctgccccgcttcgccagtttgcagagacggtgagtggcattacgcttgctcattgcggtcatttcattcccgatgaacaacctcaggccctgagtgaggccctggcagacttcttccgttaa

SEQ ID NO: 140122 - DNA, 324 bp, Enterobacter cloacae
atgtcaccacaacttgagttatccctaaacccacctatgtggcccgctttttgctattttattgtatctattgcaatttttgtcctcctgtatctggggaagataaaaatcaatcgactccgcaaataccctctcttcattgcttatacattgctcgtgattgcagtcgctgccgtacagataaacatttttgcgaatgggcatgagtttgtgaatggatttttgcacatagattttgatccttttctatatgactcggtgtactggggttccctggtttttgcgatggtttacctgctggcaatgccgcgcaacaaattctaa

SEQ ID NO: 140123 - DNA, 1653 bp, Enterobacter cloacae
atgcgcctgcccgaacgcgacccttatgctcctcgcgagtggcagcctcatgagaaacccgccctgttgggttcgccctccacgccagaacacagcacgccaaaacggattgcctacggggttgtcggtctgctggtgtgcctgacgggggcgctgggtaatgcggtggtcaccgccaatctgcaaaatctgcagggaaccttcggggcctggtcgacagaaatcgcctggctcccggcggtgtatgtgatgaccaacatctccatcaacctgctgctggtgaaattccgccagcagtatggtttgcgcgccttcacggaaggttttctggtgctgtatgtgctggtcacctttttccacctgtttgtaaacgatctcagctccgcgctgatggtgcgtgccgcacacgggatggtggccgccgcgctcagctccctcggtatttactaccagatacaggcctggcccgcgaaacaccgtctgaaggcgctgaccatcgggattaccgggtcatcgctcgccatccccctcgcccgcctcttttcgaccgagctgctgcagcttgacgagtggcgcgggctttacttctttgagctcgggctggcgctcatttcattggcctgcgtgatagcgttgaaattgcctcctggcgaccggcgcaaggtcttcgagaaaaaagacttcatcaccttctttttactggccccggggatggcgctgctctgcgcggtactttccttaggccgtctttactggtggtttgaagcgccgtggatcggctggtcgctggcattagcgctggtattaatcgtgtctgcgatcgtgtttgaacataaccgttctaacccgttgctgaatacccgctggctgtcgagcggcagcatcgtgcgtctcgggctcattatgctgctgatccgcatcgtgctggcggagcaaaacaccggcgttatcggctggctgcagtatgtcggcctgcagaatgagcagatgacccacctggcgtggtctatttttgccggtattgtctgcgggattgtgaccagttgtttgaccatcaagcccacaaaactggcgtggccgatcattacctcgctggcgcttatgattgttgcctccctgctggacagccagtcgaacaacctgacccgcccggaccagctgatgctcagccagttcctgctgggcttcggcagcgccttcttcctcgcgcccgccatgctggccgccattggcggggtaatcgccgatccgcgcaacctggtgagcttctcggtgatgtttggcatgagccagaacctcggcggcctgctcggctctgccatcctggggaccttccagacctggcgcgagaaataccactccagcatgctggccgatcagctcacaaccctgaacccgctggtgaatgaccgtattcaggcttacaccggcctgtaccggagcctgattggcgacagctcgctgctgggcacccaggccatcacccagctgcaaacggtttcatcgcttgaggcaaatattctggcttataacgatacttatttactgacggcgagcattgccgccaccaccctggtctggattttatggcgcttgctgcgcctgcgcctgactgcccgtatggccctgaagaaggcaacaggcaacaagtaa

SEQ ID NO: 140124 - DNA, 597 bp, Enterobacter cloacae
gtgaatagttctgaattgcttgagcaaataaaggtcgctgtcaatgaggctaaacagagcggtgtacaatctattcctattgataatttgataaactatttagaagaaatagatgtttctgatcgtgctgaagacaatcaagtaacattagagggactaaagcatcaaaactcaactcagcttgaagttttgaaaataaacaacaacttccaaatagaatctttcaaagcggccataagtattggtgcaaacgcatgcaggacctttttgattatgaatggaggcgctgctattgccttactggctttcttaggaaatatatggaataaaaactcctcggaaactgccgctaccgctatagcaactgcactaatgcttttttgcggtggtgtttttcttgcggggttatgcgctggattatcttatttttctcaatgcttatttgcttcatcagaactgggaacaaaaaaatttcaatcatatagcgggcatgcaatcaatatctttgcctgtttgagtggagcgggctcaatggtgatttttgcttatggttcatattccgcatatcaatctatgattgctcagttagtgaaataa

SEQ ID NO: 140125 - DNA, 1500 bp, Enterobacter cloacae
atgactgatgcaattgatgattctaaagtgatggaatacaagatgaggccatttagatgttcttggaagatgttatcacctgagttagttacgcttgcaaaagaacttctttttttaataaggaagtatgggattgaaaagataggtgaacaaaatgccataagcaaacgtaaagagtttatttccgcggtccatgaaggttggaaaatagcccaaaagaaaattgcctttgagataatcattaggttagatgaaatcacatcactacaaaaacaatccaaagactttcacaggcaaaaaaacagcaaggagaaaatgaggtgtttgagagagtctcgactaaaagaatatgagattaaggttttaaggagatttatcgattcgatcgtatgggtattatttaacaacgagcactcatcaatcagacgattatccttgccaaataacaacgataacttatccaaagaaaatattattgactcaatgattgccgccgacttaattaacgaaaatcctacatccatcgctatagtatccgatatgacaacgttcgtccatgcaggcgatttggtcgtttacaaaatgggacaaggcgttagtatcgccgaggttaaatcaggcgataagaacattgatttttctcatgctgcacaattctcagtggaatcacaatgccaaaacttcgatgaacaatttattaaaaatctgaatgaaaaggatgtaaaacattacactcgaacaaaaaagcaatggcagcgattgaccgatattactcagacgatcaacggaggtaccggttatgaccactatcacaagacacaggtcaacattgaagatgataattacatacctgaattttataaccaagctattgtaaattgttggagcgaattaaagtcaggaaaaaattggagcatagatgtaattgacgattgtttgtatgtcggagcctataaaaaatccgaaatggggtttgtaggatttaacacatggatggatggaacaaacttaaaagggcatgtattcaacatctctgacagcatcggccagcatttcgcccagccattatttaacctaaatctccctcatgaattgatagaagacatcattactggggagttaatcattgtattatgccttgattatagaaagtttatgcaattgggaaataagatgcaccctaacttattacacctagcacctgtaccaaaaaagttttcagatcctgatgattttttcatgattgataaagaagctattttttcttataaaaatggtaacacctcatttattggcactggactagaatcccgaataatattcgatcttcaaaagccatcaaatataatagactggatttataaggggagtgatttatataccgcctcccaacaccgaacacaagccctcgatgttcaagcactcagaaggaaattaaaaaaaataaaaaaaggcaaaaacaaaaacgccaaaaaaagtcggcgtttaaatcgtaaatag

SEQ ID NO: 140126 - DNA, 450 bp, Enterobacter cloacae
atgagtgactttaagccttttgacaaccagctcgccgggcttcttgctgccctgtcacccgcagggcgtcgcaagcttgccggtgatattgcaaaggagctgcgcaagtcgcaacagcaacggattaaacagcaaaaagcaccggacggttcaccgtatcaggcgcgaaagcgtaagcctctcagggctaagaccgggcgaataaaacgggcgatgtttcagaagctgcgcgcgagccggtacatgaaagccacaggccgtgaaaacagtgcagtggtggaatttaccggcaaagtgcagcgcatcgctcgcgttcaccagtacgggctaaaagaccggccaaacccgcatgcaaaggacgtgcaatatccagaacgccagttactcggattcagctacgaagataagcggctcattgatactttgataattaaccatcttgcaggttaa

SEQ ID NO: 140127 - DNA, 609 bp, Enterobacter cloacae
atgcctaaagcgagtattctttttaaagaaatgaagaagagagtcgatcgattaaaaagtaagtatatgagtcgacaattacgaaatgaagccaatgatcccattggctacaatttcgatgctctgaatatcgctgcttacaggctattagtacatgctgagattgaagagtatatcgaggcaaaagcaagtgagaaattaagtgagattaaaagtgatgtcgcagccaatggctttaatactagctattataaaaatatactagctatagcttgtttggttggtgaacctctctctataacgaatccttatgatgaagccgagtttaagcaggttgttttaagggtaattttagccgcagaagataaagtaaagaaaaataatgggataaaaaaaggttcttttatcccgcttgcatctttttgtggttatgctgaaagttcgatcgatccaatactgcttactaacttagaaagttatggtaaaaggagaggatctgtggcacataaaggagcacgacatgcaaataacatatctgctccatcctcagaagttagtgatgcggaaaatataatgaatctattgcgttttcatttctatgggttctga

SEQ ID NO: 140128 - DNA, 1140 bp, Enterobacter cloacae
atgtctaatattgatcattatgaattgcaaatcccggacaatcagcaggaagatgaagatgatttaaataatacgatttcatttaaagaatcagtagtaatgaatgctgactggacaattgaaactattgataatcagataaaaaaagggaatatcgatctacagccaagctttcaaaggcgtggtgcttgggatgataagcgtaaaagtagattgatagagtctattgttgttggtatgccagtaccaaatattgtattagccgagcagaaagatcatagaggacgatttattgtaattgatggaaagcaaaggcttatggcaataaatgagtttttagctgatggttttaaactaaaaggattagatattagaccagagcttaatgggcaaaaatatagcgaacttcctagtgaagaccgtgaatatcttgataatagcacattacgctctacagttatacgtagttggaaagatgagaactttctttatgctatcttttataggcttaatagtgggagtcttcctctttcacctcaagagttgcgtaaggctctaattggagggaagttactcgatgaaattgaaacttatttaactcaaagcaatcaattccatgttctttttggtcagtctcttgataaaagaatgcgtgactctgaactagtattacgatttattgcctataataaacgagtcgaagaatatcgtggaaactttaaagagttcctcgatgagattgtagagtattatgaaaaaaactggaataactatcagcaagaagtggttgatgctttaggatccttaaatcttgctttagatactacaattcaaatatttgctgaaaactcatttaaaaaatggcttggcacgcgatatgaaagagttatcaatagagccatatttgattgtatcgctcgtttcttcagcgatcccaatgtttcaacgaaagctcttcaaaataccgccgctgttgagcaagcttttcaagagctttgcatggaccaagagtaccgagactccgtcgaaaagacacctaaaacaacatcagcaacacatactcgaatcgatatgtggggtcagaagttggctaatgttctaggtatgaattacgatggaaatacaagaaggatcttgtaa

SEQ ID NO: 140129 - DNA, 348 bp, Enterobacter cloacae
ttgaacaacgagctcggcgaggcgttagcatttcgcctgcgtatctgctacaaatactgtatatgtatacagtatttgtgcggagggggtatagtaggtcatgacttggattttcaggtggtctatcggggtaagaccttagagtattaccgccccggagggtgggttttcttccagcggcctaaacagtgtggcggcgggtactggttggggcgcacttatgatggcgtttttatgattgagtacgagcgaccggtatcgctaaatgatggtatggactttctggcctcaatgaaaaaaatagaggcaaaaagcgaggagtttgactcgaattattcgcttttttag

SEQ ID NO: 140130 - DNA, 189 bp, Enterobacter cloacae
atgaataatcaacaaactggtgaactaattgccacgctaaaagcagctatcgcattagctaattccttgtctgatacaatctcaaaccgcgaggaagcagaagaaataaacaaactgtcaatccgcttgagagaagcagttcaagctaaaatgccaaccacgcatacgagtattttagaaatcaactaa

SEQ ID NO: 140131 - DNA, 240 bp, Enterobacter cloacae
atgtcaaaaccaataaagaatggctgcattcgtcatatcactaatggtatgcggctgcttatcgatttaaaaagcgtggcagctatttgtgagcgtactgaaacagcagaaaaggttgaggtacaccttacgtcaggggaagtttttgatattgctgtcccgtatgaggaaattgcaggcctttatctcgagtttttagcaaaagaacgtggggtcatggcaaaccccacaactatttga

SEQ ID NO: 140132 - DNA, 300 bp, Enterobacter cloacae
atgtcaaccccgataaatgaaaaaatcaaactcatcagggagtcagaacgattaaatagaaaggaaatcagtgagttaaccggaatagcatatggttcattttgcggatacgaagctggggataaaaaaccgggtgtcgaacccataatgagaatccttcaacatcctcgtttcaccaagtacaccctatggtttatgactgaccaaatagcacctgaagctgggcagattgcaccggctctcgcgcactttgggcagcagacaacaacgttaccccactcagaccagaaaactggctaa

SEQ ID NO: 140133 - DNA, 960 bp, Enterobacter cloacae
atgatgctaaacaccaggattgtcgtggcactgaccacgctcgccgtgacgttccccctctttgccagcacgccggagaattttatctataccagctcgggcgaccttgatgccgccgccgcgcttatcacccgtcgtgatatcggtggcgcgcagatcgtttataactggcgtgcactggagcctgagaaaaacagatatgacttctcatccatagagcgagatctggcgcgcctgaaggccagcaataaaaagctgtttattcaaattcaggatcgcttcttcgaaaaagatgcccggtatgtccctgattatctgatggcagacacgaagtacagcggcggtatttctccgcagtttgacaaccctggtgaagggaaaccaacaggttcaggctgggtagcccggcagtgggatcctgccgtgcgtgaacggtatcaggccttactggcagccctggcgaagcgttttgatggccaggtttatggtgtgaacttaccggaaaccgcgattgaccttgatgagaaaaagccgccgacaggattttcgtgcgacaactattttgccggagaaatggaaaacctcgcctttgcgcgaaaggttttcacgcaatcccatgtcgtacaatatgtgaacttctggccgtgtgaatggaacaatgaccataattacatggggcggctgttcgaatacgccagtgcccataatatcgggcttggcggaccggatattgttcccaaccgcaaggcgcaaatgaaaaacgcctatccgttctttaaccagtataaaaacaaactgccgctggtcgccatggccgttcaagagcccacgctcacctaccgaaacccggctaccggcaagcccttcaccaaagatgaatttgttcagttcgcagaagcgtatctcggcgcagatattattttctggagcacgacgtcgccctggctgacgacgaaataa

SEQ ID NO: 140134 - DNA, 246 bp, Enterobacter cloacae
atgaaagatgaagcggcccatcgggctggatgtatcgatactgtccgtgaggctcttaaagtggataccgcgctgccggagctcgtccaccagaagtaccagattacgcatgctgcgcccaaggcgatccagcttccagactaccagcgtgtcgccctcacccagcattcgcagaagctttttaagcgccggtcggttcgccacagctccgctcattttttcttcgaaaatctgctcacatcctga

SEQ ID NO: 140135 - DNA, 324 bp, Enterobacter cloacae
atgacgtctgcagtttcagacagaattatgaaaaatattggtgacgacctcgatccagaagaggcgctggccaacatttcacggatggagttcaagcacttcaccttcaaagatgatgaaacgcaaaccccacgtcgcggagtgatatcacagcaaattgagacaatcgatccagaatatgtcaaagaaattggcggcatattacaccttgaccagacgcccctgttgctcgatgcgctggctgcgataaaagccctgacaatccgcgtcaggactttagagggagacgctaaagctgaggctcctgcctcatctgctggttaa

SEQ ID NO: 140136 - DNA, 1275 bp, Enterobacter cloacae
atgctttataacaccggtaccatcgccattaacggaaataccgcaaccggcaccggcacgaactggacggcacccgccagccaggttcgcgctggccagacaattatagtcatgtctaacccggtgcagatgtttcagatttcatccgtgaacagcgccacgtcaatgacggttacgccaactgcttccccggcgctgagcggtcagaagtatggaattcttgtttcggacattatctcggttgatgggctggcacaggccatgtctcagctcattaaagagtatgacgagaacattggcgcgtgggagacgttcgccaccacctcagcaaaccagagcatcgccgttaccatcaacggtaccgccgtaacgatccccggcatcggtaaactggcgcagaaagggagcaacggtgcgcttgctattgctgatggcggcaccggggcaacgaaggcggaagacgctcgcacaaacctcggtttgggagacgcggccacaagaggtgtaaccagcgataaaatctcgcctggtgttggtacatcaaatttgccaacagtaggggcgcttgggctcggaaatccaagacatattgataatttttccgatacaagctttatgggtttcggtaggtacacaggcgcaacaataaacaatccgggtggtggaggcgttggcctgcagctccagtatgatggctcaccaacattttcctggttcgtctggtcgaatgacgggcaggcatacattcaaactggtcacacccccggaggccagtacacctggaaaaaagtgtacaccacagccaataccaccactgcttctgatggaaccctgaaagcagcatctccggtcgctcgtattgttgcgagtgctgatgcatgcctgcgatcagatattgctgaggatggtttttcatggtgcggctgcggtacggcgaacgctgaggcggaaggaataactctttctcgcctcgatgcgggggtttacgtgctgaccggttcggcagggctggcgtcagaggggtggcagctactgccgccaatggacccaggcggtatgggggagctgggcctggttgaggcagagcaaaccgacaagggcgaactggtaatccgcctgttcaagcgcaaatacatgttgagcgatgaaggtgagatcatcaaaaccaaaggtaaaccgatggacgtaccggcgaacagctggatcgatgttcgcctggatatgcctgaagattccctatttaaccagcagatgaggcaggagcctcagctttag

SEQ ID NO: 140137 - DNA, 411 bp, Enterobacter cloacae
atgattcccgatatcgcggcggcgctggctgcaaagctcggcgagtgggctgatgctgaagatatcccggttgcctgggaaaacgtgcctttcacaccgccgtctgatgggctctatcttgccgtccatgatatgcccgccacgccgcgtacggtagacctcggtctgcgctgccggacttattctggcgtataccagattaacgtggtggcgccggccggttccgggcgtacctccgcggttgctctggcgggcagagttgctgagttgttccccgaagggctgggaatcgaaggcaatgacttcacctgctggattagcagtcaacctggcatattccgcggtgtccctacatctgtgtcctacacagttcctgtcagcctgaattacagggctgacattatcagctga

SEQ ID NO: 140138 - DNA, 297 bp, Enterobacter cloacae
atggggcttacgccccatcggttagccagcggcgggcgcggtgaaggtgatttcctcactggatttagcaataccatcaacagtaccggtgaccgtaaaggttccggccgtatcagaggtgagtttgaccgtcgccccgcctgcagaaccggtctgagaactggccgtgctcagcgtgccgcctgtggatgtccatgcgacggttttaccggatacaccggagccattcagtgtgtacttcagagaaacagttaccgcatcgatgctgtcagcggttgcggaggttttatccgctga

SEQ ID NO: 140139 - DNA, 267 bp, Enterobacter cloacae
atgtcaaaacaagagttgtttctttggggagtacaaacgatagttttaagcaataacgctaacgtcattcggcaagatccggaaggtaaattagcacatatttatagtgccactggcatttttagcatcatacaagatgcaatctatgcaagcgaaaggattccctctgaactaagcgtcgaagaagctattgaccagttctgcttttatatgcttgaaaatcttcgtgaggatgctgagtgccctcactggttccggcgctattaa

SEQ ID NO: 140140 - DNA, 267 bp, Enterobacter cloacae
atgtcacaaggtagtagatattcaaagatcattccggccgttggtaactggtatcttttcgttcaaggtaaggaagagctgaaaacatcagacgcactctatccgatagctgcgtgggctgaaagtgatgatggtaaaatcgtcggcctgtctaatgttggcaagtaccaaccagcagaactatatagcccccctcctggttttacctgctactacttgcgagaagaagagttgacgaaagagcaaagagatctcatcgggcgttag

SEQ ID NO: 140141 - DNA, 270 bp, Enterobacter cloacae
atgtgggttgaaactttaattggaattgctgcagcagtctttgccgccatcgctggcgcttttggcctgggccatattcgcggaacaagcaaagcagaagcaaaagcagatcagcagcgcaccgaagataacgcagcggcaacggtcgcggccgcagaacgccggttagagacaatgaaagaggccagcaatgtacagcagactgttaaccatatgcctggcgacgatgttgatcgcgagttgcgggacaactggacccgtaagggttga

SEQ ID NO: 140142 - DNA, 477 bp, Enterobacter cloacae
atgcttattaagttttcagattttatccaagcaagagagcaggttgaaaaaagagtccaagaactaactcagatgcttcgcaatgaagcggaagagtttctgacacaatataaacaatccttacatacacctcatgattcttggtctgatgggcaaagagcttacccttacgccagactcatgaacacgagcgacgaaggaatgtatgctcaacaatccaccaaaactcttgcacttgataatcaaaataacgtgtcttttttaatagcaacattaattaacgagaacattcaaggtggtcagtggatttacgttccaattaggatgtctgtaagtaatcgtagcgttattgtcactgttggtaattctgaacaggaggaggttcctcttggtggggaaggtaacggctactacgaagcttgtagtctcgttaaagaagcagttatgagacaaataaaatctaggtttcctaattaa

SEQ ID NO: 140143 - DNA, 225 bp, Enterobacter cloacae
atgaaaatcgagttaaccattgatcgcatgaagaaacttcctgatggagctatacctgcgcttgaatcagaactgctcaaacgactcagcaaacagttcgataattgtcagctaacgatcaagcgcgccagtaatgatggtttgactgttttcggaggcgacaagaaagaggttgagcatatcgtgcaggagacctgggaaagcgcggacgagtggttttattaa

SEQ ID NO: 140144 - DNA, 471 bp, Enterobacter cloacae
ttgatcgaagtaaagcacccatttaccataaagtcaaccaacgcatgcctaccttcaagtaaagctattgtttacaattcaggaatgaacactaaagatacgaaccaaggcctgataacccggctgaccgagttgaacaaaaaaggtttctcaaaaactgagatggccaaggttgctaatgttagtaaacaagcagtcaccggctggttccgaaccgggaaaataagcaagcaatctgcactggcagttgcagaggctgcaggggtctctgttccctggcttttgggtgaggatgttggcgaaaaagacggcttaaaagcggatgagcaaaggctattagaattgtatcgacaactccctgatgacgaggagaaacaaaacttccttcgagttttatctcttcgcttgagagagttggatgccatgtacgagaagtacatgagaggaaggattcgttcgcaagatgattag

SEQ ID NO: 140145 - DNA, 840 bp, Enterobacter cloacae
atgccagcatcggtaattagctttataaatatgaaaggtggggtaggtaaaacaacgctctgtgttggtattgcggagtttatggctaactatcttggaaaaaaagtccttgtgattgatgttgatccacaattcaatgcaactcagtctctcctaggacattatggtcgtgtagatgaataccttgatcaattacaaacaaataaagtgacaatacgtagaatttttgaggttccaacatctattatggatacggcccaagccgtttccccttcagatgtcattacgaaagtttctgaaaacctggatgtgattcttggtgacataaatataatatttgatacttcccaagaatcagtgagaatattcaaaatcaagagatttatcgacgataataatcttcgtgaccattatgattacattttcttggatagccctccaacaatatctattttcactgatgcttctcttgttgcttctgatttttatgtggtccctgtaaaaatcgatcactattcaattttaggcgcgaccagtcttgttagcgtggtgcgaaatgtaagacataatcataacccgcatatcaaacatttaggatttgtgtacaccaacacagacgaagaactgacattaaaaacaagtaaaataaaagataacttcgaagagcaatttaatgcattttatttttttgagaacaagttatcatacgtaagagatttaatggttgggcaacaaggtaatatcccttcttgctatgctaagtcaagaagtgatataagcgcaatttcgacagagttcatgttaagagttagccaactaatggtgagtgataatggataa

SEQ ID NO: 140146 - DNA, 387 bp, Enterobacter cloacae
atggataaagaacaatatagcactctaacaagatttgcccatggcggagtcacaaaggagtctgcgataggtctgtttgtgaccatagtccttgataaagaactgttaaaaacgaatcaagatgtaaaagattttgttgaaagtgttttcaatattatcttattaccgtacataactcgctcaagaactcttatttgtgcaaaaatgtgccgtttcttagtaaacaaagacagaaaagaaataaattactttggcattacgactcgttcatattttgaaaatattttctcaaaagagtatgaacttcaaagtaataaaaaaagaagcacagcgctttcaaatatggaactgtgggtatccagaatgcttaagaaaggcgataactaa

SEQ ID NO: 140147 - DNA, 663 bp, Enterobacter cloacae
atgctttcgaacgatccctatggcaatagagcggaaactgaaagattccgccgcgaggtagcagcgtattttaaagatgaatcagatataaataccctagtgagtgtttttaaacatgttagaatttttagcatgattattgaattgaataataatctgtcacataaatcacatgtaaagggtataatatatgattctttaaattcgattatcgcaattctaaataaaagagaacgatatttacaattaaacctccgctcaatgatagaacatatagcaagaattgctttgaataagacatattctggtggtgactttgatggaactgtgcgcagaagagatttcgattacctaaaaactaatagaagaaatgaaaattggaattacttacataatgtttatattaatgcctgtcattatgtccatttttcaccgcaagcaaacctcaatacctcagcaactttcttacaattgattgttaatgattgccattcatcacaaaaaaatctcattcgtaatttacatagattaacaagttccgtaatggaaacatacatgatttattttcatgatgaggttgcaagcacattttatagatctatggcagacctgaagtatcttcttggcaatagtttgtttactaaattcaaagggctaaactga

SEQ ID NO: 140148 - DNA, 186 bp, Enterobacter cloacae
atgagatttgaccagttatcagaagattcaaagcaagcagcacgcagggtgcttagcgagctgcttttgaaaaacaatgctagcgccgaaagaattgcccaggcattcactgatatggagctctacgaaaacagccccttacgctatgaagtggccaagccaaacggcggcaatcaagcatcctga

SEQ ID NO: 140149 - DNA, 201 bp, Enterobacter cloacae
atgaaacgcttgcttgtgcttacgctggcactactgccagccctcaccgctcatgcagagcgcattacattaactttgacgggcgaacaggagacaggaaacgctaaggtgtgtatctacgaaaacgccaactttacggagacagttacgatcaggccgtcgcagcagtgccgctacacaatgacctttgaagaggaataa

SEQ ID NO: 140150 - DNA, 330 bp, Enterobacter cloacae
atggtagacgatatcgagaaacgagtgatcgagatgttcactatccgtggtggtacttacctgttcagaaaaaagaaatacgacacctacacgccggaatcgagtattcattttgatgtgcagcttgatcaggatgatgttgaagagttggtagaagactattcgaaagagttcaacgttaatatgtcggatttccatcttgaaacctactatccagaagttaagttttcatggaacccgttcaaaaagcctgaacctgtggatgttccagatttcaccattgatatgtttatccagtctgcaaaagctggaagatggttgtacaaatag

SEQ ID NO: 140151 - DNA, 459 bp, Enterobacter cloacae
gtggatacagtcgaggaacttaacggaacatatttctatgcggggcgttcaaacctcaccgcttccgaactctttttcatggtgtttgtcttcaatactgctgatcaattcggcatcaaagatattgccgctgtctatgctctctatgctggtatgaatgaccagactacacggactaaacctggtacggcgattcctggaacgtccagattgtcgaaaggagtacggcgggtatttggaaacagaatgttcccgtttgggttaaagatgccaacgtggattggcggttataccccgtggactgttaagcgtaggatggttaggaagatcggaacgtgggtagggcgaactatccctctcataggtgaggtgattcttgtggctgatgtgtcgcagatcatctacaactcgatcactgaatacaacaccattgcacggggtgacgataagttatggtag

SEQ ID NO: 140152 - DNA, 234 bp, Enterobacter cloacae
ttggcttctattgtccaaaatctgttagttgcgcattttctgcactctttataccctgagattaatcctaatgaatcaagggtgagcatggctatcgggaacagacagattcaaaaggaatcacccaaagaagagttagattgcttgctggatgagcttgcactcacacaggagcaacgggagtttatagaatcaatgcggcaagataacggggataaaaacaacgaggagtag

SEQ ID NO: 140153 - DNA, 381 bp, Enterobacter cloacae
atgaaaataactaatcgacttaaaaagaagttattagtcctcgatggcattgacaatgatttcatagagtatggaaaggaaatatcatgccctgaatgtgacggggtaatagtctactctatcgtaaactcatatgagtttgacacgcttactgaagaggtaaaaagctttttggttaagaaaatgagaggtgtgaagcttgttagtgaacataagaaatatagctacggcgatagccaattagatgtttcgaaaaatacatgttcaaagtgtttgaaagatttttctagtgtattaacgtataaagaagtgcaaccagcacgatgccgggtatatcttgtggggctttttgaaggttatttgaaaaagatcaaactttaa

SEQ ID NO: 140154 - DNA, 483 bp, Enterobacter cloacae
atgcttgaattaaatttaaacccgattaccggtgagctaaacctggatggtctaagtttagagatagatagtgaagaaggattttgtaattgtgacttttaccacaaatcaataaagcacaaagctataaaaaacattatgcctcatcactatcttattgactcaacagtatttttcgaaaaagaatttcaagctattatacgtccaatatgttttggttttccttttatggttcatcttgtcgataaagatagtgaatattataaatccctaaaggactgggatgcgagaactaatattaacatgctaaataactcagtgaaaagcttgtctgattggctaagcctttctctgaatttaggggttcctgatgttacgaaaacagaaatgattagatgggattatgaatggggtcgaatttctgtctcgtatgagacaaagtcattcaaccatggtatatatatagtttggaattcaatataa

SEQ ID NO: 140155 - DNA, 246 bp, Enterobacter cloacae
atgaattacgattcatacaatgaggtgctcgactatctcaaggagttttttaagtcaagagtagagtcagcacgttatttagaaaagctaataactttgattgaagcttctcgctctgacaaaactgtgacaataagagctatttatgaaacgtacatgcagtatgtaaaagaaaatagagaaaatataaaagtcatcgctggagaaaaagaaatgtggattaatttattgaaccattggcaataa

SEQ ID NO: 140156 - DNA, 315 bp, Enterobacter cloacae
atgctgacccggcttgcctgttggctgtccgcccatcatctggcgtcgcgttttattgatgcggcggccgagcggatcgtagcggaagctgacctgcgtctgcgttttgttgcggtcccgtggctggctgatgacttccgtcagacggtgctcgccgtcgtagcggtaatgccagcgggtctggctgttatccttctccatggtgcgggcgtgtatgttacaactccagcgaatgtcgttcagctgcgtcaggcggttgtgcgtgaccttctcagcagagtcttcctgcgggttaccggcagcgtaccgttctga

SEQ ID NO: 140157 - DNA, 480 bp, Enterobacter cloacae
atgaatggaatggtttccaatccaaatcaaaaggtgtttttcaaaacacggacagatgcttcaaaagcatataaattatggaaaaaccaagactggcaaagcttagaatcctttatgggacctggagcatggcctccaaatagagggcttaccaaagctacgccgataacattgaaaccgggaactaaaattgacagatatggtggtcgtatcaacgatgggactttcagtgatacaggaactttcgtatctcctgctggagcatctttcgaaagccgagccttgcctttggatacgctagataaaacatataaaacctacgaagcggttgctccggtacatgcatatgcaggacccgcgataccttggtttgaacaaccaggagggggaactcaatatgcactatctaaatcaataaaacaactattggctgataaaaaattagagagaaataaatttcatgagtctgggaagttataa

SEQ ID NO: 140158 - DNA, 231 bp, Enterobacter cloacae
atgttcctcctccctgaccaaaaacaacaggatcttatgataatgcttgtcccgttccagcaactgcatctcgttttacacggtacgcctaaattttgctacggaatccaaatattctatgtggctgtacctgcaaactctcccatagtttttgtctactaccgccagcggcatcgagagttgccttatcaaaataaaaaccagattgtccaggagcaccaccgtagatga

SEQ ID NO: 140159 - DNA, 1272 bp, Enterobacter cloacae
gtgcgggaagagcgggacgataacccgttcagctggtaccgctggcagtacgacagcgccggacgtctgctcgttcaggacggcacgctgcctggccaggagcagtggcgctgggacgctgccggtaacccgctggaaggttctgctgagaaggtcacgcacaaccgcctgacgcaactgaacggcattcgctggcgttatgatatccacggccgcaccgtggagaaggataacggccaggtccgctggcactaccgctacgacggtgagcaccgtctgacggaagtcatcagccagacgcgggaccgcaacaaacctcagacgcaggtcagcttccgttacgatccgctcgggcgacgcatcagcaaaacgcggcgccagatgctgggcggacagccaaccggcaagccgatcaccacccggtttgtctgggaagggttccgtctgctgcaggaagtgcacggggacgtgccgctgacctacgtctacagcgatcaggacagctacgacccgctggcgcgtattgacggcgttgatgccccggagaccttctggttccactgtcagccgaacggcacgccggagcggatgacggatatcgaagggcaggtgcgctgggaaggggtgaacagcgcctggggcaagctgctgcgggaaagcgagacgcaagtatcaggatattctcagaacctgcggatgcaggggcaatacctggaccgtgagacagggctgcactacaatctgttccggtattatgacccggactgcgggcggtttacgcagcaggacccgatagggctggcgggggggataaacctttaccagtatggtgcaaatagtttaacccgaatagaccctctgggattaaaacaagaggaagttatacgctatatgagtaaagatgaagcgattgcatcagcttctgaacgcgatggtaaaggcggattggtttctaataatcgtggtgaaaaagccatatgggttaatcatgatagccgaccagggtttaaccctggaaatgaaaagtatcgtgccgttatgaccgtaaatgactctggggttgagcttcttaatcaacatagtgatatatcaaaagttgattacaaagaaaccgggctgaaagatggagttctatcaaagagaaatgaacctggagcaaggggcatcggtaaaaatatcctttctcgttttaatgataaaatcacttcattccagattgaaaagaaagatgctaaaggtaattggaagaaatgtggtaagaggattacttaa

SEQ ID NO: 140160 - DNA, 663 bp, Enterobacter cloacae
atgcgcaccacccactccacatttcgtcttgccggaaccacggtccaccaaattaccttcgatcccaccacctttaccgacgccgacctcctctggcttcctcaccaggcccagcttaccgacgccggacgaaaacgaaaaaccgaacaccttgccggtcgcctcgccgccgcccacgcactcagagcgattaacgaacgcgccgttcccggcatcggtcccagcggggaacccctctggccggaaggcatcactggcagcattacccacagcggtacacaggcgatggcggtggttgcgcgctatccgcatacgctaatcggcattgatctggaagccattctttccgaaaacgaagctcacgaaataaaggaaggtgtcatcgacgcacaggaagaaacacgccttttgcagtcgggcaagcctttcgcgcttacattgacgctcgcattcagcgccaaagagagcctgtttaaagcgctttttcctgtagtgagggaatacatgggatttgaatgcgcacgggtcagtgcattgaatgagaaaacgctggtattaaaacttgcccaacccatagggtgttattacgagggattgtgttttaacctggcatggcagattatggacgaaagcgtatgcacgttactcgtcgttcaggaatag

SEQ ID NO: 140161 - DNA, 219 bp, Enterobacter cloacae
atgcgtgaattaaatcaaaatgaaatgagtattgtggccggcggtattggtgccggtaatgggaacggtaatcacagtggcaacggcaatggcaatagtggtggtaatggtggtacctgtaatggcggcaatggcggtaatggtggccgcggcggtaatggcggtaatgggggtaacggcggaagctgcggcggtggcaataatggcggtcgtcgatag

SEQ ID NO: 140162 - DNA, 261 bp, Enterobacter cloacae
gtgaaggtatttctgggggttcgcaatgcgatggtggaagtggaggtaacgggggcgcaggcggtaatggcggccgcggaggtaatggaggaacctgtggttctggaaatggtggtaatggcggtaacgggggacgaggcgggaacggaggtgatggtggaaatggtggccctggagggaaagggggcaaaggcggtaaaggtggtcccggtggacacgatggccgtaacggtagggatggttgagtcgtcgaagagatag

SEQ ID NO: 140163 - DNA, 1275 bp, Enterobacter cloacae
gtgtatcgccaaaaagcggttgatcacaaaaaattgagatggcaaggaagagccatattactgcctgggatccctgtttggttggttgcagggctatctgttttttttgttattgcttttctaaccttcgtcctaacgttcacctatacgagaagaataactgtagtgggagaaataaccacctatcctcgttcatctaacgtttacgccagtgttcagggggtggtagttaaacaatttgtcaaagaaggtcaactgctcaaagtaggtgatgctatttacatgatcgatgttagtaaaagcacacgtagcggtgttgtcagcgataatcagcgtatggatgttgacaaccagctgacacgtatatctcaaatcatgtctcttctccaggaaaataaaaaaaacactcttgagatgctcaaaaaacaaaaagaacaatatagcgctgctctcaaacgttcctcagatattatcacccaagcccaggaaggcctccatgtaatgaaaactaacatggagaactaccggcattatcaggcgcgtggtcttattactcaggatcagctgattaatcagatagccttatactacgaacgacagaataacatgattaacctgtctgcccagagtgaccaaaacgcgttgcaggtgacaacactggagagtcaaattcagacgcaggccgctgaatttgataaccagattcatcaaatggaacttcagcgctatgaattgcaaaaagaacgtctgagtattgatgctggaggcgctattattatccgagccatggctaacgggagggtagattcccttagcgtcaccgtcgggcagatgatcaagccgggcgacagtctgctacaaatcatcccatacaatatcgatcatttctctcttgtcatttgggtaccgaatgacgcagtcccctatcttaatgctggagaccgcgtgaacatccgctatgaagcctttcctgctcaaaaattcggtatgtttggcggagcaatttctgtcatctcacgttccccagcctccccacaggaaatgcaaacctatcaaggggcgcttaaagtggcctcatcttcagctgcaccctactacaaagttattatcaaacctgacagacaaaatattgcgtacgcgggtaaacgtctgagcttgggtaatggaatgcaagctcaaagcaccttatttctggaaaaaaggaagatctatcagtggatgctttcccccttctacgatatgaaaaatagcatagagggcccgataaatgagtaa

SEQ ID NO: 140164 - DNA, 2133 bp, Enterobacter cloacae
atgagtaaacgtgcttttaaaacgcttctcggacaactcgatcttcatctgcgttctcgggttccactagttcatcaaacggaatcctcagaatgcggtttggcatgtcttgcgatgatttgtaatcactatggaaaaaatagcaatctcatctccttgcgacaacaattcaacctatctgcacgtgggacaacactggcaggaatgaaagaaattgctgaacaattaggacttgcatctcgctgtttatccctggaacttcatgaactcaactcgcttaagatcccctgcatcttacattgggattttaaccattttgtagttctggtcggtgtgaaacaaaatcgagtgatcctacacgaccctgccagaggccgtagaacaataaatctcgaggaaatgtctcaatacttcacgggcatagcactcgaagtatggcctggaagtacatttaccgaagagcaagaaagtcaccacttcagcctcaaagcccttgcagcaaaggtacatggtcttaagggtacgctagcgaaaatatttttctattcgctcattattgaatccataaatcttcttatcccgataggtactcagcttgcactggatcatgctattcccgctgcagatgtaggcttactgacactgatttgtattggtctgttactctttactttcttacgcctggcattgagcgcactgcgttcatggtcttcattattaatgactacgctcatcaaagttcagtggcaatccgggttattttcacatttactgcggctacctttgagttattttgagcgacgcaagttaggtgacattcagtcgcgctttggatcgttgaacactcttcgggaaacctttaccagtagtatcgttggagcactcatcgatggaacgatgttgatcggtgttgtcattatgatggcactttatggcggctggctcacaggcgttgttatgtgttttactgctctgtatgtcctcatccgtcttatgacgtacagtacctaccgcgaattatcggaggaaattctcgttagagacgcccgaacccgatcttatttcatggaaacgttgtacggtatagcgaccattaaaatgcaaggttttagtgaaagaagaagcatccactggctgaacctggaaattgacacaattaacactgaaataaaaatcaccaaaatggatttgctttttggtggcgtaaactcccttatcactgcttgcgagcagatagcaatgctatggctgggttcaagactcattatagataacgatataacaattgggatgttcatcgctttcggtgtattcagagaacaatttgccgacagaatttggtcattaactaatttcctgactaagttgcgcatgatgcaccttcataatgaacgtgtggcagatattgcacttaatactcaagaaaagaaaaagcccgatatagaaatattaaacacgatgaaacctgtagccctagaaataaatgcattaagctaccgatatgatgaccattcggccgctgtctttcgtggtctttctttccaggttttagctggagaaagtgtggcaattacaggcccgtcaggtgcaggtaaaacaacgcttatgagggttctttgtggattgtttgaaccgcagacaggttcagtaatgatcgatggtaatgacattcaacaacttggtttaaacaattaccgcaaaataatcgggtgcgtaatgcaggatgataagttattttctggttcaattagagaaaatatttgtggcttcgatgaaaatgccgattacgaatggatggaagagtgcgctcgcgcaagctttatccatggtgctattgtaaaaatgcccatgggatacgatacattagttggagaacttggtgaggggttgtctggaggacagaaacaacgcatctttattgcccgcgcactttatcgtaaacccgggatattatttatggatgaagcaaccagtgccttggacgaagagagtgaaacgtatgttaatcaggctatcaaaaagctaaacatcacccgaataatcattgctcacagacaatcaaccatcgcatctgttgagcgtgtgattcgattaatgccacagacagaacagcatggactgcactctgaatga

SEQ ID NO: 140165 - DNA, 2106 bp, Enterobacter cloacae
atgaaaaattgcgtaagactgagtataaaaccgacattattcataatagtcattttgtttggctgcgtttttttcactcatgcccatgggagaaacgctgatgttgacaacaacgtagatccttatcgctggatggaaaccgacggacaacagacagctcgttggctaagccatcaatcagaccaggcggttaaaatattacacaccctcccctggcgaaatgcactggcgaaaagactaagcatactggttaacacagaaccaactctatctgatatctatgatgcgggcgatcgtcgtttctacctacgatcgacaactgaacatccttatctgcggctttttgtgcaacaaaagggaaaacctgaacgagtggttattacccctcccgtcggatatgggattaatttttttagcccatctccagacggtcactatgtggcttttggattatcgaaaaatggtactgaaactacggcaataaatgtcatcagagttgcggatggtgtcgtattaaaagatgaaatttccgcggttcgctatcctaatgttgtctgggcagcggataaccagtcattttattacagtcttaacgatacaactcatgataccgggcgacaaacatgcggaaaagtctactaccatcatttagggagccaaaatgatgttatgacttttgactggcatactctcccggaattgacacagaagaaatgtgaaaacgttaatttgtttgcatcccccgactctgcatatctcatcgtttatttttcgaaatcaatcagtggttatggcggctatcttttttctgcaaaaaacgatcccgcactcaacggaatattacactgggccaaaatcattgatgttgatgagaatgtttctgcctttgtttgctctggaaagtggatttattttgctaacatgaattcatcatcaggttacgatatctcaagagtcgatctgagtactcctacttcaaaacgagagcatgtgatgagctgggcaaatggtgagctcacccagctaaccaccagtcgggattcactttatattgcataccatgactctggtaccaataaattcgtacgtattccttttgaagacccgaataaacaccagttcattccagcaccagcagatgaaaatgtgagtgcaatattcgccagcaataatcgcaaggatatcctcttcacccgacagagttggctcacgcaacctgctattttccagtataacccggtcaataatcgcatcagagatacgaatttaatatcaccggtaaaaccatcctttacagactatgtgacggaagaaatatgggttctcacagcagataacgtccgcgttccgttaactttaattcatcataaagggattgaacaaaatggtgccacccccatctggttgacagcttacggcgcttatggagtaagtacccttcctgaatttgatatttcccgcttgctctggcttgaacaaggcggagccatcgcaatcgcgcatgttcgaggaggaggtgaactgggtccagcatggcatgaaggaggaagaacgaataagaaagaaaattctattaatgattttattcgttgcgctgaatatctcgttgataataaatacacctcaccgtcaaaattggtgatcagtggtgagagcgcgggggggattataatgggtatggcaatgacgcttcgcccagaactattttcagctgtggcgatagacgtcggaatacttaataccagtcgactggataaaattccaataggcgagatgaattttgaagagttgggttcaccttttacacaatcaggcatgctcaatttgttaaaaatagacgcttatcagcatctggttccaggtaaacgctatcccccggtgttgttaacggtcggcctgcatgaccaacgtgtctccacctggcaaacagcaaaattcgcagcccgattgcagacaataaacaaaccgtggaatgttccggtgctggtattagcttacagtcaaggaggacacaatgcggccacctacgcagaagctgattcaaaattagtcgacactgtgagtttctttatatggaaaaccggtattcattttcagaatcattaa

SEQ ID NO: 140166 - DNA, 678 bp, Enterobacter cloacae
atgaaatccaagagtgcgttagttttagaagaactcagatccaaattacgtactgcatctgtggcacaagtcggtggtttccgccctacagcagacccaattacatcctggtttttaaaaggagtcgctcttccaggtgaagggttgccagtttggaaggggcagccgatgtttccgcttctccagattcgcgtagatgaacttcccgtgattcctgaacaactgaaggggatcgcgctcttagtgctttatcataatatggaaagccatccatttgataaacctcatggcgaggggtggctaatacgagaatacgccacccttgatgggcttgagttattgcctgcaattaacactccatatcgagcatttccggttcggtgggtgagtgtcaatgatgatgctccgggatgggaggatgcttgggatattattgacttgtctgacgtaaacgatgatgaggatgcaagtgatagattctatgatggttttaaccggtacaggggaaccaaggttggaggatatccaatggagatacaacatggtgtggggattcaagattttgtctttcaagtggggtcagaagaaaaagtaaactggatgtgggcggacaatggtatcggctattttcacaaatccccagagggactctggacgttttcatgtcagttttactag

SEQ ID NO: 140167 - DNA, 789 bp, Enterobacter cloacae
atgccatcaattcccattaaaaccgcagatgaacttgcccgccagcgtcatgcaggagcgttgctggcctccgtatttgagatgctggacacgtttattgttccgggagtctcaactctggacatcaatgatcgcgtagaagcttttattgtcaatgagttgcagtcaagacctgccagtaaaggacaatataattacccttacgtcctgaatacttctgtgaatgaagtggtttgtcacggagttcctaaagccaacgaatacctgaaagccggcgctatagttaatgtcgatatcaccctggagaaagggggcctgattgccgactccagcaaaatgtatctgattggtgacgtctctccgctggctcgccggttggtggatataagccaggaagccatgtggctgggcataaaaatggtaaaaccgggtgcaacactgggagacatcgggcatgccatccagacgcatgctgagtccaacggctatagcattgtcagggaatactgcgggcacggtatcggcaaagaaatgcatgaagaaccgcaggtgctgcactatggtaaacctggtacaggcgaagtgttacaggcaggaatggtttttaccatcgaaccgatggtaaatcagggaagcagtaaaataaaaaccaaaaaagacggctggacagtggtcacccgggataaaaaactctcggcccagtgggaacacacggtcgctgtgaccaatgacggttttgaagttttaacacttcgtaaagatgaaatcattccagaaaacatggtttga

SEQ ID NO: 140168 - DNA, 219 bp, Enterobacter cloacae
atgggtattgtcaaaatttcagatttgctgcatgaagacgtgcgggatgcaagcagagcgatgtcacgttcagtgaatgcacaagccgaatactggatccgcctcggtatgatgagtgagctttacccggaacttaactatcaacaaattaaaatgatgatgctgaaatcaggttctgaccgtttaatggaggttatcaatgccatcaattcccattaa

SEQ ID NO: 140169 - DNA, 621 bp, Enterobacter cloacae
atgactgttaacgattccctcttcgcattctctctcgcagcactgttacttaccctgactcccggtcttgatacggcacttattctgcgcaccgcttgtgctgagggcggtaaaaaggcttttcaggctgcgcttggcattgatgctggctgttttgtatggggcgcgctggttgcgttaggtcttggtgctcttctggcggtttcagagatgacttacactgtgctcaaagtttgtggcgcggtctacctgagctggctgggcttacaactgctgatacgtcctcgatcatctttcagtgatggtgatgacaacaacgtttctcaagggaactggtttatcagaggaatgctggggaatgtgctcaatcccaaaatgggcattttttatgtctcttttttgccgcagttcgtacctgccggtcactcacctttaatatggacttttatcctggtcagcatccacgtagcgattgggactatatggtcagtcactctcattttatctacgcattttgtgtcagccgtactgaagaaaagtcgcgttgtccgggtgatggacagagcaacagggggcttgtttttatgtttcgcggctaaacttgctattagcacgagatag

SEQ ID NO: 140170 - DNA, 903 bp, Enterobacter cloacae
atgcttgattatatgcttgagcagttcagcaggctgcctgttgactcctggttactcaggaacggcctgaaagactatattgatgaacagctgctctggtgtgaggacagcaatttttcatcaaatttccctttccgggaaaccggtctgcctcaggatttttttcttcagaaaatcatttcctgcgacggtaatgactacctcaccggacccagatacagaggcggcgatttgaagaagccgttcattgatctggtcgccagctctgctcctctgacccggcgggcaatggcctcaatactggacgtatggcatcccatgggcgcacgttcagtccgcgttctccgacccgtgtctgaggatacgcgcggttgtgccgatcagtttttctatgtcggcggcagcatggatgaaaaaaaagaagctgtaatcagcggccatactgtccgcattgagcgtgcctgccagccgtcagttgagtggtgccttcaggctctggaacttgcctatgccgagacgtattcccgctatcctttcctgaaggataaggtggttcctgcagatgaagaagacattcgcgatgccattaaggacggaaacctgttcatcatagtttatgaggggtcgcgtgccggttttatcatctgtgataacgcgcgccgggcttttatatccggacagtggatcaccgaggagatcgttattccgcgctttcgcggaaagcatgttgcgggttccgctcaacaggccttactttcttttctcagcacgccccgcacaccggcatcgctatggggaaccatcgaaagcagtaacctgccttcaatacgcgccgctgagcatgccgggagaaagcgggtgatggagtatgcttttctgtatggggaagatgtgcatgattaa

SEQ ID NO: 140171 - DNA, 441 bp, Enterobacter cloacae
atggtcttaatcaggacgccaaagttaaaagatataccctctctaaataagctgtttctgcaactaggatatcagacagagggagaacgcttagaaaagcacattgaccaagagtataccggtcttagcatattggttgccgaatcagaaaaagaactttgcggggttattgtggtgaattttataacgcccctgcacgaaaacggcttatgggcattaatttcagctctggttattgacgaatcattgcgaggggcagggatcgggcggaaactcctcatcgccgctgagcaaatcgccctggagaaaggatgttctcaaattgagctttcaagcagtgaaagaagagtcagagcacacaagttttatgaagataatggttatcaggaagttaggaagcgttttgttaaacatctcgccgacgttcccgttgttaattaa

SEQ ID NO: 140172 - DNA, 405 bp, Enterobacter cloacae
atgacagtccaaacaccacaggtagtagcggaaactttttttcatcgtatagccacagcagaagatgtgaatgagatagcggcactggtaagtgaaagcgtcgactgggtggtcgctggaaatactcagttagttccctggattggccgaaaatacggcagaaacggtgtggcagaattctatgcgcaaatacggacacacctctcaccagaacattttgaaataaaagatattctcatcaaagacaagcgactggttgctattggtgagcttgcatcacgcgttaaaaaaacacagaagctgattgaaaccgaatttgtactcgacatgtacatcgaaaatggtcttattacccgctttcgcatgtttgaggatagcttcggagtttccgaggcgtgcctttaa

SEQ ID NO: 140173 - DNA, 918 bp, Enterobacter cloacae
atgcgaccagctcttgattttaataccctgaaagttttcattgcggtggttgaaagagaaagttttgttggggcatctaaagtccttgaaatgccgacatcaaacgttagtcgttgtatttctcagctagaagacagactgaatcttcagctcattgagcgcagcacccgacatatgaaactcacacaagcggggcacctgctctattcccgggcgaagccattaatggatgcacttgagcagactgaaacagaattaacgttgcggcagatgcagctcaaggggccactacgtatctgtattcccaatgaaataggtcctgcactgctgggttctgtgattgccgatttcgcctgccagcacccggatctggaaattagctgtgtcacaaatttgtctggtcttgaatccctgagagacgatctcgatttagccatcattgtgagccgtggccagatggatgacggtgattacatagcccgtcacctggtgacgatcccttgcaccatcgttgcagccccctccgtcattcagcgttatggcataccttctcgtatacagcaatttgaagaattaccctgtattaccacggtaaatgcacttaaaggtgctccctggcagtttgtgaataaaaaggggggatttgagacgataaaggttaaaggccattaccgggtaaacagcggagagatggcaggacgcgcggcggtagcgggtgttggtttcgctattctttcgaaacaggcctgccagccctacatcgacgatggacgactgatcgagactaagttcgaacaaccgccagccccacttcaattgtacgcactttattcagacaagcgttatttgcccgctaaaacacgagcgcttattgaatacatacagcagaatttgagcaatctatccttagcagcctaa

SEQ ID NO: 140174 - DNA, 1209 bp, Enterobacter cloacae
atgtcatcggtcacaacaacgtttaatcataaagccctcatccggatagcggttgtcatggcttttatccagttcacaaatgcgctggaatatatgatgttcaaccctgtttttgcttttatggcagcagacttcgccgttcccgtgtcattctctggctacgtatcgggcatgtacacctccggggcggtcctgtcgggaattatcgccttttactggattggtcgtttcaataagaaacgttttttaatcgccaatatggcactactcggcctactgacacttttgacgacatttacctccagctttagccttctgcttacattacgattctgtgccggattggctggaggcacaactatgggggtgagtatcagtatattgataaatctcgcaccaactaacttgcgagggaaattgttggcgacggtaattgcatcatttccgatgataagcattgccggaatgcccacgatactatttttgtgcgctcattacggttggcatgtcgctttgtggctaaccagtacgctgtgtttgttggcaatgccactgattgtatccatcatccctcaggatacagtctctttcgatacaccccacgcactgcctctcgacgttaatactttactgttcgcttccagtaatgcgctggtacagtttagcccgatgctggtcattcctgttttggtaccattaatgacccaacagctggggggctctcaatacctgctgccatggctgtttttcgccgggggcattgcaggatacctgtcaacaaaaatgacaggtgcgctaactccgcatttttctgcagtgagtctggctacagggtcaactttcgtttttttactcgctttgctgatacctgttatgggctattcgaatccgacgctatttattattttatttctcggtgcatcttacagtcgtctggtttcctcctcggcggtgagtattcagtttcctgatgacaggcaacgagcgggattttcttcattgcagtcatcaataatgtacctgatcacaactgtcgcattttttctgtcttcttttctattatctgggcactccatagcacaacaaaatatgaacacgttgctgggggtatgtgcaatttccgcatcagggttccccatcatcgttatcattctgcaaaagaagctggctaagcgtacgctccagccaaatcatctcatcaatgattag

SEQ ID NO: 140175 - DNA, 768 bp, Enterobacter cloacae
atgactcgaaagacaaagaatctaatcatgggcagatttcaaggaaaacgcatacttataactggtggaactagcggcatgggatttgcaggcgcacagcgcatcgttagtgagggcggtcatgttgccattaccgggctcaatgatgaaaggctgaagcgcgcccgtagcatgctgccgggatcatctcttattctgaaaaacgatgctgccagcgaagcagatataagcgatcttcaggcagcgataagcggctggggttcactcgacggattatggcttaatgctggatttgcagaagtaggttcaccagaatctgtgacagctgatgtttttaaccgcatgatgaatgctaacgtacgtggcccgatgctacagcttgcagctctttcgggatcactcaattcaggtgcgtctgttcttgtcacttcatcttcttctgtatatgaaggtgcggcaatgaccagcctgtatgcagcaactaaaggggcagttgtcgcaatggttaaaagctgggcctctgcgctggctgggcgcggtattcgggccaatacgctggttccgggtccgattgaaacgaactttagacatttcatgccggaggaatcgcgccagcagtttgaaaattttgttgtcagccaggtccctctcggccgggcaggaacagcggaagaagcatctgctgtcgcactctttcttctttcagatgacgcatcctatgtaaccggcagccagtacgccgtagatggcggacttgtgcgttactag

SEQ ID NO: 140176 - DNA, 1548 bp, Enterobacter cloacae
atgactattgaagctgaattgattgagtttcttgatggaaacattaaaagtggagggaataagaaaagagatatagaaataataaaatattactatgggttacatgaatcgccttggccaacattagatgaaactgcaaacaggtttaatataggtactagagaaaggatcaggcagttacttaattgcaagtttagggactatgcaaataaggattctatcacttcattgcgtcatttcgttgatattttacaatcaagagaatactggttgacatcagaatttgagaaacacatcacagctaccaacctaatcagccaacatacacatgtaaaaggaatatttaatttaattgaagatcttaatattgattgtggttatgagttttattcgccggagttaaaagttgccacaagaaattcaattggaattaataatgaaacatgtttgcttaaaaaggctcatatcaatgatcttaggaaactactaaaaaaggcccaagggctaccaggtcgttgtgggatagctaatttaaattatattaaagaagacttgggtgactattacaagcttatacttttcctcattgagaaatctaaaaattcatgggttaaagccaacgggagtgactattggtacattttcgaaaatagagacaatactattattaactattgcgagaagatattcggggttattcataacattgattcctataagttagccacaacatttaggaattctttggatgggcgaagttaccattacccatacccaccagttgatattatacatgcttatcttaaaagctctatatttttggttaacagtagctcagacgttaaatttataggtgaaacgacaaagttaaacgatatcgagaaagatatattaatatttttcgagaaccatacggaaacatcattctcggcattaaagaaaaatttattacaaaaaggttatgggagtgcaaatgtgcttaaaacaacaaatcactcaccacttatttacgttgataaaacccaaggcagaacacgttatacttacagcttgattggtcgaagaaaattattgcaggatgaaattcaagaatttaactcttatgagttgtatcttcgtagattaagagcacttcttgaagatgggactgatgatacaagggaacaagtggcaaggaaagaacaacatattcttcaagagtggttatttaaagataaaactcatgagaattgtgctatttgtgggagagagtttagcattcaaagtttggtgacggctcataaaaaaccgagagctaattgcaatgatgcagaaagattagatccatacattgttatgcccgtatgtttaatgggttgtgactatttttacgaaaagatgtttgtctatattaacggcatggtaatagaggcaggattggagcttccaaacgcaaaaactgaatccagctatatagagaaaatcgttggaaggcgagtcgaccctagatggctgttaggcgagccatctttctttcgctcccctaacatgcaatctccaatcagctga

SEQ ID NO: 140177 - DNA, 156 bp, Enterobacter cloacae
atgagaagaacaaaaccttacctgatctacaagaaaactaagaatcttcgtgtgattcaactcctgttaggtcataagaaactggaaagcacggtccgttatctgggcattgaagtcgatgatgcgttagagatttctgaatcgattgaagtctaa

SEQ ID NO: 140178 - DNA, 354 bp, Enterobacter cloacae
atgaacacatcaccgtggaacaaagaccgtatcatcggccaaaaaagaccacttcagatatctcatatctgggggatccgaatcaggcttgaactggaaggtaaaacgcgcgatttggctctgttcaatatggcccttgatagtaagcttcgaggctgtgatctggtaaaactcaaagtatctgatgttgcatatggtagctctgtttcaagcagagctacggtgctacaacagaaaaccggcagccctgtccaatttgagataaccaaagggacaagagaggctgtttctgcattgataaagcttggcaatttgaatcgccacgggtttaacagacacctcagagtcatttaa

SEQ ID NO: 140179 - DNA, 1422 bp, Enterobacter cloacae
atgaatgagaaaagtattgtcggaacaaccgctggtataattggcagctctgaaaattacgcagacaatgtagtcttgggggcaaccagaggtcatggatttgctgctgaaaaagcgaatcaccttaaggatgtgatgtcagggaaaaatgcaaagattgttggcggtgacaatgtcaaaaatggcgctgacagactggtggatggcattcacatacaaacaaaatattgtaattcaggctcaaaatgtatcagtgaatgttttgaaaatggaactttccgctacttaaacactgatggtactcctatgcaaatagaagtaccgtcagataaatatgatgatgcggtgaaggcaatggagaatagaataaaaaataatcaggtgccaggtataaaagatccagaattagcgaaagatattgtcagaaaaggttcattcacatatgaacaagtaaggaatattgctaaatttggtactattgaaagcttaacttatgatgcaataaacggcattaagttggctggtactgcaatgggaatctctgcggctgtttcattcgctgtcgctctatggaatggcgaagactgggataaagctcttgaatcatcttgctatgctggattaaaagtgggtggtgtagcctgggttagtagcatcattactgctcaacttggcagaacaggaatagaacaaagtttgcgtggcgctacagattggatcgttcagcaaatggggcctaaagctgccgcatggattgcaaatggtttacgatcaggtaatgcgatttatggtgccgctgcgatgaaccacgttagcaaacttttgcgcgggaatatcgtcacaggtgttgtcactactctggttatatcttcggtagattttgttcgaatgtttcagggccgatgctcaggcgctcaattattcaagaatgttacagctactgcatctggagttgctggcggaacaggtggctggatggcaggcgctgctggaggagccgcattgggttcacttattcctttcgttggcacggctgcaggcggaatcatcggggggttactaggtgcgtttgccggtggtacggctgcaaatgctgcagtttcagctattctcgatgagtttattgaggacgatgctaaagaaatgcttaaaatagttgaagaagcatttggtgaacttgcttttaattatctgttaagtgagcaagaggcaaagtcagttattgatggctttaaagagaaggacgtaccagattttttgcgagatatgtatgcatcttctgaccgcccgttgtttgcaaaaaatgaatttgaaccaatgattataaatattgctaagaataggaatgttatttctctacctactgatgctcaactattacaaaaaaccgcaaaaatcatagatacccttgtagcagcttaa

SEQ ID NO: 140180 - DNA, 600 bp, Enterobacter cloacae
atgctttgtatagggacacaactcgaactgtttgacgagctaaaaagtaaactattcatgagtagacgacttaatagagactatcgaaccaaaatcagaaatattccccgacgcctaaaagctcttaaccgctgggctagtacttttcacaaccctgaacgtagcattttctcagaagatgagcattactggaatttcaaaattccagtagacattaatattgttgaggggaaatgcagcacgcttaaaaccaaagcggcttgtgcgcaagctttaattaatgcatgttcaaacctcataacggctactgctggtatgaattacagtcctcgaattaccgctgtcgtatgtcttcctgatatgtttacaagtgaggtctgtctttatcgatccgaagaatactttcaagggtttataactgaaggtcgttctgaaaatggcgcttcggctttgatcaaagatcgtagccttgcagctgagtggggactcgttcttcccgctaacatacaagaaattggtatcactctcgaatattatggaagtgaggaccgtgatgagtggtttacgggagaacgctggtattatggtcaggtgacttaa

SEQ ID NO: 140181 - DNA, 126 bp, Enterobacter cloacae
atgaggggcgtcagcgtactgaagggaaatccgatcgtgagcgctcttgagcaaaaaaaacttaccgcccggcagagaggcggtaaggacaggcaaagtggcataaaagagaggaaaaatacctga

SEQ ID NO: 140182 - DNA, 486 bp, Enterobacter cloacae
ttgcatgcaaaacgatgcacccttgatgatcagatatatattattactctagtatacaatgactatattctttttagttcatttaatggaatagataaaacttgtataagtgggcgggaagatgatgcccgtctaaaaagcataatagaaaatcctctttctaagaaagaaattgtctgtcttgctgaggcaggtcttatccgttactttaatccaagatataatataacttataaaggtagttttcctgcatctgatcaaaaaatactttcaggttgttttgatttagatttttccggtctgtctgtagagatagaattaaatgactcgcattttaggctgtattctgaagatgccagcgtaaaatatcatcatatagcgatgtttaatcttgttgatgagcaacaacgattgggattttttacattaagtaacggagattctgatccaattacgatgactggagttattcctctgacaaagtga

SEQ ID NO: 140183 - DNA, 1068 bp, Enterobacter cloacae
atgttagttaccgctaataaaagaaagcataatccttcaatgtcaaaagttttttatgatagtccagttttttttgacataaatgaagttgaaacggctttgaaaaatctgagggatgaaactagaaactcaaaggcaagtgatagatacatgattgttggggagtcgggagttgctgatgagaaaaaagatagttcaaccacttcagaatgtggatgtcaactgagtgatagtgaacgtattgagaaatactttaattgtaagtttgaattctacaactcaaaagcatcaaatatttcaaaaggtttttacgcagatggcacgttagataagtttatatcacgtttctcagagaagattaatcaagatagactgtcatttcttttttcagatgattcaaggaatcaaaaattcgaaaatgtcataaaaagcttgctaggggcttcagagacactaggaagttataaaaatgtaacaataatagatctgagtggcataccttttgaagtactgagtataaccgtttcattgatatctaggcttatttttgaatatggctacatttacaagaaactcatggaatctcaagataaagatactgatttccctgttctcttggtttacgaagaggcacataagtacgttccaaacagtgacttggtaaagtatagatcttctaaaaaatcaattgaacgtattgcaaaggaggggcgtaaatacggagttactcttcttttggcaagtcagagaccatcagaaatatctgaaactattttttctcaatgtaataattttattgcaatgagattgacaaatcctataggccaaaattatgtgaaaaggttattgccagatacacttggtgctattattgatactctcccatcacttaaagctggtgaagcattagtaataggtgaatcaattgttttaccatcaatagttgcaattgatgaatgtccagaagatcgtcaaccttcctcaaatgatattaaatattgggagatttggaaggaccagtggcataatgtgaatttttctgatgtcaaagaccattggcttaaataa

SEQ ID NO: 140184 - DNA, 147 bp, Enterobacter cloacae
atggctatcgggaagagacagaaccaaaaagaatcacctgaagaagagttagatcgcttgctggatgatcttgaactcacacaggagcaacgagagtttatagaatccatgcggcaaaataacgagaataaaaacaacgaggagtag

SEQ ID NO: 140185 - DNA, 159 bp, Enterobacter cloacae
atgtcaggagacgagatatcaaaatgtgatcccgatcgctccttaaaaccggcgcagatgccacccggccagcaatgcctgattctgtgcatcagcgcccatcgcgttgtgcatatgctcaaaatattatcaaaatacgtcgcaatgcttgagcattaa

SEQ ID NO: 140186 - DNA, 1917 bp, Enterobacter cloacae
ttgaaattccgtaaagatattaatgggttgagggcatttgcagtccttgcagttatgatttatcactttaaacctgagtgggttcctggtggatttgctggtgttgatgttttttttgttatatccggttatctgatgacaggaataatttccactgctattgagtcaaaatgctttaatttaattggtttttatgttgccagagtaaatcgtatcattccggcattaactctcgtatgtcttgcattacttattgtcggatggtttgtattagtacctgttgattatcgtacacttggaaaacatgtcacgagtagtctattctttatatctaatatcatttactggttagaatcaggttattttgatctaaattctcacgagaaattcttgcttcacacttggtctctatcagttgaatggcaattttatcttatttatccattcctttttattggcttacacaaactgttcaatctcaatactataaagaaaatcattgtggggttgacagtcgttttttttctgttgaatgtatatatgacgcaacactggccggatgctgcatattttttattaccatctcgagtttgggaaatgttactagggggcatcgcgtttctttatcctttaaagttagacagccaatataaaaattatatagagaaaacaggtctggctttagtaataatttcattctttgtcattaacagtcatactgcttggcctggttacttcgcgttgttacctgtactcggtgcatttttcataatttggggggatcagggtaacagtattgcaacaggtaatccattatcccaatttttggggaaaatctcttactcagtgtatctctggcattggccattagtagcttttagctattattacgacatcactaatgcttggattgtcggtattccattgtctattatatttgggtatattagttatcgttatgttgagttaattaaatggaataaaattatccaatggaaattgatatttaaggtcaagccattaattttggctataattgttgttgcttgcgcatcgttcacttatgcaaaaaatggtgtgcttagtcgttattctgaggaccggatcgtactcatgaataacctttcgcaatacataactatgcctctacgagaaaacggctattgtttttattcatttaatgattcccagtcgctcaaagttgatcgtcgcgctggaactcaatgttatcttggtgatgctaataaaaaagctgagactctcatctttggcgattcatttgctggtcaatttgatccattgtggaaaaattttgcacaaaaatataatataaatctgcagtcagtttctacaaactggtgtttcccatcattcaatgatgattatacaggtagtaaagcccatgctgcatttaagcaatgcttagaaaatagaaggtttcttaaagacgcaattcaaaacaaaaaatataaatatcttatattagcatccgattggaatgccatttatcaacaaggttatatcaatgacgtgaagtcggttatagattttgcattgacaaataatatcaagattataatgatttctgcgccagttttatatcgaaaaaacccactaaataaatttcagagatatatacttgacggtggagatttgaatataaatgatttgaaattgccggagcatggaaataactatgttcggcaatatttaattgatgatccaaatatcttttatattaatcaagatgatatgttcaattcaaatggattgtttgtaaaagatggttatttagttccttatagcctcgatggtatgcatatttcacttgtaggcgctactgaagcatataagcattttagtcagagtaaagattactcactacttgtaaaatatatgcatttaactaaggattga

SEQ ID NO: 140187 - DNA, 1164 bp, Enterobacter cloacae
atgattgccatgccttggattgttatagttatttgttttacattttgcactgtaatttgcttacttaatcaagcctattcaaaaattctttcttttgctttaacgttgatgtttactctttttgctactctttattattttaatggtgtagattggctgaattattattacgtttttgactatttccaaaaacaatttgatattagatatgatttattgtttaacacttacttatttggcatggcaaatgtaacagacatttttcagatagctatttttattttttattttttttgtttctacttattatataggttgactttatctagtgttattgttcttaacggaccagcctttatcacttgtgtcgttatgctaggcggattatctctagttttggatcagataagacagtttgcagcaattacgattagtttttttgcctgtaatagtttaatgcgagataatcggcgggggttttataagtatcttattattgctgtactatttcactactctgcaatctttgtattattgtttagatttttttatagaatgagaaaggctcagatcgtatttgcaggtggtgctattataggtatatttgtttttttgggcggcgttgtgcttttaaatctgggcctagtcgcaaatattcctgtggtaggtccagaactttatagaaaagctaccctttacacacgagatatcaattcatttaaggcagaaattggtttcggcgcatttgtggatgttttaattattagctattatttggccaagaggaatatggtcgatgcctatctggatagaatgtggtccttagcattcatttgttcctgtttccaccttggtttctactttatgccagcattttcgcgatttaactattttgcttttattcctctggcttatatcttcagtcacgcacttacaacccaaaggaataaaatgggatttataccggttgtagtgatagttagtgcagtctctatgatgataattattgtaacagcaaaaacattctctgatccaaacagaccttcctggaacgagtattctgtagatgcggctttctacaatactaatgaattagatcagttacgaagcaatcgttgcgcaatgcttcaaatcgacgcgagtgatttttgtgcagcatattaa

SEQ ID NO: 140188 - DNA, 1407 bp, Enterobacter cloacae
atgtccaagcaacagatcggcgttgtcggtatggcagtgatggggcgcaacctggcgctcaacatcgaaagccgtggttataccgtctccgttttcaaccgctcccgtgataagactgaagaagtgattgccgagaatccaggcaagaaactggttcctttttatacggtgaaagagtttgttgagtctctggaaacgccccgtcgtatcctgttaatggttaaagcgggtgcaggtactgatgctgctatcgactctctgaaacctttcctcgaaaaaggcgacatcatcattgatggcggtaacaccttcttccaggacaccattcgtcgcaaccgtgaactgtctgctgaaggcttcaacttcatcggtaccggtgtttccggtggtgaagagggcgcactgaaaggcccatctatcatgcctggtggtcagaaagaagcctatgagttggttgcgccaatcctgaccaaaatcgctgcggttgcggaagacggcgagccgtgtgtgacctatattggtccagacggtgcgggccattatgtgaagatggttcacaacggcatcgaatacggcgacatgcaactcatcgcagaagcttactctcttctgaaaggcggcctgaacctctctaacgaagagatggctgaaacctttaccgagtggaacaaaggtgagctgaacagctacctgattgacatcaccaaagatatcttcaccaagaaagatgaagagggtaaatacctggttgatgtgattctggacgaagctgcgaacaaaggtaccggtaaatggaccagccagagctctctggatctgggtgaaccgctgtctctgatcaccgaatccgtatttgcgcgttacatttcttccctgaaagagcagcgtgttgcggcatccaaagtgctgtctggcccacaggctaaacccgccggtgacaaagctgaattcgtcgagaaagttcgccgtgctctgtacctgggtaaaatcgtctcctacgcgcagggcttctctcagcttcgtgccgcttcagacgaaaacaactgggatctgaactacggcgaaatcgcgaagatcttccgtgcgggttgcattattcgcgctcagttcctgcagaaaattactgatgcgtacgctggaaatgccggtatcgcgaatctgctgctggcaccgtacttcaagaaaatcgcggacgaataccagcaggcgctgcgtgacgtggttgcttacgctgtgcagaacggtatccctgtaccgaccttctccgctgcggtggcgtactatgacagctaccgtgctgccgtgctgccagcgaacctgattcaggcgcagcgtgattacttcggtgcgcatacctataaacgtaccgataaagaaggtgtgttccataccgaatggctggattaa

SEQ ID NO: 140189 - DNA, 1167 bp, Enterobacter cloacae
atgaaaataactatctccggaacaggctatgtaggcctatcaaacggcattctgatcgcacaaaaccatgaagtggtggcgttggatatcgttcagtctaaagtggatatgcttaatcaaaagcaatccccgattgtcgataaagaaatccaggaatacctcgccaacaaaccgctgaatttccgtgcaacgacggacaaagaagacgcctaccgcgacgcagatttcgtcatcatcgccacaccaacggattacgaccctaaaaccaactacttcaacacttcaaccgtggaagcggtgatcaaagatgttatcgcaatcaacccaaaagcggtgatgatcatcaaatcgaccattccagtaggcttcaccaaatcgattaaagaagagttgggtattgataatgtcttcttctcgccagaatttctgcgcgagggcagggcgttatacgataacctgcatccatcccgtatcgtgatcggtgagcgttctgagcgtgcggagcgcttcgccgcactgctgcaggaaggagcaatcaagaaagatattccggtactgttcactgactccaccgaagccgaggcaatcaagctcttcgctaatacctatctggcaatgcgcgtggcctacttcaacgagctggacagctatgcagagagtctgggcctgaacacccgccagatcatcgaaggcgtgtgcctcgacccgcgtattggtaaccattacaacaacccgtcgtttggctacggcggttactgcctgccaaaagataccaaacagctgctggcaaactatcaggcggtgcctaacaatttgatttccgcgattgtggatgccaaccgcacgcgtaaagacttcatttctgattccattctcgcgcgtcagccaaaagtggtgggtgtctatcgtctgatcatgaagagcggttctgataacttccgcgcctcttccattcaggggatcatgaagcgtattaaggcgaaaggcgtgcaggtcattatctatgaaccagcgatgcaggaagacgagttcttccactcccgtgtggttcgcgatctggacgctttcaagaaagaagcggatgtgattatctcgaaccgtatggcggaagagctggcagacgtggcggataaggtttatacccgcgatctgtttggtagcgactaa

SEQ ID NO: 140190 - DNA, 1005 bp, Enterobacter cloacae
atgaaatttttggttacgggcgtggcgggatttattggttcaaatgtcagcaagcgcttgttggatgcaggacaccatgttgtggggattgataatctaaatgactactatgatgtcaatcttaagctggcacgtctggatctgctgacatctggcaatttcaccttacacaagctggacttggccgatcgtgaaggcatggcagcactgttcgcccgtgagaaatttgatcgcgtcatccacctggccgcacaggcaggcgtacgctactcgcttgaaaatcctcacgcctatgctgatgccaacctggtagggcacctcaacgtgctggaaggctgtcgccatcataaggtacaacatcttctgtatgcgtcttccagctccgtttacggtctgaatcgcaagatgcctttttcgactgacgattcggtcgatcaccctgtctcactttatgccgcgaccaaaaaagccaatgaactgatgtcgcatacctattcccacctgtacaacctgcccacgacgggcctgcgtttctttaccgtgtacggtccgtggggacgcccggacatggcgctgttcaagttcaccaaagcgatgattgaaggcaagagtatcgatgtctacaactacggcaagatgaagcgtgacttcacctacatcgatgatatcgctgaagcgatcatccgcctgcaggatgtgatccctcaggctgatgcgaactggaccgttgagaccggttcgccagcgaccagctccgcgccgtatcgcgtctacaacatcggtaacagctcgcctgtcgaattgatggattacattaccgcgctggaagatgcgttaggtaaaaaggcagaaaaaaacatgatgcccatccagcccggtgacgtgctggaaaccagcgccgatacgaaggcgttgtatgacgtcattggatttaaaccgcagacctcggtaaaagacggagtgaaaaactttgtcgactggtaccgtaatttctataaggtttaa

SEQ ID NO: 140191 - DNA, 171 bp, Enterobacter cloacae
atgtacacaaaacactatcctcaaccattttgtatgacaagcatatattctcatggcgaatataatatttggtacataataaatttagttatgagcgacaacatgcgccgcatgcgggtttggcaggcgggatgcccttttgcctcacttaagcatcaggaatttttttag

SEQ ID NO: 140192 - DNA, 1311 bp, Enterobacter cloacae
atgggaaatacaacaataccaacgcagagttttcgtgcggtcaatgccgggcaagcccagcgttacattattcctttcgcgttactctgctcactgttttttctttgggcagtcgctaataacctgaatgacattttactcccccagtttcagcaagcctttaccctgacaaacttccaggctggcctgatacaatctgcgttctatttcggctactttgtcattccagttcctgccgggatactgatgaaaaaactcagctataaggcaggtattattaccgggttgtttttatatgccattggtgctgcattattctggcctgcggctgagttaatgaattatacattgtttcttgtcggtctttttattatagcggcggggttaggttgccttgaaactgctgctaacccctttgtgacagtgctggggccagagagtggcggtcatttccgtcttaatctggcgcaaacttttaattcttttggcgctattattgccgttgtgtttggacaaagcctaattttgtctcacgtgccgcatcactctcaggcggtactcgataaaatgacgccagaacagctaagcatttataagcacagcctggtgttatccgtacaaacgccttatatgattatcgtggcaattgtattgttggtcgccctgctgattatgttgaccaaatttccggtccttcagagcgataatcacgtcgacggcacacaaagcacattttctgcctctctttcccgtctggtccgtattcgccactggcgctgggcggtgctagcgcagttctgctatgtcggcgcgcaaactgcctgctggagctacctgatccggtacgctattgaagagatccccggcatgacgccaggtttcgccgccaactacctgaccggcaccatggtgtgcttcttcatcggtcgctttaccggtacatggctaatcagccgcttcgcaccgcataaagtactggccgcttatgccctgcttgccatggtgctatgcctggtctccgccgtattcggcggccatttcggcctactggcgctaacgctgtgcagtgcatttatgtctattcagtacccaaccattttctcccttgggattaagaacctgggtcaggacaccaaatacggctcgtcattcatcgtcatgaccattatcggcggcgggattgtgacgccggtcatgggctttgtcagcgatgctgcaggcaatatcccaacagcagaactggttccggcagtgtgttttgccgtcatcttcatctttgcccgtttccgttcgcaagcggcaacgaattaa

SEQ ID NO: 140193 - DNA, 1419 bp, Enterobacter cloacae
atgaaacaagaggttattctggttctcgactgcggagcgaccaatatccgggccattgccgttgaccggcagggcaaaattatcgcccgtgccgctacggcaaatgccagcgacatcgccatagaaaataacgcctggcaccagtggtctctcgaggccattatgcaacgcttcgcggactgttgccgctcgctgaagacgagtctggcaaactgtcgtgttcgcggcgtcacggtgaccaccttcggcgttgatggcgcgctggtcgatgagcacggcaggctgctctacccaatcatcagctggaaatgcccacgcaccgccgaagtgatgaaaaatattggccgcttgctgtcacctcagcggcttcaggacatttccggcgtgggggcatttggcttcaatacgctgtataagctggtgtggctaaaagaaaatcacccgcagctgttggaacaggcacacgcctggctgtttatctcgtcgctgattaaccaccacctgaccggcgaattcaccaccgacgttactatggcagggaccagccagatgctggatattcaacagcgcgatttcagccatgaaattttgcaggcggcgggtttgccgcgtcggctcttcccacgtctggtggaagccggtgagctcgtcggtaatttacagtctgatgctgcccaatggcttgacctacccgccggtatcccggtgatttccgccggacacgatacccagtttgcgctgtttggtgcaggtgccgcggcggatgaacccgtcctctcctcgggaacatgggagatcctgatggtgcgcagtgcgcaggtcaacacgccgctgctcagtcgctacgtcggttctacctgcgaactggacagccagccagggctgtataaccctggcatgcagtggctggcatcgggcgtacttgaatgggtacgtaaactgctttggaccgaagagacgccctggcaaacgctgattgagacagcccgccgcatacccatggggtccgaaggggtgaaaatgcactgtgatctcctcggctgtcagcatgcaggctgggagggcgtcacactcaacaccacacgcggtcatttttatcgcgctgcgctggagggcctcaccgggcagctggcgcagaatctgcgcacgctggaaaagattggtcacttcaacgcgactgaactgctgctggtcggcggtggcagccgtaacatgctgtggaaccagatcaaagccaatatgctcggcatccccatcaaggtacttgatgatgcagaaaccactgtcgcgggggcagccctgtttggctggtacggggtcggagaatttacgagcccggaacatgccagagcgcagatgcattatcagtaccgctacttctttccggaaaccgaatctgcaccgatcgagggagtttga

SEQ ID NO: 140194 - DNA, 423 bp, Enterobacter cloacae
atgttaaaaacgatttcaccgttaatatcacctgaactactgaaagtcctggccgaaatgggccacggcgatgagattattttttctgatgcccatttccccgcccacactatgggaccgcaggttatacgcgccgatgggctaaaggtcagcgaattgctgcatgcaattatcccgctgtttgagctcgacagctacgcgccgccactggtgatgatggctgcagttgagggtgactccctcgatccccgtgttgaggctcgctatcgcgatgcgctttcacgtcaggcaccctgtccggcaattacccgcattgaccgctatgcgttttacgcacgtgccaaaaaatcctttgcgatcgttgtcacaggggagtgtgctaaatacgggaatattcttttaaaaaagggggtaacgccgtaa

SEQ ID NO: 140195 - DNA, 192 bp, Enterobacter cloacae
atgagtaaaaaacggcaaaaaaaatttgagatagcgtttggcaacactgtcagcaagcagtgcgggagcaagagccagccaccccagcgttatgcactcaaaattaagcggcataccctcaggttgcgcgtgcaacctgagggtcatcacctcaatcagaaaccaaggctgtccagcaggtcgtctacctga

SEQ ID NO: 140196 - DNA, 417 bp, Enterobacter cloacae
atggtaaatctcgagaatttacttttattgcttactgtgggtttgtttctcgttgttgtaattatggatctgtttagttctcgttattttaaaaaacacgaggctgactataatcagctcctttctgactacagacgcaaaggttatgatctcgatctggtaacaaattacgcttctttttttggatcactggcaaactatcaaaaaataatctggtttattcgtcttcataagggcgtgaagatgaagtttactcgcgacaggctggtgcaggaagaagcttataaatatattcaatcattaccagatgaaaaaattgcctggatgctaaaactgcatcgtcgttataaagtgcaggcattaatattcactctatggctcattgttggattattttttgtaaatttcattaaatag

SEQ ID NO: 140197 - DNA, 606 bp, Enterobacter cloacae
atgataaaatacatcaagaagagcctggcattaagtactgtgatcacaagtcaaatggcgactgacgatctccaacggcttgagtctttaaaagatggcttaaaagatcagtttggcgttcctgtaggtgtacatatgacaggcattcccttggctatcagtatgttactcgccattttttgctacgctatgctacaagtttctgtctggatattactatttcgcctgctcggcttacccgaatttaaagtcatgatgggtgtatttcttgcagcagtggcgtattgcatgattgcgatgagtactatgtttctgactgctcgggggtccttggctggatttaaagcgcatatttccgttatcacgctgactggactgatgagcatcgtttattttatctggacgtggagttcacttttattcggctctgttgagaattacaccccgcaaataacctcttttttagggttgggatttttctgcatgaatgtcgtgtggatgaatacatcactcttttaccgttcaatcgccctaacgctacataatcggatttggcgtaaacagctgaaaatagagacaaggcaaatgtcgcgactcaaacgttga

SEQ ID NO: 140198 - DNA, 1986 bp, Enterobacter cloacae
atggcagagaaatcatttaatgtagaagtacagatagattatttagataaggtttctaaatcttctgcattacaagcaatcgctgagttggtatggaatgccttagatgctgatgctgaaaatgtatatgttgatttggcagagtctgagttaggactctcgcatatatttatcagggatgatggtaatggtattccctatgagaatgcagaaaaattgtttagttcactgggcggttcatggaaaaaagacaaggttttatcagaaaggaaatctcgctttttgcacggaaaagaagggcaaggacgttttaaggcattctcaataggtcgatatattgagtgggatactacttatttacttgatgatgtatattatgaatataaaataaaaggaatagctgataataagaaaaagatttcagtttctgataaggttgtatcaagtaaagttaaatcaggaacagttgtttccatattggaattggtgaaaaacttcacctcattgacacctcaaaaactatctgagtttctttccactacacttgctttatatcttagtaaatacccatccgtaaaagtatttgtaaatcgagagcaaatcgatccaacagcacaaattttatttgatacaagctataaattagatgatgtggtttattgtaatgaattacattcatatgagttacaagttattgaatggaagtcagctaaagaaaatgagatttttttatgcgacaaagaaggctttcccttaataagctatgagaagaaagttagagggactggtacatattcttattctgtttatttgaagtctacacatttgaccaaactttcccatgagggtactttgtcgctcatggatttggagccttctttaagtcctgtattaaataaagtcgaaggtttgataaaggaacacttcaggaaaagagatcatgaaaagtcaagggagttaattgataaatggaaaagtgaaggtgtttatccgtatgttggtaaggccgaaaatattgtcgaggatgctgaaagaaaagtattcgatattatggctatcaatgttataaaatacataccacaatttgataatggcgaccttaaacttaagaaatttcagtttaaattactcaagcatattgttgggagttgccctgatgacttgagaactatattggaggaggttctctcgcttcctaaggaaaaacgaactgaattggctgaaatattaaaggatgcctcattgtcagctgttattagtgtttccaaaataattactgataggttgaagttcatatctgggcttgagaatgtattatttcatccggatacaagaaaaatattcaaagagagaagtcagcttcataaaataatggcggataatacatggttttttggtgagtcttttacattgagtgtcaatgataagtcactgactgaagtattaagggtgcatctagaaaagcaagggattgatattccagttgatgagaaagtaacaaggatagatggtagtgtaggtattgttgatttaatgcttactagaagtataggcaaaaactacccagatgagcgtgagcatattattatcgagttaaaggcacctaaagtaaatataggtcaatcagaaatagaacaggttaaatcctatgcgtatgcagttgctgaagactcaagatttaatggtttaaaaacaaagtggaacttctgggttatatcaaatgagctcacaacttatgctctcagagaattaaaacaaaaaaaccttcctgaaggtgcaatatatcaagctgaagaaatgactatttggataaaaacttggtctcaacttattcaagagaacaaacatagattaggttttctacagaatcagcttaatatatcgtatgaccgtaaagatggtctacagttcttaaagcaaaagtatgctgagtacactgagggcgttgtatttgaaaatgaatcacaggatgagtgtatagattaa

SEQ ID NO: 140199 - DNA, 429 bp, Enterobacter cloacae
atgaaacccgaatcagtcattactgcccttcagaacgttgccgctcaacagcttgcagagagcaaccagcacatcactgacaagctgagtgcattttctgcggccagcatgcaggcgctgaaagagattgatgcgtctgttgaacgctgtaagcaggagcggcagactgccctcaatgaaagcgcagaggcggagcaggactggcgctgccgctttcgcaccctgtgcggcaatctcacacctgaaatgaaagctgagcacagcaggcgtattgccagtcgtgaactggccgacgagttcaccggcctgattgcgaagctggagactgaccggacacgcgccatgctgaatgcctgctccaccggcaataaatacctttcagcgcatgaagatgcctttaccgcttacgccggtgcggaatggacttag

SEQ ID NO: 140200 - DNA, 1380 bp, Enterobacter cloacae
atgagtgagaataaaagccgacgcgagtttattagccagagcggcaaaatggttaccgcctgcgccctgtttggcaccactggctccgtcgcgtatgctgcagagactgcgaaaccacgttgtgagacaggcaaaccgatgaacattaccgccagacactactacctggataacgtgctgctggaggccgggttcaacgttgacggcggcgtggcgataagcacccgcaccgaactgaaaacactcgaaattaatgacggcaaaattgtcgccctgcgtgataacaaaagccatggcgatgccacgctgccacactatgatgcaggcagtaagctgatgctgccggcaatgcgcgacatgcatatccacctggataaaaccttttacggcggtccctggcattcccttaaccgcccggcgggcacgaccattcaggacatgatccgtcttgaacaaaaattgctgccagagttacagccctacacgcaggagcgtgcggaaaagcttatcgatctgatccagtcgaaaggctccaccctcgcccgcagccactgcaatattgagccgacatccggcctgaagaatctggaaaatctccaggccgtcttagcgcgccgcaagccggggtttgactgtgaaattgtcgccttcccgcagcacggcttgctgttatcgcactccgaaatgctgatgcgcgaggccatgcaggctggcgcacactacgtgggcggtctggatccaactaacgtggacggtgcgatggaaaaatccctcgacaccatgttccagattgcgctggattatgacaaaggggtggacatccacctgcatgaaaccagcccggcaggcgtcgcggcggtgaactacatggtagagaccgtggagaaaacgcccgcgctgaagggcaaactgaccatcagccacgccttcgcgctggccacgctcaacgagcagcaggtcgatgagatcgccacccgcatggcggcgcagcaggtgaccattgcctctacggtgccgattggcaccctgcatatgccgctgaagcaactccgtgacaagggggtgttcgtcatgaccggcaccgacagcgtcattgaccactggtcgccgtatgggctgggcgatatgctggaaaaagccaatctttacgcccagctctatattcgcccgaatgaacagacgctctcccgcgcgctgggtatcgccaccggtgatgtgctgccgttgaacgacaaaggcgagcgcgtgtggccaaaagcgcaggacgatgccagctttgtgctggtggacgcttcctgttccgccgaggccgtggcgcggatttcaccgcgtaccgcgaccttccataagggccatcttgtgtggggcaccgtctcctga

SEQ ID NO: 140201 - DNA, 1542 bp, Enterobacter cloacae
atgcccaccaaaatcgtcataaaaaagaatacctattttgactcggtgtcattgatgtcggtttccaccaaggccaataaattgccgggcgttgagcaggcttttgtggctatggcgacagaaatgaacaaaggcgttttaaaaaatctcgggctattaacgccggaattagcggatgccaaaaacggcgacttaatgattgtgattaaaggcgaggcggcgaatgacgaaacgctggcagccatcgaagcgcttttcacccgcaaggagagcggcgggagccatgaagcgcgttatgccacccttgccagtgcgaaaacccatcgtcctgagagcaacctggcggtgatttcggtaaacggcacgtttgccgcccgcgaagcacgtcaggcgctggaaaacgatctcaacgtcatgctcttctccgacaacgtcagccttgatgacgagctggcgctgaagcagctggcacaccagaaagggctgctgatgatggggccggactgcggcacggccattatcaacggtaccgggctatgcttcgccaatgcggtgcgtcgcggaccgatcggtattatcggggcgtccgggaccggcagccaggagctgagcgtacggatccatgaattcggcggcggcgtgtcgcagctgattggcaccggcgggcgcgatctgagcgaaaagataggtggcctgatgatgctggatgccatcgcgatgctggacgctgacgacgccacccaggtgattaccctcatctctaaaccgcctgcgccgtcggtggcagaaaaagtgctggcccgcgcccgcacctgccgcaaaccggtggtggtctgtttcctcggtcgtcatcagccgccggctgatgacggcaacctgcagttcgcccgtggcaccaaagaggcggcgctgaaggccgtgctgttaacgggggtgaaaaaagagtctctcgacctgcatccgctgaactggccactgatcgaagaggtgcgtgcccggctgacaccccagcagaaatacatccgcggcctgttctgcggcggcaccctgtgcgatgaggccatgttcgccgcgctggaaaagttcgacgacgtctacagcaacattcaacccgatccggcgaaacggctggacgatatcaacgtcagtaaagcccacaccttccttgattttggagatgacgatttcacccacggcaaaccgcacccgatgatcgatccgaccaaccgcatcagccgcctgttgcaggaggcgcgtgaccccgaggtgggcgtgatcgtgatggactttgtcctgggctttggcgcgcacgaggatccggtcggcgtgatgcttgaggccataaaagaggcgcaggcgatggcgaaagccgataaccgtccgctggcaattctcggctatgtgctcggaaccgaccaggactcaccgtccctgacacagcagtgtcagcttctgaccgaggcaggggtgatctgggcgagcagcagcaccaacaccggattactggcacgtgaatttgtctttaaaggggagactgcctga

SEQ ID NO: 140202 - DNA, 1257 bp, Enterobacter cloacae
gtggggctttttgagcatggtatttttgagaggaaacctaacccgaccatgctgactgataccaagctgcgcaacctcaagccaaaggacaagctctacaaagtgaatgaccgtgacggcctctacgtggccatcacgccagcgggttcgatttcattccgctacaactactcgatccacggcaggcaggagaccatcaccttcggccgctacggtgtcggagggatcacgctagcggaagcccgcgaacggctgggcgaagccaagaagatgatcgccgcagggaaatctccagccaaggagaaggcgcgggacaaagcacgcgtcaaggatgccgagacattcggcgcgtgggccgagaagtggctgcgcggctatcagatggcagaaaagactcgcgatatgcgtcgagctacgttcgagcgcgagcttaagccgaagttcggcaaccagaagctgacagaaatcacccatgaggatttacgggcgctgactgatgcgattgtggagcgcggggcaccggcaacggccgtgctttgccgcgaaattgtgatgcaggtcttccgttgggctatagaacgcggccagaaggttgagaacccggccgatctggtgcgcccgtcgactattgcaaagtttgagccgcgagatcgagcacttacgcccgatgaaatcggcttgatgtaccagtacatggagcgcattggcaccacaccttcgatccgcgcggccgccaagttgctgttgctgacgatggtacgcaaaagcgaactgaccaacgcgacgtggagcgaaatcaatttcaccgaagcgctctggacaattcccaaggagcggatgaagcgccgcaatccccatttggtgttcctgtctaggcaggcgctcgacattttcatagctctgaaaaccttcgcgggcggctcggagtacgtgctgccatcgcgctatgactcggacttgccgatgagcagcgccacgctcaatcaggtgctcacgctgacctatcgtctggcccagaaggaagggcagtcgcttggcaagttcggaccgcacgacttgcggcgtacagccagcacgctgctgcatgaggcgggctataacaccgactggatcgagaagtgccttgcgcacgaacagaagggcgttcgtgccgtctacaacaaggccgagtaccgcgatcagcgccgggcaatgcttcaggattgggcggacatgatcgatgagtggacaatcaggaagccccgcctcaaggactga

SEQ ID NO: 140203 - DNA, 231 bp, Enterobacter cloacae
gtggaaagagaattaaggagagcgagtaaagttctcattagcaaaaagcagttgctggagatgattccactgtgcgagcgcacgatctacaactttgaaaagcagggaaaattccctcagcgcatcgcacttagtagtcgcaaggtcgtgtgggatttagccgaggtcgaggcatggattgatgcgtgcaaacattccggctcggcccctcgtcccggaatgggggcctga

SEQ ID NO: 140204 - DNA, 738 bp, Enterobacter cloacae
atggccatcgcgtgcagcgttgccggtggcgatcttgtagggcttgcccccgcgtgcgctggccgcgtggtctatttcgctggagaagacccggaagtcgcactggtgcgccgtatccatgccattggtcagcacctgaatcagcaggcacgtgaagccatcgcggagaacctgatcatccagtccatcatgggcaaacgtatgaacgtaatggatgaccagcaccttgcgcgcattatcgaattctgtgccggtgccagactgatcgtactggataccctgagccggattcacgaccgggacgagaatagcaacggcgacatggcacgacttgtcgccacgctggagtacgtcgcggcaagcactggggcgtccgtcctgtacctgcatcatgtcagcaagggcagcgcccgcgagggccagactgaccagcagcaggcagcacggggtgcgtccgccctcatcgataacgctcggtggtgcggcttcgtcgccaaaatgactgaggaacaggcgaagagcctcagcgaccgcacctatgatcgacagcccatcggcaacgaccgaagaggtttttttgttcgctttggtgttagcaaacagaactacgacgccaccccgctcgatcaatggtacaagcgccatgacggcggcgtccttgtgccagtggaactcttagcgacgaagaaggagagcactctgcacatcgtcaacggaggcgacgatgagcggtggtaa

SEQ ID NO: 140205 - DNA, 753 bp, Enterobacter cloacae
atgagcggtggtaatgccgtgacccccaccagtactagcgcacaggcgcgggtaatgctctatcagcctagccagcgcccgcgattgcgcgaaggtgattggacagatacatcatttggccgctgccgcgtgacaggcaggctaggccagaggcacgccgatattgtggaagcggtcctgtactgcgcagaacgtcggcgccctgtctctgatggtggcgtagagcttctggttgaccccgctcgggtgagaaaaacactttccgacagccgctacagctttacgcagatcgaaaagctgatggccgagctgcgagcggcgacgatcacaattgagacgcgacaattcgatttcccaataatcgggggattgattgatcacgttatcccatcacccatgacacggcctgatccccttacggggggagagcggaatctatggcgggtgcgccttggcgtagcgctggtgatgctgcttgagcatgacttgagtctgtactacgacccagcccccattgcccgcctgcagcatggcatcagccaagcggtagcgcggcacgttttgagccacaaagtagaaccgacaggcggttggtatcttgacaccgttatcgtggcggttgccggacaggcctcaagccaagccatgcgcgatgcgagacgaaggctcaaggaggagactcaagagttacgggaaattgggcttgtgctcgacggcgaccgcatcaagaaaaacggcgcttgcaacacctga

SEQ ID NO: 140206 - DNA, 321 bp, Enterobacter cloacae
atgatggacattctgatgttcgctggattcgtagtactcgcctcgactttcgccatcggcatgtgggcgctcggccggtggctgcgtagcaagggctacggaccacagctcgataggctggatcgccaatacacggccttgcagcttcgagtaagcccgctcgccttgtcggcttcctaccgcatgttttccggggtgcaggctctgaaccgcctacctttgctgggcagcaagaataacgccgccttgaaccagcaagttttgatggccatccaagccgcgcaggaagcccagaggcaagagaagcgcgacaatcgctga

SEQ ID NO: 140207 - DNA, 1620 bp, Enterobacter cloacae
atgcaacgttcagcactactcgcactcatcggtgcggtgctcttgctttcggccggcactgctgcggcagcaggagatataactcaaggcaatgaaatgaatgggcttttgcggatgctctatgacgccgcaagtgaatggtcaccacgactacagggctatgcactcacattgctggcttcccttgcactaatccaattggtgtggacgttcatgcctttagtcatgaaacaagctgacttcggcgaaatcgtcggcgagttgatccgcttcttcatggctatcggctttttttacgcgatcattgagcattccgttccttgggcgacagccgtagtagacagttttcgcgaagcagcgggcacggctagcggtttgggccgtgcgcttcagccgggcgatatgttcgcggtcgccgtcgatttctcgcgcaccatcgttgagggaatctcagttttctctccgggtaaagcggtcctcatcgcgcttgttggctgtttggttttactgtgcttcgccttcatcgcggcattcatgtttgtgacgcttgtagagtcatacgtcatcatcaacgcctccgtgctgttcttcggctttggtggttcgcaatggacacgcgactttgcaattgctccgctccgcttcgttatcgcagtaggtgccaagctgttcgtcctaacgttgatcgtaggagttatcgtcacgtcggcgaagtcttggttagcagcgtataccaacgacgaagcgtctctgatgacgttggcgggcttggctctggtatgcgcatacctgactaagactattcccgaattgatcggcgggatgattagcggcacttcgatgggcggcggatcagccattggtggcatggcggctgccggtgcggccggtgcggcggcggcgatcgcaaccatcgccacggccggtgcggcggctccggctgctgccggtgctcttggcgcggccgggagtggtagtgcagcgggggcaggtgcggcgggtgccggtgggcttggcggcggcggtctggcaaccgcgatcaattccagctttgccggtggtagtgcgcccgccgcagccgcatcaggtggcggggcggcctctggcctcggcgcgagcactggcggtcaagcggcggccaagggcgcgtcgtcggcaggtgccagagtgggcggcagcggcgcaccacaaacgccgggcgcagcgccgcagcagcctaacagcggcgtacagcaggccgccaagcaggccgggaagtccgcgcaggtcaatgacgacaaagaccagcaagcgacaccaaaagagggagttgtcagctccggcaacgcactttcccaagcggccaatggtggcgcaaagatgctcggcgtgatggcctcgatggcagtgccgggcatggagaacgcgcacggcttgtctcttggcgcaggatctgcgccacctgttcccgacgataccagttcggccgctccagccaatggagcggaatctgccgcagaacctacacaagcggaatctaacgtcatccgtccggtctcggacaacagctctactcccggccgcctcgcctcgctcaacgtgccgggcatgacctcgaataacgaccaaccggagaaataa

SEQ ID NO: 140208 - DNA, 186 bp, Enterobacter cloacae
atgttgatatctaagacttttatcgctgtgctgtgcatcgcttctgctcttggtggtgctgttgtgtccggtgtctttgtttccgtcagcaccaattgcgcgactgctgaacggcctatgccgacagatgccgataaaaacttcgaagcccggaaaaacaactggggtccatctgaggatttctaa

SEQ ID NO: 140209 - DNA, 795 bp, Enterobacter cloacae
atggaaatagaatcgcaaaaaacgtcggcttatgccgcccgaaaattcggtcgaggtgcggcgctcgctctagcaatggcaagcacaggcgttggtgtaagtctctacatggcaccggctccggcctatgccatctactgctcgaactgctcgacgttctatcagcagatgtacgagtacgccgaagcggtcaacacgcaactgaacacggcccagcaactggcaacacagattcagcagtatcaaaacatggttacgcagggtctgagcttgcccaactccatgttcggcagcatcgcggccgacctgcaaagcgtggtgaatatctacacgaagtcgcaggccttgggccgccaaatccagaacatggattcgcagttcaacacgcagtttccgggcttcgactcctacctgaatcaagccgcgaactcggcggcagtcccggcgcgggatcgttatcagaagtggtcagagcaggggcgcgacaacgtgaaaacggcgatggaagcggcgaacctcaataccggcactttcgagtctgaggacgcgcagcttgcccgcatggtttcgcgttcgcagtcggccgctggccggatgcaggcgattcaggcgggtaacgaaatagcctcgcagaacgtgcagcaactgcaaaagctgcgcgatctggtagccacgcaaatcaacatgcagggcaactacatggcccagcaaggcgaccggagggccgctagcgaagccgccgaacaacaattcgaagctcggaagaataactggggaccttcggaggacttctaa

SEQ ID NO: 140210 - DNA, 225 bp, Enterobacter cloacae
atgaagacagctcaccgcatcagcgcattggctaatcaactcaacgaactgcaagcctgcctcggacgagccagcgggcggcctagcaagagcgttatggaagcccagcgcatagcggccgagctggcctcttcactcgaagattggcaccttgaaacgctacacattcctgaaccggagcgtgacctctatcgcgcacagaatccctattacactgcccactga

SEQ ID NO: 140211 - DNA, 210 bp, Enterobacter cloacae
atggcacgaaaaaccctcgcagagcgccgttctgatgccctttctgagcttgaaatggcgaaagccagattagcaaaactcgacaatgaggcagcagaaagaatcggaagaattgcaataaagtcaggattggttaatcttgagcttacggacgatcaagtccgagaggaattcgacaaaatcgtggaaaggatcagcaaggggaattga

SEQ ID NO: 140212 - DNA, 381 bp, Enterobacter cloacae
atggccggtgaaaatgcgattgaggctatcaagccgcattcgcgtgggacacgtccacggcgggagcgaattgaggtttgggtcagcattgatgagaaaaaagagctagccgaaagggccgatcaggcgggattgtcgaatgccgctttccttcgcgctgttgggctgaatctgcctataggttcacgggccgatttggaagctgtccgccagttggcaaaagtgaatggcgacctaggccgagtagccggactgctgaaattgtggctcgctgagaaacgcggtcagggcgcgcgaccgattgacgtggaaacgatgatgatggatttccgcgcaatccaagaggacatgcgggcgctcatggggaggatttccaaatga

SEQ ID NO: 140213 - DNA, 1953 bp, Enterobacter cloacae
atgatcgcgcatcgcatcaatcgtgaacgcaaagcctcaagtccagcccggttaatcaagtatatggtggcggccaagggcggcattgacccgacgagctgggagcgcacggccgattacattctggattccgccaatggcacgaccgagggcgagaaggtcgccagctaccgggtcacgaattgcggcacggatgatccggcagatgccgcaatcttaatccaagccacgcaagcggctaacactaggtcgaaggcggaaaagacctaccactttgtctattccttcccgcccggcgagcagccagaccttgagacgctgcacgccatcgaagacgaactatgcgctgccatcggcctcgatgagcaccagcgtgtatcagcggttcatatcgacaccgataacctgcacgtgcatgtagccatcaacaaggttcacccgaccgggttacagaacatcgaaccctattacgaccagttccgcctgatggaggcatgcgagcgtcttgaggtggagcatggcttgcaaagaacgtttcatggtctagaggcaaagcagcggcatcagaaccgcgacattgagttgttgccagagaaagccccagagcagcgcgatagcctattccgtgaacaccttagaaacgcttacgacctcagcatatcggagcctcccgaagccaaaaccctaaacgggttgcgtaagctgtccgatacccgtctacagaagcagtcagcagataaagcggagccagtccgcatcggcgcgaaggtggccagcgtggaggcgcagtccggcatcgagacactaaccgggtacgcggcccgcgaggtggccccggcgatgcgacaggcgacgagctggcaggagctgcacgacgtagcggccgagcacggcctagaggttcgccagcgcggcgctggccttgttatcggagagccggatttaggcatttgggcgaaggccagcaacgtcggccgcgacctttccatgaagaccctaaccgaccgtcttggcctgttccagccttccgaacggcaggccgaggcgaaggcgaaccgcaagcggtacgagccacgaccccggcggccgggcaacccgacgacagcgggcctgttcaaccagtaccagcgcgagcgacaggcggccattctggcccgccgtcagggcctcgaccagatcaagcgcgagagcgcggctttcaatgcgcaggtgaggcagtggagccagacagagcgaatgcttttgaaggtcgcgggtaaggggccgaccaaacgcctgatgtacggcactatcaaacagcaggccgacgcctcgcgccagaagaaccggcagagcgcagacgctcgccgtcaggcgctgttcaaacagacgacgatgcccacttgggccgactggctgacgcagcaggccgagcgcggcaacgccgaggcgctggccgtcctgcgcgaccgcgaggaacggacacgccgctggaacggggagctactgaccgctgaccgggccgacaaggccaaggctatcgttctcgacaagctcaaacccaaggcccggaaagacggaacgatgacgtacagcaccatcgacggcggcatggtgatcgaccggaagacccacgttcaggcgcagaaagccacgaccggcgcggcgctggttgcgctcgaactagcgtccaagcggttcgaggggcaagccctcatcgtggaaggcacagacgagttccggcttgaagtcgcccagctcgccggtatgcacggcctcaaggtcacgttcaccgatccggcgatggagcagatgcgccgcgagacggccgagcataaggaaatggagaaggcctttcagaccgaggtatacgctccgaaggacaccaaaaagggggaggggagcaagatgccgggcgtggccccacagcgtaggcagaagcaaccgaaggaccgctctaatggactgatatag

SEQ ID NO: 140214 - DNA, 1008 bp, Enterobacter cloacae
atgcatctaataatgctcgatacatgtgtttggcttgatatttcgtctcaaaaagctgaattgccaatgcttactgccatagaacatctggtacaggatgggagtatcaaaatactactgcctgatctgatacgtgccgagtacgaacgaaataaagagagggtgattgaggctacgcgcaaacggctcgccagtgaatttcgagtaattaaaggggtggttgagtcgtttggcggtgaaggtaaagagactgcgctcaaaactttagatgatgttaatcacaggctgcccattctttccgaggtaaatcaaaacacagtaaatcgtgttaccaaactttttgacatagcccacgaagttataatctctgatgccgcaaaaatcagagcagcagagcgggctatcgctaagaaggcgccgttccataagcagaagaatagtgttgctgacgcagtgttagcagagactttccaagagtttcgggtgtctcacgcaagtgagtacgaaacctttagatttgtcactcataatgtcacggatttttccggcaaagaccacaggcagccacacgacgatttcgcagatatttttgacggcagcagctctttattctttaacgccacaagctctgccatcgaggatttgctcgatcttgaagaatttcactatgagaatagctttgcttgggaggacgaaactcgtgggcttcaggaaatcatgtctgcgatggacgagttgttcgataaagtttggtacaaccgccatatgaacatgatgtatcacctagataatggtgacatagagatcgtccccgctggcacaaaacgctacggcaatgatgtgattcacgaagatatcctcggccaagcaaaaattgcagctcagcgggtcagggataaatatgaagatactgggccttggagcgactttgaatgggggatgctcaatgggaagctctctgccctgcgatgggtcttgggtgatgagtgggacatgctcgacacgtaa

SEQ ID NO: 140215 - DNA, 825 bp, Enterobacter cloacae
atgggcgatgtaacaattattaccaatgctattgggcgttttgccaacgccatgcggctttatggtgaagccttcatcagatatcgagggctggtagcaatcgaccgtgaagaggctatccacaacctcgaccgagcatttgagcaaaatcttgagagttttcatacgttatatgatgtatcgcaaggggtgtttgactttcatgctcatccggataccagtctcctaattgctattcgtaatgctcttcatcatcgtgaccatcctttgttccatagtcttcttcagactatttggttggacggggagccagagcgtctgcttggagcggagtatttaatggctaggcatcgaacgacggctggcaatcccccgccgatgatgcacttgatcaagttggaagatatatacagtcgcctcgacccacgtcgtgaatcggtacacataaatccaatgggtaagggcaatgctttatctagatttatcactctggaaaatggccttgccttcgagagagtgtgggccaaagcaaaaaaagatcgctatcccaccaagcaggtgtatttggacttgttgccgatatttaattctgcggtttcgagagttttttctgcattggatatggctggagtgccgtttcaagggtttgatgcagatgcctataaatctacatttattgatgaattaaagacagaccttcaacatttcgatttctttggtctgcgtatacatgcgctacagatagaattaggcccgaagttcacaatccaagaggcctctatcaggcggggctgtacctacgaaaaggtgatggaggacgaatag

SEQ ID NO: 140216 - DNA, 189 bp, Enterobacter cloacae
atgaaagacagaccacacagagaggccatggccgagtacttccgagcagatccgacctatgcagcggagttgcttgccgaagtccgtcgtgacggcaacccggacgagctggcaattctgttgcggcagatggacgaggcgttcgggagcgactgcaaacgttcgggctctccgatgagacaactatga

SEQ ID NO: 140217 - DNA, 699 bp, Enterobacter cloacae
atgacgcaagcagcttggacacgcgacggtcggccggtagatgcggcttccattcctggcgccgagtgggaggcgttgaaacagacggcgcagttaggtgacttcgtgatgccgtgctgcaaggcaccggcagtactcaagacaagcatcaatggtttacctttcttcgctcatctgtcggaggagtgcggcactgcgcccgagactaaatggcataagtcgggtaaggccgcagtgatggccgccttaaccggcatgggtatcgaaaaccgtgacgaggtgccgggccgatcaccaagcggcgacaagtgggaggctgatgttctcttctcggcttccggtcgcaccatcgtcatcgagctgcaacgctcctaccagcacctacgtgacttcacgcgtcggcaggagcggtacgctgcatcgggcgttgagtgctactggctggtccgcaaagagacattcatgaccttaggaaaggccacgtcacgcctattgttgaagcgtgatttcggcaacgtgtttccggctagtggaatcggtactggcatgctgcccgagttgccggtggcgatgctggacaccgagggcgagcaaccggttcagttcggcgggttcaagaccgcgactgtgactgtgtggttggcaggcatccttgatggtgcataccaatatcgcgctggctcttggaaccttaattga

SEQ ID NO: 140218 - DNA, 2109 bp, Enterobacter cloacae
atgtctgcatttacgattcagataaaaaactgcaacagcatcgaaagtgctgagattcggatcaataagggcacgcttaatataaagtacgggcctaatggattggggaaaagctcaatagcgaaagcaatcctagcatccgtgagcgatgatgggacgcttcaaaaattgaagccctttaaacatcgtgcgtttgcagggcagtttgatccgtctgtggttggggtcgaagatataaagtcggttttggtttttgacgacacctacgtttcgcaatttgcattccagcgggatgaagtcctcaagaatagttttgaaatattcataaagacagatgattttcttgctgctatgcaggagatagaagcactattccaaggaattaaggcggccttcgacggaaacgaggacttgggcaatgctatatcagatctgaaagaacttcgtgatgcatttggagttacaaaaacgggggcgctttccaagtcaagcaagggatataaagcatttggttctggaaataaaattgcaaatattccagaacatctcaagccatttgaagaatttataaaaagtgatcaaccggcgacgtggatagcttggcagactaaaggtaattccttcttggaattgtcggataactgcccttattgttcttctagttttcaaggtactgataagaaggacgtggcgcaagcagttgccaaagaatacgattcaaagtccgttgagcatttgagtgcgttacaggcaatcattgcaagattgggaaaatactttgatgatgcttgccgtgagagcttggagaaaatcacaaaatcaaaggttgagctttcgttagaagaaaataatttcctaagcgcccttagaggcgacgttgaaacgctcattgcaaaactcgaagggttgcgatctatctcgttttttgtacttcgagatgttgagaaaattgaagacgaaatcagcaagctgagaattgatctcgaccttcttgggagacttaattcggcagatactaaatatgttgttgatcccgtaaatgctaagctccaagagttggcggagaaggtgggagaactcaaaggtaagatcaacaagcataaaaagctaattgagaggaccgtcgcggaaaatcaggatggcattaatggcttccttaagtcggctggttacaagtacagcgtagttatcaagtctgaagccgagtcttacaagatgaagctggtacaccaagaccatgacgaacatattgagacagcggcccagcacctaagctatggagaaaggaacgccttcgctcttattctattcatgtatcaggttttgagggaaaaacctggattggcggtcttggacgatcctgtctcaagctttgataagacgaagaaattcgccattctgaacgagttgtttagaggcaaggcaagtcttcgtgatacgaccgtccttatgctgacccatgatattgaacctgcaatagatgttatacgtggcgttaagcggttattccaacatcctaagccaacggcatattttctggcgtcgaaagcgggtgtagtatccgaggtggagattagagaggaaaatattcaaacatttgcgcagatatgtagtgataatattctcgaacttgatgatgaagttattaagtgcatatatttgagaaggcattttgagatcatcaatgatctaggcgcagaatataattatttggccaatcttttacacgctagggacgtgccaattctaaaatctgcggtgggcgatatcgctatgaatgctgaacagattgcgaacgccgaagctggcatcaagaaattcatcccggcttttgattactcggcggtgcttgctgcgattaaagataaagcagagatgaagcgtcgcttcacagaagctaccgttgggtacgacaaaatccagcttttccgcatctttaaggaagtgcatggttccgccaatggggagcaggatggcattcttcagaaatttgtgaacgagtcatttcacatcgagaacgaatatgtgatgcagctaaatccccacaagttcgacaatgtgccggagtatgtcgttttggaatgtgatagggttattctggcgtcttaa

SEQ ID NO: 140219 - DNA, 303 bp, Enterobacter cloacae
atgaataaatccctccacgaaagcgagcgcgtcccggtttcacttgaaaccgtctggcgggcgctgaccgccctcggccatcagcgactctggctccgcccccctgaggatcatggcgtgcacacctggctgattgtgacctgggacggcctgacggtggccgaacgtatccgggcctccggctcctggtggctgaccggggatgccagcgccatctacaccaatccggagcggatcgtcccggacgggctggaagagctcacctggctgtcagtgcagcggcgaatgaaggacggattctga

SEQ ID NO: 140220 - DNA, 486 bp, Enterobacter cloacae
atgatatttgcacggcagtcaaatgaacctgctcataacgagccctcttttgtcagagatttccactacctgaccgctctgatacagcatctgggtgcgcatgaacgctggaacagcaggacccccagaaatattgctgatagtctgggtatggatatgcaggaggtcgaacgggtacttgcttcttatccggcgtttttcagacgctcttccaacctcagttctcagggggaacccctctatatgatccatctccgctatgccagaagaaggaagaataatgaaacagacgctcgtgaatctcctcctgtaagtgcagctgagatgggtatcatgctggatctcgtgacgaagatgattgccgtggaagaacagaacaaaaggctcagcttcgaaattaaaaccaataatcttaaaatatggtctgctctggggcttgcctttctttcttccgctactgcgattgttacagcattcctaaaatag

SEQ ID NO: 140221 - DNA, 2004 bp, Enterobacter cloacae
atgaaactggaatcttttcgtgttcgaaacttccgctctgtgtttgacagtggggtgataaccactgagaaattgacagcaattctggggcggaatgaaagcgggaaaacaaacttgttacttgctcttaaaagccttaatccggcagagggtttcggcaaactcaatgatataaaagatttcccaaggaacagaaaattaagtgagtgtacgcctgacacaccagtggtagatacaacttggatattaaccgaacaagaattgactgagcttaatgaaatttatccacgtgtacagaacaatacttccgtaactgtttgcagaagatataacggggatttaaggtatatcaattttatcggacttaataaattcgactatgatgcgcaaaaaataaaaaaagaagtacgtaaaattgccgcccaaactgaactcttcttcgataaccaagacaataacactgaggaatgtcaggcagatcgtcagtccatcagggacatctgtaatgccatgcttcctattccagaccgccccatagcctggtcagagcaggctaaaggtaaacctctagagctaaggaaatatctgataaagtatgacattgagatgaaatcagattctgacgatgctcttgatgaactcgaggatagtctggaagaaattatcagtgatgctgccagacacaaagccgcacgacaatgggtcctgaaaaaccttcctgttttcgtaatggttgatgaatatccggaactgaatggccaccaacatatggccgaatatactcagcgtaaacagcagtctaaacaaacgaatgcagatattaatttcgaaaagctgtgcaaggtggcaggcattgatccgactgaacttacggctaataggaataattcagaagtccggaatcagcttgtaaacagggccggagcagtcgttacgacagaaatcagaaggctatggcaggacaaacctctcaaaattcgtttcaatgtcgatagtgattatttcgatacatatgtttcggattcaaataattcctatgatgttgaggtgaacctagatgaaagaagccggggatttaaatggttcttctctttctatataacattttttgcagataccaagggcggttcagcagaaaatgctattattttactggacgaacccgggctttatttgcatgctaaatctcaggctgatcttctcaatcatctgaccaatgattttgaaaatcagattatctataccactcattctccgtttctggtgccaattaaaaacatttccgatgtaaaaactgtgtcgattgcagaagataagggtacgacggtaaccaacgatcccagcggggattccacaactttattcccgttgcaggcagcgcttggttatgacattgcgcagtcgttatttattggatctcacaatctgattgtcgagggagtaactgatttctggtacctcagcactatttcagatgtactaacctccgccggcagaaagggcctgaatagcaaaattacaataactcctgcaggtggggcacagcgtgtgtcctacatggtttctcttctatcctctcagaacctcaatgtcgtagtacttctggatgatgagaagcaaagccgggagacttcagttgagcttcatcagcagggcatgcttaacaaaaaaaatgtggtatttgtgtctgatgctctggagtcaaagcgcgacgagtgtgatatcgaagatcttttcagccgtgataccttcctccagctggttgatgaaagttatgatctgaagcctggtactcttaagctgaatgagaaaatcccgcgaattgtcaaacagattgaaaatgccttctcgacagacaagaaacattttgtgaaagccaaacccgcccgcgcattcatgaaccgtttgaaagatggagataatcaaccactgtccacagaagaactggatcggtttgaaaaactgtgcgacctgataaacaaaagaatgacggcccgcagctga

SEQ ID NO: 140222 - DNA, 873 bp, Enterobacter cloacae
atgaaaatgcaggatctgagactgtttaacctcgtctttgaaagcgatccgggctggatactcgatttctccaaccgcacgctgtcggctttttttgatgaagagctgaacattgatattgatgatgagcgttatcaggaagaaggaacctcaaaagccaaacgagtcagatgtttactgaagaaagtggatcgggaaaccgcgctgcgggtgctgaacgcgctctggaagcataaaacggagtcgatgccggagctggccgagcaaagccgtaatgactggctcgcgctgatatcccgtctggaaaatacggacgctgataccgccacaggcgttaagcccgtccagtcatggcgcgggacagactggctttcactgattgccgacatgaacgagatgaaaacactggctccccatccgcggggtttccggtttgaaagctggctggctgaactgttcagtacctttaagcttgctccccgttcgtcattccgtaacacgggtgaacaaattgatggcagcttccgcctgaatgatgaattctatctgatggaagcgaagtggcatcagaacagaacaccggcggcagatttgcacgtgttcgaaggaaaactcagtaccaaagctacatggaccaggggtgtattcatcagctggatgggatttactgatgaaggtctgacagccttcggaaaagggaagcgagttatttgtgtcagcggttatgatctttatcattccctgaaccagaggatcgccctgcccgaccttctggacgcaaaactccggcacgccgccgaaacaggggagccttatgctcagttcgacaggctctacacccttaaagacaaaatatccggcacgccgaaatag

SEQ ID NO: 140223 - DNA, 255 bp, Enterobacter cloacae
atgaagaagaacgcagttaaaaagttccttaatctctgtcagaacattatgtttctcaagaaaactaggactacagacaggggtgactgtttcatcgaacatacgttcagacgaaacatctcgatagttaccaaggccgtaacgaattgcagcatcaacctgaccatcattaagatccacattaatgtcagtcacatccagttcaatatcaaattcaggatatctctgcctgaaccggttgagacgcggagctaa

SEQ ID NO: 140224 - DNA, 315 bp, Enterobacter cloacae
atgcatctgcatctgaacacatccgctgccaggaacatcaaaccggatattttccacattccactctgccgggagagaaataacatgagaatcgtatctatttttaaaaacggcaataaccgtgctattcgcctgccccgcgttctggattttgagggagtgggtgagctggagatcgtccgggaagaggacagcatcattctgcgtcccgtctgcctggcttggattacattccccctgctgggaaaaacttctcctgattttttgacggagtgtgaaggcgttatcagcgacaacggacggggtaagctttga

SEQ ID NO: 140225 - DNA, 3081 bp, Enterobacter cloacae
atgagtcactcctccctgaagcagacctttaacctgtcggagtgggcgctcaggcatcagcaacttatcaccttcctgatgctaatggtgatggcggccggcatcctgagctatgagcagctcccgcgcaatgaagaccccgcttttaccatcaagaccgccgtggtgtccgcgcagtggccgggggccaccgtgcaggatacggtgaatttagtgactgacccgctggagaaaaaactgcaggaaattccgtacctggactatgtagaaagcaactcgcacgcagggaaggcggtgatatttgttaacctgcgcgacgacacgccgcccggaaaagtggcagatatctggtatcaggtgcgcaagaaaatggtggacgtgacctcctcgctgccggagggggtgcagggaccggcggtgaatgatgagtttgacgacaccttcggcacaatttatggctttaccgccgaagggttcaccccgcgcgagctgcgcgaccgggttgaggacatccggcgcagcctgatgtcacttccggacgtgggaaaaataaccctggttggcgtgcaggaggagcagttagtggtgtccttctcgccccgtcaactggcgggcatggggctggatttgcagcaggtgagcgacaccctgaaggcacagaacgacgtcgtgccgtcgggcacacttcgcacggaccgggaaaatgtggctcttcgggtcagcggggcgctgacctcggaggatagcctgcgggcggtcacgctgcacgtgaacgggcgctacattcccctggccgacattgccaccgtccggcgtgaaacggctgagccccccgcgccggcgttccgggtgaacggtcagccggccatcgggctggccgtatccatggccgccaccggcaacatgctggaatttggtcataccctgaacgcgcggatgcaggccctcggtcagcaactcccgcatggcatagagatggtgaaggtggccgaccagtcggcggtggtcggccaggcggtgagcgggtttgttcgcgtactggccgaggcggtggtcatcgtgctggccgtgtcgtttgtatcgctgggcctgcgggccggcctggtggtggcggcggccattccgctggtgctggccatgaccttcacggtgatgctgctgtgcggcatcggtctgcagcgtatctcgctgggcgcgctgattattgccctggggctgctggtcgacgacgccatgataaccattgaagtgatggtctcccgtctggaggagggagactcacgaaggcaggcggcgaccagcgccttcagaaccacggctttcccgatgctcaccggcaccctggtgatgattgccgggtttattccggtcggctttgcggcctccagtgccggggaatactgttttaccctgtttgcggtggtgctgatttcgctgctgtgttcgtgggtagtggcggtactgttctccccgctgacaggcgtctggatattaccggcacaactgcgcaacgcgcacgaacacaaggcgtcgggccggctcaggcgcggttatcaccgtctgctgctgctggccctgcgtcaccggctgatgacgctggcctcggcactcggcctgctggttctggccgcgtatggtaccacctttatgcagggggaatttttcccggcctcggaccggcccgaactgctggtcagcctgacgctgccggcaaatgcttcacagactgaaacggcccggcagaccgtccgtctggagcaggcgttgcttcacaatccagacgtggaccatttctccgcctacacagggtcgggtgccatccgcttttatctgccgatggatgtcctgctggacaatgagaataccgcccagctggttgtggtggcgaaagaccttgaatcccgggaccggctcaggcagcagcttgtcaccctgctggcccgggagttcagtgacatcaccacccgcgtctcgccactggagctcggcccaccggtcggctggccggtgaaataccgcatcaccggcccggattatgcgcgggtgcagactgtcgctcattccctggcctcagctctcggtagcagtcccgtgacacgtgaggtgaaccttaccgccggcgagccgcagcgggtcatcacgttacaggtgaaccagacggccgcgcgggcggcggggctgtcttcagaaagtattgcgcaggcgctgaatgccatctggtcgggcagtaccgtgaccacggtacgcgaccataaccggatgattgacgtggtgctgcgtgcggataacgccgagcggcaggacctctcgacgctgtccggaatgctgctgacgaatgaccggggagataaaattccgctcggccaggtggccactctgacatggggtgtcgacgacccggtgatctggcggcgacagcgtctgccgtatatcaccgtgcagacggacctggcccccggcatgcgtgcagaggtggtatcgcaacacctgttgccggcagtgaacaaacttcgctcgacccttccgcccggctaccatatagaggaaggtggcacggtggccgagtcggacaagggtaaccgctcggtgtatgccgtgctgccggtgaccctgtgcgcgatgctgatcctgctgatgatacagctgcagcgctgttcccggatgctgctggcgttgctgatggccccgttcggactcattggtatcgtgctggccatactgccgaccggtacgccgatgggctttgtggcactgctggggattattgcgctggccgggatgataatccgcaacgcagtcattcttatcagcgaagtggatgacaataagaacaagggcatggccggtgatgatgccattattgctgcagcagaacaccgtgcccgcccgatattgttgaccgccagcgcagccatactggggatgatccccatcgcggaacaggtcttctggggcccgatggcttacgtcatcatcgggggactgtttgtggcaactctggtgaccctgaccgttcttccggcggccatgagtttggtgattcagcttgaacaggcgactattaagaggaatgaggaatga

SEQ ID NO: 140226 - DNA, 1131 bp, Enterobacter cloacae
atgacggaaaacctccccgaattcaccgactgcatgcggcaggcgctgcgtcatcttttcacgactgcgccgctaagcgcgctgttgctgccggtgtgtcttctgcttgccgcctgtggggacaagccggaaaaaacggtaccgccgcgcccggttcacaccgtgaaggtccccgcaccttcggttgccggaacattacggcagaccggtgaaattcgtccgcacgatgaggtgcccctcgggtttcgcctcgacggacggctgctgacccggtccgtggacgtgggtgaccatgtcgctgcaggacagatactgggcacgctggaaaacaacaccagtcagaaccagctgaacagcgcgcgtgccgaccttgaaagcgcgcgggcggcggagcagctggcggtacttaatctccggcgaatgacgcagctgatgccttcgggtgccatcgcgcgcgtgcagctggatacggcccggtcagactggcaggccgccgtggcccgccggcgcagcagtgaggcggccctgaataccgcccgggagaatctgaactggacgcgtcttgttgccccggccaccggtgtggtcacgcaggtcagcgccgagcccggccaggtgctcagcgccggtcaggcggtggtgacgctggcggtgagcagcggacgtgacgccgtgattgacgtggcggacccgcaggcgttttcgcaccctgctggcagtttcagcgtgtcactactggctgatccggctgtgtcggtcaccggtacactgcgtgacatcagtccgcaggccgatgcgcagacccggacctggcgcgtacgcgtcatcctcgataacccgccgccggccatggcgctcggtgccagcgtccaggtcgaactggcgggtaccgggcctgccgtgatgcgcctgccctccggagccctgactcggaggcaggacatcccggcggtgtttgtggtggacgacgcctcccggcggctgcagctacggccgattacgcttgccggctttacggcatccgacatcctggtcattgccggcatccggccgggggagcgggtggtgaccgccggcgtcagcaaactgcgtgagggagaggtggtggcttccggggagacgggcgaatga

SEQ ID NO: 140227 - DNA, 1182 bp, Enterobacter cloacae
atgaacacgttacagcagcagaccctttggcgctggatttgcgtgcgaattctggcgctggccatcggttccgtggtggtgattgccgtgtgcatgtggctgcgttttgccgtgcagaacctgtggaacctgcaccgtatgccgtccaccctgcgtgatgaatttatcctcctgcgcgcacatcctgaaaccaatctggcccgctttcatgagattgtcgacacgtggtggggcgccaggtattccgacccttccattgcctctgcggactggctgatggtcggtatactggtgggggtgatgataccgtttattgtcgtcctcgggctgcgggcggcccgtccgctctccctgcagttcagtcgccttgccgcggcagcgcgcgccgttgctgctggcgactttagtgcccgggcggtgcaggtggacaacgcgccgctggaaatggcccgcttcacgcaggacttcaataccatgatgcagcagctggcacgctatgaccgtgagctcagggcctcccacgttgcgatggcgcatgagctccgctctccgctgacggcggccatcggccgactgcagggtatgatggacggcgtctttacgcccgagtcccggcaactggcgatggtcatgaaacagcttcagctgctcagccgcctcacggatgaactgcacctgctgtcgctggcggatgccgggcagctcatgctgaataaaacgcaaaccgatctcaccgccctgttgcgcgagcggacggcctggcttgggccacaggcgcaggccgccggtatgatcctgagcgtaacctcccatgaaccctgcctgtccctggcggacccggtccggctgggacaggtcatcaccatcgtgctggaaaatgccctgcgctatgcggctgaaggcggggaggtctcggtgtccgcacaggcgacccctgagggggcccggatggtgtttcgtgaccggggaccgggcgtgccggcggattttctgacggtgatgtttgagcgcttcacccggggagagtcgtcgagggcgcgccactcgggcggcagcgggctgggattatccatcgcacggggtatctgtgaggctcacgggggaaccattcacgccgcgccgggagagatgggagggctggtcattaccgtcaccctgccggcacatcacgaccggaaataa

SEQ ID NO: 140228 - DNA, 693 bp, Enterobacter cloacae
atgtccggaaatcgaatactgataattgaagatgatgccgacgcggcggacgtgctcagtgcctatcttgcgcgtgagaattatgcggtcagcgtggcgggtgacgggccgacggggctggaaatgagccagcggctgaaaccggaccttatcctgctggatgtgatgctgcccggcatgaacggtacggaggtgctggcggcggtgcgccgaagggggaatattccggttatcatggttaccgctatgggtgatatccccgacaggataggggccctgcgttacggggcggatgactacgtggtcaagccctacaacccaggagaggtggtggccagggtgcaggcggtgctgcgacgtatgacgcagacgccggaaacacccctgctgcgctggctggggctcgaggtggatacagcgatgatgactgccggcgtcagggatgagcgcggagagttcgcagcacttatgctcacgccgacagagttcagcctcctggcgaccctgatgcaggcaccggtgcgccccttctcccgccagcacctgctggagcactgcctgccggagagtgatgcgctggagcgctcggtggacacgcacgtctataacctgcgcaagaagctggagactgcaggaatttccggcgtgctggtcaacgtgcgcggtgtgggctaccggttctctcagccatga

SEQ ID NO: 140229 - DNA, 789 bp, Enterobacter cloacae
atgataaccagaaaactgatgctttacatgacctgtttcgcgctgaccggtctggcgaccaccgcccgtgccgatgacgccagtccgcagcaatccatgatgtcggtgggcctcgccggtcagaatctgccccgttacagtgggtcagacaagcggcgctggcagctaattccgctggtgcaggcccgcgacggggcattcttcctggatacgcaaaaggggataggctatgacctgcagagcgatagtggcctctacctggaacacaccctgggctataacctgggtcgttcagaccggaattcggactggcgggacggcagcgataagctccggcgcatggggaacatcagggctaccgtcaacaccgcctttgcggtgggctggacagtgacgccctggctgacagtggaagggagagccacgctcccgctgagcgacagccagggggggaattaccagacgtctgccacgctcattccgctacagaccgccagcgacaccgtagcgttttccacggcggcactgtttggtgacagccggtatatgaataccgtttacggtgtcagcgaccggcagagcgcgcgcacaggttatgccccgtatcatgctgccggaggattttatggcaccgacagcagcctgacatggagccatcagtttacagcggcgtggggcacgctaatcagcctcgactacacctggctggacagccatgcggaaaagagcccggttgtctttcggcacaatgaaacatcggcttcctttggggtgctatacaccttctga

SEQ ID NO: 140230 - DNA, 495 bp, Enterobacter cloacae
atgaaggatttcaaagaactgctcgaaacagcatcagattacaacgaatttgttggcagcggatcagaagaagaccgcaacgcattgcggcattttgaagtgcttgccaacaaggcattacctgatgatgtcatcagtaagctctcccagcttccgggttcgtatagcattctggttgcagctgaaatgtggtgcccggactgtcataaaaacttgcccgttatccatgccgttgccgcgtcagcgccggcaattcgtctgggcatcgttacgcgcaataaggcggaagccgtctttaaagcccacttcggtgtcgaaaaagtcaaaattccgtttgcggtgatactggatgaaaacgcgactccgctggggcagtttattgaacggcctgaaaatgctaccggcaagaacggagaagtgatcgagagttacaaaaacggcgagcttctggccgagaccgcccgtgaagtgacttcaatttttccaggaaaatag

SEQ ID NO: 140231 - DNA, 1230 bp, Enterobacter cloacae
atgaaatatgattttgatgaagtagtggacaggacagggacagatagcttaaccgtcgatggctggcgcgaatatatgtttggtgcctgtgaaggaactgtgccggaagtgccgtccaatggttttataaacctctgggtagcagacatggctttttccacacccgcgccggtgcttgaagctatacgttcccggttagataaaaaaattctcggctacacacgcgtttatgacagggattattatgatatttttggggcttggtgtgaaaggaattacggataccggtttcaggaggaaaacattgttttctcccccggtatcattcctgcgcttaaccgactggtaccgttgctcacccataaagaagacagcatccttatcctgaccccttcttacgcaccgtttaaaaaagccggagactatagcggtcgtcgcgtcgtcgaatgtccgcttaaaaataaccaaggtcactggacaccagatttcgaggcgatggaacaagctctgtgtgatgaacagaaacggattaaagtcttcttcctctgtaacccacataatcctaccgggcgcgtctggcgacacgatgagctacagagaatgattgccttatgcattaagcatgatgtttgggtgatttctgatgaaatccactgtgatttatcccgctcgggcgtccggcatatccccgcggcgtcagtttttcctgaaaatcataaaattatcacctgcatgtctaccagcaaaacgtttaacttggcgggtaatctgctggcaaacataatgatccccgatgcctccgtaagagcaaactggcttcgactgtatgatgattttatctctccactgagcctcgtagctaacaaggccgcttggtccgagtgtgacgagtggttgacacaggtcagatactatattgatgaaaactttctttatttgaagagctacctttacacataccatcctcaggttaggtttttgatacccgaagggacatatcttgcctggattgatatatctcctctcatgaatgttagcaatcagagcgatataaccctgttctttgccaggtatgctggtgtactgcttgaagggggggggatgtttgtcggtaatggcgacgggcatatacgcctcaacctggcatgcccccgcgctatgctggctgaggggctcggacgcataagtaaggtattaagcggtagttcagtcaagactactgaatcttaa

SEQ ID NO: 140232 - DNA, 966 bp, Enterobacter cloacae
atgccaaagcagaacaaaaatcaaaagcttcgtaactacgaccctcgttttatctactctcttgttgttaagcgttacttctctgaaatgaagacgaagatagaaattgctgaagaactcggtctgtctcgcttcaaagttgcacgtttgattgatgaagccattgcgcaagagtatgtgaaatttactttccctaaacagcaggctctggatgaggaaattgcgcaaaatctctgtacgaaatacggattacaggatgctgttgtgctttctgtttcagaatcctggtcttcccaggaacaattaaacgtcaagctgggagggatagcagcaacctacctgagcgagattctcaaagagggtatgaagtttggtctcgcctgggggcgggttctttcaagtacggtgagtcaactgacgacactacctgttctggatgttgttcagctttctggtgttcatcctggcattgagtttagtcagggaccgattgatttaatacacaaagttgctgcaatttctcacggaagagcgcacccgatgtacgtgcctatgtgggtggatgatgagagtttagcccagaaactcgctgacgatcaggctgttcaggatacgcaaaagttttactcaaatatggatgtcgttattacgggtattggggcatggaaaacaggctcttccagcctatgcgatatattccctgaggcttggcgtgatgctttaataagccaggacattactgctgatgtatgcgtaaccctggttaatagcaaaggcgaaatacttgatagcccgttgaaccgcctgggtttcggcattacgacagatcaattgcgggccacaaagaaactgattggtgtggctggaggggacgaaaaatatgaaggtattgttgcctctctcaaatcaggtcttctgaatgtgctgattactgactttgatacggctattaaacttctggattaa

SEQ ID NO: 140233 - DNA, 450 bp, Enterobacter cloacae
gtgggcacaatttctatcaatgtcgcggattgtgcggcatacaaaaattatgatgaagtgctggagcatattcaccagaaacatctggctgatgggatagtaagagacacttacctccaggcgttgcgtgaacgtgaagccgactacccaaccggaattttacttgatggctatgctgtcgctatcccacattgcgatagccagcacgccgtcagcccggcgatttacatcatccgtttacctcaggaaattgaagttaatcaggcagatggtgacgagaaattgtgggttcgcctggttgttaacctggttgttactcaaccagcagatcaattgcagttgttgaaggcgttgtttaaccatcttcagctagctgaattttatcaccagatgctggagcttcctgctgaagaagcaagagcattgtttattaacacgataattaaataa

SEQ ID NO: 140234 - DNA, 294 bp, Enterobacter cloacae
atgattactatcctcgtagcctgcggaagcggtgtagcaacctccacacttgccgctgatgaagttaaatcggtttgtgctgaatacggcattgccaacgtaaaaattaataaatgcagtatgtccgaactggcctccgaaatgcaaagcgctgatgtggttctgacaacgaataattataaaggtgatattggtaagccgcacatgagcgtcgcaggttttattaccggtattaacgaagccgcactgcgtaaaaaattaggtgaactgttaagcgaaatttccaaaggctaa

SEQ ID NO: 140235 - DNA, 645 bp, Enterobacter cloacae
atggcacaaattttaccatcagtttttggtgcaaacatattacgtttgcaggaagaaattcagtttctggaaaaagaaaaaacagaaattctgcatgttgatttaatggatggaacttatgtaagcaatatagctttcggccctaatcaaattgcggcaatgaaaaaagccagttcaatgacatttgatgtgcatatgatgctggcaaatccggaaagacatatcgatgacgttattaaaaccggcgcggaaatgatttcggttcattatgaatcaacaccacatgtgcattatattatccagaagatcaagaaagcggggcgcaaagccggtgtggtactcaatccagggacgccggaacatgtaattcaatacctcctggatgatattgattatattttaattatgaccattaatccaggtcagcccgggcagacatttattgaaaagagcctggagaaaatccgcaatactaaaaaaatggttgccgggcgcaacattcagattgaagttgatggcggcgttaacgccgaaattgctaaaaaggtaaaagaggctggagctgatttaattgttgttggcggtgcgctatttaatgacacccctagagaaagctatcaggcattaagggtggcgattcaatag

SEQ ID NO: 140236 - DNA, 561 bp, Enterobacter cloacae
atgagcgttcaacaaaatactttaaatatcctgagcgagttgcagcaaaatgcgatgaagattgatgatgctcaggctgcccaattcgtctcacagattaagaatgccagacatatctttctgcagggcgcgggtcgtagcggcatcgccatccgcggctttgcaaaccgtcttctccatctcggtctttcagtaagcgttgtcggcgaaatttcttctcctcatacgaaaccgggcgatctggtcattattggctccggcagcggtgagaccggcagtctggtgagcctggcgcagaaggccgtagcctgtggcatggatgtggcgcttgtcacaatgaaagcggaatccacaatcggcaaactggccaaaagcactcttgtattgcctggaaccgtgaaagaagacaacgagcgtgaagacggtgctttttcacagcctatgggctcggcttttgagcagctctgctttatcgcctatgacgcaatcgtgcttgagctgatggcccagctcggcgaaaccagcgaaacgatgtttaaaaggcacgcagacctagagtga

SEQ ID NO: 140237 - DNA, 216 bp, Enterobacter cloacae
atgaatttgctgatgagtttatggctgattacaaccggcgctttgcgaaagcgccccggcatgactttgatgttcaccggcaacttgaaaatggtgttgacctggcagcgttttcacgtggcgggaaccacgccgtgtttaaaatccctgacggtgcataaccacttaactaacaatgagttaccatgttacaagatacataattctcaattgtaa

SEQ ID NO: 140238 - DNA, 474 bp, Enterobacter cloacae
atggtacctattatgaaatatacggagttcctatcgtcagctaaacggcataaccacgcttgcagagtgctcaaggaaaagcttgatagcttaggtgaggacaatgctgaaaacgtggaatacaaatttttagtgcttagcctttactatctctcaggttatataattgaatgctcaattaaatacaaaatatttgagcttgaaaactatgactcaaacttagaagttaatgagggtgagtgtgaaaaatttggaatagattttaagaataaattaaagacacataactttaagagactacaaaactatcttgattcgttgataagcgacgtaagccacgtgagtgaaaaaaaagccataaacaaattattaaatgaatggacgccagagataagatattcgtccattgatgttaattacaaacaaataaaagagttatattcacatactaataacttcctaaaaaggatgtaa

SEQ ID NO: 140239 - DNA, 2787 bp, Enterobacter cloacae
atgttaaaatcaatggacttcattcaaagaatcgaaagtgatctaaaagaaaacatcgatcaaaattcaattcatgattattatgtagagctaagagtaaatcaaaatgtagaaatttatgttgttagtgatgttattaaaagcaaagatgaattatatcttaatgcaactaatattaatgaatttagcaatgaaaatatcgaattcacttttctgtctgaaagaaacgcaactaatgaagaatacgaacacctgtttgcaaaagaaaagacatcaattggtttaagacgctcattgagtgctttgctcaacatgaagaagagagtaaacaagcataataatgttttaacatttttcagctacaaaggcggtgtagggcgaactacaagcctggcattaacagccagttatttagctaggcaaggtaaaaatatctttgtagttgattgtgattttgaagctccaggtttgattaacttttttaacagtgcacaatcagataattgcagaggaggaattattgaatatcttaatgacaaatcctttgatgaaaaaactagcataaaagattacatttataacattgagaaaagttactctggcagtgggattatcaaccttatgtcagccgggaatatcatgcataactatgaggatttagttagttatcttgaagggcttgcgaaattagacctgcaaggtgagaaattggtgaaaatttttgatggcatcataaatgatattaatgaagagttttctcccgatgtaatacttattgattctcgaacgggattcaataatactttcggcgccttagctcaagtttcccaaaacgttgttgtattagctggtgatgatgctcaaaatcaaccgggcattgaatatgttacgaaaacactgaatgagatgaatattaatgcctgcttcgtgttatcaataattagcagtaattttagccgtcgctttaataacttcgctaatcagatccaggggaatgcatcctttgatactgaagttttttattttgatagacaaaacactcttgagtatataggtacatctttagaagacaaggatgacttggacgatttcatcaatggcgaaaatggttccactcaatatcagaaatttttcaaatatatttacgaggttacatctgaacctcatttaattgcaaaagaaaataatataaaagatgcgattaatgctgaagaaagtctaatcctattaaatgagatagactcttttgaaatttccagtgataatgaagataatttcaattatgatttagcaactccaaaatcagacgaaagcattcaagataaagtattaaatgacttaagagataaactaccagatctctatgctgaaaatattgattactctgatgagtatataaataagttgttctactttagaccatgcatggaagatctgttcattcctgaaaagaatatattattaggagataaaggcaccggaaaaacagctttctataaggctctccaaatcggtagttttttcgatatgttaacatcaaaagctcaaaaaacacacctagattacaatgtattaaatattaccaattttgataaagacaactttgaatttgatgggttcgatgcgtatcataaggatgaattattcatcaagcgtttttggattttctttatctggaatgccatatgctcaaggggggaatatggatgtaagaaccaagacttacttgtaaaccttgataacttcaaggcgcaagggaagataactgaattattattagattcagacaaatactctttaattgaagatgaaatgaatgacattaataacacattaaaaagtgaggataaacggttaattattacttttgaccaactagataatatagtaaaaccattcttatggaatgatgtaatttcgcctcttgttaaaattgcaatgcgtttttcttacgaaaacatacatccaaaactgtttttaaggagagatttatatcaaagacttggtaacctaacaaataaaaactcttttactccgcgtattatagacctagagtggtcacagaatgaaatcttctcatattttttaaagattgtattcaactactcgaaggataatttcttctcattcctatcggacaacttaccaagttcaacattagtacagcaaatccataggaaattaaaaacgaaaggcataatccataaccaactcccgttagataaatatcttatccagccagttataaatgctttctttggggctcctagacctaaaaataacggtagactaagcactgcgtatgaagatttattccggaatattcaaagtgcagacaaaacagtaaaccttcgaccatttattgatcttttgacaaatgccattagagaacaggatgaacaagacatcgagaaacaataccgtaaaaattccattatagggttagcttactgcacgagtaaacaagttcgaaaaaatgcagttgtaaaatatctcgaagatttatggaacgaaaaaggtaatgagttcgttaaatgtttctgtttagatttatccaataataaagtaagtcctggcttcaaaaggaatgtactcaatgagagtagttttgacagacttctagaagagattaagaaaaatcacgatgatgacgatatcattaagactggaactctctcagaatttaagcaggttttgattgcaaataaaattataacaccatatatggtcggtagcaaaacaagatatgggtttgcttacttatacaccaactactttggtatttaa

SEQ ID NO: 140240 - DNA, 207 bp, Enterobacter cloacae
atgacggcatacggaacggagtttttctcaatgaaagatgtaaaccgactcaggatccttcaggatgttacagatcggtgtatcactaagcgtctcgcggccagcttggtttacctgcttggcatcattcagcgagtattcgaccgagcccgacgctcgcaaacaaaaaactggctgaacgtcatctcacatccagctttctgttaa

SEQ ID NO: 140241 - DNA, 783 bp, Enterobacter cloacae
atgaaatcctactactacaatcgcttcttaaaacttcaagaagaagcaaaaagaataatcgattccagcgttaagtataatgatccatacactggaatgataaatcatactatggatcccaagctttataaaaaatgggttcttaatactaaagttttaattggaaatgtgtttggtgctgattctgtctatttgaagtcatttgtcgacgctgaaaatcaaagaaacacggatagctattatgaacgtatttcaggaacccttaagccaatactagatgctgtaattgacaatattgaagaaaagagtgatgaaatggacacacaatctggattagaaattataaataatctttgcatgagatttccattatttgctcggcaaataaaaacacgccattcaaaaagacaaacaattgaaattaaagatgaatatgatgtccaagatttatttcatgcattgctaaaaatccatttcgatgatatcagaccagaagaatacacatcaagtctggctggttctgcatcacgtgtagacttcctgttaaaaaaagaacaaattgttgttgaaataaaaatgacgaggaagggcttgggtgcaaaagaattaggcaacgaattaataatagatatcaatcgttataaatcccatcaggattgtaaaactttagtctgctttgtatatgatcctgaaggatatataaataatccatcaggaatagagaatgatttagagaaaacatcgtctaacttaaaagttagagtaattattgtacctaaatga

SEQ ID NO: 140242 - DNA, 1218 bp, Enterobacter cloacae
atgtctcaagagcatagatttttcggtagcattgcggaaacagatagggtagtgcgcaagatgtgccacacgcatcttccgaaagactttacattaaaggacaatgtcatcctactggacgaaagtaatgcatcagttgatgattttgaaaaatactattgttattttttatactgttgggattttctatacaagacttatcttgcagaaaatttcgatcagtttgattcattgccagttacgcagaaaatgctggttaacaatagaatatcactggatcctattctgatatcaacacatccaaatgtgttcctgtttcatatagtacttgcagctgaagagtacttaactaagaactcatctatctatgcgctcgggaacgacgtgataatattctcacttgttggtaaaataaggtccttaatgagcagtattgatgtcatctcgttgagattattcagcaataattctatgactctcagttacataccttacatcctaaataggggtaacataaaaatatctctagagggtatgtccacagtagtaaattccgcagaagagaaatttaaagatattgtaagtgatcctagatgggcagaaatagataaatttttaaaagatggagcacttcttgcatcaaagaaaacagagcaggataatctattaattacagttgagtcgctaaatgatacactaagcaaaacaaggtcagaatttaatttcctaaatctttcacaagcttttacaaatattaggaaaattaagaaaagtgagttaaataatattaatattgctttttattgcattgctgtattacttctgtttacacctattgctttattgttatttaacatatatggtaatatagacaaatttaatgattggaataaactactctatatattgccagtagccactattgaaataatacttctatatttcatgaggctcttctatatacaaaaaaattcattagcagcacagttacttcagatagatttcagattaagcatctgtgagtttattaaaaactatgttgatgaccgcacgatcagtgaaaaagacaaagatacttggtcagcctttgaagcactaatattcagcccaattcagttacgtgaagataaaatcccctctgtattagatggaacagattcattagctgaatttatcagtaaggtaattaaagcaaaaaagacaggatctctagactaa

SEQ ID NO: 140243 - DNA, 405 bp, Enterobacter cloacae
atgaagcgtgaaatcggaattgttctttttttgctatcgctgagcgtacctgcagggcttctgctgaattttatgacttcatctgaatacggcattccggcacgggctgttacagattcaaacgctcagaaagcggctaaggacactgctcaatttgagagcatggagcgtgacgctttagcccagccagatgcatggaaagcgtatcagcaggtgtctgatgcagtccctgatgatgcacccaccgggctgcaaaaccgttaccgcagcctcgcggtttcactggcactgaaggctgcaatggcctgctcgccggacgccctcaggctcctcgaacgtaacgatgtgattgagtttcgcatactccgatcatcgttagtttccgcctgcagaaccgccaggtaa

SEQ ID NO: 140244 - DNA, 231 bp, Enterobacter cloacae
atgagaaataacccctgtaaaacggagctgaaggtcgcccgcagccagcgaaataagcttcgtaccatgtccgcaaagctgaaagaaatgtgttgcgagtgggacggactgagtggctggctggaaaccgaaagcgagcagctggctgagagtatagacaagcaccttgaggtgctcgaagaccagatccgtgaatggtcagtaggtacggataaccgggaggaatattga

SEQ ID NO: 140245 - DNA, 1770 bp, Enterobacter cloacae
atgcttttagcagaggattgtcttaggtgcccaacctccttagcagaggctcagttagttgcacataatgcgaagcaacttcatgaattacaaccacttggcgtggatggtgtgattacaagcccaccttatctaaatggaactaactactttagaaatactaaacttgagttgtggtacatggggtttgttacgacggttaattgtttgcgtggcttccgtgatcaggtagtaacctcgggaattaatgatgtaacaaaaaataaaggtaatatagttcatcctgcagctcaggctgtcgtttctgaacttgctgacaatgcatatgatggacgtatttctaaaatggcagcaggttattttgaggaaatggggattgtgttcaaaggcctttataagcatatgaaaataggtggtattgctgctatcgatattggtgattcactttatgggggtattcatgtaccgactcatgatattttgagtgaaatatcccaagattttggatttgcaactcttgatattgtgaagctacgagagcgaagatccaaatctggagctcctttaactcaatcattaatcattttagaaaagagggatctcgataataaaccaatctctgggataggccgacaggattgtgacataccccataaatgggatatgtttaaagagacgttgccacatcttcagcacccttattcaaagcgtaattggggtaatacgttgcactctgtgtgttcttatcaggggaagatgaaacccgcattagcgttcaaacttatagaatcattttctaataaaggtgatacaattctcgacccattcagtgggtcagggacaatcccttttgaagctgcactaaatgggcgcaagtcattggctatggatattggtttgttggcaacaagtctgagcaatgcaaaaataaagaggccaaacaaagataatgttactgaaataattaactccttggaggaatatatttccacctctcagcctagtcagtgttcgattaaagatgcaagagaagttaagtttaacaaaactattcctgaatattttcatgaaaatacattgaaagaaattctttgtgctcgagatttctttatgaaatatcatgacgctcaatcagctgattggtctctggttatgtcatgcatgctacacattttacatggtaacagaccttatgctttgagtcgtacgagtcatccaataactccatatgcaccaactggtgattatgtatacaaaaaccttattgaaaaattatggaataagataaataaatcattaaatactgaggttactgacgattttgttactggacactgctatcaggctgatattctctcagaatggccaagtgaaatacagaatttagatgcaattattacctcgcctccattctttgatagtacaaaattctatatgactaactggatgcgatactggttctgtggctggactaggttggattttgatactcaaccaaagagttttgttgaagttattcagaaaaaatcttttgatgcctatgactttatatttggccaatgtcatgaaagactaaaaccaggtggttatgctgtgtttcacttagggcactcagataagtgtaatatggcagaatcgttaaaaccttacgcagagaaatactttactgtaattgatatctttagcgagtcggtggaacactgtgaatcacatgggatatctgataaaggtagcgttaccggtcatcaatacttagtgctgcgaaaataa

SEQ ID NO: 140246 - DNA, 1431 bp, Enterobacter cloacae
atggctaaattaccaggtaaaacagcatactcaggcattagacgaagtacgaccagaaagtcgggctttaaaagccatccggacagtactggaggtgagtacaaacgtgaggtagtaaccccttacctccttgaggcaggaaaaacactgaccgtgtgttttcagttcccagccagtgatggtcaaacctatattggatttggtggtttctttcaatgcgaagactttgttcaagtatcctttaataatcccaacgtcgcagcaaatgagtttttgagaagttcctcagcggacacgtcgaaatttggttcaatgtggcgacacaatggtatggctggaaatgtgaccattactttttattcacatgttgatacctacgtagccttatatggattagaatgtggtctaatttggcatgaggcattcgatgcggcagttgaaaatgaccagcttggttacttgaaaagtatgcattcaataatgcctgaagccggtttctataccactgaggggcgcgtaacattacattatgatggtcctttaaaaagatattatcaagatgttatatttcatcttaaatcgtgtaaccgttgcgctagattcctacctattaatgtaaataatgaacgcgcgcacttatgtttttcaaaccattgtgtagcaaaggcaccttgcagacataaaggatttggaatacttaccgatgttgattctggagaaataaaaacactagtttttggatatcagcttgaatgtcgtttttgtaaaaaatattacgtaaatatgcctttaaactggcagagaacagcagcacaaatgaaggaagatggtcagcgccgcaggaatttcgaattattgattgctgaaatcaatcaattatcaccacaactaaattatcgaattaaaactggtcgagaattactggatgacgtgtggaatcgatttaatggtcgctgttttaattgtaatatcccactgcaaaacaaacgaaaaatgcacctcgatcacactcgcccactagctcttttatggccacttgatggtacagccacagccctttgtgcaacctgcaacactagaaaacgtgacagaccaccatcactattttacgataactttcagatttaccaactttcacaactgactggcctatctgtagctgaactaacagctccagaacctaaccacgaagtaatcacagaactacttaagcgcttagattggttttatgaggattttttaacaaaaccttcgttacttatggagcgtgatggcaagatagcagcagaacttattgtaaaagcattagataaagttctgttacgttccaaaaaaatcacgtacaaattttcatttgttgaagaatataacaaaagacgtgagcaaaatatctcgttcgatataaacgaagatactgacttcattgtttag

SEQ ID NO: 140247 - DNA, 315 bp, Enterobacter cloacae
atgcttctgctggattttagtcatatacgccagtacctgtcggatattggtgatactatccgcatcgctatagtggaccgggatgttgatattggcgcggtaatgcgttttgaactcgcaccggtgcagcccaccatctcctccggtaatttgagcccagcactcacgggccttttcagcccaggggtatgtcttctgtgtccgattgccatcaagccagaagactacgtgagcatggtaatgatgatcctctgtccattcgataacccaaaagaaccctaccaccaccttcagctgcatcatgcgatccattag

SEQ ID NO: 140248 - DNA, 1071 bp, Enterobacter cloacae
atgatcgaccttcatactgaagactctgtaatcaatcattatgccgatcgctatcgtacatacatgccaattaatgtccgtaaggcaataaaaaatgacggtattgatggtttgagttcttcacaagcctgggatgaaacattacctttaattacgactgaagatatttcacgtgataaagcacttggggcgctggtcggtttggctgttggggacgcagtcggcactactcttgagtttaagaaaagagacagtgaacatgtagcggatatgattggtggcggaccttttcatttaaaacccggtgaatggacggatgatacgtccatggcattatgtctggcggaaacttatctttcagaaaacagaatgcataccgatatacttagaaaatatctcgttaaatggtatcttaacggtgataatagcagtaatggtcggtgtttcgatattggcaatacgacgcgatttgcgcttgaacagtatttgcgtatcgggccttcctggtatggtaataccgagaaacacactgctggtaatgctggggttattcgtcaagctccggtgtctatctttcgtcgaaaatcgctgcgcgcgatttacttcgaatcccaggctcagagtcgcgcaactcatggcgcggtagagtcaattaatgcatgccaatttctcggattggtattgcactatttaattaacggttataaaaaagaagaagctttttcccctcatgttttcccactatgcgcgcgtgtaatgatcataaatgcgggtgagtataagcaaaaaactcgcgatcagattcgttcaagtggttatgtaatagatacgcttgaggccgcgatgtggtccgtatggaatacggataatttcagagatgctattctgttggccgccaatcttgccgatgatgctgacagcgttgcggcgacggcaggacaaatagcgggagcattatatggttattctggtattccgtcggagtggaaaaacaaacttgtacaacacgagcgtatcgccaaaatggcaggtgaactgtttgatagagctcctgaggataattttttataa

SEQ ID NO: 140249 - DNA, 744 bp, Enterobacter cloacae
atggcattatgtcttgcggaaacgcttcttgagaagggtgatgctgatactatatgcttcaggaataagcttctggaatggtatcagcatggttataacagttcaaatggcatctgttttgatataggtaatacaactcgctttgctttagaacaatatttaactgttggtcctaggtggagcggtaatacttcgccagaaactgcaggtaatgcttctattatcagacaagcgcctgtctcaattttttttagaaagtcattaagcaaagcgttttatgaagctaaaaaacagagcatcgccacgcacggtgccgcggaagcaataaatagcacacagtatttaagttatttacttgtacatatgattaatggcagcaataaagattttgtttttgctccacacgtcatgccgcttcagccacgtgtaatgattatcaacgcgggtgaatataagcaaaaaactcgcgatcagattcgttcaagtggttatgtcatcgatacgcttgaggccacgatgtggtccgtatggaatacggataatttcagagatgctattctgttggccgccaatcttgccgatgatgctgacagcgttgcggcgacggcggggcaaatcgcgggtgcgctgtatggttattccggtatcccacaggagtggaaagacaaattggtacaacacgaacgtatcgccagaatggcaggtgaattattcgacagggctcctgaagatactttcttgtaa

SEQ ID NO: 140250 - DNA, 258 bp, Enterobacter cloacae
gtgctccagccaggtggtggtgcgggtattgccgtcggcgtcgatttcctgcacccggttgcccatttcgtcgtagacgaaggtgacggcgttaccgagcggatcgatgcgacgggtcagaagttcgttttcatcccactcgtagcaccagttttcaccgcgctcgtcaacgtagcggacaatcagattttgcgcgttccagtagtgcttacgcgtctggccatcgtagtgctcgacggtcgtcagcccggcggctaa

SEQ ID NO: 140251 - DNA, 1161 bp, Enterobacter cloacae
gtggccattgcgtatagcaatggcgatatcgacctgccgtacatcgcgtatgcactgcacgactccgaacatccggacctcgtgaaccgggacaatcacacccgcaacgtgctgcgcacgccggcgaacaataagctgcggatggaggacaaacgcggcgaggagcatatcaagctcgccacggaatacggcaagacgcagctcaacagcgggcacctggtggacaatcagggcaaatcccgcggcaccggtagcgaactgcgcactgatgaatacggggttatccgcgccggaaagggactgttcatcagtgcagatgcacaggcgaaagcgcagggcgaagccctggacatggatgccgcgctgaaggaaatagacaggcttaatcagcaactgcaacagctggaaatagccgccgaaaatgcacaggccctgaaagcggatgtcgacagccagatacagatatttgagcagcggctgaaaccgctcaatgaagctgtgcattttacagccccggaaggcatggccctgaccagtggtgaagatatgcaactggccgcagcacgaaacgtggtcgtcaacgccgggggcgatatcagcgtcggaacaatgggcaatctgaccgcactggccggagaaaaactggggctctttgcccggatcggacaactgagcgtcaaatccggagaaggaccaatagatgtccaggcgcaaaacgccagcctgcggttgttcgctgagaagaagctgacgctgagctcggcgaatgacatctccctggccggaaaaaaacgtatcacgctgatcggcggcggaagctatctgcggctggaggcgggaaaaatagaatacggtacgacagcgtcgtatctgcgtaaggtgaagcggactatgtttgctggtgcacattcaacagcaatgtcatcaatatcaatggcattagttgaagatttaatcaggaatggattcttcgatgaacaattccggatcttgaatgatagtggtaagcctatggccaatgtgccgtattttatctctagcgaaagtggtgaaacatttaaaggggtcaccgataatcaaggtctgtgcaaacgcgttttttcaaaggaatcatccaaacttaccgtttggctaggtgtccaagctttggagagatggtag

SEQ ID NO: 140252 - DNA, 885 bp, Enterobacter cloacae
atgactgagcattcaactttaactaatgaaattccacattcaacgcacgacgtaactagtttgttaatgccagctcgtgcgtttttctttattattgtcgacgagcctgggaaagatggttttttggtaagaaaaatatatgcttcaaaatctaacccttatttgtcccaaatggatttatcgccactaagattactttcagagacagacccagagcggtatggcttacttcccaaaagttttgatacaacagttagtgttgctgagcatgtgatgggtaaaaacaaatcaccctatatctctacaagctctgtttttcccggcggttctcccagatttgatggtaagtcaatatatattgacgtcgagaaagcattaaaatctggagcagagttagttacgactgatgaaattttgaaagcacttgatgaatacaaagttaaaaatccacatttggttaaacgtgttgataagattgcagcatatgtaagagatgttgataaggaaattttgataaagggtgagaaaatacctgcgaaagccattttcacaccagaatctcttagcttagtaaaagggatggcgaaagcaggtagggtagttcaggtcgtagggatagttcttacagcgtatgatcttgaacaagccactgaaaaatctataaagaccggaagtgtaaaacctatcagcgctgaagttatacgacaagcagggggttggggcggattcgtcgcgggagctaaaataggaaccgttgctggtgcggcagtgggagtggagacaggtccaggtgcagttattacaggacttattggtggtataatattcggctgtgctgggtattatggtgcggactggattgcggattacatagatgaaaattaa

SEQ ID NO: 140253 - DNA, 555 bp, Enterobacter cloacae
atgaaaattaaatttattgattttttcagaaaaaaaaatgatctccaagatatttactcagcctcaggctttgaagtcttggcaaaatcgataaatacatacccattttttttgtgtctgaaaagtaacaatgtatatgcatattcatcaagatttatggttaaacctggcgatgtagataaagtagaagaaataatagagtctttttttcggaaaaaaattgaaaatgaaaaggtatgtttaatcaataatgagaaaatagtacactactataagtttaatgaacttagtcaaatagtgcttgatataatcactaatgataatgatttgattagaaaactctgcaatgagcactttgaaccgccagctcctgatactgtttttccatattctgattttgaatcagtgggcagtttacaaggacagataggtctgtggtggaacgtttactggtctcctttttggatatctttatctgaagaagataaagcgaaatacttagagcgtaataacatatctggtgaattgagagaatttttgatacttcatagttaa

SEQ ID NO: 140254 - DNA, 489 bp, Enterobacter cloacae
atgaatacaaataattacgatcgtttctttttatttgaggacgtcggttacgatatacatgattatattgaagtggtcgctattattgttaagaggtggtctaatagacgtgttgagaggttctcagaagataaacgctttagcccatacgtatatattaaaggaatgagtcccgagcggataaaaaatttaaaacgggagctagcgagagctggatatcctccaaaggatggttttgatttctttggtgatgattttagcaccgattcaataatgcaggatataaatgatttgtcttactataaagtgagattcattaacgatattcagtatttacatgaaatattatcgtgctctactagaagaaaagaaatttaccagttttattttaacaagcctatgtatgaatatgagtcctcgcgtggaaaagtaataaaaatccaagtgaaatcattagatatgtgcaaaaggatacttaaaaatgactga

SEQ ID NO: 140255 - DNA, 903 bp, Enterobacter cloacae
atgtttctcagggagtcaaaattgaatatttatgcattgatagtaacatttaatcccgatctagactcttttgggaataatatagctgcgatcgccaaacaagttgaaaaagttattgttgttgataatagtaatgatgcgaattgccagctcgatttgaaaagtttccttgaaggagtaaacgatgtaattctcattcagcctaatgaaaatttaggcatagcatatgcgcaaaatatcggatttgtatatgctatgaaaaataaagctgattacatcatcacttttgatcaggactcatcagttgaggatggtttaattgatgcgttatatagtgaatatcagagaatcaaagaacaaagttacataaaaattgcatgtattggtccatctgttattaatgaaagggataatacaagatatgaaaaatacttccggaatagtattgcaataactgacacagtatttagtgttaaatcaatcatatcatctggtaccttgtataatattgatgtgttcgccgcaattggctttaataaagccgaatggtttattgactcgattgatatcgagtggtgttatagagccagatatcttggatatcatgttttgatgacaacaaccgtcgcaatgcgtcataacttaggtgccaaggatttgaagcttccgattgggaaatcgatcaatataggatcgcctttcagactctattatgtatatcgcaactggatcttctctttacgtgagccacatttcgaaataagttacaaaattaaattattaattatgatgccgctgaaattctttattttctcgaatgtatccccccgcaagactaggatggggtttatgcttcgtggaataaaagatggcatcatgaaaaaacattctttcttgaaataa

SEQ ID NO: 140256 - DNA, 501 bp, Enterobacter cloacae; identical to SEQ ID NO: 140081

SEQ ID NO: 140257 - DNA, 210 bp, Enterobacter cloacae
gtgggtgtgggtgcgactgcgcctcaggcggccgataaaatccacaccgatttcgagataggctttattcgtacacagactatcgtgtttgaagactttatcacctacaagggagagcaaggcgcgaaagaaacaggcaagatgcgtgcggaaggcaaagattacatcgttaaagatggcgatgtgatgaacttcttgtttaacctttga

SEQ ID NO: 140258 - DNA, 228 bp, Enterobacter cloacae
atgtggtccgtatggaatacggataatttccgtgatgccattctgctggccgccaatcttgccgatgatgctgacagcgttgcggcgacggtgggacaaatagcgggggcgttgtatggttattccgctatcccgcaggactggaaagataaactcgtacaacacgaacgtattgccacaatggcgggtaaactattcgatagagcacctgaggataattttttatag

SEQ ID NO: 140259 - DNA, 129 bp, Enterobacter cloacae
atgaagatgaagaactttaacatttacctgggcgcctacgcttcgtgggtgaacgcgtcgccgaaaaagggaagcgataagaacgacgatcgttatggcggtcgtgtgcggtttaaatattatttctag

SEQ ID NO: 140260 - DNA, 453 bp, Enterobacter cloacae
gtggatagcaatggctttataaaacaggcatccccggtcgtcaaagtcttctctaatggtaaatatgaaactaacgacgaatcagaaggcgtcacggtcactcgtctggatatcggacaataccttattgaaggctgtaaagcactcaattcagacgctgcctggggcggtatcgacggaggatttgaaatccccacagacaggaataagcaaccgctcatatggctggactacgaggttaacgcagacggctctgtgctggtaaaaacctatcaccgcgaacattcttctgcgccagcatttgccaggaatgagcgtgatggattggcagatggtgagccggttgacatcccggctcaccagttcgtcagcgttcgtgtagaaatgccagttgacagcatctggaatcagaaacaaacggaagaggctttaaagcaggaacagggctcgtaa

SEQ ID NO: 140261 - DNA, 222 bp, Enterobacter cloacae
atgaacaaatttacccccgaatatcgaaaacatcttctccggccaatccctgaccggaaacttagcccgcaagaatgcgccgatcgcaaagagctttaccagatcatccgtgaggagcgtgagaacgatacatcaccggcaaagccatcgacttacaggccatgtgatccatatctgaatgacaaccgcaaaggtcttggcggtgcttcaaggagtgactaa

SEQ ID NO: 140262 - DNA, 198 bp, Enterobacter cloacae
atgaatattacatgcgagtgcgtagacatgcgcacatccgtcggcccccacaacaccatcaaagttgagatggaaggcgttgtcctggccggcaccgttaaaacccgtgacgtactcccccaactcgacggcgcagaagtcatcgaatggctggctgagcagggttacatcatcactcatcaggagcgcgcagcatga

SEQ ID NO: 140263 - DNA, 1305 bp, Enterobacter cloacae
atgacagctgaaattgcagtatataatcgttctggcatagcattagccgcagactccgctgtaactactacaaatggcttctccgagaaaatatataataacgcagataaactatttgaattatcaaagcatcatcccgtcgcactaatgatatataataatgcgggtatatgcggcgccccatgggaattgatgattaaagcttacaggaaaagccttaatgacaagtcttttgactttattagcgagtatgctgccgatttctttagtttcgttcagagcaaccagaatattgtcacctttgatatgcaggggaaatatttctttagcttgttttcagatgccatcctacccaaactgttaaaggatgtgcaggatgaggacgttgctggcttcattaaaataaataatgccgccccatcttttgatgaatatcacaatttcatcgagcaacggtgccgaagaaaattttctgagataaacgagaacccattttttgattcatttacgcaggaagatttcgaattagcatttaatgagctatctccaataacatatcaattatgcgccttaagaatacaaccaaatattgatactcctgaaaccccataccctgaatcattaaaagaagcgctagcattgcttctttcatcttatatgtgtaaagaaaatgatttgcagacttattctgggattgtttttgctggctatggggacgaggaattctatcctgcaatagagtcacatcatatctacggtgtttataatggaaaaattatgaaaccaagcaccaaggataaagacaacagtggctcttcaattggaatattccctttcgcacaagaggatgaggtgcacacctttatgcaaggctgcagccaaggaattataaagtgtgtagaagattcagtatttggctctcttcagaaattaaaaatggaagtgactggattgatatcggcacagcatccgtcaatccctagatatgagattgaagcagccttcgatgcaaccattgcaacgactcaaggtgatactctcgaagcacttcaaaaccatatgacgttaaatcatgtgcaaaaagtgctttcagtgctgggttctctagccaaggttgatttagggtatatggctgaatcacttgtaaaccttaccgcctttaagcgtaaagtctcaaatgatagcgacagtgttggcggacctattgacgttgctgtattatctaagggtgatggcttcgtttggatgaaacgcaagcattattttgataaagaactgaattatcaattttttaagagaaaatga

SEQ ID NO: 140264 - DNA, 543 bp, Enterobacter cloacae
atgcattcacttgcgtatcaacacaataccggaatacacacgggagcgatgataaaccgcgctcaagctaaagcggcgccaggccacgaaaagatccgcgatgcggtccgggcatggtcgtcggcgctggacaatcaggacgtcgtttcggcgctgatcatcaacgaataccgggagcagggcggtaccgccatcagctttccggaagacatcagccgggcgcgccagaaactgtttcgcttcctggataatcgcttcgactccgagcagtaccgcgagaacgtgcgccagctgacgcccgcaatcatggccgtgctgcctgttgagtatcgcactcgccttatcggtgccgattgcaaaatgtctcgtctggctgaagccgagaaagaactcgctgaggctaaacaggccgtgctgctggacgctccagagcatcagaagctgaaagaggtaagcgagggtatagcgtcgctgttccgcctcatgccggagcaggtaggaccgctgatgacgatggttacatcgatgctgggggttatatga

SEQ ID NO: 140265 - DNA, 564 bp, Enterobacter cloacae
atgacaaacattaacgcagtggaaaaaatggctgaattaatgcagcagatggaagagaactcgccgcgggtggctgctctccaatattgcctgtcggaggttgccaaacgcattacagaacttgagcagaagcttgcagtgtctcagcgcgagttccgtgctgctgatgcgactatcgagaatctgcagatgaagcttgagaagatggctgcggagaatgcggggctgaaagattttgtaaaaacctgctttcgtgctgcggctgatggtgcatcactggatggtgcagatattcaggagcttggcgagcgtcttggtttgtttggacgggaaacctatcaaccagtgctgcacggttacatctgcggtcatgaggctggcgaggacagcgtgtatgtcatgaagaaaaccacagccaccgacgctttcctggctgaagtgagggcgcagggtgccgaagagtgcgtgcggcagttggttacatcggatgacgatgatttctctgatgcgccgaatgtatgcgccgaggtggcacgtcaatttcgcaaaggagtgcagtcatga

SEQ ID NO: 140266 - DNA, 666 bp, Enterobacter cloacae
atgagcactattaccaaagaattcaccaaagagcagttacagcaaattatcgaaactgaccacgttcaatgtggtgaggcttctgcgctggcgcgtatagcactggcatcgctcgaagtggagcctgtggcgtacatgtacaaagacaatcttcacgctgatgctcggttcagcctacatacaagatttggcaactggtctcaggaagatatcaacgagtacgaaattacagagattccactctacaccgccccgccagcgccggtatctgtgcctgatgcttacatacgagatgctcgcggaagaatgattctaaatgggaagcaggagccgagaattggatacagtgcaggctggaacgcctgccgcgccgccatgcttcagggtgccgaacctgtaacgacggcttacaagttgccattcgagcagtggctttcgcagcagacaggcaccattgacgtcgaatgtggatgcgtgatgacggaggtgtttttccactggttgcgcgttgcgtatgaggctggcaactctccggtgactccggatggttgggtgctggtgccagaagaacccacccatgaaatgcttgaggctggtgatgaacaattcggaacttacgatgtgtatcgccggatgatagcagcatcaccgcagcaggaggcatga

SEQ ID NO: 140267 - DNA, 438 bp, Enterobacter cloacae
atgaaacagcaattcctcctccgaaacaccaacatccgcgccaatgccatcagcgcgattaaccagctgcagctcaacgagaagcgaccggtcgtcatcgagataaaagagatgacccgctccatcgaccagaattccaagctttgggcaattttgggcgacatcagcaaccaggttgaatggcatggccgcaagctctcctctgagaactggaagcatattttcaccgccgcactggttaagcaggaagtcgtgccgaacctcaccggtgatggcttcgtggtgctgggccagtcaaccagcaaaatgaccgtcggccagatgcgcgacctcatcgagctaatccatgcctttggtgctgagcgtaacgtccgttggggcgatgaatcccgcttagcaatggaatgggcctctcgctttggaggtgccagtggctag

SEQ ID NO: 140268 - DNA, 669 bp, Enterobacter cloacae
atgagcatttatcaacgcatcaacggcgctgactggcgcaatatctgggtagtcggcgatctgcatggctgctacaccaacctcatgacccagcttggcaacgtggacttcgacccggcgcaggatctgcttatctccgttggcgacctcatcgaccgcggcaccgaaaacgtggagtgcctggatctgattactcagccatggttccgggcagttcgtggcaaccatgagcagatgatgattgatggcctgtcagcgcatggcaacgttaatcactgggtggcaaatggcggcggctggttcttctatctggactacgacaaagagattctggctaaggcgctggctcacaaagcggctgaccttccgctgatcatcgaactggtaaccggcgaccggaaggtggtcatctgccacgccgactaccctcacaacgagtatgaattcaacaagccagttccagaggaaatggttatctggaatcgtgagcgaatcagcgatgcgcaggacggcattgtttcggagattaccggtgccgacctgtttattttcggccacaccccagcgcgtcagcctctcaaatacgccaaccaaatgtacatcgataccggtgccgttttctgcggaaatctaacactggtgcaggttcagggcggtgaccatgcgtaa

SEQ ID NO: 140269 - DNA, 546 bp, Enterobacter cloacae
atgacaaaacaaaccgtgaatgtctacggcatttctgtccgggttgactccgcagggagatataacctgaacgatctgcatgcggcagccgttgccaatggtgaggcgacagaatcacaaaggccgaataaattcatacgaagtgcagcggtaaagcgctttgtttctgcactggactccagaggacaaaaatgtcgtctggaagaaaatcaatcacttaacattgtgaatggtggtgttaaccaaggcgtctgggctgctgagttgttagctattcgctatgcggcatggatcaggcctgaatttgaaattcgcgtttatgaaacattccgggaagcggtacttaacggcatcaccaatatgtctcgcctcaacaggcttgacctgctgatcgcaaatgagaccaaagaggtcagcgcatgtgcccgggcaatgaataagtggggcgtcggtggtcgcaagaagcttctcaattgcgctcgtgagcggatcgtcagtcagatggaccctgacatggtcacgcttatggaagcgaaagcagggtag

SEQ ID NO: 140270 - DNA, 576 bp, Enterobacter cloacae
atggagctaactgaataccagaaagccctattcgatgatctgacaaaactacagcagaagtttgcgttaggcatcgtaaaggggcttagccaaattgatgcgtacaaacaagccggtggtaaggccaagaaagatgaaaccgccagtgcatgtgcgagtgaaatcctaaccaatcctaaggtaaaggcatttatcgatgagatgaacaaggaagccatcacaaacgcggttatgacgcgacaggaagccctggaacggctttcagtgatgggaagggcatctttgcatgagatggttgaatttagcgaggtagagctcggcacagaagataacggcaagccaatcatccaggctggctggaagtttaaagattcagcattgcagagcgctggctcgttatcagcgatctcagagctcacggcgggtaagcgtggaatatcaatcaagcttcacgatccgaaagctgccatcaagcaactcgcagagttgcagggatgggaacctccgaaagagtcgaagctaacgattacggccacaaagccattgtcggaactttttgaagatgacgaaacttaa

SEQ ID NO: 140271 - DNA, 1341 bp, Enterobacter cloacae
atgacgaaacttaaccctgtattcaagccgttcattaaacctcatcgctacaaggtggcaaagggcggtcgaggcagcggcaagtcatggtcaatcgcacgcctgcttgttgagatagcgcgcagaggttcatatcgtttcctgtgcgctcgtgagtttcaggccagtattgctgactccgttatccaactgatagccgacactatcgaacgcgaaggctacaaccacgaattcgagattcagaaggtctacatccggcacattgccaccaacagcctgtttatgttctacggcataaagaacaacatcacgaaagtgaagtcactggaaggcattgacatctgttggatagaagaggccgaggcagtgaccaaggccagttgggatgtgctgatacctaccatccgtaagcccggtagtgagatatgggtaagctacaacccgaagaacatcctcgacgacacgcaccaacgattcgttatcaacccacccgatgacatttgcctgctaaccgttaactggaacgataaccctcacttccctgacgttctgcgcctggaaatggaagagtgcaagcgcaaagacttcgacctctaccagcatatctgggaaggtcatccagtagcagatagcgacctagcgattatcaagccttcatggatcgcagctgcagtagacgcacacatcaaactcaacttcacggcatcaggcgctaagagaattggctttgacgttgcagacgaaggcgaagatagcaacgcgatcacaatggctcacggagcagtagtaaaagatgtgcaggaatggagccgtggcgatgtcatcgagtctgctaacagggttaaccagtacgcagacagcatcaacgctgacaaggttatttacgattcaatcggtgtcggcgccggcgtaaaggctcagctaaaccggattgccaaaagccaggttgaaggtttcaacgctgcggctgctgtatttgagccagatcgcgaatacatgccagggaaaacgaacaaagacatgttctccaacctaaaggcgcaggcgtggtggctggtaaggcagagattctataacacctggagagctatagagcatggcgaaacatttccagacgaccaattaataagcctctcttctgaaataaaaaaccttgaatacctcaaggctgaattgtcacgcccccgtatcgattacgacggcaacggcagggtgaaagttgagagtaaaaaggacatgaaaaagcgcggcataccctcgccgaacatggccgactccttgattatggcctttgcgccaacttctaacgctctggcgaggctaaaggctcttgccagttaa

SEQ ID NO: 140272 - DNA, 1257 bp, Enterobacter cloacae
atggctaaacgtaacaatagacagcagaagaaaatcgacaagcaaacacgcatggacagctatcagaatgtgttcatgaacattggcaccggtggcgacagatcggcgtatagccgcatccgcacggcacacctgctgacgcgcggggttcttgatagcatctatcttggagacggattaggccggcgcattgtcgatgtcgtggccgatgagatgttccgtgccggatttacggtggaaggtgcaaacaacgagccagaaatcatgtctcggtgggatgagctaaacctgactcagcagtttactgacgcagtggcatgggctcgcttatatggcggctctctgatgctgttcggtgtcaatgacggcggagaactaacatcagagctaggtgacggtgagcttgagtttgttcgggtgtatgaccgttaccaggtacagccgttcttgcgcgatctaaacccagatagcgtgacctatggggaaatcattcagtaccagattaaccctatctctggcaccccatattacgtacacgctagccggtgccacatcttcgacggcgagcggttgccgaaccaaattcgacatcagaatcagggctggggcgcttcttgcttgcaaggcatctatcaggcactgactgactacggcatgagtcatgcacatgctacaagccttcttgagcgtaagcagcagggtgtttggtctgccgatgatctggctgagctctgtaaggatggggaagggcgagaaacggtgcaagcccgccttaacatggtggacatgacacgcagtaacgggaacacgatcggggttgatgccaaaactgagaagtacgagttgcttaacggctcgcttgaaggcgtagttgacgttcaagaccgtaagcagctgcgtatctctgcgcttacaggcattgacgagcaaatccttttcactaagacaccgacaggtcagggcgcggataaaaccaccgttcctgagtcatggaagcagctaattgggcgcaagcagaaagacgaggcgagacctgcagttgaaaaggcggttagtctcctcactagcgacccaacatggacaatcaagttcaatccactatctgtccctaccgagaaagagcaggcagaaactgcgaacttgtggtcacaggctgatgagcgttattcacagcttggatgggtaagtaacgatgaaggcatcgctaccctgcaaaaacgcggaggctacgtctacccggagatgaatgatggctag

SEQ ID NO: 140273 - DNA, 807 bp, Enterobacter cloacae
atggctagagtatggcttcatccctacggagtagagcgtgactacaccagcgcgcttgtgaaagccaccaggcagttcaacagagaaatcaactcaacatacggtgatatccgcttcgatggatggcaggacgacatggcggccattctgccctatctgcgcaatgcaggtaacaggatattccagccggtaatcgagcgcctgccgtcattcttctcgcttaccagtcagttcaacgataaacaatggcgcctaatcgttaagggcggaacgggcgtagacctcccgccatctcaagcagtcatcgccggacaaaccactattcctgtttcatctggcgtgctgggtgtcgatgcttatcgagctgaggcgtggcttcgtgaaatgcaagaactttgggtcgctgaaaacgtcaggctgattaagtccatccctgctgatgagctatctgacatggaaggcatcattcagcgtggcgtaatgaatggctccagtgccgacactatcaagaagcagattcaggagcgctacggtgtcactgagcgaagagcaaagttgattgctgtagaccagatcgggaaagccaacgccgcactaacaaagcagcgacaggccgatgccgggatatctggatacaagtggcgaggtgttcttgatgagcgcgaaaggccagagcacagagcgcgtgaaggcaaatcgtacaagtggaataacccgccacccgatggtcaccccgggcagccaatccgctgccgatgctatgcagagcctgactgggctggttctgtttttgatattggagagtga

SEQ ID NO: 140274 - DNA, 258 bp, Enterobacter cloacae
gtggaaaacgtagagagattgcgcgagatcatccaggaaattatagctactggtgcacaggtcagcgatgtcaaatatgtcggattcggcgtttaccagggtgtcgcaggcggggcatataaagtaactgaaagccaaatggttaatatctgcaacctcctaaagatggcaacgcctagcagtcggttatgggatagtgaggcggattttatcatttgccagcccggaagccactcgcactctatgcatcataagtga

SEQ ID NO: 140275 - DNA, 138 bp, Enterobacter cloacae
atgaacaaaattgaaaggctcaagatcattttaggggtgctcatggctggggccgttctgcccctcgcagtatttattgcgatgttcatcccctacatgctgcttgtaaaacaattcgttggcttgtttgcgcgttga

SEQ ID NO: 140276 - DNA, 1101 bp, Enterobacter cloacae
atgaaaacagtatctcgcttcgatgtgggagagcttcgtgcgtccgtaaatgaggatggatatctggaggatgttccggtagttggccgcattggcatccagttataccgaaatccagacggctcggtacgacgcgaactacgcccgccagaagaggtattcaacgctgactctttggcaagctttaagggcaagccgatcaccatcggccaccctggcgcggttaactcccgaaacgccaaaaaacacatggttggcaccatgcttgagccgggcagacaggacggcgacaacgtcaaagttcctgtcatggtctacgacgaaagcgcaatcacatcggctactagcggcaaaacaaagcaactatccctcggttaccggcttgacctcgacgagacgccgggagagtggaatgggcagccgtatgacgccgttcaacgaaacatccgcatcaatcatcttgcccttgtatcgaaagctcgggctggtgatgtagcaaccctgaatctcgacggtgacgaagaaatcactttagacgatgacgacaaccaaccagaaggtaaaacaatgcagaaattgcgactcgacaacgggcttgagtacgacgcttcacctgaagtcgtcgtggcgttcaacgcccttaaacaggatgcagaggacgctaataccaagctgtccgaagcgcaaaccactatttcaacgatcaccgccgaacgcgacactctgaaagctgacgcggctggcttcgaagataagctgaagcaggctcgagaagacgccgccgccaccatcaaggctcgcgccgacctcgaggcgaaggcagataaacacggcatcaagcatgacggcatggatgacattgcagtcaaaaaggccgtaattgccaagctgaagcctgcgatgaagctcgacggtaaagatgacacctatgtcaatgttgctttcgatatggctatcgaggcggcgccaatggagcagcagcgtaagatcgtcaaccaagacaaggccgaatcgcgcaatgacggtgaaaacgggccagccgctaaagcagctcgccagaaaatgctcgaccgcatgagcggcaaaaaggagacagcataa

SEQ ID NO: 140277 - DNA, 519 bp, Enterobacter cloacae
atgcctgttcaaacttcctacgacaacgacatgcagatcgcaatgccgggtatgcgttcagactccacccaccagatcaccgatggctgcaacgccgctcagggcgcaatcaagcctggctacgtcgttgcacgggtatctaatgccaatgataagcgcgttgttaagcaggtttctgcagctggtgacgccgccaacctgatgggcatttgccgcttcagtcactatggctgcgttaagggtcaatacgaagcaggtgatgcggttaacgtgatgacttggggtcgaatctgggcagtaaccactctgacagccgcaccaactatgggtgcgctggtaaacgtgattacctccggcgatgacgctggcaaagtggcggccaccggcggctctcccgccttgggctgggtgcttaccggcaaattcaccacattcaccgacaacactggttccgctgtgaatctggctgaagtacaaatccgcaaccagacctcagagccagcctcttctgaggcataa

SEQ ID NO: 140278 - DNA, 939 bp, Enterobacter cloacae
atggaaaatatgaattacgacgaagcggatcttaccgctattgaacatggggcggcggccaacggaattcgactggatgaaggtgaatccatcttcctggctcgtgagctggactacgttaagtccaaggtttacgaaaaagaatatcccgcactgaccgcgaccacgctgttcccggtcacatctgaaatcccatcgtacgccaagaccttcacgtacggcgtatgggatgcagtgggcatggcgcggatcatcgcagattatgcagatgacctgccaaacgtgggcgttaactaccgagaagaaactggcaaggtattcagtctgggcaacttctacgagtacagcctgatggaaattcgcgcttctcaggcgaccgggaaaaaccttcctactcgactggccaacgctgcccgccgcgctcatgacgtcaaagttaatgacctggctttctatggcgataccgattatcagattgtcggcgtgctcgatcacccaaacatcccggtaaccacctctgctggctggacaactggcgcaatcgcttcaggcgaactggaagatgcggtatccgctatcgaaacggtgaccaaaggcctgcacgcggcgaacgttatcgcactgccgccaagcgcctttaaagtactgtccaagccgatgcctaacaccaacacatcttacatgacctacttcaatacccagtatccgggcatgcagtgggttcgtgttaacgagctggaagacatcgacggcaccggcactaaagcagcgctggtgatggagcgtagtgctgacaacgcctccatggaaatcccgcagccgtttgagcagttgccgccgcaggctaacaacctggcgttcaagattccatgccacagccgcgctaccggcgttcaggtttacctgccgctgaccatgcatctcatcaaaggcatttaa

SEQ ID NO: 140279 - DNA, 204 bp, Enterobacter cloacae
atgaaaattactaacgcatcagcacgactgtattacatcgcaggccagaaactggctccgggtcagactgccgaagtagatgattcctggaaggacaataaaacggtgcaggcatccatcaccaaaggtgagctgcgactcgctaataaagatgaagccgtaaccgccagtcaggtagagaaaaaagagaaggacaagaagtaa

SEQ ID NO: 140280 - DNA, 408 bp, Enterobacter cloacae
atgaacattgccgcatttgaaggtcttacgcctctggaaatcttccgcaagctagcgcctgaatttgcggctgttcctgatgaggttgttcagggttacatcgacctggcatcactttttgtttgcgaagacgagtacggagacgcatataacgtggctctggctctaatggctgcccatatcatggcatcgcctggcggttactctgataacggttccacatcatctggtcgcatcctctcacgcaaggagggtgatctggcaatcacttatggaaacgtatcaagtgataccgattacctcagcgggactacatacggaaacctgctgcaacttctccgcaagaagaggggggcaggattttctattatgactcgcggagtcgtggggggatgcttgtgtccgtaa

SEQ ID NO: 140281 - DNA, 468 bp, Enterobacter cloacae
atgcttgtgtccgtaaaaatcacagacaacaagcggcaatgggaaaggttcaggcgggagatcaaggcaaccggaagcaaagaggtagttgtaggcattcagaagggcgaggttaatgatggagttcttgtcgctgaatacgcggcatggaacgaattcggcactagaacaattccagcacgcccattcatgcgcacatacttcgacgcatcggtctctcggctggaaaggttcgctacaaatggagtaacgcaaattctgctcggtagagctaccttttctcagtttctgaatgcggctggcgtatttatggtggatggggtcaagaagagtatttctggtggcacctggactccaaactctccggtgacgatagctctgaagggttcatcaaagccgcttatagacactggcgtaatgcttaattcagtcaccttcgccattcatgattacggaaggtcacaatga

SEQ ID NO: 140282 - DNA, 348 bp, Enterobacter cloacae
atgagcaatccgtttcgcaggccttatcaggtatatactccatcgccttcggctttggttaacggcgtcattgttgatggggtaatgacggagtcaaccgcttacttcagcgtgcaaagtattaaagatacgcaggagattgagagtctggaaggagggaggaggttaactgattatcgccggctgtacagcgacacaaagcttcagattactgatgatttccccatggctcagccttcacttgtcgttattgatggctttaactacgaagttaagcaccgtgaaccatggcaaaacggaatcataccccactataaatattatgtggtaaggaaacgcgatggctga

SEQ ID NO: 140283 - DNA, 540 bp, Enterobacter cloacae
atggctgaaaccacagtatcaaccttcgttcctgatgctgtagagtctgccgcttaccgtgttttgtcccagctattacccgtacctctcgcttacgccaatcagaataactcccggcttcctctgccttatgccacgcttcgtgtatcaacgcgtacgaccattggcagggatgagcatggcgaagtagatgatgagggtgtaatgccgtcacacggcgttagagaaggaacggtgatggttaatgtgtacggcggaagcgcacgagagcattgcgacgatctgattaataacatccgtaaaaccacatcacgctacctgatgcgcagagaaaaattcgttatcgcaaacagcgcccaggttaacgaccttacaggtctgcgagatgaagcaaacttcgaagcgatggcgaatgtagaccttacattccgctacaccggcaagtacacggataacgtagggctcatagaaaccgttgatgcgacaggcgacatcggcggaatagaaacacacctcactatcgccgtcacatccgactaa

SEQ ID NO: 140284 - DNA, 531 bp, Enterobacter cloacae
atggcacttgagtcaatcagcgctgaagagctgaggagtttgcgcacctacgatccggaaacaggccaatggaagcactgctcagacgccggtaatggcattcgaagtggagaccaggtaagcctatgcgcagacactaatggctaccttaccatgacggttaagcggaagctctatttggctcatcgcctcgctttcctgtacatgactggaagttggcctcctgatcaggttgaccatgtgaatggcgtgataacagataacagatggtgcaatttgaggcctgcaagccgtgaagaaaacacgcgacacagagctataagcgcaagcaaaaagaccactgatttcaaaggcgtttacaaacgaaatgaccgcccaaacaaacagtatgaagctcgaattggcgtggatggaaaatacaaatcactaggtagttatcaggatgccgcaatagctgcgtgggtttataacctcttcgctatagctttacacggcgaatttgcaattttaaacgagttaaaggtggtttaa

SEQ ID NO: 140285 - DNA, 1341 bp, Enterobacter cloacae
atggcctcattaagtcaaattgccaacgtgactatttcgctggacacagcgagtatcgcgaaggcgtcattcggcattccacttgcagtttcgcctacaacggcattcagtgagcgaatccggaaatattcaagctacagtgcggcacagcaggacggacttgacccgcagacgctcaaagcgctctcagcagtatttagtcagaccccgcgcccaaatcaggcatgggtaggtcgccgaaacgccgtttctgttgatctgacagtaaccaacgcgacgatcacaatgggcaacattttcgcattcagcgtgaatggcaccaccgtaacgtacaccgcagcgagcggcgatgatgcttctgacgtatataccggtctgaaaacagcgctggcggcacaatctgtagttgatgcgttgtttaccagcaccgctgatgctgaagggctgcacctggtagtgaaagttcctgagacagcaaccatcgttaagccagtgaccaacctgtcaatcgcaaccgcaggctcagcagacggattagaagcggaccttaacgccattcagcaggaagacccgggctggtacggctttgctctggtagagcgtggtgacgcactaattcaggatgcggcggcatgggctgagacgcagaccaaactgttcttcgcgtgcagcaatactgctgatatctggacatctgctaatgacgatatcgcatctcagttgcaggacctgcaatatctgcgtacagctctgattgctcacaaggcagcagcgactgagtatcctgaaatggcatggatgggtcgatgcttcaccatcgcgcccggtggcgaaacgtgggcgcttaaaacactggcatccatcacgcctagcaagttcagcgacacagagcagagctacatcttccagaagaacgccaatgcttacgagcagtacgccgaaaatacctacctgataaacaaaggcaaggttgcatctggcgaatggattgatgttgtgcgattccgtgactggcttgtagacaccattcagaagaatatggcttctctggtgatccgccagaagaaggtgccttacaccaacggcggtattgccctcatcgtcaacaacctgaacggttcacttattcaggggcagcaggcaggtggaatcgctcctgatgagcgtgacagcgaaggcaacacaatccctgggttccgtatcacttatccaaatgcagccgacgtttctgctgatatcaaagctacccgaactctctatatcgagtttgtggcgcttctggctggcgcaatccaggtggtcgaaatcaaaggctcactcacctatagctacgagggctaa

SEQ ID NO: 140286 - DNA, 447 bp, Enterobacter cloacae
atggctgctgaattaactggctcttatgacggctcagaagtatttgtcactatcggcccgcttctattaaccggcttcagtgatggagactcaattactgctcgtaagaacgccaacttctatgaatcacgcgcaggtctcgatggctcagtaggtcgcgcgcgcgtaacggataagcgcgggcagatcgagcttcatcttttgcagacatccgcggcaaacgacgaactatctgcactgatgaaccttgattcattaacgcaggacggcaaggcagtgtatccggtatcagtaactgacttctctggtcgcactgttatcgcagcaggccaggcgtggctttatcagcttggcgacgtggccttctcaactaacgaggttggtgaacgcatttacacctttgagtgtgctgacctgaaattctccctcggtggtaacaacgtttaa

SEQ ID NO: 140287 - DNA, 438 bp, Enterobacter cloacae
atgtctcaggaattcgctaccttccatatcggtgacaaagagtttaaagccgccaaaatgaacgccttcgctgcggcaaagcacttagtaaaactaaaaacgctgcttgataaaggcctggcttcaggcggtgatgcaaacgccattcaattactggccggcatcgatgagaaaacgttggaggaagtaatcatccctatcctgcgcgactcatcaacattcagcgttactgacgagaagaaaattgacagccctaacgcaatgaaccttgtgttcaccgtagacacgctgttcgacttcttcgagctgtgctgggaagtactgaagctcaatttcacccctttttttacgaaagttctcaccctgtttgggttaagcccagaagagctggcaaatcgggttcagtcactggcgaaaagcgcgacccaggaaagctaa

SEQ ID NO: 140288 - DNA, 1572 bp, Enterobacter cloacae
atggttattcgagaatttctgatccgccttgggctcactggctcagatagtgtgggtcgagggctggacagggtagacggaagggtcgataaaaccattcagtcattcaatgcgcttggcggtgttcttgctacggtattcggtgctgtaaccatctcaaacattgccaaaactgctgacgagatgcagtctctggaggctcgaattggaatgctgccacagactatcactaccggcgcagaagcattcgacactgtggctcaaagggcaagtgcagcaaggcagggcattgaagagtacgcatcattttacattaaggctggtaacgccactcaggacttctataaagaccaggagcaggttttacagctcaccgatgcagtatccatagcgcttgccgcttctggctcaacagccgttgcgcaggggcaggctttcttccagcttggtcaggcaattggatctccagctgtccagatggaagagatgaatacgcttatcgatgtagctcctgaccttttcagggcgctcggtaaagccatcccaggggctaacaacaaccttaaggctttcatctccaccggcaaggtaacgggtaaaatgcttgctgaagggttgattaaagtcctcccgcaattcgtcgaccagtttaaacaaatgccaatgaccattggtcaggcgctcgtactggtaaacaacagatggtcgatgtttatcaacagacttaaccgcagcagcggagcggtgacatgggtggcaaataagttcctttggatggctgataaaatcgagtatgcactggactcagttatcgatgctcttggtggcgcagagaatgccgtaaaactgcttggagtagctcttggcgcagcaggccttgtaggttctgtttatctcttatccgcagcatttaccgcactcacaagccctgtatttttggtgatagctgcacttgcagctctgtttcttgttggtgaggacgttaactcctggcttaatggcaacaagtcgcttcttggagacatgatcgggcctgtatctgagtacaccgattcgattaactctctaaaagtcgcgcttaccgacatgaaagatatggctgtatgggcgctgaatgttctcaacagtctcgccaacttctttaactccagtcaggacaaggttcaggattttggagataagattgggactacaaaatttgcaccatggctgaaggaaaaggcaggatggcttgttgaagatttaggcaagtgggcgtcatggggaaatgcacaaacaaacggtgcatttgatatccccagaatgtggtcagatacgcttgctggcgtgcgaggcttcaaccaggacgcaaaaggtggaaatactctactccccagctatcaatctcttgcattgccaccgccatcagcagcgtctggtcctaagatagacgtcaacatcggcaatatctcagtgcctgccggaacgtctgacgagcaggttaaattccttcaggatagcgccaaatcagcattcagtgactacggatggaatgcgctgggtaacacattaaacttcaacactggaggttag

SEQ ID NO: 140289 - DNA, 717 bp, Enterobacter cloacae
atggcaactgatgtgcttggcttcctctggaactcgtcaggcgatagcaccttcaggcttaatgaccctggcgtcggcaatcttgagtttgacacgctggaccaggagacccatgagtggacacgcgatgtgacaatgaatcccgtagaaaacgggtcgccaatatcagatcacatcatccgtcagccgaaaaagattaccgttgcaggcatgataagtaatgcaccagtgacaggggtgttaactcaggcagcaaacgctctggatagcggcttcgacggggaagacagggttaacacagcgatcaagctgcttgactcgctctatatttcaaacgaactggtaaccatatacaccaaaaattacacctatgagaatatgctcattcagggaattaacattcccagaagggtggatgatggtgatgcggtcaattttacgatagatgcagtgcaggcacttatcgtgagcacggctacgacagaggttcctcctggtgtaggcgtcaggaaaacggatacgaccagtaatggcgctactgctaaagccggaacatcaaactcagcagacccagctacggctaaccgggctacgccaaccaaaaacgttggcaagaatacgggttcaatcctgagtcaggctttggatgggttatctggctcgggcggtaaacttcaggaatatctcggcaacatcataggtaatgtcaccccatga

SEQ ID NO: 140290 - DNA, 342 bp, Enterobacter cloacae
atgaccccactaaattttcaggctggatttactgaccagacattgcaggctgttttcgacgatacaccggttacgcttcgcctgcgatggaatgaacgctttggcttctggtcgcttggtatctatgaccgtgagtcattgccgatcataaccggagttaagcttgtacagaattacccgcttttaaagaacttcagtttcgataacttctcaggagatatctacttcatccgtacgtatggtgaaaaggtacgccctgatatcgattcgattggaggcgatcacctgttggtgtatgccactgaggaagaaatagatgagtttgtttctgcgaacgggtga

SEQ ID NO: 140291 - DNA, 936 bp, Enterobacter cloacae
atgagtttgtttctgcgaacgggtgaaatcatcgtaggtcagcctcagggtgaggcagtaagcattaaagacctgcgatttgagttcgatatcaccaaaacagccagcaaaaccgccaacgaagcatcactcaaaatctacaacgccgcgcccacaactatcactttgatggagacagtaaataacgtggtcatcatcaaggctggttacgtcaatgatatcggcgctatcaccatcttcactggcaccacatgccgtagcctgacgtatcaggacggtcctgacatcatcacggagatggagttaagggacagcgtcatacctttacgcgacgccaagataagcgtttccttccctccaaatacgtcagcaatgaccgtactggatggggtggcgaagaacttcggactgccaatcaagaagagcatcagcaaggttcaggataagcagtacgtcggcgggtatgcctataacggtagggtgcgtgatgctatggacagggtctgtaattatcttgggctggagtggagcgctcaggatagcgaaatacagattatcaaaaagggtggcgtctatgcagacacggctgtcgtgctgtcgaaagacactggcatgatcggatatccccgccgtgaagcaaaaaccatgaccgagaagacggcagccaagcagggcatcaaatacggtcagaaagggatcgtcaggacggttgtggatgtagaagacccaacggctaagctaaaagaccgggtcactcttgaggtgcagggctaccgggtgaaatcactgctcaatcctgccatttatcctggtgcttatgttcagcttaaatctcgcggaattgatggggaattcttccgtgttgaagaagcacattacaccggagatacgcacgggcaggaatggagcgtggaagcgctattgaggtttatctga

SEQ ID NO: 140292 - DNA, 675 bp, Enterobacter cloacae
atggctgataacagtgatgtagtagaagcgcttaggcggcttgtaagctccgaaatggacacggtaaacacagcacttccatgcactgtggttagttactcaggcggcaaggtaacggtaaagccagatggcgagaaaatatacgcagatggcgataccaatgcctatccggtactgaccgatttgcgtatggtgtggccgcagtttgcaaacggtcaggccggattgaaaggccccgtccaggctggtgataaatgccttttggtggtctgccagcaggcaaccgatggcagcgacgacacaaggcgattcgacatcatcgactcatacgttatccctggtgctggttatagtgatgcagtccctggcaacgatgacgtgagaatgtattttggcgatgccttcattgctatcgatgccaacgggaaaatgaccattaatgctccaggtggggtggaagaaacaacaccgttgcataccgttaaaggaagcatgaccgttgagcagttgttcacttaccagggcggcatgactggctcgggcggtgaaacatcggtagctaccataaccggcacgatgcaggtgattggtgatgtggttatcaatggcatcagaataggcactcaccgtcaccagggtgatagcggtggcactacaggaggcccggagaactaa

SEQ ID NO: 140293 - DNA, 342 bp, Enterobacter cloacae
atgattgatttcagacttacagataacaaagtcgtgttcactaacggccttcttcagtacgtagatggagctgagcgcgtcaggcagcaggtagaattcaggcttaacctgtggcgcggagagtggttccttgatagtcaattcggaacgccgtacttacaagatattctcggtaagcaggtaacacttaatggtgcgctatcagccatccgtacagaaatcctcgctgtagaaggtgttaccggcatagttgagtttacctacaactttgaccgggcagagcgaaagctgagcatagagtttacagccaacactgagtacgggttggtgcagtacccctga

SEQ ID NO: 140294 - DNA, 1419 bp, Enterobacter cloacae
atggctgattacattactgcgacaggctttgacaagccgacattaccggagatggttcaggaaatcggtgatgcaatggaaacggtcgtcgggccgattaacagagaggctgattcgaccaccggacagtggatcggaattgaagctgagcaaaacgcaattcacttcgaaactgaagaggagttgtgggctagccggtttcttgcttctgctgagggattcgctcttgatgctcttggcgactggatgggtgggattacccggcatggcaaaaccacgacaaaagtgaacgccgttatttatggctctgaatcacgacttgttccttctggttctttagcttctttcggtaattaccaattcagactgacggcagattataccatctcacgctcgacgcttctggatggagaggtgagggtatctaacaacacacaaaccagttacacggtacggattgctggcgttgatcatacctacacgaaagttgcaggagacacggtaaacaccattgctacaggccttgccgcagtagtggactcaacaagccagtattcagccacagcaaacggctcagtaatcagactcacctctgaaaaccttattgaaggttacgcagtgtcgcttagcgctgggctggcgtggcagttaattggttcaccggcaatctttgaggctactgaagcaggtccgattgtcgttcctgttggtggattaaacaatcctgtaagtgcgatcaccggatggacaggagttaataacctcgttcagggggccaccggttcagatcgcgaatcagacacagattaccgccaacgtttataccagagcagggcatcatctggcggtgcggcaaccatcccagcaattgagactcgcctgattacggaagtcagcggcgtaaccttagccaaagtcattgaaaacgacaccatgacgacagtcgacagcattcctccaaaagccatccacactatcgtttctggcggtcttgagcaggacattgctgacgcaatctggaagtacaaaggtgcaggtatagcgacatacggctcaattgcgatcactgtgtatgaccggtacgagagaccacatatcgtgaacttctcaagacctacagaagtggatatttatgtcaaagttgacgttgttcttctggatactgaggagccgttaccagctgctgttgtggacgctataaagcaaggtgttgtggcttacggtgccacccttggacttggtgatgacgttattacccagcgcatttatggctatatatacgcaaataccaccggcatcgggaaaatgaccatcaccgtcagcactgacggaactacgtttgcagaaagtaacatttccgttgctgaaaactcatttgcttcgttctccgctgccaatgtggaggtcacaggtgtctga

SEQ ID NO: 140295 - DNA, 756 bp, Enterobacter cloacae
gtgtctgatgaatggattgatatcgatttccttgcgctgatacgacaaaggcctactgactggcttaaaaaaggaggacaggttccagatctctttgctgctgttggcgtacttcatcctgaaattgaagcgcgcgccaaatacatctacctgacgcaaagcatatacaacgcccacggcatagagctggacagattcggacagtacgttgatgtcggtcgtgatggaatgtctgacgatgattatcgccgggaaatcatgcaggcgaaactggcgactgcgttcagcggaacaccagataacgtcatggtcgtaacggcaaccactacttcaagtactgatgtcgaactggttgagctctatcctgccgcattcagcgttcacgcaaccggaccttatgtccccacaaacatcaacaccatcgtcgaccgcgcatctgtggcgggtgtcagagcatattcaacacatgattatgggctcaacggtttctccctggcgggaatagacaccaattcaggccaagcgttacaggtcggcgataacacagcaatgcaggtagacaccgacacggcgcttggacttaaccgtgggtctgtattcattgctggctcatatcttgacgcggctgggtccgtgtcaggtgtactcgaagtaaacggctcatatctcggcgtcgctgacgacgattatcttcttattttctcccgtgactatggcgtcaccgggacgatgctctgtggcgctatgcctaagtga

SEQ ID NO: 140296 - DNA, 642 bp, Enterobacter cloacae
atggcagatatcactctaaaatatttaacagatttgccagcagccgcttcggcagcgttgactgatttgttgcatgtaaatcagtcaggaaatgacaggtctcttaccgtttcaactctgctcaaagcaattgttgatggtgtatatccaatcggaagcgctcatttttttactaatacaacaaatccaaatgtcatatggccaggaactacatgggccagaataccaggcgcaggaaggacaatcaggcttgccaataactcaggaagcgacaccttgcaaatagggggtagcgacagcattacgattacagcatccaatcttgcaccacatacacatccgattgatgtcaactcagattctttcgattatgggagcaaaacaaccagcacatattctcattcacacacggttgggcttaaaagcgttggaacattaacaggtggcgctcaggataggagtagcgatgacattatttcttcacagtcaactacaacatcatcagataatcatgcgcattcaatatcaataggtgcgcattctcaccgaatatcgggtgacacaggttcaaccggttctgcaaccccaatagatactacaaaccaatatattaaattagctggatggtacaggactgcataa

SEQ ID NO: 140297 - DNA, 1785 bp, Enterobacter cloacae
atggccgaacaaaaagtaaaacttactgagttgccaaccgcgaccgatacacttgatacagcgcagctcttggtcaatcagaacagtaccgaccagaagcttgctattacacatctgttgcgtgcaaagaacaacctttcagaactagaggattttgcacaggcacgagcaaatttagatgttccgtctgtagaggaagtaaataacaagttatcaggatttattgacgggtcttatacatttagctctggcgggtcgttagcgtcacgctctgattttatctgggatgaagaaacgaaatcctggtattactggtcaggagtattgccaaaagaagttccagccgcttccaatcctgactctacaggtgggactggtgttggtgcatggattcctgttggagaatcagtactgcgaggagacttagcaaaaccaaccggatcttcgctcattggatatcagtatcctgtggatggcagtgtgccaagaacggtagaagataaacttggagatttcgttagtgtgctggactttggcgcaaaaggcgatggcgtaacagatgattcagtagcctttaaaaaagcctcagctaccggtaagaaagtgtttatccctgatgtgtcaggtaatggttctggctgtatttacaaagtaaaaaatgtatatatcaaaaagccattgctctttggagaaaatatcggtgtagaaatacaacctgtttctgccggtgatgagatgttctactttggagatcctgaccagccatctacttacattattaatggtgcgagaatagaaaacctcaccttttcatgcccatcagcttcagatggagagtaccctatagccatacgttgccatcaacagcagcaaatggagatattcggatgcacattctaccgattaacatttgagcttatagactacagatatgtcacctttaggaaaattcgtggaataggttcaatgttctattcaaacaggactcaaccaaatggtgttgattgggctgacgcattggttatctcagacagttttattgcttactcttcccgtgttgaagttcgtaactctgtaggatttcaaatgcgaaatacctattgcgcaaatccgacatctactccatgcctgttattgggatatgacgattgggcaaagccaagtcatggaacgtgcgaactaactgacgtaacaattgaaggcgttacagaactcaacaattgcaacctttttgtttttattgtaaatggccatatgggtgcctttgaggggcatgggctaacgcttaaagattgtttctcggtaaactgtgtaaatacagaattccattacagtaaagacttcggtgtatacatgaatgcgtgtaaaaaatcatcattcactaacaccaggtttacaaataatggagaaggtgggattagaattggtggtgatacgcaatatgttgcattcgctggatgtctttttggcgagggaggaattgctaatgacggcccaactcaaaaacgaggtattaacattgaggacactagcggagggattgcggtgttgtcttctgtttttgatggaaatagcgaggttaatattggcggagatcaaagtaaatacagggttctggcatgtcaaggagttcccgatactgtaattgttagcggtggtggaacatcgcaaaggccatcatctccaaaagcagggcagcagtattacgataccaacctaggacttcctgtatggtggaatgctaccacagaaacatggcagcgtgcagatggcaccaatacataa

SEQ ID NO: 140298 - DNA, 1479 bp, Enterobacter cloacae
atgactaataaatttaactttttttgttgggcttttattttcacaatattgtcagtggtatattcactaattgccaaaaatacactcccaaactctgatgttatatcatcattcagagaagcaagggatattttaaacggtaacatactgttaagtggatggaagctatctacggtatcattttactttacagagatcataccatatgcattagcaataaaaataataggatttaacgagcacctttactatattgtcccagggatatttatgggggtactggtaacaatttccttgtatgtatcaaatcataatagaaatttatcattttacgcagttcttgctacctttgccatgccaacatcgttttcatcgagtataatgttaattgcatgcattcacataggtgcatacatactaatcttactttgtttagttttattggagcaatataggttaaaagggtcgttaaagctattattgacatacatgattatgttatcaactttgtcttttagtgatgacattgcaaaatatgcatttattatccctgttatacttgtgtgcttgtatagagtggcacttggaatatataaacaagaaaacataaactatagatatgtggtattgatagcgtcaactgcagtatcaattgcagtttcgaaatgcatatctttcttttttttacattttggtggatttaccctgccagggataaccaccccgcattttgttgatttctctcaattaactaataatatatcattaactattcagggcacttttcatttttttggtggatatgtatttggaatggaaataggtgataagagaacattctttagtttaattaaggtaatattcatattttcattcatatatttatccacaaggtgcattcttaaatttaaggaccttgatttcttttgtcaggtattggttgcgtcatcattactaatgttttttgcttatttactgagcgacagaccaacaaatctcttttctatcagatacattgttcctacgtttgtatttatgtccattgtcatttcaagaagtgcctttgccttttctgcaaaaagaaatatagcgatttctttaatcgtcattttgttatcaataccaagtttagcaacattaagaaacacagtaaacactaacgatgtgacaattgaactaagaaattttttacatgaaagcggatataagagggggtatgcctctttttggtttgcatcttcggtagccggatttagcgatattaacgttgcgccatatgaattacgcaataatcaatttgttcaatataatgggctatcaaaatcagaatggtataaagctggagcggagttcttaattgcagatgacgaagaccagattggcaatgccataagacagtttggaactccaagtgaaaaacataagattcaggataaaatagttctcatatggaaagatgggatcagggctttaaattag

SEQ ID NO: 140299 - DNA, 918 bp, Enterobacter cloacae
atgaagatttctctggtggtaccagtattcaacgaagaagacgcgataccgattttttacaaaacagttagagaatttgaaggccttaagccctatgaggtcgagattgtcttcatcaatgacgggagcagggatgcaacagaggcgatcatacactcaatcgccgtttcagaccctctcgttaagcctctgtcgttcactcgtaacttcggaaaagaaccagcgctgttcgctgggttagaccatgctacaggtgaggcgattatcccgattgacgtagacctccaagaccctatcgaggtcataccgcatcttattgagaagtggctggctggtgctgatatggttctggctaaacgaacagaccgttccaccgatggtcgcctaaagcgcaagacggctgaatggttctataagctgcataacaaaataagcaatccgaagattgaggaaaacgttggcgatttccgcctgatgtctcgtgaagtagtggaaaacatcaagctcatgccagagcgcaacctgttcatgaagggtgtattgagttgggtaggaggaagcaccgatgtcgttgagtatgcccgggcggaaagggttgcaggcaacacgaaattcaacggatggaagctgtggaatcttgctcttgaagggattaccagcttctcaacattcccgcttcgtatatggacatatatcggcctgttagttgctggcttagcctttctttacgggacatggatgatcattgacaccattgcgtttggcaacccagtgcgtggctatccgtctcttctggtatctgttctttttctcgggggcatccagcttattgggattggggtactaggtgaatatattggacgtatatacatagaatctaagcaacgacctaaatatttaataaagggtaaaaaatga

SEQ ID NO: 140300 - DNA, 516 bp, Enterobacter cloacae
atgaaaatgaacaaactctttactgcactggttctggcttctggtatggctgctttcggtgctcaggcagaccagggtagcggcgttgtgaccttcactggttccgttatcgacgcgccatgttcaatcgcggcaggtgacgaagatcagaccattagcctcggccaggtttccagttccgcagtggcgaacggcggcacctctacgccggttccgttctacatccacctggaaaactgctctgttgagaccgctaccactgtgaccaccaccttctccggcgcggattccagcgttgacggagcggtgctgggcgtgaccggcaatgcaaccgatgttggcgtcgtcatgaccgacggcgacagcaacaccatcaccctgggtgaagccacgactggacagaacgtggttaatggcgacaacaccctgacctactccgcgtacatcatcggtggagaagcgccaaccgaaggtgatttcaccgctgtgactaactggacgctggcctacgaataa

SEQ ID NO: 140301 - DNA, 552 bp, Enterobacter cloacae
atgggttatatattttcgaatacaacaaaaatagttaaaacactcccttttctcctgtctggttgttgcctgcctttattcgctgcaaatcagggggagggtgccgtccttattcagggggcggtgctctatacaccctgtgcaattgatcttggtagccgcgatcaaaccattgatatgggcgatacgcccgtgtcggagattgccaccaaaggctatggccccacacgtgcgttcaccgttcgcttaattaattgcctgatgctgccgacacccgggaacggaagatatgactccgagtactaccagataacgtttgagccaatgacgggcgcagaccggttttccgtgcgtggagacgcacagggaattgagctggcgatccgcgataccgacggcaatatcgccgcgcccggcgtggcctttcccgccagagaggtcacggcgggcagcatgaacctgaattattcgcttcagcttgtcagcaacggacagccgctcaaagccggggattaccagtctctgatccgcttcagaatggattacaactga

SEQ ID NO: 140302 - DNA, 2484 bp, Enterobacter cloacae
atgaaaaaaacgatacggacattccgacgctcaacgctcagcgtgctgattttggctctaatcgtgccggtggcgaaaagcggggccgacgatgacattcagtttaatactgacgtgctggacacgcaggacaagagcaatatcgatcttagccacttttcgcgtcgcggctacgtcatgcccggcgactacacctttagcatcatggtgaacaaagagatcctgcgcgaggagcggattgtggtctatcccgagggtgaaaacggccgggacagcctgatctgcctgacgccagagcagctctctcgctttaacctgaaggccagcgtcatggacgatcttcgctggctgcgcgacggtgagtgtctggacaaagccagcctcgaaggactggatatgcgcgtcgacctggcaaaggacacgctttatctgtcgatcccgcaggcgtggctggagtacaccgcgccaaactgggatccgccttcgcgctgggatgagggtatccctggtgtgattgccgactacaacctcaatcttcaggcgcagcagaatcaaaccggttcagacagccaaaatatcagcgggaatggggtcctgggggccaatctgggaccatggcgcgcccgcgccgactggcagaccagctggaacaagcgtgacgggaagacggacaaggatttcgcctttagccgttactatctctaccgcgccattccttcactgaaagcgaagctgacggtgggggaagattacctcagctccgatatcttcgataccttccgctttagcggcgttagcctgaattccgatctcagtatgttgccgccgagcctgcgtggctacgcgcccgaagtgacgggcatctcccgttcgggcggcaaagtgaccatcagccagcagggacgcgtgatacacgaaacgcaggtggccgccggggcgtttcgcattcaggaactgaatgatgccatctctggcacgctcgacgtaagggtggaagagctggacggcagcgtgcaggtctttcaggtcacgacggcttcggttccctacctgacgcgcccgggtgcggtgcgctacaagctggcggcgggtaaaccctctgagtgggggcatagcatgaccgggccgatgttcacctcgggcgaaatctcctggggcgtggccaacggctggacgctgtacggcggctcggtgatcggtggtgactacaatgccctgtcggtggggatcgggcgcgatctcttcatcctcggcgcgctggccttcgacgtaacgcagtcgcgggcggtattgccttctgaaggcacgctgtccggtacctcttaccgggtgagctactcaaaaaccttcgacgagtatgacagccaggtcacctttgccgggtaccgtttctccgaacgcgactttatgagcatgtcggagtacctcgatacccgctacggcagcggcacgtcgcacagcccgaaagagaaatacacggtgtcgtttaacaaacgcttccgggatgtcgggctgagcgcttacctcaactacagccatcagacctactggaacagcgcggataacgatcgcgtaagcctgtcgctgtcgcgctatgtcgatcttggtccgttcaggaacatgagcgtatcgctcacggcctaccgcagcgagtactactccctgaaggatgacggagcctacatttcggtgtcgctaccgataggtaacggcacctcgctcagctatggcgccacaattaaccgcaccgataacacccatcgcgtgagctattacggccgggtggatgagcacaatagcttccaggtcagcagcggcctttcccgcagcggcccgacggcgtacggctactacacctggcagggcgatagcgcgcaggtgcagaccaacgccagctatcagtccggcagctataccgcgctgggcatgaacgtgaccggcggtctgaccctgaccaccgaagggggcgcagcgcatcgctcgaacgcgcggggcggcagccgcgtgctggtggataccgcaggcgtcagcggcgtgcccgttaagggattcggcgcctcggtgaaaaccaaccgattcgggaaggctgtgattggtgatgtgaacagctactaccgcaatccgatccgcattgacgtcgacaaacttgatgaaaatgctgacgtcacccgatccgtctcgcaggccacgctcaccgaaggggcgatcggctatcggcagtttgacgtgattgcgggtggtaaagcgatggcctttatccgtaaggctgacgggagcttcccgccgtttggggcctcggtgatgaacgagaaaaaccaggagacgggggtggtgaatgacgaaggaagcgtctggctaagcggcattcagccaaacggcaaaatgaccgtcaaatgggatggacaagcccgctgcgtggtaaacctgccggccacgctgccagccgtgctggagaacctgcttttaacctgttcgccggaataa

SEQ ID NO: 140303 - DNA, 747 bp, Enterobacter cloacae
atgacaattgtgcgaatttccgccctgacgggcctggcgctgatggtttcaggcgtggcaacagccgccgtatcgctggacagaacccgggttatttttgacggcgcggcaaaatccgtgagcctgcgcctgaccaatgaaaataaaacgctgccgtatctggcgcaggggtgggtagaagatgctcagggtaaaaaaattaccgatccgctggtgctgctgccgccggttcagcgcattgaaccgggtgagcagagtcagatcaaggtgcaatccaccgcggggatccagcgcctgccacaggacagggagtcgctgttctatttcaatctgcgcgagatcccacccaaaagcagcaagcctaatacgcttcagctggcgctccagacccgcatcaagctcttttatcgcccggccgctattgaagtgcagcgtgctgattattccacgccgtttcaggaacagctgactctggcgcgggaaggggataaataccgcgtgaataacccgacgccgtattacatctcgctggttaatgcgtcttcgacgctcaccggcaaagcggcggcaggcttcaagccgattatggttgagccgaaaggtcagctagtgctggcaccgtccgctgctgcgctcggcagcgcgcccgtgctgacttatgtcaacgactttggtggccgcgcaaagctcatcttcagctgtggcggcagcgagtgcaaagccgtgccgcaggaaaagaaaaagtaa

SEQ ID NO: 140304 - DNA, 582 bp, Enterobacter cloacae
atgactatcgcgtactggaaaaaggggagcgggctcgcgctgatgctgctggcaggatcgctaagtgccgcggacgaattgatcgatgggagctatgggctgctgcacgtgcgcggtgcgctgacggaaagcgcctgccgtctggagatggactccgcgtggcaggaggtggacatgggaacgacggcaacgggggcgcttaaaaaaccgggcgaccagggtacgccggtgcgggtggagatccatctggaggattgtatgccgtcacctacctcagtacgcgatgcgtggagcggcgatctgctctggagccgggatcagccctcggtcacggtcagctttgttgcaccgggagagttgtttaatccggggttggtccgcgtgagcggagccagcggggtggggctacacctgaccgacaggctgcatcgttcggttcgtcttaacgatgaggggcatccgctgctgctggagtcagatgacaacacgcttttttattatctcgcaccggaacgtacctctgcaccgctggtggcgggggcatggcaggcgctgatccacttcaggcttaattatgactag

SEQ ID NO: 140305 - DNA, 477 bp, Enterobacter cloacae
atgactagttcacgttttgctctgcttatcgctttgttgctggccagtccagcggcatggtcatccctgacggtaaacgtcaccggcgtggtcgtggagggggtgtgtgaaatcaacaacggtgaaactgttcacgtggattttggcagcaacctgcaggcgcgccagctggacggtgagaactttatgaaaaccatcgactattcgctggtttgtgaagatctgacctctaacgatctggagatgcagtttgaaggcacggccacctcgtttagcgacgactatctggccaccgaccgcgaagggctggggatcaaattgtatatgaacggagaatcgatgccgctaaatacctggatgccgtttacctggccggaggtgcctgttttgcaggccgcgccgataaaagatgacgcatctaccgtggaaacgggcgtgtttagcgcgtcagccacgctgaaaattcagtatcaataa

SEQ ID NO: 140306 - DNA, 852 bp, Enterobacter cloacae
atgaatataatgctccgaacgatccttgctatgctggttcttgttgctactcagcccgcttcagcctctgtctggagctggattgattccattacgcaaaatagcagcattaattttgactataacttcacgcttgctgattgggatgaaaatgactcaacgccaaatccttgctatgggcttaatgcctgcaccatttttatcagccacaggcatgatgcttcaggaacatcaggctggggggttgttcaaggatggggggttgcggcttatccctttataagcagtagtgaaacactcggtgaggtgggcaaggagttaaaaaaagtatttcctctgccctacagtggtacgactaaccataacggtaccgtcaattttgaagagtgtgtcggttttttttatgcgccaggcgtcaacatggggacaagcggccccgtggtcgatcagaaatatgcaggatacaacatactgccaggcagcatttgcggtactgccccacagcccagtggctcctgcgatttcaatcaggacgtactgaccctcgatcatggcacgctgacgcgtcaggagcttgacgggcatgaagtcagtgaaaacgtcagtattaactgtacgacatcacagacgctcaagctgtatatctactccgcagacaacgtgcagctgcgtgacgacggcagtctctattccgagctttatatgaatgacaacgtgctcggcacgtcgggcttcactctggacgtcgccgaacaggaaaatgtcgttgtgaaatcagttcttcatacaaatggcagcgtggcggcaggtgagtttgcgggctccactgtgatgctgattacggtggagtga

SEQ ID NO: 140307 - DNA, 801 bp, Enterobacter cloacae
atgactgcgttgcccttgaacaatatcgatctctactgcgcgcttatgatgggtgagatcgttccctattatcagccgctgattaacagccggacccagcggttgtacgggctggaaatattaatgcgttggtcactctctgaggaaaatgtctctcccctggcgcttatccgcgcatttgatgagaacggcttgttgccagaaatgacgcaacacctgctgcgccaggttgcggcagatattaacgaactggatgcattgctgcctgacggtcttcatctttcgcttaatgtgagcccttctcaggtcgcgaagcccggttttgtgtttgatacgctttcgtttctggcggctattcctctggaaaaatactgtctggtggtcgaggtcactgaagaacaaccattaccgcctacgcctgaggttacgggcgcttttctgaagttgcagctggcgggggtcgagatctatctggatgattttggtaccggctgctcgaatctggcataccttgagcaatttagcgtggatggggtgaaggttgaccagcttttcgttaagcatctttcctctgataaagcgacaacatccattgcagcgagggttgcggacctggcgaaagcgcggggtcttggcatcattgctgaaggggtggaaacccctgaacaatcacagctgctgcgcgatatggggattgttattcagcagggctatcttttttcctgcgcattaagtcgatcgcagttacgggagtatcttgccgccagaaggttgcatttccagatgaaaaatagggaataa

SEQ ID NO: 140308 - DNA, 738 bp, Enterobacter cloacae
atgcatttcataataaacaacaatgtctctttcaacgttgctgaaaggacggtgtcggacggaaacacgcaacatgtgctttctaatccggcatgcagacttcttctcgtactcctggaaaataataaccggcttatgaccagagaggatcttttgcagaaggtgtggggcgattttggattaaccccatcgagtaatagtttgaacaataatatcagtatattgcgtaagatttttacagagtttgaaattcatgatgtgctcaaaactgtccctaaacaaggctttgagttggcgctgaataaccttcagttcaacgaaaaatccagagactatttggtgatgcaggcgatttcaacacctgataaagagcccagtgtaaataagaccaggttgattaaatggaccggcgtgttgttcattattattggggtagcaatcgctttatatctcaattttttcgacaaacgcgaggatgtcacgcttttaaaacaagttcagcagtgcaaaatcttttatcacagcaaagtgaatgcaaagagagtagaacactttttttctgaaggcaaagggatgaaattgctgacgaagtgttcaacgcctgcctatattttttacgatgacagtagagtacatgagaaaaccgagcttcttgaaatctttgtcgcaaaatgtacggtcgatagtgaaggggaatttagtgaatgtaaaaacttcgtctcgactaaagtgggctag

SEQ ID NO: 140309 - DNA, 486 bp, Enterobacter cloacae
gtgaatgtaaaaacttcgtctcgactaaagtgggctagccttgctgtgctgttgattctggtgtttattggcgcgctgctgtacgtgcccaaggatacccgcgcgctggattgcataacggatatgaatcttgagctgggcaaagataatgacaagatcgttgccaacatccaccttgtcgttcacttcgttccagatgcgctcagctacattaccgagtatgggatcgtgacctacaacaaccagcgctatatcgtcgatcgctatgcccgactgcgttattccggagataacactcactcttttactgaatttaaaagagaaggcatagagaagaacagtagcgaaacactacctgagtttttatcagaaaaactgacttcagcccaaaaggtctttttatttaaggtgcggaagttacagggtgaagtatggagcatcagcgatttgcggcgtacggtattagtgtgcgctaaatcagactga

SEQ ID NO: 140310 - DNA, 645 bp, Enterobacter cloacae
atgctaagaggccggaatctttttgccggtaaaacgcatttgggtgtaaatatcatgccattaaacgtactgataacacaggatagttatctctttcaggggttaaagcagtgtatttctcttgtgcatattcaggatcttacgctgtttgaaacccctcatcgtgagtgtgtggtcctggtagacagcagaatgccgatgaacgatcttgagcacgggtggcgtgttgtctcggctatgtttgagcaaactaaggctataatgctttgtatgaatcaacccgcgagcttgcccttcagcgtaaatccctgtggggacactgttgacatgaaaaccagcccagaaaatattacgctaatgatcatcaataaaattcctgttttaatgtcggataaacggtcacagccggtgaaaataaaaatagaagaaaaagagatggcattaattaacgcatttctgtgcggaaaggatatcgaagagatggcaaagatgttttgttgttctcaaaagcaggtctatagactcagagacaaaatttgccagcggcttaacgtcagacatttttatcttgcctgcctgtatatttttcgccatggcttactgcaacaatcttatacattacccgaaacctggttacgggattaa

SEQ ID NO: 140311 - DNA, 1047 bp, Enterobacter cloacae
atgactgagaaacattttgttgaactgcgcaacgtgaccaaacgctttggcgcaaacacggtaattgaaaacatcaacctggcgatcccgcagggacaaatggtaacgctgctcggcccgtccggctgcggtaaaaccaccgtgctgcgcctggttgccgggctggaaaaaccgaccgaagggcagatttacatcgatggtgaggatgtgacccaccgctccattcagcagcgtgatatctgtatggtgttccagtcctacgcgctcttcccgcatatgtcgctgggcgagaacgtgggctacggtctgaagatgctgggcgtttcgcgcgcagagataaaaacgcgggtcaaagaagccctggcgatggttgatcttgaggggtttgaagatcgttacgtggatcagatttctggcggccagcagcagcgcgtagcgctggcccgcgctctgatcctcaaacccaaagtgttgctgttcgatgaaccgctgagcaacctcgatgcgaacctcaggcgcagcatgcgggacaaaatccgcgagctgcaaaagcagttcaacatcacctcgctgtacgtgacgcacgatcaaagcgaggcgtttgcggtctccgacaccgtgctggtgatgaacaagggcaacattatgcagattggctcgcctcaggatctctatcgccagccggcgtctcgctttatggcgagttttatgggtgatgccaacctcttcccggcccgcttcagcgaggatgtcgtggaaatccacggctatcgtctgccgcgtccgctgcactttgctacccagggcgaaggcaccgtcggcgtgcgtccggaggcgattacgctcagccagcacggcgaggcgagccagcactgcactatccgccacgtcgcctatatgggtccgcagtatgaggtgattgtcgactggcacggacaggagattttactacaggtgaacgccacgcgcctgcagccggacgtgggcgatgcgtactatcttgagatccacccgtacgggatgtttgtactggcggaggcggcttaa

SEQ ID NO: 140312 - DNA, 2079 bp, Enterobacter cloacae
atgtcacagacactcgctcttcatcccgtgaaaaaacgggatgcggtcttcctttgggttttcgttggctggctggcctttgccctgctgccgagctggagccttgattacggcctgctggaatctaccggggatgagatcctcgatgcctacggctggtcgcacttcaacatcagctggctgtggtatctgatgccgagcctgctgctggtgcgcccgtttaacgaagcaaagcgcgagcagcgcagccgccactaccttgacgcgggctgggcgctgctgtgcatggcgttcgtggtcatcagcgccaccgtggaaggacgcggtttaggctatgccaccatcgtgctgtttgttgccctgggcgccatcatgacgctggccctcacccgcctggagtggctgggcggcgatcgctttgtcatcggctcgctgattaccatcgtggcgctgatcggcatttttatcgtctggccgagcatcgccattttcattccgatgttcaccaacgacgcaggtgaattcgccccgctggcctttatgaacgtgctgtcgcaggcgcacattatccaggtcatcatcaactcgattctgctgtcgatagccgtcggggtcggctgcaccttctttggcctggtgctggcgatctacaccacgcgtatcgctaaacgcagcgccatcattggacgtatcttctcgattctccccatcgtgaccccgccgtttgtggtggggttgggcgttacgctgatgatgggacgctctggctatatgacggagctgatggtggactggtttgggttaaccaataccaactggctgtacggcttcaccggcatctggctggcgcaggtgctggccttcacgccgatggcctttatgatcctcgacggcgcgatcaaaaccatccacccgtcgctggaagaggcctcgtacaccctgcgcgccagccgctggcagacctttaacggcgtcttcgtgccgctgctgaaaccggcgctggcgaatgcgttcttaatcgtgattgtgcagtcgctggccgacttcagtaacccgctggtgctgggcgggaacttcgacgtgctggccacgcagatctacttctacattaccggctcacagctggattatcaggcagcgagtacccttggggccttcctgctgctgttctcgctgctggtgttctgcatccagtacatgtggatcggcaagcgctcctacgtcaccgtgtccggtaaatcgtaccgcggcgacgtgcagccgctgccggtgacgctggtgtggagcgtgatcgccctgctggcggtgtggatcgcctttaacgccctgctctacggcagcattttctatggcagctttaccgtcaactggggcgtggattacaccctgacgctggataactttatcaagctgttcggccaggggatgagcgacggcgcgtggccttcgctgctcgatactctgctctacgccgggattgccgcgccgatcaccgccgccttcggactgctgattgcctgggttgtggtgcgccagcagttccggggtaaaaagaccatcgagttcaccaccatgctctgctttgccgtaccgggtaccgtggcgggcgtgtcctacattctggcctttaacagcgcgccggtgtacctcacgggcaccgccgccatcgtgattatctccatggtgatgcgtaacgtgccggtgggcattcgcgccgggatcgcgggattagggcagatcgacaagtcactggacgaggcctcgctgagcctgcgtgccggaagcctgcgcaccatcacccacatcctgctgccgctgctgcgtccggccattttatcagcgctgatttacagctttgtgcgcgccatcaccaccgtcagcgccattgtgttcctcgtcacgccggacacccgcgtggcaacggcctacattctgaaccgcgtggaagacggcgaatacggcgtggcgattgcctacggctcgatcctgattgtggtcatgctggcgatcattttcctctttgactggctgatcggcgaggcgcgtatctcccgttcaaaagccaaaaaccaggcgtaa

SEQ ID NO: 140313 - DNA, 1032 bp, Enterobacter cloacae
atgaaaacaacgcttctctctaccctcattgcttccgggatcgcgctggctaccttaaccggtgccgcacaggccaaaggccgtctggtggtgtactgcagcgccaccaacgaaatgtgcgaagccgaaaccaaagcgttcggtgataaatacgatgttaaaacctcgtttatccgcaacggctccggcagcacgctggcgaaggtggatgccgagaagaaaaacccgcaggccgatgtctggtacggcggcacgctggatccgcagtcccaggccggtgagatggggttactccagccctataaatcgaaaaacctggaacagatcatggagaaattccgcgatccggccaaggtgaagggcaacctctcctcagcggtctacgtcgggatcttaggttttggcgtcaacacccagcgcctgaaagagaaaaacctgccggtccccaaatgctggaaggatctgaccaaaccggaatacaagggcgagatccagatcgccgatccgcaaagctccggcaccgcctataccgcgctggcgaccttcgtccagctgtggggggaagaccaggccttcgactacctgaaacagctgaacggcaacgtatctcagtacaccaaatccggtattgccccggcgcgtaacgccgcgcgcggtgaaaccgccatcggcatcggcttcctgcacgactactcgctggaaaaagagcagggtgcgccgctggagctgatctctccgtgcgaaggcaccgggtatgaaattggcggcgtgagcattctgaagggcgcgcgcaacgaagagaacgcgaagctgttcgtggactgggtgctctcgaaagaagcgcaggagctggcgtggaagaagggcaagtcctaccaaatcctgaccaacaccacggcggaaacttcgccgaactcgctcaagctcgatgatttgaagctcatcagctatgacatggacaaatacggctccacggacgtgcgtaaagcgctaatcaataaatgggtcagcgacgtgaagatgggtaaataa

SEQ ID NO: 140314 - DNA, 1302 bp, Enterobacter cloacae
atgcacgcactgtctgctgaagaggtttcacaacgttaccgggcgctgcgccccaggctgctcctttgtatggtgattggctacgccgcgttttacctgacgcgaaaaagtctgaacactgttttacccgcgctacagctggatttggggctcagtaagggcgatatcgggcttatcggctcgctgttttatctcagctacgggctgtccaaattcgccgcggggctctggcacgacagccacggacagcgcgcctttatgggcatcgggctgctggcaacgggcgtgctgaacgtgctgttcagctttagcgatgctttcccgctgctgctgtttatctggacgctgaacggcttctttcagggctggggctggccgccctgcgccaggctgctgacccactggtattcgcgtaacgagcgcggcttctggtggggctgctggaatacctccatcaatatcggtggcgcgattattccgttgatttgcgccgttgccgcccaccgatggggctggcaggcggcgatgctgacaccggggatcatcagtatcgtgctcggcctgtggctgaccacacagctgcggggcacaccgcaggaagagggtctgcccacggtcggggagtggcggagcgatccgctggagctgcgccagcagcagcaaagcccgccaatggggctatggcagatgttgcgcaccaccatgctgcaaaacccgatgatctggctgctcggggcgtcgtatgtgctggtgtatctcatccgcatcgccctgaacgactggggcaacatctggctggcagaaagccacggcgtgaacctgctcagcgccaacgccacggtgatgctgttcgaagtgggcggcttactgggtgcattgtttgctggatggggatcagacctgctgttcagcggccagcgcgcaccgatgattttactgttcacgctggggctgatggtgtctgtcgccgcgctgtggctggcaccggtgcaccactacgccctgctggcgatgtgcttttttacggtcggatttttcgtcttcggcccgcagatgctcattggccttgccgccgttgagtgtggacataaacaggcggcaggctcgattaccggctttctgggcgtatttgcctatctgggcgcatcgctggccgggtggccgctgtcgcaggtgattgaacgctacggctggtcggggatgttcagtttgctctcgattgccgccgtcctgatgggtttattactgatgcccttgctgatggcgggcatcaccgcttctcgcagtcacataacgtcataa

SEQ ID NO: 140315 - DNA, 1542 bp, Enterobacter cloacae
atgcggcgcgctgtccggcatctgatcctgtccctgttcattatgctggcctggggaaccggctggctgatgctgtggacgctgagcttctaccttacccacaacggccagcaggcggtgctgtttctgccgcagggggtgtggctggcgctgatgattttactttcacgccgctactggcctgcattaattctccccccccttgccgccattctgtggctgcacggtgagcagctcctcacgcgttatctgatgctggccgtgccgcttatcggcatcgtcagcgcctggctggcgcagcagtactggcatcgcttcccgctctactggcagcggctgtcgacgctgattgcggcggtgacggtgaatgccatgctgcaaaccttgctcctgtcgccctttctggacagcccggccacgctgcttttgctcggctcctttaccggtggcgtactgcttacgccgttcgtctatctggtcttcgaatttttacgccagcagcatcgttaccacctgctggggctggacaccagcaatccgccgctgcgcacctcgctgattatctggtgcagcctgtttttcattatcggcattggcacgcagatggtgctctccccggcgctggagcggctgctgctgattgtcgtgttcctgcccaacgtggtgatggcgtggaaattcggctggcagggcggtgtcctttccgggctgctcggcagcatgatgatcaccattgcccgccaggtgggcgtcgggtttagcgaccttctcgaactggaaatttttctctctacccagtcgctgctggggattggcctggggatcgccatcagccgccagcagcatctggcgatgaacctcgaacgctatcgccatcggcttgagagtgaacttcaggccagacgggcgctggcggaaaagctgatccattccgaagaggacacccgcaagcagctggcgcgcgagcttcacgacgaaatcggccagaacatcaccgctatccagatccagtctcagctggtgaagcgggcgagcgatacgccgctcgtcattgaggccgccggacagatcaacgacctcgcgcggcgtattcaccactccacgcgccagctgttgcgccagctccgcccacccgtgctggacgagctgtcgctccaggaggctctgcaccaccttgtcaacgagttcgcctttgctgaacgcgggatccgctgccgttttgactaccggcttcccacgccgccggaaagcgaaacgctggtctttaccctgtatcgcctgctccaggagctgctcaacaacgtctgcaaacacgccaacgccagcgaagtcacgattctgctctgccagcgtcacgcgcggctctacctcgaggtgcacgataacggcagcggcatcagcccgcagcagcagcccggcttcggcattcagggcatgcgcgaacgcgtctcggcgctcggcggcgaactgacgctggaatcccgtctcgggacgcgcgtaattgttaacctgcccacaaatttgcaacaaacaccgcgctga

SEQ ID NO: 140316 - DNA, 630 bp, Enterobacter cloacae
atgattaaagtggtgctggtggacgatcacgtggtggtgcgttccggtttcgcccagctgttaaatctggaagaggatgtgatcgttgagggccagtttagcagcgcggcggaggcgtggcccgccctgtcgcgcaacgatatcgacgtggcggtgatggacgtcgcgatgccggacgaaaacggtcttagcctgctcaagcgcctgcgccagcagcggccgacgtttcgcgccatcatcctgagcatctacgacacaccggcctttgtgcaaagtgccctcgacgcaggtgcaagcggctatctgaccaagcgctgcggcccggaggagctggtgcaggccgtgcgcgccgtcggcatgggcgggcattacctgtgcgccgatgcgataaaagcgctgcgcggcggcgagccgatgccaaaagcgcttgaggcgctcactccgcgcgagcgcgaagtgtttgagttgctggtgaaaggcgaaagcgtgaaggaaattgcctatacgctttcgctgagccataaaaccgttcatgtccatcgcgccaacgtgctgggcaagcttcagtgcagcagcaccatcgacctggtgcacttcgcgcttgataaccaactgctcacgggccactga

SEQ ID NO: 140317 - DNA, 585 bp, Enterobacter cloacae
atgttcaaaaaatctcttttagccgcaactgtggctgtaatggcaatgggctctgtttctgcaatggcggctgatgtaggcgtgatcacttttgatggagcggtaactgacaccacttgcgtaatcacttccaataacggtgttgacgccaataacgtcaccattaccatgcctgtagttaaaaaggcagacgtggaaaaaactaccgttgacactggcgttgggtctaaagagttcgaactgcatctgagcgaatgcccggatacactgaccaaagcgtccgcgacctttacctctcagcagttcgcagaactgtctaacggtacgcttaaaaccgacccaacggtgaccggtcatgctgataacgtaagtcttgcgctgttcaacaacaccaccaccagctccgatcgcgtcatgatcggccagccgaacaacaacactcaggaagctacactggaagcgggtaaaggcactctggcctaccgtgtggcgtacgttccgagcgccgactgggctgctggtactaacgatatcgcggccggtaaagtgagcagcaacgtcactttcaccatgtcttaccagtaa

SEQ ID NO: 140318 - DNA, 720 bp, Enterobacter cloacae
atgcgcctttcaaaaatgaatgttaccgcactgttttgcagcgcggcttttttagtttctagctctgcatttgcagatatcgtgatttccggcacgcgcgttatttatccgcagtctgcaaaagacgttactgtcaaaatggaaaaccgcggtaataagccacttttggtccaggtatggctcgatgatggtcgtgataccaccaacccagaagagctaaaagttccgtttatcgtcaccccccccgtttcacgcgttgatccagctaaaggccaaaccgtgcgtattacatggcttggacaagcaatgccccaggaccgcgaaaccatgtactggtttaacgtgcttgaagtgccaccgaaaaccaaagacaccgacagccagaatatgctgcagctggcgtttagaacacgcataaaaatgttcttccggcctgatggtttgaaaggcgattcttctgtagcagcagcacagcttaaatggacgcagcaaaataatgcgctggtagcgcgtaatgactccccatattacgtctccgtcgcaaaaatcgatatcagcgccggcggcaaaaaaatcgaaatcgatccgcatgtggtcgctccttttgcaagccagtcgtacgcactgaaagaggctggctccatcaaggttaaaaaaatgacctacacatctataaatgattacggcggcgctgaacctcacgagaccaccgttaattaa

SEQ ID NO: 140319 - DNA, 2607 bp, Enterobacter cloacae
atgttatttcgccactcgtttctttgtattgccatatgcacagcccttcagactgcaagttttgccgctgagagtgcggctgtgccatcctctggtagtgaagaggtcgaattcaacgatcagttcctgtacaaaacaggaaccaatattgatgttagccgcttttcccgcgggaacccggtagtaccaggcacattcaaaacgcagcttgttcttaatgggcaaaagaaactgcttaccgatttcaccttcaaagataacgggactccccgcgcacaaccttgcttcaccccgaaaatattgatgcaaattggccttaaagcagaggctattcaggctgcgacaggcaaagacagtgctgttgaaaatgctgaggaaacctgtgtcgaattacagcacgcttttacgggtgcctcctgggatttcgatgcaggtacacaagaattgagtctgattgttccacaaatttatgttgaacatcgtcctgggggatatgtcgatccctctctgtgggaagacggcattaccgcgggaacattatcctacgatcttaacgcctggcattccgacacgcctgacggttcgagcgatactgcttacgccgggcttaaatatggcctgaatatgggaccatggcgcttacgttcacgcgggacattgaactgggatcaggaaagtggctccgactattcaagccaggatatttatctacagcgtgatatcacttccctgcgagctcagttactggtgggtgattcctatacgcgtggggatacgtttaactcgttaaatctgcgtggattacgcatgtataacgacgatcgcatgctccctggcggtatttcaacctacgcccccactatccgtggcgtagcgaaaagtaacgctaaagttaccgttagccaaaacggaaacaagatttatgaaagcacggtgccaccgggcgctttcgagcttaatgacctcagcacaaccggctatggcagtgacctgatcgtcacggttgaagagtcagacggcagcacacgtaccttttcagtgccctactcctccgtcagccaactactgcgccccgggtatagccgctgggatatcggcgctggtgaattaaatgacaatggccttcgtgataagcctcgtctgggttatgccactggttattacggcttaagcaatctgtttaccggttacgctggcgtgcagtatatggacacgggctatttctcaggtctgcttggcattgcgatgaacacgtatataggcgcgttcgccttcgacgtgacacattccgatgcggatgtggatggtataggaacgttgacaggtcaaagttatcgcctttcatggagtaagctcgttgaagagacgcagacctcgttcaacgttgcagcgtatcgcttctccaccgaagactatttgacgttaaacgatgcggcttcgctgtcagaagacgttaaataccgggatatatcgcgtaatccagagcacacgggcaacgatgtatacaatcacttccaacgtatgaagaaccaaattcagctaaacatcagtcaaccgctcagctccggaaaagatgcttatggttcattatatctgacgggaagctggcaggattactggaataataccagttccacttcacaatattccgttggttataacaactcattctggctgggtagctatagcgtatcgttacagcgcagctacgacgagtatggcgagaaagatgacagtgtttacctgaatctgacgattccattggagaatctgctgggccataagcgccatccagccggtttctccagcattaacacaagtatgagttctgattttaaaaagaatacctccttcaacaccagcgccaatggcaatacagatgattaccgcttcagttacagcgtaaacaccagtacgacccatactgatagcggtgatattaaccagctaggcgggtatggcacttacaacagttcctatggtccgctaagcctttctgcttcggcttccgatgacagcagtcgtcagtactccatgagttacagcgggggaatgatggtacatgcaggcggtctaacgctggcaccaggaagtataggtgacaccgatacgctggcactggtcaatgcgccaggtgcaaaaggggctcgtttgaccatcggtgacggtgtcattggcagctctggttacgccattatgccctatctgacggcctatcgggagaacactgtaggtatcgatatttccagtctggaatcagacgtggaggtaaaaagcaccagcacagtgtcagtgccgcgcagtggtgccatcgtacaggtggattttgaaaccgaccagggccgctcattgctgctcgaccttcatcgctctgataacggatttataccgttaggagccaacgtgctggatgaaaaggggctgtcgattggttccgttggtcaggcgggtcaggcttatgtgcgtggagtagaagacaatggaacgctgcgggtggtatggggcagtgatgcaaacagcacatgtaccgtgacttaccacataactccctctgctcagaaagtgggtctgacgacggtactcgctaaccaaacttgccagatataa

SEQ ID NO: 140320 - DNA, 576 bp, Enterobacter cloacae
atgaagaaaacattgtcactgacaagcctcagcacattgcttgctctggcgttaagttcacaggctatggcagcaacaacgaatctggatgttacgtttaccgcctcactgcgggaaaccacctgcgatgtaaaaattgagggcggcgcaggtgatggaaaaaataacactattccaatcggtactagtggcaagacctcgctagcagatatcactgcgggctcagacgtggccagcacaacgtttaagcttaaaatcgttgagtgtccatccagcctacagtcattaaaaaccacgatcaccggcatcaagtcggtatattccgataccatcattaacaatagtgcgaccggaacaaaagcagactataccggtgtgtctatcgcccgctctgctgcacctactgcgccatttaccatcaatgccactgatgatgctaaacgtctggtctggacggcggccgaaatcagtagcaaagaagtctcccttattgcccgtatggcggaaacaaaagcaggtcttgcaaccacgggtgacttcagtgcagttgccacttttaactttgaataccagtaa

SEQ ID NO: 140321 - DNA, 561 bp, Enterobacter cloacae
atgaacataaaatcgtccacactgattgctctggcaatttcttccggtctcttcagcgccgccagtagcgcgattacaggtactaccagcgttcaggcaacctttacctctacggttgaggcggggacctgtactgcgcagatccaaaacagcggtggtcaacaaattacgacgttgccatttggagatgtttttaagtcagaccttgtggctcaaagccgaagcgaaccattcaaaatcgtttttagcagctgtgcaggtgtgaaaactgcgagcgtacaagcaaccaccggagcgggaggggagtgttctggcgatgcgaaaaatggtgattcatttaacgccagtaatggcgcggcctttgaagtctggaaaggaacgtctggatcaggaatgctgatgaactgtagtacaaaaccgtcacaagccgtcactattagcggtgcatccgctagtgtagatatgaatgcacgtatcgtgatcgcaaaagataaaacgatcgcagatgtcaccgccggtgacgttagcgcgcccgtgacgtttgtcgtcacttaccagtaa

SEQ ID NO: 140322 - DNA, 606 bp, Enterobacter cloacae
atgtcaaacaaacagaaaaataaggttctcaaaagatcggtgatcttcgcaggactcattgcctggcactggtctgccccatgcctgtcagcggaaacaggcatggatgtcacgcttgatgccaatattgtcgaaaacacctgccagatttcgattccagatggaggaaaagtccatctgccgacggtcagtaagaattggttttataaccccgatggaagctcgcgtttgcagcctacagatgcagcaagcggcaccccgtttacagtgcgggtagaaagttgctctggcgataatatctcggtaaatgcggtggatttcagtttccagccacaaagcaagcagtggccggttggcactcgccaggtgtttatcaacgaaaccaaggtcctggaaggcggagcagaaaacacgggtgtcgttatcttttcaaaagcgttaaacaccaatgtactgaacgcggacggtagctccagcgtgttaatcgatgcaggcgcagatagctgggtgaaagattatccattttatgcacgcttacagaacgtcggcctcgtgaaagcgggaaaagtgacgagtagtgttgtggttaatgccacctataactag

SEQ ID NO: 140323 - DNA, 1107 bp, Enterobacter cloacae
atgagtaacacaggatggtttaatatttttgcatgggcaagactgttcgcggcaagtctactgctactgcaagggtatgcttggggtgaatgccattttggctatagtggcgagggcgggacctcaacgattgtcaatacccttgcaaattcacctgtctattttaaatccagttacaacacgggaataccgggccattttagtgagattgcgggcccctttaatgcacaactttcccctgggctttggtctcagtgcgatgcaggaaacgaaggtgaacaaatgtcaaatatcacctacgacgtggttgggactaccgacgaagggtacgcgctttggccaaccaatattgacgggattgcttatgcagtgagggtttatagcgatagcaaccctggagcatattttcaatattcctctggtcaatggataaaccttcccataaacgcgtcgaaaacagatcataattggaaaatccaaatcaagctttatcagcgagacagtattctgggtaaccctgaacatgtttcggtaataaccccacaagggtcaaaaaaaatcggtgggatgtccattggagggcatacggacagcgacaaccaaccctggtggtttaatattacgccgtcatcttttagcattccggttgccgccgccacctgtcaggcagccatggtcaatggcggcagtaataacgttgattttggtgaagttatgttctccgatgtgaaaaacagcggctggtatccacataaacaatttaatttgcagctcaaaggttgtgctaatacggtgggtatttattataaagtcagctccaatacaaccacctctgttcccggaacgggggttgtgttgaccaatatcttgacttcgaatgccgcgagaggggttggtgtcttaataaacgaagagtttccctccaacccagggggacatggagaaccgataattaacgatcccacaccaatttatgcacctcttcgcacggtaggcaccagcgaaaacattgatttaccttttaatgcctattttatggaatataccagcgatattgctgccggtaatttcaaagcggtggcgacattctcaatagagtatttgtaa

SEQ ID NO: 140324 - DNA, 345 bp, Enterobacter cloacae
atgagcaagtttattatttacatgctgaatatattattttgtggttatgtactggctacatgcctcatttctttggttagttttgataactgggaggactgtacaatcgcaataacaatcatattaggaagtgcacaacttattgcgacattacttaatcgggcactgcctcataagttacatattttaggggggatagctgaactgatagaagatccgctattagtgattggcgcaattgtgtgtctggatgtgtttgaaccctggccgataaagattattgggatgtttacgtggattgttttgattttctttgtaccttcaataataagtcccaagcgttaa

SEQ ID NO: 140325 - DNA, 1266 bp, Enterobacter cloacae
atgtctgatgtccaagaatttttgcctacaacgagtaacgaatatctctcgctcgaagtgcttgctgatatcctttcagaatcaaagcgtacactagatgcttgggtttcaaaagggatcttagtcccgtcatcgtcaacacaagacgataaacttttatttaatctacaggatttgtctcattttccagaggtaaatcaaatgattagcagcgagtgggagactgaggagtgtattcttccttctcgcccttataagttagttgaacttttcgccggtggcggcggcttggctgttgggcttgaaaaagcagggctcgatagtatttttcttaatgaattagataaagcagcttgtgcaacacttagacacaacagaccgcattggaatgttgttgaaggggatatatctaatatagattttacaaagatcaatgaaaatgttgatattttgactggtgggttcccatgccaggccttttcttatgcgggtaaaaaattaggatttgaagatactagaggaacacttttctttgaatttgcacgtgcagtaaaagaattacagccgaaagtttttatggcggagaatgtaagaggtcttttaactcatgaaaacggacgaaccctggaaataatccgtgaaattatccatgagcttggctatgagcttgtagaaccaagagttcttaaagctatgttttataaagtgccacaaaagcgagagagacttattcttattggagtaagaaaagatattgcaaaacaggctatatttaaatggccttcaccttataagcgagttctgactcttagggatgctttctatgctggggaactttattctacggatgttccagattcaccgggtcaattatatccattaaggaaaaaggaaatcatgtcttttgtccctccaggaggatattggagagatcttagtattgaactccaaaaagaatatatgcaaggaagttattttcttggcggtggaaaaaccggaatggcgagacgcttatcgcttgatgagcctagcctaacccttacaacttcccctgcgcaaaaacaaactgaaagatgtcaccctgtggaaactagaccattgcagatccgtgaatatgcaaggatccagactttccctgatgaatgggagtttaaagggtcacttggagctatttatcgccaaataggaaacgccgttccggtcaatatggctgcagcattgggacgctcccttgttcgtcttcttaatgatatagaatcgaactaa

SEQ ID NO: 140326 - DNA, 717 bp, Enterobacter cloacae
atggaagataaagatttgattttggagcaggtaaaacaatggtttagtcaatccatagcggcaaaccatatcaagaacacggtgaaacttgtaaacccaaaagaattcgatataaacccctttctaacaatttatttagccaaatacttaactggtgatgcttctgcacagagcatagctcgagctttaatattaccgagggttttaggaacttctattacaacttcttttggtcaaaatatgcaaagcttcattagtattttgaggcaatcatacggaagtacaacttctggtgtagatatagaatttatagaccaagttgatggacacaggaaatattgtcaaataaaagctgggccaaatacgattaataaagatgatgtcgaatctattactgggcattttcgtgacgtcttaaatttagcgagaaccaataaccttcgtattccgcatgacgatcttatcattggtgtcctttatggcgagccatctgatttgaatgcaagttataaaagaattacaaggcaatattaccatcctatttatactggtaaagaattttggcatagacttaccggtgatgaagatttctactctgatcttattgatgcaataacttcagtagctactgacgccgatttcagtgaacgattagaagaagtaattagtgagcttgcgagaaatgagaaaataatagcgcttgaacaactcaattaa

SEQ ID NO: 140327 - DNA, 714 bp, Enterobacter cloacae
atgcaaaataatagtttacttagtgagttaatctatccgttgattgtggctatagttgctggtgtcattagttctatattacagaataaaatgttgccgaatggtttctatatgaaacttttcaaaccaatacctgactatgtaaaagatgctggaataagtacttttttatatcggctttcatataggaatgtggatatagaaaatgtaaagcctattacttcaataaataaatttttgatgcttcttttttcacttattataatggtttcgattggttgtttctcttattattcatttaaaataattttaaatactccaagagagtatgctaatttaactctatcatctacagatgaatggtttgtcatttctgaaaatgatgcaaggagctatcctgataataataaatggagacttgatcaagatgcgtgtcatactgatatttatcaagaaatatcaaaaagcatcggcgcaagctacgatttggtttatctgatatgcaactcagtaggattagataaacaaaaagttcatattaggaaaagagtcgagaaatttagaaaagatagaaatgttgtagtgtttattaatataatctttattacatatgcactttttattatagcaataatttgtgctccaataacaatagttccaaagttaataaaatatcgagatcagtaccttcagaataagtttttaattaaataa

SEQ ID NO: 140328 - DNA, 1464 bp, Enterobacter cloacae
atgcctaaattaagaatttacttctcggatttttttaatgttactccggaaaaaataaaagactatggtgctttcaatatttcgttaattaatgatcttccattattcatagatccatttttattatttaataatgaaaaatataaaagtctgcatcaaagtataattagatatgtttcatttttacgagaccggtctcaacacggtgagttgaatagtggattgattaaaagttggtttttattcccggaggtaaagcaaaactggttaggttatagtgttgtcggcaacggtggcagtggccttggtattgattttgcaaaatcattaaacaattcattctctagtatacttcaaaattttggcaaggaagaaataacgaaaggtagtcaccttgagaagttatgcttaattaaggacggtgttgggaaggacagtgtaagtgattttaccaccaacttaattaaatcttttttattaaagtacactgaggattttgctaaagataatatagataaaaaatatctctcagagcacatggtggctaaagttgaatttaattatgaaacccgaagctggtcatcaaagaaattcatactaccgacgtatgatggcgattatgttcttttaacaccaagggatatacttacaaaagatgaaacctggattaacagaaatgaaatgatagaagattttagagatatatgtgatagtatctctaatgatcaattgcgtggtcagttatcagattactttaatagatgtttgcctgatgaggcaaagaaaaaagaaagagagctagctgcggatttaactataaaaaactatcctagttttatagattattatatccgttataaagaacagaacccaaatggggctaatcgtgagagtgatgcaaaagtcagtgaaactgagcgtagatatgttgaagctgttaagcttttagttaatatgatttttgaaaggaatgaggacttctttcatgaaaaggatgatacattcgaagaagcttataaacgggttagttatcttaaacaagttatcgaaaataataacggatataaagttttctacttgaatggtgtacctgttaaacgagaatccgacttacagttaatgtttcgattgacatggtttgccagtatttcggatgtaaacagcgaagttgataatggtagagggccagtggattacaaaatatcacgaggctctaaagacaaaacattggtcgagtttaaattagccagtaattctaagctaaagcagaatctagcaaatcaggttaaaatctacgagtcagcaaatgaaactaaaaaatcaataaaggtgattttgtattttaatgatacagaactatctaagctaattaaaatatttaaagagctaggggttaagcaaagtaaagagttggttataattgatgcgagacctaataaagtatctgcttcaaatgtaaaataa

SEQ ID NO: 140329 - DNA, 321 bp, Enterobacter cloacae
atgaaacagccattaccgcccgtattacgcgccgcgctgtatcgccgtgccgtggcctgtgcctggcttaatctgtgcgcccgtcagcaccgctatccacagctcacactcgatgtgctggaaaatgccatgacggcggaactggaggggttctacctgcgccagcacggcgaggaaaaaggccgactgattgcctgtgcgctactggaggatttaatggaagccggagcactcaaggccgccccgtctctttcctttctcgggatcgccgtgatggatgaactttgcgcccgtcacatccaatcgcctgtactgcactga

SEQ ID NO: 140330 - DNA, 261 bp, Enterobacter cloacae
atgcctgttaataacccggccttaatacagaaagagcatcatgttgcgctcagtcagaatgacctcaactgtctggaacacctttgcaacgtcggcaggctcgtcggcgaactgatgcaggtgcaggactgcaccaccgttcgccgcgacccggcgcagcagttacagctcacctccgtgatttacctcatgaccacccagctcgacgatgtggtcggacgctgcaaccagcgctggctcaccggggaggctgatgtatga

SEQ ID NO: 140331 - DNA, 450 bp, Enterobacter cloacae
atgtttgatttccctcagccgggtgaaacctaccgctgctctggttttcctgatgtgatggtgtcgggcgtgctggccgacggtattccgtgggatatgccgtaccgctgcccggggctggtctggaacccgtaccggcgcacctacaccatccttattcgtattattgccggtggcagcatggcagaaattccgctccgtcgttttttgcaggactttatctgtgagcgccccgacgtatttaagcgcagccctgaaaaccgtcacgctgttttacgtgaaattgccgctgacccggaattacagcaataccgcgcgcgaaatatccaaaagtatccgggtgatatttccccggtcagacggccagcgccggtggcgcgaaaatggcggaataatgtcgcaacggaaacggaaataaaaccggataacagctaccgccattatctgtaa

SEQ ID NO: 140332 - DNA, 282 bp, Enterobacter cloacae
atgcataacaacactcagagcgtctcagcgggtcgtgatgttcaggaacatctcagccctgagtcattccataaactcaaccgagccagcgccatgacgcatttcgtcgggctggatttgcaacagcgtgaactctccggcctgcaccagctttccgtccctcatattctgagttatctgcatgaggacatcagttatgtgctggaggagctcaaggccaaaggcctgtgtcgtgatttcattgccccgtcatccgtgaacggaggtgagcatcatgtttga

SEQ ID NO: 140333 - DNA, 600 bp, Enterobacter cloacae
atgaatcagagccgctttcaaaaagcccctttttctggcttgcatctgttgtgtgtttcctggtacagttttgccgttgccgcaaaatcggcaaccgggcgtgagaacccgtatttgttatcggcgacaccagacgcgccatgcgtctttttttgtgtcgcaataaacgccacagagcaccagataatggtgtggtgtgcggtcattcgtgcagatgtgactctccgtctcctgcccgtattcgcacattatgccgctacgtcaatggtagctcaggcggggcagccctcgggctggccggtttccgataacaccggtattctcacccccgtctgggctatcgccactgagcgtgagaactccggcgatagcgtcgtcaacgctgttatcggaggttgccttatggctacgatcctcaccccatctcaccctgaatttgtctttgtgtttgctgccatccgccgtgcagatcatacgccccagatctctatgctccgcactgttgcgggagatgaaaagaccgcccgccgctctctcgttcgcgattacgtgctctcccttgctgcccgtctgccggtcgcggaggtgagccatgcataa

SEQ ID NO: 140334 - DNA, 267 bp, Enterobacter cloacae
atgcaaactgtttattcttatccttcttctgtttccgtagcatctctgatgccgatatctgatgccgctcaggagagatttttacgcctccccgaagtgatgcatttatgtggcctgtctcgctccaccttatacgatttaatcgcccgtgatgctttccccgcgcaggtctcactcggcgggaaaaacgtcgcctggctccagtccgaagtgaccgcgtggatggcggaacgtatcgctcaccgcaacaggaagtgtgacgcatga

SEQ ID NO: 140335 - DNA, 735 bp, Enterobacter cloacae
atgaccaccacgaccattcctgactatctgattccggcattccggcaactggacgcggccagagctgagcatcttgaaaacgcccgcatgatggatgacaccgccaccgcaattgcccgtaccgcacagcaaaaaacagagcttgagcaggagagcggtagtgacgcgagtgaatggcgcacggcatttcgtgccggtggtgcggtgctgacggatgagctgaaaaaacagcatctggcgcgtgtcgcttcccgtgaactggcagaggagtgtgaccagctcgctgaggtgctgacctttgaatgcgaccggctgaaaggtaactgtgacagcacggccagagcataccgtcaggcacattacaatgtgctcagccagtatgcgggaaaagagctggataacgcgttacgcgattcgtgcggggcgcttgtccgggcgatgaaactcaaaatgctggcactggggaatcctcttgcgaacaccgtcgggattcagggctatgtcgagccggataaagcgattatgcaggaggtgcagacgtggcttaagcaagcggtgaaagactgccatatccgtctggctgatgagccggtgctgtttaaagccgggctgtcggccgagacgctgccgcatatgaattacggcgtcgcagtaaccgccggtcagcgtaagagctactttgacaagctgagtgtgcgaaaggctgaccttgaagcgcgaggattactgtcatga

SEQ ID NO: 140336 - DNA, 228 bp, Enterobacter cloacae
atgatgcactgcccgttctgtcagtgtccggcacatacccgtaccagccgctatctgtctgaaaccgtcaaacatgcctattaccagtgcaccaacattctctgttcggccacattccggacgatggagtcgctcgactcggttatcaggccgccttcagagacggaattaaaggatgacgaatttatctcggctcatgccgggaaagcgaaaaaacagagtctgtaa

SEQ ID NO: 140337 - DNA, 567 bp, Enterobacter cloacae
gtgacaacattaacgctacagcaggcttttgaagcctgccagaacaacaaaaccagctggctgacccgcaaacaggagctggccgacaccgaacaggaatatggtgagctgttagtcagcggtgaggataaccgcccccgcagcctgcaaacgctgcgcgatattatcgacgtaaaaaaatgggaaattaatcaggctgccggtcgctatattcgctcgcatgaggacgtgcagcgcatcagcatccgtaaccgcctgaatgattttatgcaggcgcacggcgcggagctgaccgctgcacttgcacccgaactaatgggttataacaaccagcatcccgctgtaaaacactgcgtgatgcagcattcagtcgattatctgcgtgaagcgctgtcgatgtggctggccgctggtgaaaaaataaattattccgcacaggataatgacattttaacagccatcggattcaggcctgacgcggcttcgcgggatgataatcgtgaaaaattcacgcctgcacaaaaccagaattacgtccgaaaacgcgctgaactggccgcgcagtag

SEQ ID NO: 140338 - DNA, 2034 bp, Enterobacter cloacae
atgagcaagcttaaaattgaacgcttggttatcagggcaagtacaaccgatggaatttatggaacagacctcaaattcagttacggattaaatattattagtgctgaaaactcttctggcaaatctacgtgtatacagtcaataatctatgcattagggttagaaggtattttaggtccatcgagaagcaaccctttgaaatcggcattaacaactaaattaagggattatagtgataaggaaatcccagtaaatgaatcaaaaatatatcttcaagttgctaatgaaaacggcaagacaattacggttttaagaaaaagtgatagtgatgcttcgaaaatagtcactgtttatgattgtgaatatgaaaaaatcaacccgcaaacattcactgattattttctaaaagaccccggttctgctcaacgtgaaaaaggttttcattatttcctttctaattacttagggataaagcaaccccaagtaattaaatatgatggttcaacgtgtccattatacattgagtcaatgttcactgttaattatgttgagcagacaagaggttggggtgacatattaaatataacgccaacctatctcggtataaaagacttgtcacaaaacatccttgaatatactctgaatttggatgttcgtgagataagaaggaagagggaaatatgtctggatgaaaagaaaaaccaagaagttaaatggttgaatacactttcagatctagagtctaatgcaaaagcttatgggttctttgtttcaacaagaataccagacaagatcactccaaaatccgaggtttatcaggatagtgatttatatacattggatgaaaataaccatgagatttccttgccacaggacaaatttaatcacgaaaaggaattagaactagtcagagagcagttaagaaatggcgatgactcaaacgatgtagcattggatttaatccttgataacctaagagctaacttagctaataatgaaaatgctttgtctttattaatatcagatatagaggccaataaacagtacattatctcaataaacaaaagcctaaatgatacgaaagagagtttgaggaaatacagggatattgaaaaactccagttgttaggttcgcaagaagagttttcttttgttgagggtagttgtcctacttgtgggcaaactatggagaatacacttttgccagccagtctagatggcaaaatattaactgttgaagataatataaaatatttagagaaaacttttgctgtttttgacagtttggcaaaaagtgaaaagttaaaatttgaaaagaaagaagctacattgaaagtagccaatgctagggttcgagatttacgttgtcaaattaaggaggttcagcgtagtatatcctcccctataaactcagaacttagagagttaataaggaaagaagttaagctggaaaaatatatcgacagtttaaatatgctgtctagttttgagttggataagaaagatactcttcttgcggttctttccgactggcgggattgtaataataaactggcagtgctgccatatgatggttttagtcaaaaagataaattaaagttgcggttgttaagggattcattcaagtctaatttgcaagattttggatataagagtactccgatagaagacttcgatttgtctacaaatacatataaaccaactgtggatggtatagatattgggtctgaagcatctgctagtgataatattagggtgatttggtcatatttatactcattattaatgcttgatgcgaactcgaacgacatatctaccaatcatttgggtttgcttattatggatgagccaaggcaacaagaaaccaaagatgttagcttcaaaacatttatcaaaaaagcgtctgaatcatatcaggaagaaaagcaaatcattatggggactagcgaaaagtaccctgatttaattgctatgctggatggtttgcatgtaaatctaatgcattttgatagtaatattattcgtaagcagtaa

SEQ ID NO: 140339 - DNA, 465 bp, Enterobacter cloacae
atggatattttaaaagaaattcctgaaaagatgacctttaactcaaatgggtctccagttgagcctgaagtaagaccaatttggagaatatccttactgacaattattcttaacaaactatgtagaggttcctcttcgagtttgaaaaaaatgcaggttttatattctttaatatcatcagcagataagagagcaagatatttctccgaaggggcatatgcggatatcagtattcgatttgacccgctcttagataaagcaatttcattgggtctggctgaaggcatattttctttagatgcagcgaaaagcgttgttctaactgacaaagggacgcttttgtctaacaaaatttataaagattcatcattgtttgtttttgagaaggaatttattgaaaactatagcaagtctgagttttcagataaaaagatagatcagatattatataagggagttatatga

SEQ ID NO: 140340 - DNA, 903 bp, Enterobacter cloacae
atggaaatatcaaaaaataaagtttgggaagccaaggagtgggaaggtcacgtaaacgatcttctccgacttaagtttggggaagaaaattatatccctatacctgactttcataacggtgatgcaggtattgaaggatattgcacacaaggatatgcgtttcagtcttattgccctgatgaggcatgcacagtagataagttgtatgataaacaaagagataaaatgacagcggatgttgggaaatttatcttagataaaaaaggttatttaaagcaaattttacaaaatacaaaaatacggcgttggattttagtagtaccaaggcatttatctaaacagttgaatgttcatgcaacaaacaaagaaaatgaagttttagcttccaacttgccctatgttgataatagtgattttaaagtattgatttgggatagggacaatttcaaaaaagaagaagatgaattaattagtagtggactaagattattaagaatagaagttcctcaagtagaaatgtgtgatattgatcatcttaaagataacagtactgagtttggtgataatatttctagaaaactcagaaaaataagggataatgagagccaggttcagaatgcgtctacaatgctattaaaaaatatcgttatgtataaaaacgttatgagcgatctcaaagataactatccaattttacatgagaaaataacaaacggcattctggatcgtgagcaagatttgtctttagcatttttcgaaactgaaattttgacacctattcaacaaatagaatacctcaataataaacttaaagaaactagccgtcttcatcaagataatctaaaatgtatttcaactggagtagttggtgattggctaatgcgttgtaatttggatttttaa

SEQ ID NO: 140341 - DNA, 219 bp, Enterobacter cloacae
atgacgccagaaacagacaacgccatccgcgccgcctgccgccgctgcaccgaggaaatccagcaggccatgcgcaagaagccaaagcctaactggaacgaaacggtgcctcccatcatcaacaagcatcacaagaaaattgaagctctgggagttagcctcctggagttcgtcgtatacacaggtcggcttaatcgccgcttcggagttgaatcgtga

SEQ ID NO: 140342 - DNA, 411 bp, Enterobacter cloacae
atggctcgctacgaattcacaaaccgtaaggctcgcattgagaagaaattcagcactgaagcgatgcgtctgctgattgcactcatgcctaaacagtaccctccagaggcattcacgcttgatgaaggctatttcggtgggatggattatcaagaatggcaggtctgcgaggtagattactggggtgaggcaaatagctgggatgctttttacctgttacacgatgccctcatcctacaaacgaccgactgggaagggatgagtcgagcggatgatgctgagtattctggcgaagcgctaatcgatagaaccccattctattctccatggcgccttggcatcgtcaaccgcgctcaaatcattaggcactgccgacagcttgtgtctgctggcatcaactgggacgcttaa

SEQ ID NO: 140343 - DNA, 270 bp, Enterobacter cloacae
atgaaagatattatgctttttggtgctggacatgaaggcacaaagaaacaggttgaacccgggaaagaatcctactacttcaacagcaaaccagtatcatcgcccacaggcactaatatagttagttatagtgcagagcaggttttattccgggttagcactgtttatccagaaaaaggaggttttttgattggagtgcatggtgaagaaccttcagataaaacgatagtagatgcgatatttaagtacaaccctaccccgctaaactga

SEQ ID NO: 140344 - DNA, 237 bp, Enterobacter cloacae
atgaagtttgacttgcgctctagcattgaggcagctcgaaagaatgaattagggagtgaagaagatgtgttgctgattctgtatgacggtcacatatttgccaagctgatagggtgggcactcattacagacgatggagaagcgattgaaggtgttgctctggaaggcgttaaagtgatgtggagagtgatattcttcttcaaccgccccagaagtgaaaagatatgtcctttctaa

SEQ ID NO: 140345 - DNA, 735 bp, Enterobacter cloacae
atgattccacatagtagttactttattgagcctcacaacggtcttgggaagggaagtttcggtaatgttgaaaaagtaaccattaggaattctaataaagaggattgcggtgactatgcaagaaaaattcttgtaaatcatcatgccgatccattacttgaagctcggtttcgtcgagaagtaatgtcgcaagatgcctgcttgcatacaaatgtggtgagaataattctgtgcaatttaacatctccgccactatggtatgtaatggaattaggagaatgcacattagaggatgaaataaaatctggtctattacagcaatatgataaaataaagatagcccaaatgattaccagaggtgttgcgcatatccacttgaaaggttttttacatagagacataaagcctcaaaatattttaaagtgtccaagcggtatatataaaatttctgattttggtttggcaagacatatggatcctgatgaagctagccaaattttaacccaagttggacatttcccacgaactcctcgatattttgatcacaatgtagtactcaatggttactcacctcaatctgatattttctctataggaattgtccttgaggagttaaatattgcaggatttgatgatatcattgctagatgtactgacagaaagttgcataaacgctacttaaatgcagagcaacttcttaatgatattaacaaacatatggagcagaacaaatga

SEQ ID NO: 140346 - DNA, 738 bp, Enterobacter cloacae
atgattgatatcatttcagcttctttcttcaccgtgtctaaagagctaaacaagcttaatcaagacaccatacttccaccaataaaagtaaatgatggctatttatttgccattgctgatggattaggaggttatactggaggtaaagaagcctctgagaaagttatttcgtacatatatgagaatacgaagaatttaatcagtagtaatttcgacaaccttttcataggccttaaagaagctgttaatgaactaagcgcacaaaatagcgaacttacaaatgctgcaacaacactaaccctatgctatatcacaaataaatatttaaaaattgcacatgtaggagattgtcgtttatatgttaaaaataacaataaattaaaacagctaacaaaagatcatactcaacaccaaatgcttattgatgaaggcatcttcagctcgcgacaattaaaaaatgcaaaaggtaagaatttactaactacggcgatttcaaaaacaattgagttagattacaacatgttgcaaataccactgagtgatctttatgatgacaatcaaaatttaattctcatagtaatgtctgacggggctcatcacttttgggaaaaaagaccccggttttctgtcaataccttgtctgagccttcgaggttctgttcaagtctaaaaaagcgtattgagaatggcccccctatagacgattactctgttattgcagttaagctaactacttag

SEQ ID NO: 140347 - DNA, 786 bp, Enterobacter cloacae
atgaatgaactcccagatcataatgaaatgttactttcagcccaacgaaatttatcctttctccttaaaactttttatttacatttttcacaagattgggaaataactaaaacaccagcaatagatgaaactgatgaacagcgaatacaaagattattatttgataaggaaatatttttacaaactggattagtcatattatttaattctgccgaaatttatttaaaatccataattgctgagaaaagtgtttttttgttattaaaagacatcaaagattcatataaaaaacactccttcttcgactgtttaacaattgatgccgcagatttaaataatgtagcctcaagtatttcaggagttacattccctcaaagattcaatgatacttatgtcgccttacgtaaagaacgtaacaaagtaatacatctgggcaaaagtaatagcaaagctgtaataaaagacttcctttccgcatttttaactctacaagaagaaatcaataaagttagcctgctcaaactttcggagggtttattcagtcacgatgggctcgaaattgaagggattctagcctctgcacaaggctactctaataatatcattgatatttataaaactttctttccacttgacgaaatcttgaaagagatttataaactcgatagtaaacctaaaatgtggatacaatgtagttcctgtcatagtacctcttccacattagcagtaatatcaaaagctaaagctgtttgtctcgcatgtgggtataaaaaaggagttatgtaa

SEQ ID NO: 140348 - DNA, 1077 bp, Enterobacter cloacae
atggagaatctaaaattaatacctttttccaaagttaatttttcagatccgtttttcgatagtctgaaatcagactatgcaataggatttgttgaatggttccaaaaaaaatgcttaacacctgaaaaagataaagcatatgttctcttcgatgagaatgacaatatagatggcttcatgtatctgaaattagaagatggagttattgatgatacttctcctaatatccccgcaggacatcatttaaaaatcggaacgtttaaatttaatacaaaaggtactttacgcggccagcgttttttgaagaaaatattcgaccatgcattaaaagaaaaagtaaatgatatttatgtcactatcttcgataaacatgattaccttattaaattattcctgaagtacggatttgtaaagtatgggctcaaacattccgaaaatggaacagaaaatgttttacttcgggagatgagtgcagatcatctaacaggagatttactttctgattatccttatataaataacagaaataatgaaaacaaatatctattatctatataccccacttttcatacacgtcttttcccagactcaaaactcgtaaatgaggcaccagatgtcattgcagatgtttcttatgccaatagtattagaaaaatatatatctgtgcaatgagtgatgtagcaaaaatgaagcctcatgacattattattatttatcgcacatctgataatcagggccctgcgtattaccgttcggttgtcacttctttatgtgttgtcgaaagtgtaaaaacaatcagctcatttttaaatgaaaaagaatttctcagtcattgtttaaaatatagcgtatttactgaatcagaattgaaatcattctttaaaactaaaaaatacccttatatcataactttcacttataatttagctctgccaaaacgagtaaatcgtgctaaacttatcgaagaggtaggcctgaatcctaaggactactggggtgtgatgaagttaacagatagacaattcgaaatgatagttgagttaggcggaacagatgaaagtattattgtcaattaa

SEQ ID NO: 140349 - DNA, 369 bp, Enterobacter cloacae
atgaaagtattattgtcaattaagccagaatttgtggaaaaaattcttgatgggacaaaaaagtttgagttccgtaaaggtattttcaaaaacgacgatgttaaatctgttgtaatatacgcaactatgcctgttggtatgattattggtgaatttgacattaaaaacattatcgaagatgaaccattaaagttatggaacaaaactagacaccaagcgggcataagtaaaagtttttttgattcatattttgataacagaaagaaagcttttgctattgaaattggtgacattcgcgtatatgaagcacctataaaattgagttctatgggcatcagtgctcctcagtcctatcgatacctaaattaa

SEQ ID NO: 140350 - DNA, 189 bp, Enterobacter cloacae
atgacgcgtgaggcggtggaggaagggctgctggtaacgcggcggatcaataatccacgtcaggattcgcgcatgctgctcgccacgcagcatgcggcgaccggtcaggtcacgcgctggatcaaacagcagtttggcccggaaggcgtgctgacccggatctacagtgacttactgtggcgtacctag

SEQ ID NO: 140351 - DNA, 2334 bp, Enterobacter cloacae
atgaaaatgaacgtaacggaaaccgtaaaacaggcgtgcggccactggccgcgcattcttccggcgctgggtgtgccggtcatcaaaaaccgccatcaggcctgcccggtgtgcggcggctctgaccgcttccgctttgatgataaagaggggcgcgggacgtggttctgcaaccagtgcggcgcgggtgacgggcttaagctggtcgaaaaggtgttcggcgtgtcgccctccgaggccgccggaaaggtgagcgccctgaccggcagcctgccgccggttgctgaggacattattgccgccaccgaggccgaaactgatgccagccgcaaagccgctgcggcgcttgctgcaaagcttctggagaaaacccgcccggccaccggcaacgtctacctgacccgcaagggctttcctgcgctcgaatgcctgacgctgaccaccacgcacaaaaccggcggagtgacctaccgcgccggtgatgtcatcgtgcccctgcaggacgataccggcgcggtggttaacgttcagcttattaattctgacggcctcaaacgcaccctgaaaggcggagcggtgaaaggggcgtatcaccttatcgaggggaaaaaagaggcggaaaaacggctgtggatagcggagggctatgcgaccgcgctcaccgtgcatcacctgaccggtgaaaccgtcatggtggcgctctcgtccgtgaacctcctttctctggcgagccttgcccgtaagaaactcccggcctgtcagattgtcctcgccgccgaccgtgacctcagcgggaacggccagaccaaagccgcagcagccgcacatgcctgtgagggcacggttgctctcccgccggtgttcggtgactggaatgatgcgtttatgcagcagggcgaggacgccacgcgcaaagcgatttacggtgccatccggccagcggcgcaaagcccgttcgatacaatgagtgaggcggaatttaccgccatgagtaccagtgaaaaggcaatgcgggtgcatgagcattacggcgaagcgctggccgtggacgccaacggccagctcctgtcccgctatgaagccgggacgtggaaaattatcccgccgtcggactttgcgcgcgacgtggccgggctgttccagcgactgcgcgccccgttctcttcggggagaattgcctccgtgatcgataccctgaaactgattattccccagcaggccgcaccggcgcgccgtctgattggttttcgcaacggtgtactcgataccctcaccggcgtattcagccctcacagcaaatcgcactggctgcgcaccctgtgcgacgtggatttcaccccaccggtggagggggaaacgctggagacgcacgcgccgaatttctggcgctggctcgaccgcgccgccggttcgcgtgccgataaacgtgacgtgatactcgccgcgctgtttatggtgctggcgaaccgctacgactggcagctcttcctcgaagtgaccggtcccggtggcagcgggaaaagtattctggccgaaatagcgaccatgctcgccggggaggacaacgccacgtcagcgaccattgagacgctggaatcaccacgtgagcgcgcggcgctgattggcttctcgctgatacgcctgcctgaccaggagaaatggagcggtgacggcgcaggactcaaggccatcaccggcggcgatgccgtatcggttgacccgaaataccgcgacgcctattcggcctatatcccggcggtgattcttgccgtgaacaataacccgatgcgcttcactgaccgcagcggcggtgtgtcccgtcgccgtgtcatcatccacttcccggagcaaatcgccccggaggagcgcgacccgcagcttaaggacaaaatcgcacgtgaactggctgtgattgttcgccagctcatgcagcagttcagcgacccgatgaccgctcgcacgttgctccagtctcagcagaactcagacgaggcactcagcatcaagcgcgacgccgatccgacgtttgatttttgcggctatctggaggcgctgcccgagcctgacgggatgtatatggggaatgcgaatattgttccgcgacagccgcgcctgtatctgtatcacgcctatctggtctatatggaggcacacggctacaagaacacgctcagcctcaccatgttcggcaaagggctgtcatcgatgctgaaagagtacggcctgaattacggcaagcggcgaacgaatcaggggatgcagaccaatctcgcgctcagggacgaaagcaacgccgactggctgccccggtgcgacgaaaccccagcgatataa

SEQ ID NO: 140352 - DNA, 321 bp, Enterobacter cloacae
atgaaacaaccgctcacgcccgttcttcgcgctgcgctgtatcgccgtgcggtcgcctgtgcctggctgaatttgtgcgcccgtcagcaccgctatcctcagctcacgctcgatgcgctggaaaaagccatggccgccgagctggaagggttttatctgcgccagcacggcgaggaaaaaggccgtcagattgcctgtgcgctgctcgaagatttaatggaagccggaccattaaaagccgcgccgtcgctgtcctttctcgggatggccgtcatggatgaactctgcgcccgtcatatcgccgcgccggttgcacactga

SEQ ID NO: 140353 - DNA, 261 bp, Enterobacter cloacae
atgcctgttaataacccggctttaatacaaaatcagcgccttgccgcgttcagtcagagtgacctcgaatgtctggaacaccttcgtaatgtcggccagttcgtcggcgatatgatgcaggaacaggagagtacgaccctgtctcgtgaccggatgcaccagactcagctcgcctcggtcatttacctcatgaccgcacagcttgacggtgtggtcgaccactgcggtcagcgctggctgacccgggaggctaaggcatga

SEQ ID NO: 140354 - DNA, 462 bp, Enterobacter cloacae
atgtttgatttccctcagccgggtgaaacataccgctgttcaggttttcctgacgtggtggtgtcgggcgtgcttgccgacggcattccgtgggatatgccgtatcgctgtccgggactggtctggaatccctaccgccgcacctacaccatcctcatccgtattatcgctactggtggtatggcagaaattccgctcagtcgttttttgcgggactttacctgtgagcggccggacgtatttaagcgcagccctgaaaaccgttacgctgtcttacgtgaaatcgccgctgccccggaattacagcaataccgggcgcgaaatctcgatatttatcgaggcgatattaccccggtcaggcgtcccgcgccggtggcgcgaaaatggcggaataatttcgcaacggaaacggaaacggaaacggaaattaaaccggataacagctaccgccattatctgtaa

SEQ ID NO: 140355 - DNA, 285 bp, Enterobacter cloacae
atgcgtaatcaatctgctgctcagaccctctcagcgtgtcgtgacgctcaggaacatctcagccttgaggctttccacaaactgaaccgcgccagcgccatgacgcattttgtcgggctggatttgaaacagcgtgaactctccggtctgcaccagctttccgtcccgcatattttcagctatctgcatgaggacatcagctatgtgcttgatgaactcaaggccaaagggctgtgtcgggattttgtcgcgccgtcagcgaatggaggtgagcaccatgtttga

SEQ ID NO: 140356 - DNA, 561 bp, Enterobacter cloacae
atgaaacagacacgttttccaaaagcccctttttctggcttgcatctgttgtgtgtttcctggtacagttttcccgctgtcgcaaaatcggcagccggaattggcgttccgtgtaactcaatggcgacaacggacgcgctatgcgtctttttttatgtcgttgctcaggctcatccattttttggactgtggtgtttatacggacactatggtttctgtcagataatggtagctcgggcggggcagccttcgggctggccggtattcattgaggccggttacgccaaccccgttcgggctaccaccagtgaaattggcgtttccagtggtagcaataaccgctactcaatggagattgcccttatggctacgatcctcaccccttcacaccccaaatttatctttgtgtttgccgccgttcgccgcgcagaccgtaagccccgaatctgtatgctccgcaccgttgcaggtgacgaacagaccgcacgtctttctctcgtgcgtgattacgtgctttcctttgccgcccgtctgccggttgcgggggtgtgccatgcgtaa

SEQ ID NO: 140357 - DNA, 267 bp, Enterobacter cloacae
atgcacacggctttatcagtaccatcttcccgctctggcgaacatttaatgccagtttcagccccgactcaggaacgttttttgcgtctccctgaagtgatccatcagtgcggcctatcccgttccacactctacgatttaatctcccgtaacgctttcccggcgcaggtctccctcgggggcaaaaacgtcgcctggctccagtccgaagtcaccgcatggatggcggaacgtattgctcatcgcaaccggaaatgtgacgcatga

SEQ ID NO: 140358 - DNA, 744 bp, Enterobacter cloacae
atgaaacccgaaacaatcatttctgccctgcagaacgttgccgctaaacagaacgcggaaagcgagaaacacatcaccgctaaactgaccgtattcactgcggccagagacgcccatgcagccagcatggaaaagctgaaagagattgatacatcaattgaacgctgtaagcaggagcgacagaccgctctcaatgagagcgcagaggcggaacaggactggcgcagtcgcttccgtaccctgcgcggtaatctcactcctgaaatgaaagcggaacacagcaagcgtatcgccagtcgggagctggccgacgaattcaccggcctgattgcggagctggagactgaccggggtcgtgccatgctgaatgcctgctccaccggcaataaatatcgctctgcacatggcgaagcatttaccgcttacgccggggcggaatggattaaggcgatcaatgctgttcccgtcgtgctcatccgcgctttcctgctgcgcattcgtgccctggaaatgaatggggagagcgcaccgcaatctgtgaccatcggtgaactgcgtgatgccctcaatcgtcagggcagtctgtataacttcgatatgaaacaggagccggtcttatccgtgacgggtatgcagcggccgcaaattaccggcgtggatatggagctgttacgcagtccacttaagcgaaacatgctcgccaaaaagctggctgaacatgacggaactaaggcgggggcataa

SEQ ID NO: 140359 - DNA, 555 bp, Enterobacter cloacae
gtgaccacactgacgctacagaaagcctttgagacctgccaggcaaacaattcaacctggcggcaacgcagggaagaactgacgcaggtcgaacagacataccgcgaacagcttgccggtgacgggcagagcctgcaaaggctgcgtgagattatcggggtgaaaaaatgggaaattaaccaggctgccggtcgctatattcggtcgcatgaggaggtgcagcgcatcagcatccgtaaccggctgaatgattttatgcaggcacacggcgcggagctggccgccgcccttgcacccgagctgatgaattattccgggcaacaccccgccgttcaggattgcgccatgaagcactcggtcgattatctgcgtgaggcactcaatgtctggctggccacggggaaaaaaattaattattccgcacaggataatgacattttgacggccatcggattcaggcctgacgcggcttcgcgagatgataatcgtgaaaaattcacacctgcacaaaatcagaattatgtccgaaaacgcgcggaactggccgcacagtag

SEQ ID NO: 140360 - DNA, 207 bp, Enterobacter cloacae
atgcaggtgcatgacccgtctcagggcgcgccagtgctggcgctggcgggggattcagtgcaggtaaaacacatgcaaaaccacgcaccttatgatgcatggcttttttacggaaaaatggcgggattttcgggaatttttgagcggcctactgtgcggccagttccgcgcgttttcggacataattctgattttgtgcaggtgtga

SEQ ID NO: 140361 - DNA, 1095 bp, Enterobacter cloacae
atggctgctaacgttactcttgacgatattgagaatttagaagatgaatcttattatgaagatgatagtgagcaacatccgccgagtgatgtgatcgcttacaatgagttgagatcatgttctgatttagttcgcatgtacaatgaaggaactttgaatattcaaccagattttcaaagagatattgtatggaattcatctgctcagacaagatttattgattccttaattaaacaacttcctatccctagcatgtgttttagttttgattataacagtcaggaatggcaggtaattgatggattgcagcgaatgacatcaataattagatttttatcggacccaagctggcaactttccaaacttgaagatatcgacagtaaaatatctggcgctcgagtatcagagtttcacaagcaaaagactgagttgaataatttttataaaagagtacaaaacttaacaattccggtcacggtgcttagatgtgatcattctaaactatcgcatatggagtatttgtttactatatttcatcgtttgaattctggtggtacaaggcttaataatcaagagataaggaattgtatttttagcggtgagttcaatactgctttgaaagaaatgaatgacattaatgagtggcagaaaatagccgggttaaatacaaaaaactcaaatagatttaagtacattgagcttattttgcgattcttctcattttatgataacaaagataaatataaaggaacattatctaaattcctcaatagctatatgaagaaaaatcgtcatttaggtaaggctgatatacaaatgaagatggatttatttagcaggactgtagggttggtatgggggaagatattacaacccaatccggtaagacttggtagttctttaatggaggctcttctatatggtgtggcaaaaaacattgatgctttagagcaagaaaccagtgctagcttaactaggcgttttgatgaattaagagcagatgattcattatcaacgactttcctaagcggtggtgtagctcgaaaggaaaaagtcgatgccagattagacgctgctctaagaatatttgggtga

SEQ ID NO: 140362 - DNA, 504 bp, Enterobacter cloacae
atgatagttaaggggataatttataaaacattgaaagatctagatcgcctcttttctaaggaaaccgatcctaaaaaacagttgttttattctaagcttgctcttatggagttgtgcggatggatagaggtaactatggataatatagttgaaggggtttataaaaaaaatataactgatcctgagcacataaaaaaaattcaaaatgaaattaggaggaattctaattttcattatgaggataattttaagaaaatgttagctcctgttataggattgagttcaatcgagaaaatcgaaaaaaaagcaacgcagcaaaaactttttacactaaaagctactttgacttcattgaagactcctcgaaatgctgctgctcatacctttataaaaggtacaggtatgactatcgatgctccatcagtaacgttagcaaatttcatcagtttgtttgacggatttaaagattttaaagatacgatgaaaacaataaaaattctctaa

SEQ ID NO: 140363 - DNA, 615 bp, Enterobacter cloacae
atgaatatggcaacaaacagcagtgtgattgtgagtgattcccctgcggcaaggcgggcgggaatgagcgaaagcgaatggcgagaggcgatcaaattcgacagcaccgatacgggctgggtcatcatgagtatcgggatggctatcggcgcgggcatcgtttttcttccggtgcaggtcgggttaatggggctgtgggtgtttttactctcgtcgataattggttatccggctatgtacctgttccagcgcctgtttattaatacgctggcggaatcaccggaatgcaaagattacccgagcgtcattagcggttatttaggtaaaaactggggcatcttattgggtgcgctttattttgtgatgctggtgatctggatgtttgtctattccacggctatcaccaacgacagcgcatcttacctacacaccttcggcgtaaccgacggtttgctgtcggaaaatccgttctacggcttattcctgatctgcattctggtcgccatttcgtcgcgcggtgaaaaactgctgtttaaagtctccagcctgatggtgctgaccaaattatttgtggtggcggcgctggggctttcgatgattgcctctggcatttag

SEQ ID NO: 140364 - DNA, 681 bp, Enterobacter cloacae
atgaaaagcacatcgacaaccaacagaactgaatattacaaaatcagcagctttatctttctctatttctttacctggtctgccagtattggtctgctggcgatctggctcggtcagaaagccaacctgagcggatcggtgattggaaccgtctttgcggtgaacgggatattctccgttattctcaagccgatctacggctatattctcgataagatcggcatgagcaaatatctgctctattttgtggtgatcatgtcggccctgatggcgccattctttatttatgtttaccagccgctgttaatgtctaataccctgctggggattattatcggcgcgctctatttaagctttgcctggtacgcgggcgtggcggcgtgtgaatcctattccgaccgctttagccgtttgaatggcatggagttcgggcagatccgtatgtggggatcgctcggctgggcggtggcgtcatctttctccggcctgctgttcaacctctcaccggcgtataactttattctcggcagcgtggcgtcggtggtgatgctgattgtcctgctgagcctgaaagtgaacactaactccgctcacgcaggcgaggtgctgacgaaagagaaaatagccccgtctgacgtttacgccctgctgtgtactgaccccaaaaagttggacagttaa

SEQ ID NO: 140365 - DNA, 1032 bp, Enterobacter cloacae
atgactaaaatcgcaatcgggcgcgatctggtggacttagcgccaatcttccaggccctgccggaacgtaactaccttatgaatgccctcgatcttttcgacggggtaggcgtccagaatccgaaagtggtggtaacacagcttctggatgataactacagcctgtttaacaccccgcagagccgttattcatcaaaccacgacactaccgcgcgtcagaacggtaaagagtatcttattgaaattccttggtttgcaagggaggacacctttaaacctgttgatgtgcaaggaaaaagggtacaaggcactgattacgaacaaaccgttaccgacctgtacaccgagtacactgggaaacataaaattgcttaccttcgtacccgtgaatcttacctggcccgctgcctcttcaaaggtgaagtttatactcctgcaacagatgacctactgatctcttatgctgaactgttcggcgtagtgccaatgacagccagcgtgagcgcagcggcagcggcacaggattttgatgccatcttagacaaagttcaggctgccgcaggtggattggctggtcagattgaacgagtgatcgtattcgctaagcctgctgcatttagccagattcgcttctctgacagtatgtctaaggcattcacctacgtagcgccatacgatgaacgtaacctgttctaccagcgtcacgagcttctacctggtgtttcaacctttagcttgcctggtgcgcctatcgacattgttaaagtgacagatccgctgatccttgcacagatgccggatgatgccgacatggtggcggttcctgtgtttagcaaaggcacgaatgcctaccagacgatctacggggctgcctccggcaacttcgcactgatcgatgctgcacctgctgaatactattcttggggctacctgagcgagcgcggcgatgcgtaccacgttatgcacgaaaacagcgcgttatgtgtgaaccatgcgttaggtatgcaggtgaaaatcaccatcactgcttaa

SEQ ID NO: 140366 - DNA, 153 bp, Enterobacter cloacae
atgccgcctatgggaaacggcattctcagggagtgcgtattgtcatacgagggtgaagtgattcgaatacttaccctatacttacatagtaacataaaagttatgcacatgtcaagtatttatgcactatcagtgaatatttattcactctga

SEQ ID NO: 140367 - DNA, 357 bp, Enterobacter cloacae
atgaataataaaactatggacaccgtgaacaacgtgaacaccctaattaactccttccacgacaactggcatttaccaaccttgcagcttgttaataaggcgtggtgtgagagaacgccttccgcgcttctggaagctgtgcaatacactgaacaggcaatcactgcccttgaacatttgcaaacgtctgtagctcgtttggtgcagcgtgactgtagtacgatcacaccagaagaagcctggcgtgtagctaatgactttgaggagctggcttgctctctgcaatacatcaccgctgaactgggagagcttagcctcgacattgccaaggtttatggcatgattcagagtgaataa

SEQ ID NO: 140368 - DNA, 384 bp, Enterobacter cloacae
atgggacgaaaagaacgaaatccaattaaacggatagaacaagcaacacgcgccagcaaacgtaaatacacctattctctacaagacctcgcaagagagtctattccaggagaatggatcaccgaaataatagaacaccctgcaacggtgcctgtaggggcagagtttgaactattgcaggatgttttagcatcttcggataatgtcttctataaaccacgccgccgccgtgaataccgtgttgattcatcgaatctcaagaagtggcagctatacgcagaaaactatattgactgggtggggtattcccaaactaacggcttatccaatcacatacaagattttgacattctctttgacgacaaggaaaacaacaatgaataa

SEQ ID NO: 140369 - DNA, 279 bp, Enterobacter cloacae
atgatccaatacttagtgaaatacggcgttgaccgtattcagattaatgacgctggaaagcgtgtgttagaaaccctgcattacttctataaatccaaaccgacaaagatcagctacggtgacattatcgaacgttctggatgttcgcaaggtggtgtgatgttctggcttcacgctttaaaatcattcggtgttatcgattttaaagaagctggctatttcgacgtaacagttaaatctatgatctcggattatgagatcatttattcaaataactga

SEQ ID NO: 140370 - DNA, 825 bp, Enterobacter cloacae
atgaccaaaattaagtacatcaacaccgatgtattcaaatacgtaccgattgaagacgcatttaacgaatgtaccaggatcaccaatcttaaaacaggtgttacagaatccctatctcctgctgataagcagttttacgtcagaatgcgccatcgttatcatcgctttgcgatagagttgggcggtacttattacgatgacattgatcagcttggtgcaagtattggtgttagttcggcaacagcaacacgcattgttgcaaagttgaagaaaatcggactgatcgccagtaataagccaaagcgctcaaaccaatggactataacgccactcacgccggaaaacttcacctttgaacgtgatcgtaatgcgatggaacgagattccacgccggaatgggtagattgtctaaaacatccagtttttggcaaagtgaaagaagacgtagcaccagaagtgcagttggaggaacaacgcgacgatccgatgtgtgaccttgacgaagcaccggaagaggaagcgccagcgccggaaaaagtgaagccaacacccacgccaaagcccacgaagaaaccagcggcaaggaaagcgccagctaaacagcaaaacgtttccccgttcgagtttaaaacgccacgagacgaacgttttgatgggatagcctttgaaaggttaaacgacgcatctgatcgcttcttagttttccaggattacgatctgccatacctcgtgttattcgaaagtcaggggaaactaaccaacccagccgcaataaatcatttgaaaatgaagaggaatctcttcgaaacaacagggcgcttgtag

SEQ ID NO: 140371 - DNA, 174 bp, Enterobacter cloacae
atgagcgacattataaacgcaaccccaaaggggaaggcattcactactctgaaaattgatgattcaacgtttcaagccctttttaaggcagcgagagcgcagagaattaccgtaagagaatacattctttctattcttgatcaacacgcggagaaattaacagagggcaagtga

SEQ ID NO: 140372 - DNA, 618 bp, Enterobacter cloacae
atggcaatcagtaagggtgcaaagcgtacagacggacttgagagcgccgatcaggtgaagatggtagtggaggaaatcgcgaagaagagccagacagtggcggatctcttccttataggagtagagacacagcttcgcggcgtggatatgcgttcctggcgctgggacgaactggatatcggtagcaaggtattgcgtatcacccaggacaagaccaaagaagcggtagaagtggaattgacggagacagcaagggaggttctcaaggctcgtcataacgagcgcggggataacgtgtatgtattccagaatgacagcaaccggagcaagggtaagccgatcagccgttctaaaatccatgcagagattcagtatgcagtggataagctcaaaatgcagcgcttgattccacaggaagcagtgatcagtatgcacagcgcacgtaagaccgtggcaacaattgcccacaataacaatgaggatttagaggtgattagtaaaatgttggggcatcgctccacagaacacacacgcgcctacctggggatcactcaggccaaagtggacgcactacgaacgaagtattcaacaggcattaagagagggacacgcgcatga

SEQ ID NO: 140373 - DNA, 198 bp, Enterobacter cloacae
atgaaacgcttgattgtgctgacgctggcgctattgcctgccctggcgaatgccggacatataaccctgatattgaatgatgaagaggagacagataacgcgaagatttgcgtatatcgcaacaccaactttacagagacagtgacgatcagaccatcgcagcaatgccgctacacaatgacctttaaagaggagtaa

SEQ ID NO: 140374 - DNA, 261 bp, Enterobacter cloacae
atgagcatttactttactgaacatggcagcgctattgaataccaagttgaaggacgttggacagtcaagggagactatttgcaggtcaatcatggccccaatattccgggcggcttgtacaaaatcaacgacgataaagtgaaattcccattcgactacagagaggttgaggcagtgatcgatactgaaaaactcacctttaccgtgaatggtcaagagtactcaatgaggaaaaaacaaactaacgcttgggatgtatag

SEQ ID NO: 140375 - DNA, 327 bp, Enterobacter cloacae
atgactaaagaacagtttaaagcggctgcacagtatgatgattggaaaggaagcgtcgcagcagatgagcttgagaagaaaaatttcagcgacttcttaagagcgaaaggaatactcaaacaaggtgaagtcgtcaaaggcatctccgtttattcgggtgtaaatcgctttgatgtggaagcgtacatcgctgatgataaaaacgcattacggaaagaagatattcagataacccttggggagtttttcaagactttcaaacggttctctatcaatatttctcgtaaaggggaattggacgatcaagaaatcgagttcaaagagtaa

SEQ ID NO: 140376 - DNA, 1119 bp, Enterobacter cloacae
atgaagttcttcaacaaagcagtaatcgctgtcattggtactctgtttgccagtatcgttgataatgctaatgctgcgtctgctgttatgtatgatcaaaataaccctgcttcaggttttcaccttaatggtacagataaccgtgtatatgatttagatgttgttgagagtgataataatcgccaggctatccagatttacaacctgcaaggcgatcgcgaaaaactgcaatcctcaattgattccactaatactaacgtagcgggtaatacgtcattactgaaccagacgattactaatgtgaataacatcaatgcagatctgcaagctaacaaaactttgttaagcaccggcattactaccgctcaaatcagcgctaatgatgctgatagcaccgctcatactgcgttagctgctgctggaaatgctcaaatcaccgcagacaacaatgcaaaaaatattgctgtcgtggcagatcaaacacgtatcaatagcgggttaattagtattaacgatacccgtatcactgcacttgagaatgcaccagtgccgaaagatggtattgatggtaaagaaggtgcaaaaggtgatgcaggtgctcaagggattcagggtgtagcaggtgctatcggggctgaaggtaaacccggagctaaaggcaatgatggtaaagatggtgctgatggtaaagacggtaaaaacggcgtaacaacaatcatcacgaagaaagaagttgatacagctactatcaacaaaattaaattactcaatactcaaacagcggcacaagctgctgacctgaaagccactcaacatgtttttgcccaagcacaatcttcaagcaatgctcaattcaaaagcctgcaaaatgaagttgacgagaacaagaaagaagcgcgaagcggcgttgcctctgctatcgctctcgcttccatgccacaagtagagaaagagcaatctgtaatgttctccgccggtgtggggtcatttaagaatgagcaagctatcagcgcaggagcatctttccatgcaggtgaacacgctgtaatcaaggctggtataagtgattctacaaacagcgatcttgctatgggtgcaggcatcggtattggcttttaa

SEQ ID NO: 140377 - DNA, 504 bp, Enterobacter cloacae
atgaaaagttatttgattttcctgaccctcggcctgttggctaacgcttatgcggaggatattcagatagaaatgaccggcaacatttacgccaatacctgcacggtggatagcgccagccagaacctgacggttaatctgggtcaggccgtcgcgggtaattttaaggatgtaggggataccggcaagtggatagcgtttgatttaacgctctcaaaatgtccctcaacgacgaccctggcgacggcgacatttctcggccaggccgacggcgcgcacccgagcaaattcgctaatatcggtacggccggtgggctggcgctggagctggccgatcgtccggataagatgctcatcgccccgcaggcaagcttcagcgttctggtgaatcaggacgatcataccgccgatttcccgctttctgcccgctattacgccaccgccctgcccgttaccgccggcacgttcagcagcgttgttcaggtcacgtttatttaccagtag

SEQ ID NO: 140378 - DNA, 438 bp, Enterobacter cloacae
atgaaatttacacttacccttatcgactggcaggcaagagcgccaggactcagcgatgccgacgaatggcaggcatggtcacgccggtctgacgccatcgatcccgctgcaccgctggcgaaactgaccgatctgccgatgatgaccgcccgccgcctgaattcaggcagcaggctggccgtcgatcttggcctgatgatgctgcgcaaacaccgcatcgatgccgtcgtctacagcagccgtcatggggagctggagcgcaatttccgtattctccaggccctggcggcagaacagcccgttcccccaccgattttgccatgtcggtacacaactcggcggtcggcaatctcactatcgccgcgcgtcagcctgttgtctcttcgtcggtttccgccggtatggataccttccagcagagcttgtgcgacgtgctga

SEQ ID NO: 140379 - DNA, 207 bp, Enterobacter cloacae
gtggataaggctgtcatcctgccggaaaaaaaacagtaccaggagattggcgaggatttacgggcgcagattatccaagggcattatcccgtgggatcgcgtctgccgccggagcgcaacattgccgagacgtatggcgtgagccgcactatcgtgcgcgaggcgctgctgatgcttgagctacaggggacggtggatattcgctag

SEQ ID NO: 140380 - DNA, 186 bp, Enterobacter cloacae
atggcatttcaggaaaaactgatcgacgctctgggcagttttgccaccaccttcaacagctatcgctatatccaggcgattaagtctgcgtttattaccttaatgccggtcatcattgtgggggcgttctcggtactgatctccaatatggtgctggatccgaaaaacggcctggcgagcttttag

SEQ ID NO: 140381 - DNA, 1038 bp, Enterobacter cloacae
atggcaacaatgctggatgtctcactgcgtgcgggcgtgtcgaaggccaccgtttcgcgcgtgctgaacggcacaggtcaggttaaagagagcacgcgtcagcaggtatttcgcgcgatggaggagctgggctatcgtccgaactttctcgcgcgttcgctggctaaccagaccagcaacagcattggtctggtcgtctcgacgttcgacggtttttactttggtcgtttgctacagcaggcgtcacggcagaccgaaaagcacggaaaacagctgattgttaccgacggtcacgacgcccctgagcaggaagaacaggcggtccagatgctcgccgatcgcaagtgcgacgccatcgtgctgtatacgcgttacatgagcgaaaagacgatcctgaagctgatcaacagcgtgcagacgccgctggtgatcattaaccgtgaagtgagccaggcggcggatcgctgcgtcttctttgaacagcaggacgcagccttcaaagcggtggattacctgataagccagggccaccgggagatcgcctgtatcaccgtcccgatccacacgccaacgggtaaagcgcgactgatgggctaccgtaaggcgctggagaagcacggtattcgtctcgacgagcggcggattaaatacggcgatgcaggcatgacgcggggttacgagctgtgcaaggagctgattgcggaaaagacatcgttcagcgccctgtttgcctgtaacgatgatatggccctgggcgcctccaaagcattacaccaggccgggctgaagatcccgcaggatatttcgctgtttggttttgacgatgcccccagcgcaaagtggctggagcctgccctgtcgtcggtgtatctgccgatcgacaacatgatcgtcacggcgatcgaccaggcgatccggctggcaaaaaaccagccggttgaagcgatcccgccgttcaccggcacgctggtgttacgcgattcggtgacgacggggccctggtttaatcagaccagctctaacgccagcagctcctga

SEQ ID NO: 140382 - DNA, 1311 bp, Enterobacter cloacae
atgctttataacactggcactattgccatcagcggaaacacccttacaggtaccggcacaaacttcactgcagctggctcacttattcgtaacggctgcactgttatcgcgctgaccagcccagcgcaggttttccagattaccgcgattggaagcgcaacctctctcaccgttacgccagctgctaaccctgctatccctgctggaaccaaatattccattttgctgagcgacagcctgagcgttgacggtctggcgcaggatatcgctgaaaccttcacgatgtaccagcgctacatgagcgggttcgctgatgtgatgaacggtactacagacgtcactatcacgattaacggtgtggccgttaccgtaccgggccagaaatcactggcgaagaaaggggctaacagcgatataaccagcctaagcggcctgactaccgcgctcagtatcagccagggcggtacaggtgcaaagaatgctgctgacgctcgcacaaacctcggtttgggaacatctgcaacaaaaaacacaggaacaatgagcgacaatgtcatgcagcccggcatgtttgggcttggtcgtccggatggggcattaatattcaacacaacgagccaggatgatcttcttgttggattgacaggatatgggcttacagttcttcgaaatgatgcccaaatacctgagccatggaatatatggaactattctccgacaatatttgcccgtaccggtgatacttatagtcttttctcaatgccttttgaatcatctggcaaagttcgtattttggggggttctgccagcacaggctggacgcacagcaggatcttgtatgatgataaaaatacggttgtagatagcaatggctttataaaacaggcatccccggtcgtcaaagtcttctctaatggtaaatatgaaactaacgacgaatcagaaggcgtcacggtcactcgtctggatatcggacaataccttattgaaggctgtaaagcactcaattcagacgctgcctggggcggtatcgacggaggatttgaaatccccacagacaggaataagcaaccgctcatatggctggactacgaggttaacgcagacggctctgtgctggtaaaaacctaccaccgaactcaccctgatgcgccagcatttgccaggaatgagcgtgatggattggcagatggtgagccggttgacatcccggctcatcagttcgtcagcgttcgtgtagaaatgccagctgacagcatctggaatcagaaacaaacggaagaggctttaaagcaggaacagggctcgtaa

SEQ ID NO: 140383 - DNA, 774 bp, Enterobacter cloacae
atgacatcattaaatttagcagttcaagagcgaaatgtcgatccccagccgctgccggttattgaatggaagggtttgcgtgttgttacgactgaaacgctggccgcagggtatggttctgatgaggctaacatccggaaaaacctgtcacgcaacgctagtcgattcatggatggcatccacattttcactattaaaggtcaagagttgaaggatttgcgagtgactaatagtcacgcacaaatttcgagcaaagcccgttccgttattctttggaccgagaagggcgctgcccgtatgtctaagattgtcgacactgacgaggcttggtctttcttcgaacgtcttgaggactcgtattttcgtcctgccgcctctgctggcattccacttacctatgaagcagcactggaagatctgctgtcaaaggtaaaggaaaaccgcatcatcacagagcagcgtgaccgagcagtaaaagagaagctttggatcgcagataagcgtgaagccacggcgatggcgacagcctcagccgagaagcgtaaggctaatgcgttggcggagaaattgggtgagtgcaagaagcatgcgacgatcaaggccgttcagcgcgtcactggtaagtcattcagtcactggccgatgaagaaatggtgtgccgctaatggcatgaagcccagagatgtaccggatgaaacctacgggagcgttaaatcatggcctgccgaggcatggaaggccgtcaacagcattgaacttagaaaactgttttaa

SEQ ID NO: 140384 - DNA, 318 bp, Enterobacter cloacae
atgggatttgcatcacctgcgaatgattacgtcgagcgacggctatcccctgaggtgatctgtaatatgggggcagagagtagggtgcttgaaactgatgttggctttgccatcattgagcctgccacgaaaaaaacgccgggcgatatattgctgattctttgcgacggtcatacgcagttcgccaaactgatgggtaaggtgttaatcacggacgatggcgaggcgatagagggcccggcactggaagaggttgaggtaatggggcgggtgacgttcttcatcaacagcgtgatgcaggatgacagggtggtgtga

SEQ ID NO: 140385 - DNA, 222 bp, Enterobacter cloacae
atgcgtgtccaggacaagcgcacgcactacgaaatttgtgacctgttccagtgggccaaccgggacgagttctggaaagacaacatcctgagcccttcgagtctgcgcaaacagtgggatcagctcactaccaagcggctgcgtgcaaccggaacggcaaaaccttcccggggcagcatcgacctgcataacaccgactggattgacggggtgctggaatga

SEQ ID NO: 140386 - DNA, 210 bp, Enterobacter cloacae
atgaaaaaccttgccgagagcatttgcgattttgaccgggaacaggcacgccgtgtggcacacaacatgcctgagcagtacaccgaacgcgaacaaatgcagcaagtggcgcagattatcaacgggctgttcgtacagctggcggccgcgtttccggcaagcctggttaatcgcagccaggaagacgtgaacgagatccgccggcaatag

SEQ ID NO: 140387 - DNA, 570 bp, Enterobacter cloacae
atgaaaaaacaaaaggttgaatatggtttagaacttgatccaaatgcagattataagatggcgtggcttcatgaaagaaataaaaaagatttcgagtcattaacaaaatggttatatcttggagctgatattaaagacagcggatttgctaaggtaggtttgaccatggatgacctttcaagtcgatcatatagttctgccaatcctaactattatttgttttgtgcttttaaatgtcgagatgatcttacgaaaaccgaggttgaaaagattgaacgaagcacactggaatatctagaacgcgtatttgctaatgaagatggtacttcaaaccgagcgagtcacgcggaatctggtcgtttgtctgaatgtttttataacattaactttacaaacttcttcattagctatcatgattatctttttgaacaatttagcaataaatttatagtctgcgggtttgagaacgagtttggagatgatgagggcgagtttcttgattgtgagtttaatccaaagttcacgctgcaagaaaaaaataaattcatcaggatgatacttcgtaggtaa

SEQ ID NO: 140388 - DNA, 225 bp, Enterobacter cloacae
gtggataatctcatccttcagaaaaccattattatctttattctcatcctgtgggtaatcgatgaattcagggccaggaaaagaaaatattctgaccccgctattgaagcagctgatgccagagaacgccatgaatggcgctatctcagatgggggttccggactatacaagtggcagcgacagtgtatatcttcgttcagctgattcaggtattactgagataa

SEQ ID NO: 140389 - DNA, 1023 bp, Enterobacter cloacae
atgttagacttagaatatgctgtaactgagccttttttaaattaccatttatttcatgaaggattaaatacgaaggttaaggttttaacctcatcacttaatcatgtgattgaatatttattgacgccaggcaatgaaaataaaatgaatgagctcattaagaaaactgataaatcttggcaattcccgccgaatttttcacttccaaaccctccagtcgatgaatcaagtttaaaaagtaaaatatcatcaaaaagaccagataaggtagatgataataatgaattggattatcaattaaagaaaaaagaattagcgcaagagatgctgtattggtatgtaagtgaaatggctatatttggcagtttttctgctttggatgattgtattgtcgatattgattcttggttttcaagttgggcgatgtttaataacactcaagataaaaaatcggaatcaaccagtagtaacaaaattgaaaggttatatgactcacacgaatgggacatgaaaaacataaagacattccttccgatttatgagtatttttcagcagttagaaattcaatagctcataggcaatccaaagcatctcataagctatcagagatatcaaaatcccaagaattaaaagagtcagtagagagaaacttcccaaaaggtaaaccattaagtgaatttgaatataatgaagatatattcatctctccaaaaacgtcgttgctttgttctcacataataagattaattttcgaagacatcaataaatacatcataaaaaaaatgggtattgaaggtatcatctacatgtcatgcaaacttgcatttgaaccatcatcttataatgaaaataaagttgttaacttagctaaaaatagattaaacgaaatcgttagtggtcgatatcatgttattataaaaggtgaagatgaagccgttaaggttgctgagtcacttggtatttggcgtgattgcgctaaatttcatgcgaacaatatgaggaaattagatcctaaattctaa

SEQ ID NO: 140390 - DNA, 219 bp, Enterobacter cloacae
atgaaattacgcatcacaagagcaatcggcctcagcaagttctcgccacgttgggttaaggttatctatttacggttgactaaaaacgatattgagcgctccctcaacgcgcttctggccacaattgatgaatctgagctctcttcggagcgagtcaaagcattaagggaatgcgttgagataattaacatcgcaaggggaaagagaatgaaagcgtga

SEQ ID NO: 140391 - DNA, 225 bp, Enterobacter cloacae
atgaaaatcgagttatccattgatcgcatgaagaaacttcctgatagggctatacctgcatttgagtcaaaactgctcgaaagactcagtaagcagttcgatgattaccagcttacgattaagcgtgccggcaatgatgggttggctgttttcggtggcgacaagaaagaggttgaacacaacgtgcagaagaactggaaaagcgcggacgagtggttttattaa

SEQ ID NO: 140392 - DNA, 192 bp, Enterobacter cloacae
atggaaaagggtatctactggctacagcacaacggcagaattcaggtagcctactacaccgatggtgtaaccgatgaccttgaaacgggccagttgataactggtgtctggcatctgacgcagagagaggacatttgccacaacggagaggcagaggtgattgaaggccttctgcctgtaccatttaaatga

SEQ ID NO: 140393 - DNA, 261 bp, Enterobacter cloacae
atgtatagctacgatgacgtagagagaatcaaaaccaatctcgaatggattgtacatcaatcatctgctgctactcagttgccaaacaggcacgaccaaaaagccatatacaaaatccttgaactcatccaaacctacgaattacttcttgatttaataaaggattttggcgtatcagtaatagatgccgaactcgcagaaggcctctccattacagagacattcatagccaaagtgaaacggagtgatagtgcgatgtga

SEQ ID NO: 140394 - DNA, 687 bp, Enterobacter cloacae
atgaaggatgtaagcatcagtgagcgtgaaagtacgtacacgttccccggaagtctctggcagatatttccgtcaggccagcgtagtggggtggggctgctaatcagcaacagcactgacttcacctcaataaccaatgccacgcattcagggcagtgtatctggaaggggaccgtcaatgtccccacaggcggctgggcagttcccacgatagcggggtacgacaagtccaaatatattgtctttgggcgctgcaatagcggtaacaccgtcgatttcgatggcaacacggtcaggttcttcagccctccatccaccaacgatgacgctccgacgaccggcacgatagatattgtcatcttcgccagtggtgtggcgccgcagccgggcaccgggctaaacatcttcaatgcagccggggcttgcacgttttcgacgacaaggcggcctttcgtttacctcaatcaactctggacgccttcgaaaaataccgtgagcatcggcagcggctatgttccgctgggcagattcgggctggtggctcacgaagtaaatggcatgtacgtgtatcgaatgttcggaataaaaatacagaacggcagtgcttcagttcagggtgggaaatatctggggcgcgagcggtatgcaatttttggtaatgacacggtatccgcgctacagttctga

SEQ ID NO: 140395 - DNA, 1467 bp, Enterobacter cloacae
atgaactattacggtgatttacgcagttatatcgatgccctcgacgctatgggcgacatcatgcacgtgacccgcgaagtggacggtgattttgagccaagcgccattacccgtcgcagctatgagatccagtcccctgccccgctgttccataaggtggctggcgtggctcccggtttccgcctgttcggtgccccggccagcctctcctcccgcaaggagataccctatgcccgcgtggcgatgtcgctcggcctggctccagaatcaaccgggccgcagatcgtcgaagcgctgtcggcggcccgccataagcccggcattcccccggtacgggtggcctctgcggacgccctgtgtcatcagaatatcctgcgtggcgaggcggccagcctcgatcgcttcccgctcccctttgcccacgacaaggacggcggtcgctacgccaacacctggggcacgctgattgttaaaacgccggacggcaaatgggtgaactggtctatcgcccgcgtaatgaaggttgacggcaagcggatggtgggactgatcgtcccgagccagcatatcggccagatctggaccgagtgggtgaagctcggccagccgatgccttacgcgctggtgcagggcccggctccggcgatctcctgcgtgtccggcattccgatcccggcccacgccgacgaggcggattacattggcaccctggcgggcgagccggtgccggtggtgaaagcggtcagcatcgatctggacgtgccagccacggcagagatcgtgattgagggtcatgtctccatcacccgcgattgccaggaagggccctacggtgagtatggcggctatctcggcgagggctcgtctgcccaaccaaccttccacgtcgagaccattacccaccgggacgatccgatctggccgatgtcgatcaccggccgcccgaccgacgagtcgcatacgctctgggcgatgggactggccgccgatgccctgacgtatctgcgtgaagcggaactgccgatcgtcacggcctggatcccggaagattccaccgtccactggctgctggtggtggtgccgcagaactggcgcgagctgctgccgggcgtcagcagcgaagctctggcgcaacacatcggcgaggtgctgtttaagaccgacgcgatggtatttattccgaaggtctacgtggtagacgatgattttgatcccaccaacctgcgcgaagtggtgtgggtgctctcaacccgcgtacatccggttggccgccgcgtggtgtttaacgatcagcgcgtgatccgcctgccgcagtgttatgaagaagaagagtatgtggcaggtaagggggcaaaagtggtgtttgatacgctgcagtccacccgccatctgcatgcctcgtttgagcaggggtatccggaagaggtacgccagcgcgtactggagaactggccgtcggagctataa

SEQ ID NO: 140396 - DNA, 576 bp, Enterobacter cloacae
atgaagcttgttgtaggcatgactggcgctacaggcgctgcaattggcgttcgtttactggccgcgctgaaagatctggacgtcgaaacgcatctgatcatctccaaatgggcgcgcgccaccattcaactggaaacgccctacagtgtacaggaggttgtcgccctcgcctcgaagacttatagcgagcacgaccaggcggccgccatctccagcggctcattccgcgtcgacggcatgatcgtcgtgccgtgcagcatgaagacccttgccgcaatccgctgcggctacggcgatggcctgattgcccgcgccgccgacgtgaccctgaaagagcagcgcaagctggtgctggtgccacgggaatcgccgctcaacgccatccacctggagaacatgctcgccctgacccgcgccggggcgatgatcctgccgccgatgcctgccttctataacaaccccaccagcacggacgacatcatcaaccactttgtatcgcgcattcttgatcagtttggcctggataacgctttaacgaaacgctggggtgaacctcactccgctcccacggcttaa

SEQ ID NO: 140397 - DNA, 477 bp, Enterobacter cloacae
atggcagaaaatcgcgacttagtccttgccgcgcccctgtggccgcacggcgatagttcattaatgcatctgatgcgccgcgcagggcagcactccactatctgctggagccagtgcgtcgataccgggttatctgccgtgcagtacgccatactggtagtgctggcggaagaaaccacctgcgaccagcaaacgctggggaaccgcgccgggtttgataaagccaccggcacctatgtgatcgatcggatgaccaaaagtgggctactgaaggtgcagaccgatcccgccaaccgccgccgcaagctggtctccatgaccgcagagggcgaggcgatgctggcacagatgattgagcaggccaaaagggccgaaaagatgatcaccgccggtctgaatacccaggatatcgccgacctgaagcgtctgctgagcaagctggggggattgcaggagcctgatgagcaaagtgcctga

SEQ ID NO: 140398 - DNA, 1017 bp, Enterobacter cloacae
atgagcaaagtgcctgacagccacagtgagccgaagcccgatctgacgatcggctttctgctgatgaaacactttacgctggcctcggtggcggggctggtggagtccctgcgctttgcggcggatgagtccttctccagtcggcagatcttttgtcgctgggagtggatgacctgtaatgaccagccgattaccgccagctgtggcctgccggtgtcgcctagtgcaaagctcgatttctcaaaagagtgggattacttcgtggtggcgggcgggctgctggaggagacccgccagtcgccggaatggctgctgcaggccctgcgggatctgcacgcccgcaatattccgatcattactctctgcagcggggcctttgtcgccggtaacgccgggctgctggacggtcgccactgcgcgatccacttcaccacccgggatgagttccggctgcgcttcccgaaagccattccggtgatcgataaaacctacattaaggacggcgggattatctcctgtccgggcggcacggcgattgacctggcggcggatctgatccgccagcactgcggactggtgcgctcgcaaaaggtgctgaaatatctgttggtggatgaggtgtccacgccgaaagcgaagcacaaaacgccgctcggtgaacctgacgtctacgagaacccgctggtcacgaaggtgattgagtttatgaagcaccatctcgattcgccggtaccgctggcagaggtggcggagtttgccggagtgaccttccgccagctcaatctgatcttcacccagtgtaccggtcattcggcggcggtgtactggcggcggatgcgtcttgagcaggcgcgcaagctgatggccgactccagcaacagcattaacgccatcgccacggccaccggttttgcggatgcctcgcacctgatcgcctggttccgtaagcagtacggtgaaacccccagttcgttcagaaagcggcgcagggaagtggaaaaactggtgaaagagtaa

SEQ ID NO: 140399 - DNA, 1377 bp, Enterobacter cloacae
atgtcaaataccgtttctgttgaagacgtccccctcaatcgctttcaccgtctgctgaccgttcgctccggtggcggctccttcgtcgatggttatgtgctgagcattatcggcatagccatgatgaaggtctcccccgccctgggactgaccgccttctgggagggcctgattgccgcttcggcgctgatcggcatcttctttggcggctttatcggcggtgccctcaccgaccggctgggcagacggatgctctatttcgtcggcccgacgctgtttgtggtctgctccgtggcgcaatactgggtacaaagcggcgagatgctgtttgccctgcgctttttaaacggcgtggcggtgggcattgagtacccggtggcgaccgccttcctggtggagtttctgccgaagaaaaaccgcgggccgtgcctggccaccctcaccatcctgtggtttgccggtgccgccgcagcctatatgctcggcgaagcgctgctgcactttggcggcccggacgcctggcgtctgactctggcgagcactgcggtcattggtgcgctgctgtttctggtgcgtctgggcaccccggaatccccgcgctggctgatcagcaaaggccgtcatgccgaagccgaagcgatcattcgcaaggtgtatggccctgactttggcctggacaaactgccggagcaggcggaaagcaaaaacctctccttcttcaacctgctgcactcaggttacggtaaacgcatggcgttcgtgaccatcttctggacctgctcggtgatcccggtgttcgcggtgtatgcctttgcgccgaaagtgctggacgccctgcacctgagcggcaaatgggcctcctacggttccgtcgccattaccctgctgttcgtggtcggctgcattattgccacccgactggtgaacacccttggacgccgcaaactgctgctgcaaagcttcctctggtcggggctggcgctgctgctgctgggcttgctgcgcgatggcccgtcaatgatcattctgctgatgtttggtgcctacgcgctgtttatcggtggggcgcaggtgctgcagctggtctacccgaacgagatcttcccaacggagatccgtgccggtgcggtgggcgtggggacctcgctgtcgcgcattggtgccgcggtcgggacctggctggtgcccgcctcgctgcagagtctggggatcggcaccaccatgtacatcgccgcagcgatcacttttgtgggcctggccgtttcctggtggctggcaccggaaaccaacgcccgcagccttgccgacgcggcctcgctggatgacaccccgtcgcagaaagcgaatatgccgatggcgaagcgtcatatgctgtaa

SEQ ID NO: 140400 - DNA, 912 bp, Enterobacter cloacae
atgccccataagaaagcgacactcattggcctgatcgccatcctgctctggagcgcgattgtcggcctgatcaaaagcgtgagcgaaggctttggcccggtgggcggggcggcgttgatctattcctgtagcgcggtgctgctgctgtttaccatcggctttccgaagatccaaaagttcccgctgagctatctcatcatcggcagcgtgctgttcgtttgctatgagctgtgcctgtcgctgtcgctgggctttacccataccggtcgtcaggcgattgaagtggggatggtgaattatctctggccgagcatgaccattttactggcggtgatcgttaaccggcagaaaaccagtccgttaattattcccggggtgattttagccatcgtcggaataggccgggtattaggcggcgatggtggattttcgctgacggagatgatgaacaacgttatggataatccgttaagttacgggctggcattcagcggggcggtgatctgggctatttattgcgtagtcacccagcgtatcgctcagggaaataacggtatcaccttgttctttatcttaacggcgctgacgctgtgggtgaaatatcacacctcgccccagccggaatttactctgtcgtggcacgcatggatcagcctgatgctggcggcaatggcgatgggctttggctatgccgcctggaacgtcgggatcctgcacggcaacgttacggtgctggcggcggcgtcgtactttattcctatcatctcagcggtgctggctgcctttatgctggattcgcacctgaccctggccttctggcagggcacggcgatggtcagcctcggatcgctgatctgctggtggtcgacgcgcacggttgccgtaaaaagattatctgacgaagcgtcttaa

SEQ ID NO: 140401 - DNA, 897 bp, Enterobacter cloacae
gtgttgacatttgaaggtatctacaccccggcaattaccccttacgcagccgatggcagcattgattttgcgcgcttttccgacgtgctggagtcgctgatcgaggcccgcgttcacggcatcatcatcggtggctctaccggcgaatactacgcccagagcccggaagagcgtaaagcgctggtagaacacgcccgccaggtgattggctcccgcctgccgctgattgtcggcaccggcgcaatccgtactgaagatgcggtggactacgccagacatgcccgtgagcataaagccgatgctatcctggtaacctcgccgccgtacgccctgccgaccgagctggaaaacgcccatcacgcgctagccgtggataaagccgcccagctgccgatcatgctctacaactacccgggccgcatgggcatcaccatgggcgagacctacttccgcgaagtgagccgctcgtcgaacgtggtcgccatcaaagagagctccggcgatttcaacaatctgcacctgctggcctgcaagttcccgaacattgcgctctcctgcggctgggacgatcaggctctcgagttcttcgcctggggcgcgcaaagctgggtctgcgccggttccaactttattccgcgtgagcacgtggcgctgtatgaagcctgcgtggtggagaaagactttgccaaaggccgcaagatcatggctgcgatgatgccgctgatgaactacctcgacggcggcaagttcgtgcagtcgatccgttacggctgcgagctgaacggtctgacctccggcacggtgcgtgcgccgctgcaggatctgaatgatgaagagaaagcgcagctgaaagcggtgattgccgatgtgaaacgcaacgtcgctgcggcgctgtaa

SEQ ID NO: 140402 - DNA, 1503 bp, Enterobacter cloacae
atgagtcagctgcataccctggatgacgtaacggccatcgcccgggagctctccctggcgagccaggcctttatcaacgggcgcttcgtggccgcgcgctccggcaagaccctggcgaccaccaacccagccaccggggagacgattggccacatcgccgcctgcgacgtcaccgacgtcaacgcggcggtggcgggggcgcgcagcgcgttcgaggccggaggctggagcaagcgggcaccgggcgaacgtaaagctgtgctgctgaaactggcggcgctgatggcgcaggagatcgaccagctggcggtgctggagagcctcgacagcggcaaaccggtcagcgaatgcctggcggtggacgtgcccgaaaccatccacgtgctcaagtggcacgccgaagccatcgacaaactctacgaccacaccgccccggtcggtaacggtgcgatggcgctggtggtgcgcgagccgattggtgtggtgggctgcgtcctgccgtggaacttcccgctgctgatgctggcctggaaaattggcccggcgctggcggctggctgctcggtcatcgtcaaaccggcggagcagacctcgctcaccgcgctgcgcgtcgcagaactggcctttgaggcaggcatcccggcgggcgtgctgaatatcgtcaccggcaccggcaaagccgtcggagagccgattggcctgcacccggatatcgacatggtgagctttaccggctccaccgctaccggacggcgcttcctgcactatgcggcagagtccaacctcaagaaggtggtgctggagtgcggcggtaaaaacccggctgtcgtctttgacgatgcgggggatctggcggccgtggctggccacgtgctgaacggcgcattctggaatatgggcgagaactgttcagccacctcgcgcctgctggtgcaggaaaatgtcaaagaggcgctgctggccgagatggcaaaacagatcggcgactggccgatgggcaatccgctcgatcccaacaaccgactgggggcgatggtctcgacggagcatttcagcaaggtgagtggctatctcgacaccgcccgccaggaggggctgcggatggtgcagggcggcgatactgagcagggcgtttatgtccagccgaccattatcgacggcgtgacgccggagagcgcgctgttccgggaggagatcttcggcccggtgctgtgcgtcaccacctttaaaaccgaagccgaggccattgcgctggccaacgatacagaatacggtctggccgcgtcggtctacaccagcaggctgaaccgggccattcgcgtctcgcgcgccattcgtgccggtacggtgacggtgaactgcttcggggaaggtgacgccaccacgccgtttggtggctacaagcagtcgggctttggcgggcgcgataaatctgtcttcgccctcgaccagtacactgaactgaagaccctgtggattgatctctctgaagacgacgcctga

SEQ ID NO: 140403 - DNA, 702 bp, Enterobacter cloacae
atgagaacgggaaaggtagcgctgtatgaggatctcaaacgacatattctcaccatggagctggatccggacgagctgctggatgaagccgcgctgaccgcgcagtacggtctctcccgtacgccggtgcgtgaagtattccagcgcctggcgggggaagggtatcttgagattgtggaaaaacgcggcgtacgggtgatcccgatgagccactcgacgctgcgtaatttcttcctggtggcaccgatgatctatgccgccaccggacgccttgcggtgcagcattacaaaccggcgcagcttaaggcgctgaaagagacccagaaacgctttcgtaaggcggtgcaaacccgcgatgccgaagcgctggcgctggagaacaaccgttttcacgagatcatgggcgagatggcggccaacccttatctgcagccgagcctggggcgtttgctgatcgaccactgtcgcatcggacataccttcttccggccgcaaaacgaggacatggagcgccgtttacagctggctgcggatcatcacgatgcctttatcgctgccatcgaggcgcgtgacgaacaggcggtggtcgatctggtgtttgagcactgggaactgtcgcgggaaaacatggagatctttatcgcgccccaggggctgaaagccgataacttcgcccctttcccggagggggataaccgctga

SEQ ID NO: 140404 - DNA, 1320 bp, Enterobacter cloacae
gtgcaaaagatcacttctctacctgctgacgacgccctgccgggttggtatcacaccagtcaaccgcgtaccccgcgtcctgctcacgtcgggcaaaagcatgcccgctgggcgatagtcggagccggattaaccgggctggccgcggcccgccagctggcgctaaacttcccggatgatgaagtggtgctggttgaggcgcaggacgtgggctacggctcctccgggcgcaacgccggtttcgccattgatgtcccgcacgatatcggggcgaaggactatatcggtgatgtcaccaccgcgaatctgatcctcaagctcaacaccctcgggcagaactacctgcgtgatattgtgaaggagcacggcattgaatgtcagatgagcgattccggcaaatatcaggccgcggtgggggaaaaggggatcgccattctcgaggcttaccgcagcgggttggaaaaaattggccgtcacgcggagatgatccccgggaaggatctgccggaccatatcggcacctcatactaccagcaggcgctctacattccgggcaccattctgctccagccctcggcgctggtgaaaggactggcggacagcctgccctctaacgtgaccctgtatgaaaatacgccgatcacgtccatcgactatggcgacaaagtgacgctggtgcatgaccacggcagcatcaccgccgacacgctgatcctggcgaacaacgcctttgctgcgcactttggttttctgcgcggtcgcctgctgccgaccttcctctatggcagcctgacccgtccgttgacctccgaagagcaggcgcagcttggcggtaagccggtgtggggcgttattccggcgcatccgtttggcagcaccgtgcgccgcacggttgataatcgcatcctgatgcgcaacagctttagcttccatcccgacggtcgcccgcgtgaaaaacagctgaagcacaatattgagacccatcgtaaatcgttcgagcgccgcttcccgatgctgaataaggttgatttcgaatactcctggagcggggccatctgcctgtcagacaatcacgaaggcttcttcggccagctggcaccaaacgtctatggcgcgctgtgttgtaacggtctggggatcacccgcggtaccgccaccggcaaactgctggcggatatgatcgccggggagcgcaacgagctgatcgatttcctagtggcctcgccgggcccgaacagaaccccgccggagccgttcctgtcaattggggtgaactcggtgctgaagtggggccagttccgcgccggactggaggtatag

SEQ ID NO: 140405 - DNA, 519 bp, Enterobacter cloacae
atgttgatccgcagggcaaatacctctgatgcagaagagcttgccattttagctgaacgaaccttcagaaagactttccaggatgggaatactcaggaggatatgaaacttcactgccaggcaagctattcaacacatatccagttgaaagagatcctcagacaagactgggttacattagtctgtgaacacgagagcaaattgattgggtatgcccaactgaggtgggaagagtttcctccctgtgtcaatagcattcacgccggggaaatcctgtgtctatatgttgatgctccctatcatggtagaggatttgcgcaagaacttatgcggatgtgctttgctgaatttgaggcaaagggatcggatgttgtctggttaggcgtctgggaacataacccaagggcaatttctttttatcataagcttgggtttaccgaggtgggtgagcatatcttccaggttgggtcagatccgcagagagatatcattatgaaacgttcaactggcgttcgctga

SEQ ID NO: 140406 - DNA, 150 bp, Enterobacter cloacae
atgttcaccggcttgtctgcttttccgctaactcccgtcaccgccagcggcgtcgacgaacaggggttcagtaagattctggcccgcctgaccgcggcccgtgttgattctctgggcattctgggttcaaccggaagctacgcaatctga

SEQ ID NO: 140407 - DNA, 681 bp, Enterobacter cloacae
atggtgtgcgtgggggcagtcagcaccgatgccatcctgcatctggttgatgatgcgcaggcagcaggcgcagatgctctgttgctcccggcggtcagttaccagtcacttcgtgatgaagaggtcttcgcgctttttgaggcggtgacccggcatgcgtctgttccggtctgtgtctacgataatccgggtaccacacattttacctttacggatgaactgcacggtcgtctctcatcactggcgggggttcgttcggttaagatccctggcgtcccggatagcccggcagcggccgctgagcgggtgaatgcgctacgccaacatctttgcccgggagtgacaatcggtatcagtggcgatatgtatgccggactgggattaaatgcaggctgcgaggtctggtactctgtgtgtggcggtctgttcccgcaaaccgcaaagcagatcaccgaggcagcagcagcaggggatcacgctcgtgttatggcattgacaacccgactggaaccgctgtgggcgctgttccgtaaacatggcgggagtattcgtgtgattgccgctgccgctggtgtgcttggactgaccgatacggattgcctgcctcgtcctctgcaaccgctgtcagcgggcgatatcgcggatattgcccgagtgatcaccgcgctggagctgaagtaa

SEQ ID NO: 140408 - DNA, 1212 bp, Enterobacter cloacae
atgacgacccttcagtgtacaaacgcgcctgttaaggcaggtcttgtccgctatgcctgtgccgcgatgctggcacgcattgcggatggcggcggggtgctggcagtgatcttactgtgccagtcatctgaacagtattacacagtgacggggtggatggctgcctgcattaccctcccacatatgctggggccgtttattgcccgcaggatcgataccgccagcgacgggcgcagggtcattgcgatggcctgcctggcgtatgcctttattacagggattatgacagtgactttcggccacgtccctttacttttgacggcattgcttcttatcgccgcaggactctgtggcccactcctgacaggtgggatcagtgctttcctgcctgccatggcagggccggaccagcgaagtcagcgccgggctcagggtcttgatgtggcaacctacggtttcggtggcacgctgggtccctctgctgtagccgccatatccgcctgggcttcgccttctgcggcgttttaccttctggccgttggtactgttttcgctgctttctttatcatgcggctaccggtttcgccggttacacacagcggcaagcctacaaaggttgccggtgccatcacaacgatgagtatgatgatccggtacacaccgctgtgcaggacactgtacctgacgatggccgtcgcctttgctgtcgccgtcctgccggttgttgcggtgagtatggctgatgttcttggtgttccagcagccacagccgcttttcttaccgtggcctacggagcgggcaatctggcgggatcggtatgcctgatggctatcccactgagaggtgaacccgacaggctgatgctgagctccggagggctgattgtcgcaggcctgctttccattctggtggtcagcagttttttacccgtgtttttctgcttcttcataaccggagtgcttaatgccgcttttttcgccgccacgcttgccgcacgcagtgaatactccccaccatcctgccgggggcaggtctttgtctgggtgggtgcaatgaaaattactgcgggctcacttggcaccgcagctgcgggtcagttgatgatgttgggagcttatgcgccactggtgttaagcctgtgcacgctgtcgacagtactggttatttctctgttggcccgtatctggccatcgttcaaatctcattgctga

SEQ ID NO: 140409 - DNA, 315 bp, Enterobacter cloacae
atggcctggttaatgctgacggctgcgggtttgcttgaagtcgtatgggcttatgcgatgaaattgtctgacgggtttacccgcccactgtactcgatagtgactctcgtcggtatgatagcgagttttgccttactctcggcagcaatgcgctcattaccactgggcacggcatataccatctggaccgggataggggcagtaggctcatttgttgcaggcctgtattttctgggggaacctgccacaccgatgcgcatattcgctgcggtggtgattgtagcaggccttattatgatgaaactggcatcctga

SEQ ID NO: 140410 - DNA, 594 bp, Enterobacter cloacae
atgtctactgctcataaaagagaaaagaatcctgaaggagtaagaaaagccatcctggataatgccgcgctactggcaattgaacacggagtgcaggctgtgactattcaggcagttgcagatgcggtttctgtaactaaaggcggtgtagtgcatcacttccctaccaagaaagcgttattagatgctctctttgcagaccttgccgatcactgggaagcagaattaaaccgccatatttcaaaccatgctggtgaagttggtgctcttacaagagcctatgtggaggtatcaattcctgatccgaccgatgtccctgccagggcttactcgtatctggcgttggctgccataggaagtgatgaaacgcggtattacctgtctgagcgaattcataaactactggaaagacatagcgaaacagacaatttcatagagctggcaacgatacgcttcgccgccgaaggcttctggatttcgcaactcactaatatggaatcaagaagccatgacgaagttaaacgacatcttttgaaacttatcgacgtcttcatacaagacagatcaatgagtaaacgaactgaagtgccctaa

SEQ ID NO: 140411 - DNA, 873 bp, Enterobacter cloacae
atgaagtatgaactgccagaattttactccccgcaaattatcgaacttgatggcgtaaaaattaactatgtccgaaagggttcaggaccagcattgctccttcttcacggttttcctggattctggtgggactggcgttatctgatagaacccctttccaactacttcgatgtcattgttcccgatttacgcggctcaggcgactctgaaaagacagatctatccaggatcgaagactatgaaattgggcagcttgcagaagatcaggcccgcttgctggacgctctgaacatagataagtgtcatatcatgtcgcacgactacggctcaatggccgctcacaaatttctacgtaagtatcctgagaaagtgattaaatgtgtgatgcttgatcctgtcatgccagtgtttacagaaggtgctatcaccccttcagactggtatgcacttttcaacgcgcttgatatggctgaaacactgattagtagtactcgtaaaagtacagaggcttattatcgtcatttttttgacagttggggctacaaacaaccagtgctgaacgacgaagagtttgaagttttaatcgataattatatgaaaaccggcaatgttcttggcggcctaaattatgacagggcgaatttaacacaagaggcgacaccatggtcacctcatgattatcagcctactccgatagagacgaaggtactctgggccgcgcaggattcatccataaccattgatacgagcagacatctgcacgagttctactccaattacacgctggaagttatcgaggattgcggccatttcgttatgcttgaacaaccagcggttgtacttgataaggcactgacattcctgcgcaactag

SEQ ID NO: 140412 - DNA, 672 bp, Enterobacter cloacae
atgtgtggacgctttgcacaagcccaaacccgggaggaataccttgcctacattgccgatgaagccgatcgcgacattgcatatgacccggagccgataggacgttacaacgtagcgcccggtaccaaagtgctgttgctgaatgaacgcgacgagcaactgcacctcgatccggtgttctggggctacgcacctggatggtgggacaaatcgccattgattaacgcgcgtgtagaaaccgcagccaccagcagaatgttcaagcctctatggcagcacggtcgggcgatctgttttgcggatgggtggttcgaatggaagaaggaaggtgacaaaaaacagccctacttcattcaccgagccgatggtcagccaatattcttggctgcgataggcagcacaccgttcgagcgcggcgatgaagctgagggctttctaatcgtgacatcagctgctgaaaaaggcctggtcgatattcatgaccgccggccactggttctgtcgccggaggctgcaagggaatggatgcgccaagacttaggcggaaaggcagctgaggaggtaattgccgacggaacagtgcccgccgacaaatttatctggcacgctgtgaggcgcgccgtgggtaacgtaaaaaatcagggaccggagctaatcaaggcggcacaataa

SEQ ID NO: 140413 - DNA, 2433 bp, Enterobacter cloacae
atgccacagtcgaccagcaccgtatacatcgaagtgatcggcggggcagggtacgaagccgggcagccagggcttgctgcaatggccgatattgtgctgcgaactgctgcaggcgatccgaaatcgttgaatgcggtcgcttatcgcactatggattcggctgtgttgactgtagctaccgttaacacgactgacgataattacgacatttacctcaaagccggtgctggctctcagaagctggtcgtcaacctgcaatctgccggtgctgtggtcgaaactctggaagtacttgaggttgtggatacgctgcctgaagacgctgtagaagggactgtctaccatcgcgtcatttctgatcaggatggctccattaccggttcgctggtgggtaatgccagcactgcgaccgtacttcaaaccgctcgccatattggtggtgttagttttgatggctctaccgatatcaatctgcctggtgtaaatattcagggtaatcagaacaccactggtaatgccgccactgcaaccaaactgcaaacgccacggacaattaacagtgtaacgttcgatggctctgccaacattaccatcccgacactggtgtctcgtgggcgcattagcgcactggaggggaatgttcagggcgcaatgcaaggcattcagatgtacgaagcctataacaatggctatccgacaagctacggcaacatcctgcatatgaaaggcgcacaagcaagtggtgagggcgagctgcttgttggctggagtgggtcagatggcgctcatgcgccggtttatattcgttctcgccgtgatacagtgggagcgaactggtctggttgggcgcaggtctacacaactgctcataaacccacagcgaaagatgttggggccgcgcaagcgtttagcgcgtcttacagcacaggggctggcaattggactaccgctgaatttatcgcatggctgaaggagcgtggtgctttcgaagtgccgtactggatgatgaagggttcctggtcatatgccgacaataaaattatcactgatacaggtgtcggtaatatctgtcttgctggtgcggttatcgaggttttaggtaccgaaggcgcaatgaccatccgagttactacgcctacaacgactaccggtggtgggattgcctgtgctcagttcacctatattaatcacggtagcgcgtatgcccctgcctggcgcagagattacaacactgctctcaaacccactgcggctgatgtcggtgcgttaccggtttctggcggaacaatgactggtgtgctgacgctgcaaaatgtgagtcagcccctcaagacgccaggtggaggcattctggcaaatgatggaaatttatacattaataagtcgggatttgcaggctggattgatgcgctatttatgaaaaacagcggcggtacgatgtccggacagcttaagatccgctctacggatgggttacgcatttacgatgcggcatacgggatgatttttcgccgttccgaaaataatttttaccttatcccgacagcaaaagaccagggagaaaatggtgatataggttcgcttcgtccattttatgtagatctcactaatggcagagtaacaatgggcaatggtgctgttgttaacggtggtcttgggctgggtgtggtcaatggtcttggcggtaattccattgttctgggtgacaatgacaccggctttaaacagaacggagatggcattctggatgtttacgccaatagcgcccatgtttttaggttcattagtagcacgctgcaaagccttaagccgttgagtgtaacgggtgacatcacgtcaagtgcgtggatttacgccaaccgtttttccatcaacagcagttctggctcatggatcgatatgcgtaaccagaacgtcatcttcgggaggaacgctgtaagcacaagctctgcacaagcattgttgagacaagaccatgcggaccgcaaattcttcgttggcggcttgggaaacagtcagtttggtttttacatgatcaacaactcacgtaccgcaaacggcacggatgcgaacgcatacctccagaatgatggtacttgggtttgtggaggcaatggcagcttcaatgacgtttatatccgctctgaccgtcgtagcaaacgcaatattcgcaagattgaacgagcgctcgacaagctggatcggatcgaaggtgttctatacgagattcaggtctgtgaccgttatgagcagtctggtggcctcatcgctcaggacgtccggaatgttcagcctgaactggtaacggttgaccataacgatcagtctggagagcctcgtctgcgtctgaactacaacggcgttatcggtatgctggttgaggccgtcaaggagctgcgcaaggaagtgcgtgaactgaaggcgagaatgtaa

SEQ ID NO: 140414 - DNA, 789 bp, Enterobacter cloacae
gtgccaattgtcggtgttcccggttggattgggtcttcggccgtaagtgtgacaggccagagatggatgagcgctgctcgaactgcggtgcaattgtctgctgctggtaacatgtctcagttagcaggtcgctctaaggaaattaattacagcatcggtgcgaataataattacaacaaagacacactgatcaactatttgaaatcccagggttcgacgccagtcgttgttaccattacagggaatctggtgtcgtccagtagcggcgttccatgtttggatttcccaagttcgcttaccaactcttatatcagccttgtaatcaacgcgggtgtaactgtctacggtcgtggcgggaatggtggtgttaaaggtggcggtgctgccggtggcactgcaattaacaatgggattggtactcgtttaagaataaccaataacggtgctattgccggtggcggtggcggtggtggcggtaactcagccgatggtggtatggggggcggcggtcgcccctttggtgttgcaaacaaaacacatccacctgctgccgcgacttcacgcgctgcaactgatggtactttgaccgaagcaggtatcggtgctcaatatgctatcggttctgccgttcaatatacatgtggctctggtggtaacgttggtgcggctggtggtactgcttccggtcggttagggacgatgtatggcggcggtgctgctggtaaagctgtaacgggcaacgccccaacatggactaaagtcggtacaatttatggcgctcgcgtgtaa

SEQ ID NO: 140415 - DNA, 645 bp, Enterobacter cloacae
atggctaaatttttgtctaggcatttaggttggtgtattggcttagcgttggccatattagccgcaattgtgtttggcaaagttatcggcttgctaggaatttcaaaccaaggggttatttctgttgctggttcaataatagggatgatatgtagtggattataccgcaacactttaaattatattaaatccgatgaatacagattaaaaatacaagagtataaagagaaacgtgacgaaagtgtcaagaaagagcgagaggcattaaagaggaagacaatcgtcgaactttatctcttgaatgaaaagaaaaccttcatcaaggttaagcttctctctgtgatgatgatatttttcggcgcagcgctgagctacttattcgtctatagctctatcgttaccatcactggaactgtagcctttgttttactagagctaaaagagagagttttggcttatcgtatagctaaaggctttttcggtaataatagtactgaagctatccagttacttaaatttattgagaccaatatcgacaacatcgatactggtagcagtggtggcaaacgtaagatattgaatgaccctgttttagaagaaatcccaaatgagaatttgggaaagggggctttggatgccagataa

SEQ ID NO: 140416 - DNA, 411 bp, Enterobacter cloacae
atgccagataaagatctgacaagtagatatctcaacagggcaatggatattttgctattaggctatccacttagaactgtttttgggtcacttatcggtgctctactgtgggtggtgcttcatatttttacaccattcttgcttaccaaaggctttgttgttgactggatatataatgctggttgttttgttgttggcgttttgatcatgaataccaaaacaatcattgatgtgttcaatggtgatgcaatcagcgagaagtttggcagttctttgaggcatattgataagcgtctagatttgtcggatgaacaaaaacgatatttgattaacaagttattgagtgatcatatagcgaacctcactgacaaccaagtcaaggaagttgaacagagagttacggataagtaa

SEQ ID NO: 140417 - DNA, 966 bp, Enterobacter cloacae
atggtgccaattgcagggcctcacatacaggcggcagagcaaatgtttaagctgttttcagagataaacgctgaaatgtgccgtgaccgattcaatcgctacataatgggaataggtgaaatctgcgaagatgaggttgatatatccagagaacatttctcagcgttggtcaaaaagctggtacttgatgatgaagataaaaaaactgaatactatatccgcctaacggtcagtctggctcgaagcagtcttagcgacgatgaaaaaatgtttttcatccatacattgagcgagctaacctgcttcgatattgagtatgctcgcaagctctacattacgacaaactcgcacatcaaaggcttcaaatcagcggcagctgcgcaagtagacctcacctcccaaaaaaatggactaaatctacgatcgctcaacaaactcatcgcttcaggtctcatttatgaggttatcaacactcatccagaaaagaatcggatattcaactttactgaagagttaaagtcccttttagggcatctcttccatagtaatgattttttacctagtgttttgggcattgattccaaacaacgctatgatgttattatcatcgaaggtaatgaattttttgatgaattttgccgaacttccattcggcaaaaattagaagctggtggtctcagagttcgaatcgtgaaaaacgagggagctatgtcagacattattgcgccattctacattagtactcgtacgggtgaagggatggatggcgaaccatatagcactatcgaggtattttcgcatatcgactcaaagagctttacctatagcgaaagtgatggttggaaaaatttcgaccctaaaagcttaataccgaacgatgatggctcgttcaactcggtagagtttatccaagcgattgacgacatctgctcccatgttctccgtcgtctgaccgcttcgaattaa

SEQ ID NO: 140418 - DNA, 555 bp, Enterobacter cloacae
atgaaaaagcgcaacctcaatattcttgcatctctggtgatcgcgctcgctctgacgggatgtaacgagtctgaagtagataaaatcacgctgataggccatgacaaaaacgctcttgagagccagtacaaaaccctctttgaaaaacgaacaccaaacatcgaagccttcgctctgttcgataaaactgcggctgaaggcaaggagccacataccactggtggattaattgacggcaaagttgagtcgagcatgactactaacgtcggcaaatataccttcatgcagctcgacgaaatgcttactaaagaatacggtaagccggttgccactaaagaccaggtatttgatgagacagccttgaatggactggaatgcgccaagacaatgtcatgcgcagcgggaaagtattatgaggtcttccgcggcaaagagcgcctgatcatgatgataaacggtgccggtttcatgaataaagatgagggcgtaacgttacttacctttaccgacaaacacttaaaaacggcgcgtctggaagaagacaaacgccactaa

SEQ ID NO: 140419 - DNA, 789 bp, Enterobacter cloacae
gtgagtaacagagatgatttttctccatcggtgaagcgaacactagccgaacgcgtaggctggaagtgctcttttcttggatgcaaccaggtaacagtcggcccagatagcagtgatacaaacggcaggattaataatggtatcgcggcacatattacagcagcagcgccaggtggaccgagatatgatcctagcttgacccctgaacagcgaagctcgattgataacggtatatggatgtgtcgttcacatggcgcactcattgactctgactacactatctattccgttgagcaattgaaaaactggaagcagctggccgaaactcaacaatctcttctgcttcagatgacgcaccaggtgagtcagaacaattactcagaaagagatgtcggtgttttaaaagccattactgatatttttaattacaactacctccaaatgctgaagagcgaacagttccgggcaaaagttagcaccgacattaccgaccctctctacgcatttgataatattgcccataaccccttttacagcttcaatgatgttgttttagaaacaatccgtatggagttggtcgggaaagtgaacaacttttgggcgctgttcagagaacattccgctggagggcttgggtattatgattatatcgatatcccccatatcagacgtttttatcctgatcaggttgagcgctattacggaatcattaaccaaacacaagatttggcgtatgaaatcagcataacggcacagaaattactcgaaattagagcaaaactgccgtga

SEQ ID NO: 140420 - DNA, 387 bp, Enterobacter cloacae
atggctaccaacgaaacagagatcaaacaaggtcgctacgcagcttacattgactcgttaatcacaatctcgcctaaaagtcaggctaccattgccaaagaggttgggtacaagaatgccaacaatctctctctcatcaaaagcggcaaaatcccacttccagtagataaggttcgagctttagccgaagcgctggatgcagatccggttcgactgatgctgatggttctggaagaacgtcatcctgagctgctcgagttttttcgcgaagagggtactgcacctctctccgctgatgaaaaactcgttctagaagcgttccgtaaccgttttgacggtcaacaaggtgcgtcagaaaaggtggttgaggccatcaagtcactgtga

SEQ ID NO: 140421 - DNA, 213 bp, Enterobacter cloacae
atgaaaaatataacttctaaattgaccgcccttgaggttggacacgcatatgcgattggactggatggcgttgcgacgatcctgacagaattagaatctgaagagcttcccgtggagatggttgatacgacggttttcacttttgagctaaaaaacaaacatttcacactcatcaatactggttgcggctcccttgccgtgagaaccatttaa

SEQ ID NO: 140422 - DNA, 591 bp, Enterobacter cloacae
atgtttgatatttataatttattaaagcaaatagaagagaatacgaaacctgataattctgctatttggattgctataatatcttcaatatcagctattgctggcgctgctattggtgcatttttgttatatcgaggcacaaacaagcaaattaagtctgctgctgctactgaagataaaaaattaaaagcaactataattaccgcagaaagacttcgttggcttcaagaactaagatcaagaagtagtgagttttatgcgaatctcgatatgaattacagcttattaaaacgacaaataaatccgcagacaaccccggcatatcaacaagctggggacgagttggcgaaaactgtaatgattgagtgtaatcagataattttgttacttaatccaaaaaaacataatcaacaaacaatgcgcgataaatgcaatgaggctcttactttttttcaggaatgtgtagaactaagaaatagaggtagttttaattttgatgatgtaaaatacgcagaaataaaaagtcagttttttaatgccttgacagaaattggcattgaaacatggaagcagattaaagaattaagttag

SEQ ID NO: 140423 - DNA, 609 bp, Enterobacter cloacae
atgacgaccaagaccccagcccggcaacatactggctgccgcacgaagtccaaagccagataccaaacccaccagcaatcccgtaccaacttcaaaacccccgtagtcgagttcaatccccagctcaaaaccgtaaaagtattcagtgatggctcttgcctcaaaaatccgggcgggccgggcggttacggcatcgttctccagtatcgaggcgaagagcgcgagctttctgagggcttccacagcacgaccaacaatcggatggagatgatgggcgccctgattgcgctggagcgtctgaagtacccctgcaacgtgatcctgcattccgacagccagtatttaaaaaacggcatgacgctctggatgaaaggctggaagcgtaacggatggatcacgtctgagaagaagccagtcaaaaacgtcgatctctggaaacgtctcgattcggccgccagccgtcacaatgtccgctggaagtgggttaaaggtcatgccggtcatcgcgagaacgaaatgtgtgaccgcctggcgaagatcgccgcctactccgcagctgatatgcctcacaagcgtaacattggatttttgtcacaaaatgataagtaa

SEQ ID NO: 140424 - DNA, 2070 bp, Enterobacter cloacae
atgaaaggtaacgttctaggggatatcagagcagaacacgatgccaaaatgcttgaagcctcattctggcaaacaactgattataaagctcttttagagtcgtatgatcgatgcatagttgtaggtcgcagaggcactggcaaaagtgcattagtgcatatgctgtcaaaacattggcacgcaaaacctaaaacgcatgtgatgaccattagccctattgaagaacaaattattggtctaagagatgttgtctcacttttcggtgaaaattatttgcatattaaagccggaagcaaactagcttggcgctatgcgatttatatggaattactttccgaaatagcaagccactataggatgaaaaatgatctagactataaaagtgtagagaaacacttattatcttggggagctaaaagacaaaacataagtggtaaaataaggaaaaaattaatatctatccttgatactggaaaagatgttaaaccggctacaagaatatcagatttatcagataattttgaattagatttactagaagaggttttattcgaagctatttcaaaatcaaaccatcaattcgttatttttgctgacaggctagatgaaggatacactccagatgatttaggggttgctatcgttgacggtttcattcagtctgttattgatataaaacaaaatttgcaagaaaaagttatcgcatttgctttcgttagagacaatatccatagagccatatctaaaatggaccctgactttaccagaaacattgaaggacaggtattaagattacattgggacgaatacaatctcttcaatttggtttgtaacagaatgagagttgcatttaactcaaccatagaaaataacacgcgagtttggaatgcgtacaccgctaatgaattacagtcaaatacgggttttaaagaagcacttaagcttacattatatagaccgagagatatcttggtattattaaatgatgctttcctgagggccgcaactcacgatcgcacaaaaataataattgatgacataaaagccactgcaaacacaatatctcaaaacaggcttaacgacttactaaaagaatatgaaaatgtattccctgcactagatatatttacatcgctttttggcaataaaagaccagattttaccatcgcggaagcctctgaaataataagccaatcatttgatataaaagaagttaatgacaaaatgaaattacaggacatccttttgtttgaaggtcctgttcaggtgatccaacgtttgtatagtgttggtttttttggattatacaatcagcagtcctcatcatatgtgttttgtcatgatggaaaagaaccagaaaaagagtttacaccaggctctaagcttctgctacatccttgctattggcttgcattaagtgttcatgagtcagacattactcctgaaacagctgacgatatccacgatgaatacgatatcgaagttagctccgtatcagaagaacaacgaaaacaacggatcggtgctcttcttcaagaattaaataatatcccagaaggtaaggaaggggctgttgattttgaagcatgggctttgaaagctattaaaatattgtttgcgacgaatttgaccaatattgaactccattcaaacaaaaatggtctacagcagcgagacattattgcaacaaaccttgccgacacacctgtctggaaaaggatattgactgattaccaatctcgacaagttgtattcgaaatcaaaaactacaaaacgttaggtgctgatgaatatagacaagtaaattcatatttatttaaagattatggtaggctagctttcattataaatagggatcactctgaaaacttagaaaaacataaagagctaatctgggtaaaagaactttatgacaaccataacaaattggttataaagttgccttcaaaatttcttgagcgacatctttctaaaatgcgtagccctcaaaaacatgatgaagttaacaaacagctaagcaagttgcttgatctatatattagaagctatttaaataacaagtgtaagtaa

SEQ ID NO: 140425 - DNA, 267 bp, Enterobacter cloacae
atgggactcaaagactcaaactatcagatcgtctataggggtgagactcttcaaaatttcaaaccggggcaatacgtattctttcaacgattgaaggagtatggcggcggatactggttaggcaggactcatgaagatgggttcgagtttttgctggaagaaccaacctcgctgggaagaggtctcgagtttctgataacgcactcgagcgtggaggccagatttatggagttcgtcgacgatgcggacgacttcaaactcacctaa

SEQ ID NO: 140426 - DNA, 321 bp, Enterobacter cloacae
atgatgctgaaaattaccgaatcgtataagacggcggtgatcagcaccgcccacgtaacggcagcggattcagaacggctacccattgcctgcttcgacccacttactgatcgcgggttaaattgggtacacggtacacagtatggctggattgttcgtgctggagtgcgagggaatgacttgaaagaagagttgcgtgagtatggtatttccgaagagacgatctccaacatacagaccatagtggatgccggctttgatgcggttcacttcgattgcgacgccgagctggtggatgggctgcctgcctgggactggtaa

SEQ ID NO: 140427 - DNA, 306 bp, Enterobacter cloacae
atgagtacgagcgtttggacgtggaaagggaagtacttcggctacatcagcaataacaatctatatacctatagaggaaagcatgttggcaaattttccggtgataacgtctttgacagatacggaaaatatattggcgagataatgagtaataacagactaatcaccagtcgccacaaaagaaatctcagaggttcgagttttacaccttccaacggaggctcacggggtagatatgcaaattatagcggttacgcgatgtacgcaggctatgaggacttccccctgccagaagagttcgaatga

SEQ ID NO: 140428 - DNA, 396 bp, Enterobacter cloacae
atgactgtaattcgtgaaaacctggttcttgatttgtactatgcgtcagaaacaacctcaggcggaaaagttgcaaaactgaccgctattctgcgtgacagcacgaacgggactgaagtgctcaccaccaccctgatccgcaccgggacagaagaggattgggtgtacaccgtaggcttccagagcatcagcgacgcatccgaaccaatgctgctgaaactggaaacgtatttccgcggcgtagacaaagagatgtttgagaagatgatggtgaaagcagacgaactgtacacctcctacttgaacccgagcaacacctggcttggacaatacggtctgcgcatcgtgtccaacgaaccggttgaaaactacatcccggaaagcgtattcgcttaa

SEQ ID NO: 140429 - DNA, 747 bp, Enterobacter cloacae
atgtccaatacccatgtaaaaaacatcaaacttggcgcctgcaaagtgtcgtttggtggcgttgatctgggttacaccaaaggcggtgttcaggttgaagttgcgaccgaaactctgaaagtcaccgtagaccagctggggcagaccaccatctccgagctggtgcagggtcgtaacatcactatcactgcgccgctggccgagtctgtgttgcagaatatggtcgatctgatgccgggatctaccctgagcgaagaagataacgctgtgaccatcacttccgcacagggcgtcaacctgatcgacgtagccaaagagctggttctgaccccgcaggataccaccgactacgttctgaccatcccgaaagctgcgaccgcaggtaacttcaccatgacctaccagtctgatgatgttcgcgtgttctccgttcagttcaccgcttacccggatgacgacggcgtgctggggaaaatgagcggcccaaagccggttaaaaccgtaaccatctatccaggttcaccgacctgcaaagtaggagctacggttcaactttcggcgcaattgcaaccagatgatgttgcagacaaaaccggtgtctgggcatcggaagatccactaaaagcaaccgtagaccaggctggattggttcgcggtgttgcagaaggcgcagtcaacatttcgtttactgctaatagcggcggcaagaaggctaccaaatctgtaacggtgactgctgccagttaa

SEQ ID NO: 140430 - DNA, 270 bp, Enterobacter cloacae; identical to SEQ ID NO: 86026

SEQ ID NO: 140431 - DNA, 777 bp, Enterobacter cloacae
ttggctttagcttcagccactgccatcgcttcggtcgcagtcgttgcggaagcagcagcctcacctgcggatttggcagcagctgttgcagatccttcagcggcggtctcagcagacttcgcgttggtttcagaggttttggcggctgcggcagatgcctcagaagctgtcgcctgttcactggcaacgttggccttctctgttgcagttgtggccgaatcggcagccgcggtagcggatttgctcgcagcatcagcactgccagctgcggcagcggcactttccactgcgtgggcttctgagttctgggcagccgcttttgatgcttcggcagccgttgcgctctccgatgcagctgtctcggacgcctttgcattggtctccgaagtttttgccttctgttcgctggacgcagcagcatttttactcgctaaagcggcgtcagcagactcacctgcagcggtggcgctttcggaagcggcgttcgtgctggatgcggcagctgactcgctggcagcagcagccttctgtgatgcgtcggcgttggtttctgacgttttggcagccgcagcacttgccgccgactcaccggcgctcgaggcagcatgggtttctgattccttagccgcattttttgaggccagcgcatcagctgcactgccagcggcggcctgctctgaggcagaggcattggtttcagaggttttggcagcagcagcagagtcagacgcagcagacgctgaagcagaggcttcggacgcgctggtcgcagcctga

SEQ ID NO: 140432 - DNA, 1014 bp, Enterobacter cloacae
gtgaagggtaagagttacactcttcaggattacctgaaacgccagaacgtcagcggcatgctggtgctgaaaaacggcaaagtggcctataaatacctgggtgaaggcaataccgactcaacgctctggacgtcgcggtccgtgggcaaatcggtggtctccgcgctggtgggtgctgcaattaaagaagggaaaatccactccctggacgaccttgtcacccaatacgaacctgacttaaaaggcaccgcctgggagggcgtaacgctaaaacagctcatcacccacacctctggcgtggcgtggaacgaagattacaccaacccgcaatctgacttcgcccggcttaccgaatgtgaagcgaagccgggcacctacaactgcgtgcgcaccctggtgaaggggttacaccgtgaacacccggcgggcgaaaactggtcctattcctcgggtggcgcctggctgttaggcgatgtgcttgagcgcgccaccggcatgacgctcgcggcgtatctggagaagaccatctggcagccgtacggcatggcgagcgacggcgtgtggcatgcctacagcaaaggccagcacgacgtgggtgcgcatgggttcaacgccactctggaagactgggggcgtttcggggagtttatcctgcataacggtacgctgccggacgggaagcagatcctccccgagggctgggtgaaacagtcctcagcctggacacaggccaaaggatcggtgtccgacgcgcatccgaaggggttatacggctaccagtggtggaacaacgaagtaccagccaccgccacacacgtggagccgaaagtcgaaaattcgctgaaggattccctgtgggcgctgggtatatttggtcagatgatcatggttaatcagaaagaaaatctggttatcgtccagtggtccacctggccgcaggcagagccgtcattcagcgcccagccgctggaagcgtcgctgatgtttagcgcgattgcgaacgcgctgcgctga

SEQ ID NO: 140433 - DNA, 750 bp, Enterobacter cloacae
atggctttggcagtcttttattataaatcatcgaaaaaatataagatgctagcatttattttgctcgcatctgaccttgttattgggataagaaataaattcttttttgcttttatatgtattattattctctcgttatattcaaatagaaagaaaataatagcaatattcgctagaatatccaaagtacactatttattaattggcttcgtcggtttttcaatgatttcatatcttcgtgaaggatatgaaatcaattttattaattatcttggcgttgtacttgactctctgtcgtctacgcttgcaggtttacaagatttatactctttgcccgatgaaaatggttgggcgttactaaacccccttacgatattatcgcaagtgttgccgctcagtggttttggctttataagcgatggacaaattgctcatgaatattcaacaatagtgcttggcagcgtgtctaatgggatagcgttgtcatcttctggtcttcttgaagcaagtataataagtttgcatttcaatttatttatttatcttgcctatctgttaattatgatctcgataattcaaaaaggtttgaatagtaattatgttatttttaacttttttgccctggctatgatgactggtttcttctattctgttcgtggagaattaattttgccatttgcttatgttttaaaatcgtttccaataataataattgcaaatctattgactcaacaaaaaagtagaaattga

SEQ ID NO: 140434 - DNA, 966 bp, Enterobacter cloacae
gtgacattcccaggtcagttttcaaaggatattccagattacgaaatcgcacgtagtcttggtcttgcctctggctgcgatataaatttcacagcacttgcaggtcaactggactgtagcagaaattttaatcaggccgggattatctactcagacggtgcacgtcagtggttagtacggccatcaagaagaatcgcgacaccaaacgaaagctcggttagtcatgtagtcataaccaaagtaaatgcctcattagttaaccctgttcaggcaacaacggcgacgattaagtccccttccctggcaactgaaattggttcaacggcaatttcctgcggagccgcaatacttactgttgttcttgcggcaggtgccggcatggctattccactcaccgcagggtcttccggtgctatagccgctgtgatcttggccggtggtgttgcgacaggaattcaatgtgcaaatgggcttggccgcctgtcgttgattgctatgaatcatgatgactatgttgcgtggatggactcccaggagtggtatacagcaaccaacacagccctggatgcgatttctcttgccggggctgctgcgggtttaaaaagcgctgtattgacctatcgccttcttaaccgttcatcgtctgagagtttgctctctttattacaaaaaatgagccgggctgaccgtacgcgattaacagaggagattattcgtatccgcaatcccggcatctcgaattcaggtgtaaaagccgcaatgaaagcaggcgtgtatcctaaacgttatccgtcagaagcgttgcagttgctcttacagcgtgagttgctgaacaccatttcaaattcctctgcctttgttggaagtgctatctcaggaaatatcagaaatccgcagaatgttgcacaaacgggtaaatacatttttggtttaattcagtctttttcatttacaggaagttattga

SEQ ID NO: 140435 - DNA, 1020 bp, Enterobacter cloacae
atgaaaaaagtattgttgttcaatttctataagggaatattgtacagaggtattccgatctattcatccaacttaattacagcacttgaaaagaatggatgtatagtcaatgagtggagttgtccaaaatttgcacaaaaattacctagggcaattatagacttactctttgttctttgtgagcaagttattattcctatgataagtattatgggaagatatgaaaaagttatatatccttataactcatgttctgtaatatcggctttttccaaaaaatccatattaataattcatgatttcatcccaaataaaagaattaaggaaaggctaagtctttctgcgttatatattgtactaacacagcgatttcatgcttttttgaaaagagatgtagcatttgtctcagcaacaacaaaaagaattggaatgaatgttgaatggttaaaagatagtaatgtttatcttttccctaactcattctatcaactagaagctaaattatcacaaggtaatattcaaaaaagtaatgctgaatcctatgcagtattaatttcaggtaatggttctaataaagaatttaatcacgcaatgcagttatggaaaacatgtgcatacgctgcttcgcataagcttaaggttataggattaggctctcacagagaatgggcattgaaaatacttagagagttaaagattgagaatgtccaggtgctgccggttcttacagatgacgaattattatcggaactagagaacgcttcaatggtctgggctcattcgactcatgaaggattcggaaggccagtaattgaaggcagaatatgtggtaaaagcgttttagcgtcaaatatttctgcatttagagaacatagagacgaaagtgtttatttatatgacgatcattctttttgtgagaaatattttttggctcatgtgactagtgattcatcaggttataagattaagtatcatattattttagaggaagaaattgaaaaatggctactagcaaattga

SEQ ID NO: 140436 - DNA, 720 bp, Enterobacter cloacae
atgattgagcgcggcatgatttttaacggggagatggtgcgcgccattctcgacggccggaagacgcagacgcgtcggatcatggcgattcagccagagcattcagagctgggattacgccgagtgattgactccaaaaatggcagagataacgggaagtatttttggtcgcagtccgatgcgtgcggcctgaaggcccgctcaaaagtgttcggttgtccttatggagaagttggcgatcgcatctgggtgcgagagacgttccaggggccgcttgtttctgaggagttattcgaagaataccgagcccatcctgaaaagttcgaaacgccgcaatactgcgaatattccgctgatggcggtgccaaacctgaatactgtgatcttgacgataatctccgtcacggttggcggccgtcgatccatatgccgcgttgggccagccgcattctgctggagattactaacgttggagtgcagcgcctccagtcaatcagcccgaacgatgctgcgcgtgaaggactggttaagctacctgccactggccggtattgcataaatcagggggatcaatatttcggtggtgcaagccatgatgctcgcgaagtattttcctggctgtgggcatccatctacggcgaagaaagctggaaagctaacccatgggtctgggttattgagtttgagcgtatcgaaggagacgaccatgcgactgattaa

SEQ ID NO: 140437 - DNA, 345 bp, Enterobacter cloacae
atgagcaaatcattaaatgcacgttgcatccgtcgctggaccgtcgaatttaaaggtcgttgcgactcgaaatatagtccgtactggcgcaagcgtgatctgcgcgggtatatccgcgaagcggcgctcaccactgcttacaacatggttgagagcatggctgagaacaacgccaaatttgactatgacggcacgactattggctggtcgtctgagttctcagcctggtatgacgaacgccgggagcagtacctcaaagaagcgcgtgactacctggacgaagaagccaccaacgaagagatagacgaagagatcgagaacgagctggaggcctggaatgattga

SEQ ID NO: 140438 - DNA, 375 bp, Enterobacter cloacae
atgtcaaaacagttgttagaagtcttctccataaaaattcagcaggtgatgagggagcataaatggaacaagtcagagttagcacgccgacttaagctttctcacactgtaataagtaagtgggttaatgggcagaatttagctactggagatcgcttgaccagactctctgtcgtaaccggtaaacctccgcattggtttttcactgatgaaaacagcaacacccatccacaaagtgacacaacaggcattcaatacagaatattggatcaacaagaacaagcgcttctatctgtttttagtaagctcaacgataaagataagcttaaccttatggttcatgccattgaactttcccaaaaacatccctcctag

SEQ ID NO: 140439 - DNA, 423 bp, Enterobacter cloacae
atggaaggcatgaaagaagaaaataaaaatttcgcttacaggatgcaggtgattctgcaagaaacaggctggaacctatcggagctggcccgacgggttatggtatcccctcaggcaacgcagcaatggtcaaaaggggtaacaacagcgcgaggagagcgacttaaacgccttgctgctgtaacaggaaaacctactcattggtttttccttccgcagggaaatgaaccatcagagcaagagttaacagaactctctcagcttcaccagttagatgataaggaaaaggcgctcctttcactctttaatcagatgccagaggcagagaagaaccgcttgattgttcatgccaaaacaatactctcagagttggatttgctaaagggtgatgtagccaacatcatcaaagatatacaaaaataa

SEQ ID NO: 140440 - DNA, 615 bp, Enterobacter cloacae
atgaacaacatcgacaaacgcgcattacgtgaagccgccgaaaaacatggagatgacgacattctggcgctgctggatgagctggaagccaaagacaagcgcctgaatgaaattctcacgccgaacatgctgctgccagtgattggcgatatggatgaagacaatctgcgtcacgttattaagaccgtcagcgaaaactattcgttgctgcacgcgaaatgggaatccgcagagaagcgggttgctgagctggagagcgacaacgcatacataaaaaaccgccacaaagaactggacctgttaatcggtaaaaacattctggtaatgcaggcagcaatcatcgaatggcagggaactggcgacgccagaaaggggctggcatggatttataacacgctgtttggcccaggcgaactgccggacgaatcggagaaagacgcccaagcctattttgaccgtaaatatgctcctctggacgacgaactcatgaatcttcatcggtggttctgggagcagagcgaagctgagcgcgccgccgcgcgcgtagaggaggatggctacgacgctatgcacaaggcaatgctcacggcagcaccgcagcaggaggagaagtag

SEQ ID NO: 140441 - DNA, 282 bp, Enterobacter cloacae
atggcaatttatcgcagcaaaaaatggcttgccgccgtcgggcagatcgagcgctgtgttctttgtggagcatgggggacgcaggtggcacaccggaacgaagggaaaggcatgggattaaaaaccgatgactgtgcgacagcagctctctgcgtatgttgtcatgacagcattgataacgggaataagcttaaccgggacgagcggcggcagcttatggaccgcgcgatagttctgacagtgatcgaagttgcccgccgcgagctggtggtgcccgcatga

SEQ ID NO: 140442 - DNA, 198 bp, Enterobacter cloacae
atgaagccagaaacgcttgaggtactgaggtactccgcgcgcgctggcagcgccttcgcatctaccgcttccggggatcggtgctggtggattaccgcatccttcgtaattttgttcgcatctatcattcagcaggagccgcataatgaacctcgaaaacaccgtgaaataccacttcgccaagtcgacgcttattag

SEQ ID NO: 140443 - DNA, 303 bp, Enterobacter cloacae
atggtcgggataactattgcaatagttagctttttcggctctcgcttggttaaccaagttgacgaaatggataaggctctacaggctacgagagaagtacaggcttcccagacagaaattatcaaaggtcagcagcgggacattgataacaatgggaaagaaatcgagcgactgagaaatcaagttgatcgcctgaaggatgacaatgctgctcttaaagcgaaggcgggtatcccactaacgctgaacaacaagccaccttcgggtggctttttagtttctaggcaatggaaatcgctttga

SEQ ID NO: 140444 - DNA, 390 bp, Enterobacter cloacae
atgtccgatccattaaccggcaccggcgcagttctcggcggcggcctgctgggttcagtcctgtacggcgtctttactcatacagatttcggtgtggtgtttggggcgtttggtggtgcggtgttctacgtcgcaacagcaacgaacctgtctcgtgcacgactggctgggtattttctgacgtcgtttatcgttggggtgcttggggctggatttgttggctcactgctaaatgccgcatcgcgatatgaaaaaccgttggatgcactaggagcagtgattctgtctgccctgtgtatcaaaatcctaacttatcttaataaccaggatctgaacagcctgttcagctttttctcgcgtttacgcggaggagggggaaatggcaggtga

SEQ ID NO: 140445 - DNA, 279 bp, Enterobacter cloacae
atggcaggtgagctgactgcattctttaatgcatttatctgcgcggtaattgttatcgttctgatgttctaccagcgacatggcgcccggcatcgtcctttcatctctatcatggcgtatgtaaccgtactggtttatgccgttatcccgttgcagtttatcttcggtctctatcgtgactccagctggctggtggtggtggcaaacctccttatctgcgccgccgttatgagggcccggggaaatctggcacgtctggtagatcatctgaggcactaa

SEQ ID NO: 140446 - DNA, 237 bp, Enterobacter cloacae
atgcacgattctgaagtgacaattaatgatctttatttgacggcgaaagaatatttcccacatgggctcatgcgagtagagttatgggatattggagttaaatttatatgggtagatcgagacaatgataatcaagagcgctcggcatttcttcaggcctctcttaaggatctttccttaagccaggtcagaggatttctggacgctgagactcaggaagaccaagtcagccagtga

SEQ ID NO: 140447 - DNA, 210 bp, Enterobacter cloacae
atgtcaaaaaatgcaagaaaacctaaatttaaaatcggcgatattgtttatttggtttcaggcggcccggcgatggccattcaggaaccgatcataaacagctatgatgtttttactggcgattactggtgccagtggttttcgggaaggaagcaagaaagagccagatttccagaagaatcactgactgctaccaacccaaagtcgtaa

SEQ ID NO: 140448 - DNA, 777 bp, Enterobacter cloacae
atggctacaggcgtaccgcaagagaaggccacacagcacctcgaactctatggcaatatgcttttagagggcatagctattgatgaattctcttatagacgtggtgtgcgcgagcttgaacgccagaattccagcatatgtgtttcagcgcttggcttccttcatggtttgtatggtgaaatcgaccaagctattgctgtgtttgaggaggctgatccatttcatgatgttaccgttgctacaaatctctgttttatgctcagacatacaggctgcataaatcggctttatcaatatgcttatgatcttgctgatgctcatcaaacaaaggctttaacagctagtgcttattctatggcttatcgttttggcgatagagaccgtcttgaacattactttgatatgcacattaaattgctttcggaggatgaaaacagatctgaagcagagattcataagcaagaattattgactgagattaacaacgcatactccgttagcggctgttcgcaaaaccagtttgagttactcgctcgagtaatttggtcattaacggaaaaacatcgtttgattcccggaacagtcgagctgaacagtacatttaacacgtgctatgttattgaaatctacaatcaaaatcctgagtctatagccaggcttaattgggagcttgctgaagccgtgtgtagccatgatgctttggatgattgtgacgtagtagctcgtttttctccgactcgtcaacttcacgttggggtaagctatggcaataattag

SEQ ID NO: 140449 - DNA, 483 bp, Enterobacter cloacae
atgaccgtagagaacgcaccaccatctacagcaagatcgatatggtactttacggtagtgccgacaatatccccgtcgttttcctgctgctgcaaacccggaataccaatgcgaacgagcacagcgtcaatctgggtgttgctcagcgcgcgcgtccagggcgtggcttttgtcagcgatacgccgactgtagtttcgttctccactgcggggaaacccggaatcggcgtctgggtctgtgtgcctggccgaaattcccaggaaacgttttcaaagttcatcgttccgtctgagtttcccagcggcgtaccgtccaggaaaatgctggtcgcatccagaccaccagcaaactcaccctccccgagcgccagcagcatgcggcagcgcgccattgactgcgccgaatcaggttgttctacaggtgtgtgctgcttctggctgccaccctttgcaccagtgatcgcttccatattacatccataa

SEQ ID NO: 140450 - DNA, 324 bp, Enterobacter cloacae
atgaaacaaaaatttagggctactgcaataagtagtaatcaacttagttttttttctatattcgatatagatgaagatgaaataacgcaaatagttgattcacccaaagagcatttaaatgatgcatacacgtccggattaaactttaaatcagatgaaagtaacatttctgagataaattatgattctgaaaggcgtgaaatcacctttatgaaaaatccaaattacttaaaaatcagattttgcatacaattaattttgcagcagaaacagattatctatattcggttgaagaatataacccagatttgggtggtctggtaa

SEQ ID NO: 140451 - DNA, 282 bp, Enterobacter cloacae
atgtcagaaaaaaaactggctgttaaatggactgacagggaaattatggatgtttacataaaagcttttaaatccacattagagttgtttgacgagcttgtttcatgtgatctgttaactaaacgaaacgcttttggcaagttagaaataaatccaatattcgaaaatcattttgaatggatcatgtctgaagcttttgaaatagtgggaaatcatcttggttataatgtgcctcaaatcaggaaactgatggcaactatttgccaaatgaatctcaaataa

SEQ ID NO: 140452 - DNA, 219 bp, Enterobacter cloacae
atggctgacatcatcgacaccgcagcagagattgaagagcttcagcgtaacgctgccctttccgctcaccgcatcgaccgcaacgctgtatcagctgagcgttgtgaagaatgcgacgaaccaattcccgagccgcgacgcgctgccgttcccggctgccagacgtgcgccagttgccaggctgatttggaacttatccgtaagcaaaggggctcctga

SEQ ID NO: 140453 - DNA, 192 bp, Enterobacter cloacae
atgaacagagcctcacccgttgacttgaggacgagcctcgaaatagccaacaacctcgcgcgcatcgggattcgctttgtgccgatcccggtggcgacagatgaagagttccaggcgctggccgccgagctatcacgaaagcttgagcagatggcagtcgaagctgagaagaatgaaggcggtgcagcatga

SEQ ID NO: 140454 - DNA, 612 bp, Enterobacter cloacae
atgaatatgaaaactgaaaaaatcgtgatgatggacagcgatgaagcggccagcatccagaccgtaactggttgggtagaccgtcaaggtcgtttctggggcggtgacgagcaccaggcgcgttggtgcggcgctactcatcgcaagtgtaaaaacaaacctgatgagcatcctattcatagcactcatggctattgcgaagaatgccaccgcgaaagccgccaaactaaattcgctacctttgagcgcgcagtatgggctggagagccgctcgttatctttgatgatgaccattactttttcgacgccgaatcgctggccgactattgctatgagcactccctgctgccgagcgagttgcagttaatgatctgcgaacctaattacccgccggagttcgacctggaacagcactgcgaagagatcatgcctgatggcgatgactattactgtttgccgcaagctgtgcgcgatgctgctgaggcgctgaataaggcgctgaaagaaagtgctccagtatcgtggagcgccagcaaccgtgtggcgatcgtctctgacgacatgctcaccgacgagcagaaggccgaaataatggcggagcgcgccgcatga

SEQ ID NO: 140455 - DNA, 2058 bp, Enterobacter cloacae
atgcttgcagctactgcggtgtattatctctatcaaaaagtacagcaggcgaagcaggaaagcatcgattttgctgactctcttgatggtcttacagccaaaatgaaggagatgagcgctgtacagatggcttcagccatagccaaaacagagcaatccatcctagatcagcaggatgcgattgcggacctaagggctgaatatgagcgactggaaaagaaaaaaaccttcatagaacaagctgagcaaatgagaggatcggcggctgttgcagaagacctcgctgaagcaaaccgaaatctcgccattcaggctgataaggttgagcaggctgaaaataaattaagcagaaccactagttctctcggtctgctccgagctcaggcaaacgggcaattccgtgaaggtattgacctgttgcgcagggatggagaggaggccagtgttaccgccggaatgatgggcaagcttggcgatatgattaatttcgcttcaaaggcgaaggataaattcaactccagcagtttgatggtagagcggccgaaagacgttcaggattaccttgataaactgcaagaccaggtgacactccagagcgagcttaacgatcgcaagcgtgcgcagttgaaggctgagcaggacatcagaaaacttggtgggactgaagctgatatcagactggcgagggaaagggctgctgccgaatacgacgcccagcaagctcagcagaaaggcaaaaaggaaaccaaagacgccacgtctgaggcgaccaaatacgctaatcagcaagaagcaatcgcccaaaaacttgcgaatctgaagcagcagtctgaacttgctgccggttctacttctgagctaagcagagagcaagcggttctcgcagcgcaacaatcacttggcaaaggtgctacccaggaacaaatagagctggctggtaaatatcgcggggaaatctgggatacagcaaacgcccttaaagctcaggccgctgctgagaagttattaccggaagcgcgcgagaacgccagctataagcaggatgttcaggatctgaaaactgcgctggatgcgaaaaaaatcagccagcaacaatacaatcaaaccagtgaggtgttagagcaacaacatcaggctaatctggcaaaaatccgcgcccagcaggtaatcacgcctcagcagtccgctcttggcgaaatcgacccggttcagcaattggcaaatcagcatgctcaggaactggctctcattcagcagtttgagacgcagaaaggtcagatcactcagcgcggcctcgagctgatgaacgcagccaataccgaatatgagcaggctcgtattgcggcgcaatgggagatttaccgcaaccagagcacgaccaatcagctgatggctgacgctatcgattctctccaggggggggcgaccaatgccattaccgggctgctcaacggcacccaaagcctgcaagaatcctttgccaatatcggcacgacaatcctcaacagcgttgtcggtagtctggtgcaaatggggattgagtgggtcaagagccagttaatggggcaggccgctgctgctgcatcactggcatcgacaatggctcaggctaccgccgctgcatctgcatgggcgccagcagcgatgagcgcttctatcgcaacgatggggagcgccactgctatagggcaaacggcttatgctggctcactacttgcagccaaaggaatggccgttgctggtgcgcgttataacggtggtccggtcgatgccggatctctgtatcgggtcggcgagaatggtaagccagagatattccaggccagcaatggtagccagtacatgataccgggtgataatggtcgggtgatcagcaacaaagatatgcaggggggcgggagcgggacaagcgttgtccagaatgtcagtttcacaatcaacactaccggcggcattgacgatgccacaatggctaaaatggcgcagatgatgaagcaggttagcctcagcaccattcgtgatcagcagcgccctaacgggttactacggaggtcatag

SEQ ID NO: 140456 - DNA, 360 bp, Enterobacter cloacae
atggcaaaggttaaaatccatgcggcaaattttccatatttagaggtgaatgctactggtggctgtctatttattaaaacgggtgcgtttcagctgacgggtgaaacgatccatgcaagtaagctggttaccattgatgttgcaagtgaagatagcgtgaagaaagttggtggcgctattggatggggcgttgttggcggagtgctggctggccccgtcgggatattggctggcgcactgcttggtggaaataaaaaagaagtaacatttgttgccgagatagaagatgggcgcaagttcatgggaaccacagaccacaaaacatttatagggcttcaaggtgccgccatgaagttttga

SEQ ID NO: 140457 - DNA, 441 bp, Enterobacter cloacae
atgaaaactatggcgaccgaacagaaaaatgaaatcggccgcccaagcaagctcgccgaaagcattgagccggcaagaaagtacctgctgggcggttatctggaaattggcgatgtagtgccaagcgtagccggactggcgtgctatctcgcagtttcaaggtcaaccatctacgaatgggccaagccaaaaggtgacttttcggacatcgtagagggaattcttgccatgcaggaaaataaactcctgaacggcggcctgaaaggtgagctaaacccaacgattgccaagttgcttttagcgaagcatggctatgccgataaggccgaagttgataataagtcatccgacggcaccatgaccccacagccaacaaccattcaactcgtaccggtagagccaaagcatgagccagccagttcaactgccgatccccgctaa

SEQ ID NO: 140458 - DNA, 507 bp, Enterobacter cloacae
atgagctcaaaaacaatccctttaccaatcgcaaaggctagacagtttttggaagttgatggcagtactgaaagtgggttgaggtggaaggttgatgctagcaccagagcaaaaaaaggcgccagggctggaagtcttgataaccacggttactactacgtcaaaatagacggcgtgaaatataaagcgcatcgacttgtctgggccatagcaaatggtgaaatcccagatggcatgacaattgatcacattgatagaaatactaaaaacaattccttagaaaacctgagaattgcagattataagctccaggctgaaaatcgtagccgtgactaccttaaattacgcacgaattgcggctccctaactgtcaggaaatctgggcgaattgacgcctcgatctgtataaactccaagagattttataaaagcgggcgagataaagctgagcttattaaatggatggaggaagtgcagagtaacaagatggctcatctacttgactaa

SEQ ID NO: 140459 - DNA, 633 bp, Enterobacter cloacae
atgcgtaaaccatcccgccgcaagtgtaaagtatgcggtgaatacttcgtgccgaaattccacgacatccggatccgctggtgcagcccggagcatggcgcaatcctcgcgatgcaagagcgcgaaaaggagaaggtgaaggccatggctaagcgcatcaaggagcgcaaagagaaagagcgcgcggaacgccgggatctgaaagcgagaaaggtggcactaaaaacgaaaccgcaatggagggctgaagcgcaggcggctttcaaccggtatgtccgtctgagggatgctggtaagccatgcatcagctgcggcaggcttccggagcagaagtttggcggaaccatggactgcggccactaccgcacccgcggcgcagcggcgcacctggctttcaaccttcacaatacagctgcccagtgcgtttattgcaatcgggatcgcgacggcgcgcaaaaggcttttgaaaagggccttattgagcgcatcggtgccgaaaaagttgaggcgataaacaacgataactccgttcgccggttcgacatcccatacctacagcgcatcaaatccattttcacacgcaaagcccgcgcgctggaaaaacgccgggcccgccgacaggaggccgcatga

SEQ ID NO: 140460 - DNA, 198 bp, Enterobacter cloacae
atggagagtttaaacaagataatcatcaatgctcgcgtgctttcatggaagagagagtttggaccatttgttaagtgtcctgagtgctttgggttgctgacaaaatgcgaattatgcaaagggaaagggaaactcattcaggaggatattgacgcgtggaacaaccctatcgccaaattgaaaagggataagcgatga

SEQ ID NO: 140461 - DNA, 687 bp, Enterobacter cloacae
atgagcactattaccagagaacagttaatcgaagacctgatagcttcgacgcaaaactccagcgggatgtttgaaatcggcgaggaaacaatctgcgcattggtatctttgctcaccgccccgccagcgccggtacctgtgcctgactttggcgcattaacgaaatgcatcgttcagcgtctggttgattatggtgctgctgatgatgacgctatcgccatcgcggaggagtttgtttacaacgcctgccgcgccgccatgcttcagggtgccgaacctgtaacgacggcttacaagttgccagccaatacgccatgcaaggatgcgccagagcatatttggcttcagactgctggagtatggcctgagaacggcgagttcagcgaattaacgtggtgcagcgacaatcagcaccaggacgacacgctttatgttcgcgctgacgttgtgactggcaactctccggtgattccggatggttgggtgtcttgcagtgagcggcttcctgatgaaacgaatgatccagatggcggggctacttgctaccttgttttatacacagaaggaagacagccgaatggaggttctaacgttcaggtgagcaacgttacttacttgcgtcgctggcatgatggtatgataacccactggatgccactgccagcagcaccgcagcaggaggcgtga

SEQ ID NO: 140462 - DNA, 207 bp, Enterobacter cloacae; identical to SEQ ID NO: 77608

SEQ ID NO: 140463 - DNA, 1767 bp, Enterobacter cloacae; identical to SEQ ID NO: 26630

SEQ ID NO: 140464 - DNA, 705 bp, Enterobacter cloacae; identical to SEQ ID NO: 124394

SEQ ID NO: 140465 - DNA, 2058 bp, Enterobacter cloacae; identical to SEQ ID NO: 32296

SEQ ID NO: 140466 - DNA, 453 bp, Enterobacter cloacae
atggttgataaagttaccgaagctgccgttgtgggtggcgtggatacacataaagatttgcacgttgccgctgtcgtagatcagaacaataaagtccttgggactcagtatttctccacaacacgacaaggttaccggcagatgctggcatggatgacctcgtttgggacattaaagcgaattggtgttgagtgcacaggtacctatggttccggtttgcttcgttattttcagaacgccgggttagaagttcttgaggtgactgctccagaccggatggagcgacgcaaacggggtaaaagtgacacaattgatgctgaatgtgccgctcatgcagcattctcaggcatcaggacagttactcccaaaacgcgtgatggcatgattgagtccctgcgggtattaaaaacttgccgaaaaacagcaatatcagcccgcagagtcgctctctag

SEQ ID NO: 140467 - DNA, 936 bp, Enterobacter cloacae
atgaaatatgattttgatgagtacgtaagcagagagaaaacagacagtctcaccgtggacggctggcgggaatacctgttttcgggacagtccgaatttgcaatgcggtatccggcagaagggctaatcaacctctgggttgctgacatggcttttgccacaccagagccgattcttcaggccatcagagaccgtctggatagaaaaatactcggctacactaaaatctacgacgaagaatactatgagatctttggcagctggtgtgagcgacaatatggtcaccgtttcaaaacggaagacattgtgctgtctccgggcattattcccgcgctgaaccgtctcgtcccgcttctgaccgacatggatgacagtattcttattatgacgccttcatatggcccgtttaaaaaggcgggtgaatacagtcagcgtcgcgtggtgtactcggcgttaaaaaaatcagcaggcggctgggaacctgactgggaagactttgcacgcaaagccagtcaggccgatttacgtgtgaaaattcttttcctgtgtaatccgcataacccgaccggacgagtctggcggcctgatgaacttaagcggattattgaaatttgcctggccaatgacatctgggtgatatctgacgaaattcactgcgacctgtcccgaagcggtatcggtcatacaccggccgcctctcttttccctgattctacacgcattattacctgcatgtcctcgagtaaaacattcaatctggccgggaatttgttggcaaatatcattattccggatcccggtgtcagaagcgagtggcgtctcagacacgacgagttcatctctccactgagcctggcagcaaacaaagcggcgtggagtgaatgtgatgactggcttgtccatctgagggaatatattgacggcaatttccggtaa

SEQ ID NO: 140468 - DNA, 1557 bp, Enterobacter cloacae
atgagaattaaaaagcctcaccttcgtccgatagtcataaccttgtccgttggtgggattttgttaacttctatttttctgattgccgttattatggtttttcagcgcgaaaatatagaaaaagatttgcttgatgctaattcatcgtacgctatgaaaatgtcagatgtaatgagtggttatattgaaatggctcaaggtgaattatcatatggagcaaaaaaaataaaatcaactaatgatattgactcacttaaagatgaggcggataggttaagattgcagtctggtatgtttaattcagtttttgttgttagtaatgatgctgttgttctggcgacttcgccagaatctcttgatttagttggtacccgcttgaattcaagtgccagcaaattggcgattgaggaaaagaaaccattcatatcttcaccgttcaaatcagttactgggaatttgattattttgttgtcacatcctatttatgataagaatggcaattacatagggtatgtcggtgggtctatatatctaaaaaaacatagtttatttagcgatgttttgagcaggcattttttcaagagcgacactgaaattagcattgttagtgatgatggaactgtgatctttaataacgataacagtgctgttggtcggcccatggttatgtctgatgatttgaaatcaaagttaacggagtctgatagaggtgagggggaattttttttttcggggaatagatatcttctgggttatgctcatatgaaaaatactgcttggaatgtgttggtttatagccatgctgacagcgcgactactattcttattacttatgctaaaagtgtacttgttctgctaattgtaataattattacattttcacttctttcatatttcattgcctcccgtatttcacttcctttagaaaagcttgctatatctaccaatgctaaagatataggggcttcgttagtttatattaaagctatcaatgcttggtatgccgaagctgatcgacttaaaaaggcactttttacgcatgttaaggtaatgatggaaagggttgattctttaaatgaggtggcgcttaaagatccccttaccggcgtgaacaatagattggggttttcaactaaaatacagaataacaagtatggggcaggagcttcagttattgctattgatgttgatttttttaaaaaaataaatgatagtttcgggcatggggtcggagatgaggtgcttgtttctttggctcagattattaagtcttgttgccgtagtgaagatattatttgtcggtttggtggagaagagtttgttgtttttctgccgaatacatctgtggtaacagcggagtgtgttgcggagcgtattaggagtgttattgaacgtactgttttccctaataacttgcgtgtcaccgtatctgctggtgtggcaacacaagatgatcctcttggtgggatcgattttttgctgaaaaatgctgacgatgctctttatcaagctaagagagaggggcgtaataaagtgattgtatatagcgctatttga

SEQ ID NO: 140469 - DNA, 216 bp, Enterobacter cloacae; identical to SEQ ID NO: 133521

SEQ ID NO: 140470 - DNA, 300 bp, Enterobacter cloacae
atggagaaaaaccggcggagcgtactgcggactgccgggcggacatggttcaccatcctgatggtgtcagcgctgctgatcggcacgagcgcgggcattctgtggtggcaggggcagcagatactcgacaactacacgaccatccgggagcagaagagcacgcaggccatgctgtcagagaggaacagcggcgtgcagctctcgacctgcggcgagcagagacgccgctgcgtgaaggtgaacccggaagcgggacggttcggagaggattcgagctggatgatactggcggggaaatag

SEQ ID NO: 140471 - DNA, 360 bp, Enterobacter cloacae; identical to SEQ ID NO: 140456

SEQ ID NO: 140472 - DNA, 540 bp, Enterobacter cloacae
atgtggcaatcgctttcagtaaaaacaaaaacattcaagggggagagtatggctggatggatggcagagcaccgcaaggcgagaatgatttgccctccgggtccgtgcgaagtttgcggagcgatgaatgccgaggtgcatcacaagaacgagaactggaaggatcacaggctggagaatctacagcgactatgccggagttgccatataaaggctcaccgctcagggaagaagtgcatgatgtgcgacaggccgcacaaggggctagggtattgcgagatgcattaccaacgcttcaggaagtggggagatccaactgttgtgaaggacaaccagcatacgaatttgcgcagggactcggagagcagaactataaccaagtgcatggtagaaggttgcgagggaaatcatcactcgaagggatattgtgccagacatgcgcaacaaaatcggcgaggtacgctagggagcacgagcagcaccaagcaggaagcaatgcaaaaagcatggtcaacgcgccgtttgcggtcagaagattga

SEQ ID NO: 140473 - DNA, 276 bp, Enterobacter cloacae; identical to SEQ ID NO: 36785

SEQ ID NO: 140474 - DNA, 357 bp, Enterobacter cloacae; identical to SEQ ID NO: 101071

SEQ ID NO: 140475 - DNA, 276 bp, Enterobacter cloacae; identical to SEQ ID NO: 118716

SEQ ID NO: 140476 - DNA, 258 bp, Enterobacter cloacae
atgctggtaccggcagacacatcggttggctggtttaaggaggctatccagaccgccagcgaggttcgcttcatcaccgctgggcggctggcatttatcaacccggtcaccggtaagccagtatcgggaaataacaaagggtcgatgctcatcatctggcgaccgtacccgcgtacacactgccacttcgcaacggtggaccgggacgagctgatggctttcgggacgaaacttctcgcccgcagggaggcagcatga

SEQ ID NO: 140477 - DNA, 231 bp, Enterobacter cloacae
atgaatgcaataaagcatgcccttacctgggtcgtacaaacattgatgttgttagttatttactctcttttatgttacttcctgccggatgtattcctgtatcatctctacacgaggcattttggttttgtcactgagcttgaatggagtgaaagctatacactatttctgttcattgtttcatttttgttcaatgccatactgatttatctttgggcattaagaaagtaa

SEQ ID NO: 140478 - DNA, 480 bp, Enterobacter cloacae
atgattcgctgcacttttcatttgaatggcaatcagctttctacattgagctgtcccggtttaggatttttccccgcgttttctggaaatgcgggttataacagaaataatcctgatgccgttgcaactgcggaagtaggccccttacctccgggactctattatattgttacacgtccacgaggcgggcttggtacccactggcatgacgcaataaaaggtttagagagtggatctaatcgtgatttttggtttgccctctaccgccacgataatcgcattgatgatagaacgttcatcaataacgttgagcgtggatctttccgcttacatcctgctggtcagtctggaattagtaatggatgtataaccttacctaaccactctcattacagaatactcatgcatgggttactcgcttcaggtacggtaaacgttactgctggattaaatgcgcttggaacaatacaggtatattga

SEQ ID NO: 140479 - DNA, 276 bp, Enterobacter cloacae
atgccttacagcgatgccctggcacgttcaccggtcatgtcgttacagagtagcaaggaacataaagtgaacggaatgaccgccagagccgtatgttccccctcaccccaaccctctccctcaagggagagggggtcgtctgtgcgggtattattttgtggggatccctcagcctttggtagagggccccgcgtgcacggtacgctatcccctattttcctgcctgcggatgcgtatcaaaccccgccatcaccgccgtcaattctgctagtgtaa

SEQ ID NO: 140480 - DNA, 174 bp, Enterobacter cloacae
atgagggggcacatacgcgaaatggcaaaaaaaaaccgccattatctggcggtaaatgcttgcatggatagatttgtattttggtctctacgtccccgacgctccatggtcgggctgcggatcccttacaaactaacactgattaacttaacgaaagctaaacagctctattaa

SEQ ID NO: 140481 - DNA, 849 bp, Enterobacter cloacae
atgtcttggcaaggtgtaccgttcaaacttctaaatgtaggcgatgttgaacaattttttttaaaagtttcgtctcttcctaaaataactatcgatacgcctactgattacaatcaactctggttaacggttggtgctacgttccttggtggtataattccagctttgatcgcgtggagaacatttcatgtaaacgcagaaaacgttagaaaagaaagagacgagcagcagcgtttcttaaagtctgaaagggcaaagcagcagctatttatgatgggtgagcgtgcctcgcaatttgcctcattgaaagaagaacgtgaaatacaaaaaacgcttgctcaaaaaacaattaatgctcaagtaatctcaaccaataggcaaaaatggattaatgattttcgtgataatatcgccgaattttgtttattaatattcagtcattacgatgcccgctcaagttatctgattactgagcgtaagttacggacaatagctgatatatataaagaaactaattattctgaggattttagagttcgttatcaggaggcaagtgacgaattttcacgttgtctggagaaatcgcagtcaactcataatgctatggataaaatgaagtttctcatattgctaagtatgaatccacaagaaaaagaaactcaagaaattaaacgattgattaattttttaaaaacgtcgattaataaattaattattgatgacgtttcggggggattagccaatgttagagaggtttatgctgaattattaaacggttcggaagaattaatgggggtagtagggggcattctaaagagagagtgggaaagagtgaagttatgtgaataa

SEQ ID NO: 140482 - DNA, 1119 bp, Enterobacter cloacae
gtggataggttgtacgaactgggaaaaagatttgatagattattatatatgagtattgttgttgttatttttagtttcctcacctgctccttattaatcacattaagcagccaaaatctatttgctttaataacctcatacaaagatataaaacagcaaatcgaagcaaaaagagaaaaaatagaatttatcgaaaaacaaattgcagccattaatgaaaacgtgtcggatgttctaggttttcgagaaaaattgaacagatcagagggggttacagtaagctataaatcaaaaatcgaaaatgaatttttttccattagaaaaaaaacaataaatgagagcctgattgaaatagaccttgatgaggtgaactcaattaacgagttaaattacttcatgtacgatgtgttgaaaaaagagattgaaaaatcaagtatgggctataatgcaagagataaaatagaatcggccctccctgaaaaaaataaaatcgcaaactatcatgatacaatgaactggttggatggaaaaataaaggatgagaataattcaaaaatagagatagtcaacatagaatcaaccttaattatcccatttaaaataggtgacatggcatctagtgtatcattgataagtatagcaaaaatagctagttatgctatgcctgtattcatggttttttggttgggttcactgttcgttacgcggagaatagagatgatgaatcttatgaaaacaaaggatatatcattaatatacccacatatttttaatattttctctgtggacacaacaaaatctcaagattttaatctttatctcttaggcgatgaaaagataagaaaacaaataaagtcctctatatctttaataaaagcaacaaaaggttttttatttatatcattagcactcgcaatgtgtgggccattgtattatggcgaaattatttacctgatgaactacaacataacctccctatcactatttattgtttcagttttttgcatactaataaatataatccaagtacttgggtatgtttactttgagtcaatttcatctaatgttatttatagaataaaaaatggtgtagttgataggtatgaacttgatttttga

SEQ ID NO: 140483 - DNA, 192 bp, Enterobacter cloacae
atgcaaaagtgctttgctgaatttgaggcaaagggatcggatcctgtctggttaggtgtctggaaacataacccaagggcaatctctttttaccgtaagcttgggtttaccgaggtgggtgagaatatttttcaggttgggtcagacccgcagagagatatcattatgaaacgctcaacttacgctagctga

SEQ ID NO: 140484 - DNA, 1119 bp, Enterobacter cloacae
atgaagcaggttggcatcgtcggttggcgaggaatggtaggttctgttttgttacagcgaatggtcgaagagaacgacttcgacggtatttctgtgcatttttacagtacttcaagtgcaggtgtcgccggtcctgtcattggtggcgtcggctatacgctaaaagatgctaattcaatcaatgccctgtccgaaatggatatcattataacctgtcagggcggtgattatactaaagcaatatatcctgatttgattgatcatggctggaaaggctactggattgatgcggcctcagcgttacggatggatgagaaagcctgtattattctcgaccccgtcaatcgttctaatattgatcgtgcaatcaaagaaggaattaaactttttgttggtggcaactgctccatcaccctgagtcttatggggcttgctggactgataaaggctgacttaatcgaatggatgagcgtaatgacgtatcagtctgcatcaggtgcaggggctaaatatattagagaattaatcgctcaaagcgcatatatcagtcagcatttatcctcagatgaactcatgtcatcaggatcggtgcttcctttagtcaataaagttagtgagcttattaacagtgctgacatgcccatccagaatttcggcgtacctcttatgggcagcatcattccatggattgatagcgatttaggcgatgggaatagccgcgaagagtggaaaggtgaggcagaaacgaacaagattcttgggctttctccaggtacaatcccggtaaacggtttgtgtattcgtgtcggcgtgatccggtgccatagtgctgccatcaccctgaagctcaagcgtgaagtcagcgaaaaagaattcgcaagcttagtaacgcattcccacccctgggttaactacgtacccaataacaaggatgaaagtgtcagtcgattgaccccagcttacatcagcggttcgctgcaagttagcgttggccgttacaaaaaaatgtccctgaataatgaccctatttactcggttctgacggtgggcgatcagctattatggggggcggcagaaccgttgcgccggatgttgaatattttgcttggcaaaatataa

SEQ ID NO: 140485 - DNA, 717 bp, Enterobacter cloacae
atgatggaaatatcctgtagggtttataaaatgaaatggataaaacaatatggtaaagagtttgaaagggatgctttaaggaaattaatttcaaaagtcaattggaaacacttcaaaccatctatcaaagctagccttataggtatagctgaagaattgaataaaaatggtatagaggtaagtgtttatgaccagcaagatgaaccagatggatttggctttgattcgttgagtttgcagtttaattctaaacttactggaaatatgcggcaggtcatagaaacagataaaataacatttaatcaccatatgcaatctggtggggtgttatccataacatatagtgctgttggtcatattcatattcttgttgaacctcctagaactgaagactctgtcgcagttcatagttatcttattctttaccaaacttatgatgcaaaaaatatcacaagtaaacgtattgagaaaagtgttaaaaacttcatccattaccaaaggtactcaggtgttctttatagaaagacatttaaagatagatgggtagtcagattgcttaaagcaaagatgtactttattcaatatcttgaacccaaaaataaatttataagatattcagctttatatattccgcttattagtatgattgttgcaacaattgcggcagtcgcaagcctgatagcagtatatctgacctatttgagtttaaatcattaa

SEQ ID NO: 140486 - DNA, 378 bp, Enterobacter cloacae
atgaacacgtcaccgtggaacaaagaccgtatcatcggccaaaaaagaccacttcagatatctcatatctgggggatccgaatccggcttgaactggaaggtaaaacgcgcgatttagctctgttcaatatggccctggacagtaagcttcgaggctgtgatttggtcaaactcaaagtatcggatggtgcatatgatagctcggtgtcaagcagagcaacagtgttgcaacagaaaaccggtagccctgtgcaattcgagataaccaaagggacaagaaaagctgttgctgcattgataaagcttggcaatttgcacagtaaagacttcttgtttcggtctcgggttggaactaaccagcacatttcaacccggtaa

SEQ ID NO: 140487 - DNA, 1692 bp, Enterobacter cloacae
atgactcacgcaagcaatgaaaagcctcttatttatttattgaacacacctctagacgttgaagaggatttacaggataataaatttaacgcgtatcattattggttgaatggtactgaagaaataaatacaaacttcagttttatagatattgattatgccaatgaatttccaagagatctccacgaggccgaaatcattgttatagacactttaccaactaatcatcacattgaagctaataatagcccaataagtgtccattataggaatttgccttcaagtgtgaacttcttacctcttgatatgtattttgtaattcataatattttccaaaatcgcagtaaacaaattgttgtgattttctgtgaaagtttcgataatgaatcatatcaacttaattataatggagtaacaaaccccccaataatcactaacacatatccttttcagcaaccattaaatttagcgcatagagtcggaaaaagaatatttttagcgaaaggtgatgaagaaaaagaaattaaaaattgcctctcaaagtatataaccaactcttcatataaattagtattcaccaacttatggggtaatgacacccctttgcttacaaatgaggccggtgagaacgtagcaatgatgaggttagtagataataaatcaattatctttttaccttctattgatgataaaaagggatttttattggagttgtttgataaggtgttgccagagcatccaaacttcaaaattttatttcctgaaaatggtagcttctcatggattagtaatccatcatatatttccatagaagaaagaaataaaataatcgatattgaaaatgaattaaagaggcatgaggaaacaatagcattattgaaacaagaatacgaaagcattcataataaagatgaaaatatcaagttaaggaacatcctgaaagaaacgggtgatgaacttgtttattctgtaaaatggttccttgaatatattggatttactgatattgtaaatcctgatgaaaaagtaaaacaagaagatactacccaaaagctctttgaggaagatctcaactttgaatacgacggtcttcatttcttaatggaagttaaaggtataggtggaacttcaaaagattcagaatgttcacaaatttcaaaaatagagttgcgtagaagaggtgaagataaaggtaaagtgttacagagaaaattcaaatctgtatatgtagtaaatcatcaacgttatagagagccaaaagagcgccaggcaatcccgtttacgtctgaacaaatcgaaaacgctcaaatgacttatagagctatgacttacacatatgaacttttcaatgtatatcatatgattgagaagggtattttgaagaaggaagctgtaagagaagcatttaagcaggatggtgtgataaacttccgtgagtcgctaatatctttaatttataacaattgcttcaagcgctatagtgtctattcatttacccttgatgggacttacaccataaccaaagctgacaagctggctatcctggataaccagtatcactggcatttgctggatatagtgaaccttcaggttaatacagttgatgtagaacaggccagcgaaggcaatgcaggtttactggtagcagagttggttgaaggtgcaaaggaatactatctggtgaaatcgtaa

SEQ ID NO: 140488 - DNA, 648 bp, Enterobacter cloacae
atgcataacactaacgttaccgttactgaccagaacaccgttattaactccaacgtggctttgtttgattcccagtatctgaacgccatcagcacgttcgcgcagatcatggcccagggcaccgctactgtacctaagcacctgcagggcaatcaggccgattgcatggctgtagcgatgcaagcagcacagtggcagatgaatccctttgccgtggctcaaaagacgcacctgattaacggtgtgctcgggtatgaagcgcagctggttaatgctgtcatttcacgcagcggcgtgctggccagccgctttgaatatgaatggtacggaccatgggaaaaggtcgttggaaaattccacatacgtaaaggcgataaaggcgagtaccgcgtcccgggctggaccctagctgacgaagccgggatcggcatcattatcagcgcaacgcttaaaggtgaagatcagccgagggaacttgatttactgctggctcaggcccgtacccgaaactctaccctgtgggctgacgacccacgccagcagctggcgtacctggccgtcaaacgctgggcgagactgttctgcccggatgtgattctgggcgagactgttctgcccggatgtgattctgggcgtttacacccctga

SEQ ID NO: 140489 - DNA, 261 bp, Enterobacter cloacae
atgaatttaaataacttaaaaaatgcacttgaacaaataatttttgaacttaatgccaatggcaaacatgaatcggccaatttttttcaaactcgttatgatcagataataaatttcggagataaaattccatttgaagtcgttgaaagtctgtcaacatgcagagcaatgtctcaatacgcaaacttttccctcagggaagaaaagctattggatgatgttgttaattacgcacttgatatcaaaaaaattacgccgtga

SEQ ID NO: 140490 - DNA, 390 bp, Enterobacter cloacae
atggggttcccgagtcctgcagcagactacgttgaagagcgcatatcactcgataagcgtcttatcgctcatccatcagccacgtacatgatggtagccggcacgacatatctgcgcgccgggatcatgaagggcgctatgcttatcgtcgactcgtcgctgacgccgaaggatggttctctgcttgtctgtgctgttgatggtgagttcaggattatgcgctacaggacgctaccgcatccttgcctggaaaacccagaaaatggaaggagggagccgttaccgatgaaagacgatgtgtcggatacatcgcggccggtgtttggggtgatcacgtactgcatcaacgatgctcgttctggtgagtttgataattgtcctgtgatgtaa

SEQ ID NO: 140491 - DNA, 468 bp, Enterobacter cloacae
atgaattggaatgagatattcacttatcgtgaaggtcatatctattggaaaattagcaccgctagatgtatacgcgtaggtgatattgcaaattgcatgggaagtaatggttatctgagggtaaacgtttataagaggagttatccagtacatagaattatttacgagatgcataacggagcgatagagcctgaaatgcaaatcgatcatcttgatgggaatccacttaataatgaaataaaaaatctcagagcagttcctgtgaatattaatcaacgaaacaggaaattatcttgtgttaatacatccggtgtagttggtgtttgtttcaataaaagaaaaaggaagtggaaggcttatatattcagagagcatctgggctggtacaaagattttgtttctgcatgcgaggcacgaattgttgctgaggtgtcaactggcggatttcatacaaggcacggaacatga

SEQ ID NO: 140492 - DNA, 246 bp, Enterobacter cloacae
atgagtaatatgggggcgacgaaagcaaataagagtggttttattggtgtgttctgggctaaaagagaaaggcgctgggtttcagctattactataaattataaatttaaataccttgggtattacgatgacccagttgaagctgccttggcatacaatgacgcttgtcgggaggctaacggtgaattttcgaaagaaaaaatcgaatataacctgtctcaaattagcgccctgaattcccagtaa

SEQ ID NO: 140493 - DNA, 288 bp, Enterobacter cloacae
atgggatttcaatattggcttgcggtatgtggaatttttctgaccggcccctttgcgtttgttcagtctattatctttttgcgacgaggtgtctacaccaagacattcaagggaacgacgcgaaaggagtacatccataaagacagcaagcctattgaatactggttcagcgttattgctcaaatgattattggcgttgtaatgattggatttggattttggttattagatgacctacctgcctttcataactggcacactgaaatccgcgcaatgctccctttttga

SEQ ID NO: 140494 - DNA, 273 bp, Enterobacter cloacae
atgactgaagttttagttttttggtctgcagatagctacgaaaaattcattgttaaaggcgacgttcctgcttctatatacattagtaataaaagcaataacggcattatcgagaaggtcgatttggatgcgataattgtagacaaccaagccaaaggaaccagaaaggcttattacataatttctagcttcacaacgcactcggttgattcaagagatgatatttaccctgctattgaaagagtcaacctgaagccattctcaacaaactaa

SEQ ID NO: 140495 - DNA, 231 bp, Enterobacter cloacae
atggatgttaaaatgaatgacgtggctgtatgggtattgaattataaatattcggccccaggattagaaaattgtgtagggatgcattttcttgctgctgtagagaacgaaacagaagaacagcttcaagatcgaatgtttgcagaagttgaagcaagctgcaatgaaaagcatggtagcttcatcctgaaatctgggagtatttctccctacaagatgaagacttcttaa

SEQ ID NO: 140496 - DNA, 183 bp, Enterobacter cloacae
atgaaatttgaatctttatttctgctggccttttacctcattccgctgatcgcgatggggattatcagtcatatcaattacaaaaaatgtcgcattcagttctcagcaatcagcaaaggcattcggtttcaaagaaagtaccaaatgctgaaaagccttcacccagaccgggagggcttatga

SEQ ID NO: 140497 - DNA, 498 bp, Enterobacter cloacae
atgaacgtgaaacgttatgagtgggtgtcctgtgatgagcatgcgtgccattgcgacgtggtagagagtgctgaaggcgatatggttgattacgaagactacgccgcacttgaagccagatgcgcggcgctggctgctgagaatgcagggctgagcgctgtactgatgtctgtaatttaccccagcaatgagcctgcctaccagagcttgggaatgggttgtggtgttgaggataacagtctacagactgatggttatggcgcctgtgaatatggctggcgcgaagctatggaacgcgtctactcagaagttattccagaagaattaccagaaaccccggctaccgacgccttcctggctgaagtgcgggcgcagggcgtggagatgttagttaaacactgcgagcagaaagcgctggaaaaatcctatgacttcttcatggatgccggagcggttgcagcacagttcgcggcccaacttcgccaggaggcccaatga

SEQ ID NO: 140498 - DNA, 576 bp, Enterobacter cloacae
atggacagcttaaaacaacgcatcgttgattacgtggccgctaaccagcctgttaagcgtgctgacctcattgtggtgattggcatcagtggtaagggactggaccgtgaaatcgctgcactgcgcaacctgggtctgattttcagcatggcgggctttggctacttcaccagtgaatctgactatcaggaatggcggaaaggcgctggcgctctccacctgaagaaccgcgcgttgaatggcgcattcagcagcgctgccgcacgcagagtgagcgatgagagttatccggcgcggatcgcatctgtactgagtgatggcagcaaactgggggcaactcaaattgctgaggccatgggcaccagttaccggagcatctccagcgttatttcggtgatggtcaactctggtgagctgaagtttgaaggcccgaaaggccaccgtgtttattcgttggcacaggcaaaaaagaaagcaggtcgccgtgctgagtcggtgaacgtgatctgccaggagtgccgcaatagcgcggcaatgaagcgagtattgatggtttgggggagggtaggggtatga

SEQ ID NO: 140499 - DNA, 543 bp, Enterobacter cloacae
atgcaatcacttgcgtatcaacacaataccggaatacacccgggagcgatgataaaccgcgctcaagctaaaaaggcgccagaccacgaaaagatccgcgatgcggtccgggcatggtcatcggcgctggacaatcaggacgtcgtttcggcgctgatcatcaacgaataccgggagcagggcgggaccgccatcagcttcccggaagacatcagcagggcgcgccagaaactttttcgctttctggataaccgtttcgactctgagcaataccgcgagaacgtgcgccagctgacgccagcaatcatggccgtgctgccgctggaatttcgcaaccgtctggcgccgaagaacgacacgatgtcgctgatcgcctctgcgatgaaagagtgtgccgaagctaagcaggccgtgctgctggacgctccagagcatcaaaagctgaaagaggtaagcgagggtatagcgtcgctgttccgcctcatgccggagcaggtagggccgctgatgacgatggttacatcgatgctgggggtcatgtga

SEQ ID NO: 140500 - DNA, 375 bp, Enterobacter cloacae
atggataccaaagaatgggttgatggccttcggtggcttcgtgacgagcagattgttgacttgcacttccagctccaggaaaaaatcaaagagcactataagatgcgcgatattggcgataatcttgagcgggccatccagttctgtgaacagcaggtggccttggctgaactggctttccctgcgttgaaagcaaaacacaacaagcaggctgatgagtacgaagctctgacgggtagtaaatccccagttgagttttacgcaccggcgcatcatggctatcggcaactgataacgatcatgaagaagaggaagcagttagatagagtggctcaactggaagcaaagaagcgctcagaaggatggagagattag

SEQ ID NO: 140501 - DNA, 429 bp, Enterobacter cloacae
atgaaacgcacacccttctatcgcaggcccgggcgaaccgggcaattctctggcctccgtgaacgcgttatctggatgattcagacgcgcggccgcccggtcaccggcagcgaaatcgccgagaagtttggcgtaacgctcatagagtttaaccgggttgccaacggcattacccgcggctcaggtcagatagcacagatcgttgagtcggaaaaatggctcaacgaggacggcatctgcgaccggacatttgacctggtaacgaagccaaaggtcattacaccgcagggtaaatcacgcctgttcacccggcgcgccattgagcaatcgcaggaaggcaggcggcaggagtgcattgaacgtgcagcacgtcgtagccgcctgattgctcagggcctctacatcgacgaaatggagtccatcctatga

SEQ ID NO: 140502 - DNA, 153 bp, Enterobacter cloacae
atgactcacgctcacgacgacatcagggttggtaatctgagccttcccttcattggtaacggctggctaatgccatggggtgaagtggtcagcaatccattaaaggcgcagcggctcgctgaggaatatcgggaaaggcaggaggcggcatga

SEQ ID NO: 140503 - DNA, 483 bp, Enterobacter cloacae
atgacagattcaacaatcttggacatgtgctgcggttctcgcatgttctggttcgataagcaggatgatcgcgctgttttcagtgatatccgcgccgagcagcatgaactttgcgacggccgccagttaatcataagcccggaccttatagctgatttccgtgcccttccctttgccgacaacactttccctgtagtcgtgttcgatccgccacatcttgagcgcgtcggagataacgcgtggatggggaaaaagtacggccggctgaacaaagaaacgtggcgcgatgatctgcgcgccggcttcgcagaagcatttcgggtgttgtggccacacggcgtgctcatcttcaaatggaacgaaacgcagatcccggtaagcaatattttggcgctgactgacgagaagccggccatatggcaacgaacaggaaaagccgacaaaacccactgggttatttttgtgaaaggcggcgcgaaatga

SEQ ID NO: 140504 - DNA, 387 bp, Enterobacter cloacae
atggattacagcaagctaagcgattttgagattaaccgggcggtggctatcgccataggttttcatcaagatgaatgtgatatagccaagcgtggatcaccttcggttggcgttgagtggaatgaagatacggggcttccaataagggtattcgactactgtaataacccggctgatgcatggccgattatcattggtaaaaagttaagtatcgtcaatgcagatgatgaatggctttgccttcctgaggataccgcagtggatggaatcaccggtgacggagttcagatgatttactcaggcgctgggattgtgcacgccaatcctctgcgcgcagctatggtgatgttcctaattattcaggatgaatcaaatgctgacatttaa

SEQ ID NO: 140505 - DNA, 396 bp, Enterobacter cloacae
atgctgacatttaagcacttcatagacaggccaacatgggccgcagctgctgggtattcgttcaattactttgactgtatgtcttatacggcaggcatgtacggcggcgttttcgtagctatccgcaatgtcttctatgacttttttagcacggagctgcgagagttacctctggttctctccgttttggttcttgctggggcaggtgttgttttatggcctgttattttctggataccagctatctggatatggattcgttgtcgtcaccaccgcaataaatatcaccgtggcagcggcatgacagaggcagccagaaataatcttaaagtctggaagtcgcaacttgaccgtgaattcagaaaagaatcgctgcgttcccagcgtgcggcatga

SEQ ID NO: 140506 - DNA, 327 bp, Enterobacter cloacae
gtgaaaccttacgaatcgaagaaatcgcagttcaccagaaacctgatccggcggcgccatgctgaatggtcagaaaagaccttcggcaatgtcggtccagtcggaccgctgaagcacctttcgatagaggcgctggaagctgccgccgatcctggtgacctcagcgaatgggctgatatgcagtttctgctatgggacgcacagcggcgcgccggtatcaccgatgagcaaatcaccgcagcgctggaagaaaagctgaaggtgaatatggctcgccagtggccgggaccgaaagacggtgagccacgccttcacatcaaaccatga

SEQ ID NO: 140507 - DNA, 195 bp, Enterobacter cloacae
atgcaaataactcttccgaagtggattgggtttctaattatgctgattctccgccctggcattactgcatcctgcgctgcatatctgatgctatatgcagatggcagttggtatcacttcctatctggcgcactggccttcaaatcctgcatcgaaactcacgacatttacaaagaggtcagagatgcaaggtaa

SEQ ID NO: 140508 - DNA, 1437 bp, Enterobacter cloacae
atgaaaatcagcgtatttaaagatcaaaagaaagaatttatttgccgtagcgccctaatggcgtcagactttttttggctaaatgcttctttaggactctcgtttctaaccgtcatgttctttattggcgacctgaataccttcatgccgatccgtcagatagatgtgcgtgttttatcacacgttattctcactgcgttgtgtgttttctggtttggcgtccgccttcgccactatgcacaaaaaaagccgttctggtcagagctaaaagaaacattacgaactatcgtcattttttcgatcttcgatcttgcattggttgcattctccaaatggcatttttctcgctatatttgggcctattgctggttatacgccattatcatggttccattatcgcgtgaaatcaccaaatctattcttaacaagttgggctactggaaaaaacgtacggttattctaggttcaggcaggaatgcgcgtgaagcctattttgctttacagagccacgaagtctcaggttttaaaattgatgcgttttgtgattttgatgcaactgacgatatgatggaagaatgtcccatagtcaaagacgaggagacattactcacatcttataattcattttcaacgcagtttgttgtggcgtgtgattttgatgaaaaagataagtttgaaaactggttaaggttcctggcgaaacataagtgccgaaatgtgattattattccttccctgcgaggattccctttatacggcactagtatgtcctttatattcagtcatgaagtattactgttgcaggttcacaataatctttccaaagcaacgtcacgcttcatcaaacggacgttcgatattgtctgtagtctgggtattctcgttgtttcgtcacctttgtttgtttatctctggtataaagtctcccgcgacggcggccctgcaatctatgcacatacaaggataggtcgtcggggtgaaaaatttgactgttacaaattccgctcgatgaatatcaattcgaaagaaattcttgcgcgtttgctagaaaatgacccagaagccagggcggaatgggaaaaagattttaagctcaaaaacgacccccggattacacctattggccactttattcgtaaaaccagcctcgatgaattacctcaattgttcaatgtgctcaaaggggaaatgagtctcgttggccctcgtccagtcattcatgaagagctggaacgatatgctgatgatgttgattattatctgatggttaagccaggaatgaccgggctatggcaggtcagtggccgtaacgacgtagattacacaacccgtgtctattttgactcctggtatgtcaaaaactggtctctatggaatgacatagtgattttgtttaaaacggttagcgtggttctttttagaaaaggtgcttattaa

SEQ ID NO: 140509 - DNA, 645 bp, Enterobacter cloacae
atggcccctggatatgtatgcattttaatcaactcaagcatgccaggattaattaaaatcggtcgaacgctacgcgactcacgcatgcgtgcgcgtgagctcttctccactggagtaccaacaccgtttcaagttgcttttgagctgtttgctgaacaacatgaagctctcgaggctatggtacataatgaattgaatgattttcgagttaatgcggcacgcgagtttttccgctacccactcgacaaggccgttgcattactaattaagctggcaaccccccttaaaaagtatgtggccgaggatataacgctacggcttagagaaaaatatcctttatatatacgtccagaaattgtagcggtaaggattgttcaaatgcccggaggtgtctggctagagattacgactgagaaagaaatcgctggatacctcatagagcagacaacccaacgaacagatctggcattcattgttgacacagacgaggcattctttcggccagaagatgatatccgtttaaatgcgaataagctggtaaatgattacgatatttactctgtcgtcatgactacggacctctttcatgatgatgcatgccagcaaataacacgcgcgcatcaagcccagagaattttagtctga

SEQ ID NO: 140510 - DNA, 975 bp, Enterobacter cloacae
atgtcaaagaccaaagtactttttgcttattgccatgagttagatcgatgtatatcgattgatgaagcaagaacagaattcttttcaagaaaaccgcacgacagacaacggttcactttctcctgcggcgatcgcaactgcaacgtcaccattagtggcgttaattaccatgtcaaagctgaagacggtaaaaagttcaaagttgcacattttcgttctccacatccccataatctgggatgtgaatggatgcagttttctgaggaagctaaccagccccgtcaatctaatgaaacagaggctgactacacagaaagaaaggcaaggcagaagctaaatgattttatcaattgcttcgatccttgtactgatgagaaagattctcagcaaaaagaatctggacaacttacatcactttcgcaggtaaactcccccgtcaaagacgatgatttgtctgacgagaaatcccacaagtggagtcgttatacacgaactaaccagctacagcgcctagtagacacctggcaagaagctaagagaactcttacatacgacgagtttagagctttaagactaagagtcacaaactacgggaatattcatttccataaatacataactcatattcagaaagggctaaaaagccaatacgcaggtgtcattttcggcggtggctctttggtgaaacgctatggtcgtggttttctcattaatttcttcgacaaacataacgataaaccaattcgtctgtatatcgataagaaccttatggagaaaggacgaatcagtcattatattgatgaaatattatcaacaggaaatgtgagatattttcgtgtctttttgttaaatccagaagtctccgaaaaaaaagaccgcgctggcaagccagttatgaaccttgagatatcaagcctgcaacaattggcgatttactacgaactcgactcttctgaagataatgattttgattga

SEQ ID NO: 140511 - DNA, 273 bp, Enterobacter cloacae
atgatggagaatcttaaaaaaacgatccgactgcgctgtgcattctgccgctcggaacagttcgccttaccttacgagggttacgcccccccaagtcatagcgttgtcgtttgtgccaactgtgggagggaaaacgacgtcacatctctgctcatcgttgctaaatcgaaagggatggaaatagctgaagattatgctgatgaactagttgaaaagatgacgaaaaatctgttcaaaacttttaaaaacagtaaattcataaagataaagtga

SEQ ID NO: 140512 - DNA, 543 bp, Enterobacter cloacae
atggacgcagagaaaattcagtcagatatagatgctcttttaacatatatgaacgatgacatggagaacctcggagagacgatcaaaactgtttcatttggatttgatatggaccagaacgatcgcattgctattgacgagcggcttcactggtctgaagagtatttgttcaaaatcatcaacatctgccattcccgttctcttctacgtaaggactatggagattttgaacatgtatccctgacagaagaaggccagagcagggctatatcagtcaaacatgggaaaaatcgttcttacgagttaggagccagcatgcaaatcgcgacgctaaatgttcatgggccagcacaagttggtaacggtaatacacaaaacattcacaatgtatttaatcaattacttcagcagatcgagaaatcctccgcttctgatgaagaaaaacaggaagctaaaaaccgcttggctaaatttttggaacatcctttggttggctctattgtcggaggtcttgctggttctcttccaggtctaatgggatga

SEQ ID NO: 140513 - DNA, 1704 bp, Enterobacter cloacae
atgccttacccatctcttgaacaatacaaccaagcgtttcagctacatagtaagctgctaatcgatcctgaattgaaatctggtaccgttgccacgacagggttgggtctccccctagccatcagcggtggctttgcactgacctatacaatcaaatcaggcgctaagaaatacgccgttcgttgctttcatagagagtcaaaagccttagaacgccgttatgaggctatatctaagaaaatttcaagccttcgctcgccctactttctcgatttccagtttcagccccaaggggtcaaagtcgaaggaatatcataccctatcgtcaaaatggcatgggccaagggagagacgctaggagagttccttgaggtcaacaggcgttctgcacaagcaatagcgaaactatctgcatcaattgaatcacttgccgcctaccttgaaaaagaaaaaattgcacatggtgatttccagactggaaacctgatggtttccgacggaggtgcaaccgtccagttaatcgactatgacggcatgttcgttgatgagattaagacattaggaagctcggagttggggcatgtcaattttcagcatccccgtcgtaaagcaacgaatccgttcaatcacaccttggatcgtttctcactaatttcactctggctggctcttaaagccttgcaaatcgatccgtccatttgggataaatcaaattcggaactggatgcaatcatttttcgagctaatgactttgtagaccccggttcatcttccatcttagggatgctatcgggaattcaacagctttccacccatgtaaagaattttgccgcagtctgcgcttcagcgatggaaaaaacgccttccctcggtgacttcattgcaagtaaaaacattcccatatcgctagcttcgatcagtatgaatggggatattccagccagcagactgaaacccggttatatcggtgcctacaccgtcctgtcagccttggactacagtgcttgccttcagcgagttggtgataaagttgaagttatcgggaagattattgacgtcaaactcaataagacccgaaatggcaaaccatatatctttgttaacttcggagattggcgcggtaatatctttaaaatatcaatatggagtgaaggcattagcgctttaccttcaaaacctaatgcctcatgggtcgggaaatggattagtgtaatcggtcttatggaaccgccctacgtcagtgggaaatacaaatattcacatatatcaataacagttacgaccatcgggcaaatgaccattctttcagaaacagatgcccgttggcgccttgctggaccaaacgatagtcgacaaatatcaacttctactagcagcaatcaggaagcattggagcgcattaagggtaagagcactacttcaacccctaagcctgtgagcactaacgccacaactgcaaaccaggcaatcctcaacaagttacgggcttctactcaaactgtagcaccagcaagagcgcaaactcagcatgtagtacctaataaatcatcaacgcattatgtagcaccgacgagaacatcagcttcacagccggtatcaccagctcaaagcattccgagtaagacagttacttcaaatcaacagacttctaagacaaatataatcataaagattttcaaatggctttcgagattgctgcattaa

SEQ ID NO: 140514 - DNA, 720 bp, Enterobacter cloacae
atgaaactggagttcttagggacagttccgaaagatcctgaataccctaaggcgaatgaagataaatttgccttctccgaagatgggagaaggttggcgctatgtgatggcgcgagtgagtccttcaactcaaagttatgggccgatcttcttgctcgtaaatttactgcagatccgaaagtaaatcctgaatgggtagcatctgctttagcggaatattctgccacgcatgacttcccttctatgtcctggtcccagcaagcggcattcgaaagaggtagttttgcgacgctaataggtgtagaggaatttgaagagcatcaggcggtagagattcttgctattggagatagcatcaccatgttggttgattgcgggaaactcatttgcgcatggcctttcgataatccagaaaaatttaatgagcggccaacactgcttgctacgctgtacgctcataacgatttcgtcggtggaagcactttctggacacggcatgggaaaactttttaccttgaaaaactcacccaacccaaactcctctgtatgacagatgcgctcggcgaatgggcactgaaacaagcgctggctgaggattctggttttatcgaattactttcgctgcaaactgaagaagagcttgcagagttagttctgagagagcgtgcagcaaaacgtatgcatatcgacgactcaacgctgcttgtactatcgttttaa

SEQ ID NO: 140515 - DNA, 834 bp, Enterobacter cloacae
atggcatacgaagctcaaatcagccgtactaatccagcagcatttcttttcgtcgtcgatcaatcaggttcaatgtccgacaaaatgtcttccggccgaagcaaggctgagtttgtcgccgatgctcttaatcgaactttaatgaacctaatcactcgctgcaccaagtctgaaggcgtacgtgattatttcgaaattggtgttttgggttatggcggtcaagggatttctaatggtttctctggttcactgggaggacaagtcctcaatccaatttctgctctcgaacagaatccagccagagtagaagatcgcaaacggaagatggatgatggagctggtgggatcatcgagacagcaattaagtttccagtatggttcgatcctattgctagtggcggcacgcctatgcgtgaagccctgaccagggccgccgaagagttggtgacttggtgtgatgcccatccggattgctatcctccgactattctgcatgtgactgacggcgaatcaaacgacggtgacccggaagagattgccaatcatctacgacaaattcgcaccaatgacggtgaagttctgattcttaatatccatgtcagttctctcggaaatgatccaatcagattcccctcctcagacactggcttaccggatgcctacgctaaactgcttttccgtatgtccagccctcttccggaacatctggtgcgtttcgcgcaggaaaaaggtcatacggttggtatagaatctcgtggattcatgttcaatgctgaggctgccgaactcgtcgatttcttcgatatcggaacccgcgcttctcagttgcgttga

SEQ ID NO: 140516 - DNA, 408 bp, Enterobacter cloacae
atgtaccattttgtttttgcccctgaagccgtcaccagacgaggggaatggataataccggagactgtcgagcagaaggattatgactcgcagttctgtgtcagttgtaaactgaaaattggcgttcatgtcgatccactgacgagtgtgaagagttttgttcaccaaccaagggagattcaacacctcaagcatttaaaggcttgcagattcaaccgaatagtcgaagcctctgatatgccaaaagatctagggcaagatttcccctccttcacaaagcttcggttgcgtcaggccacagtggtacagaactggcactgtgtctggtgccagctttgctggcatagcgaaaaatgctgtccgctttgcaaaaactggatatttgccattagttgtcgtgatgaatga

SEQ ID NO: 140517 - DNA, 1029 bp, Enterobacter cloacae
atgaacttacctgataacgttttatcatcacatgctgatatctacattgataatgaccagctgaatctggttattactaccgaccacgaatcaagagaccagatagaatctcttgatacctgtcttaaaaatctgagcaaatattcttcgttgccttttactgtcatgtttaatcgcactgattataagcagaatgaaggtgctatatggctgctggatgcactacgctatctggaaatactggagaaagcttacctgaataaccgtgtagccaatccccgtatcgcactgtttcgtcgactggtcaatcaaaccgatttaggtctccgtgttcgtaacgggaaaatattatcatcagacccaataacaacagctgagttgctgaacaagcttgcacaggattatcgctcagccgttcaccagcctgatttcaaaaaagcatacaaaaaatataaacggacttcggtgaaaaacctgaaaggtgcatggaattatctccttcatctgcagtcccgctattcgcgtcttctggtattacgggtggatttatcctggaatgatgaacataaatcagcgatcaccgctgatatggcccgtgcatgccgtcagaagctacttcgtaacatgaaaaagaatccattatttcgccatgtgctcggaactgtatggaaacttgagtatgctccttcccgacagtttcactatcacatgctctttgtgctgaatggtcacaaggcacagcaggacgtcagcctggcccgggcattcggtgagtactggaaagacaccatcactgaaggcaaagggcattattacaactgtaatgcgcacaaggaccgttataccgagtgcggtataggcaagctggagcgtgggaatacatcaatggaaaaagggttgcttaaggcagtcagctatctgaccaagattgatgcctgcgcgcgtctggtactcccggggaatgccaggacctttggtcggggtgaaatcaaagtgctgaaaacaagaaagaaacagcgcagatcgtaa

SEQ ID NO: 140518 - DNA, 204 bp, Enterobacter cloacae
atgaacgagattgatatttataaagaccggttcgttgatatgcttttcattactgaactgaccggccagtcagataagtggttttataaattaatacaggatggcaagttccccaaaccgattaagtttgggcgtaactctcgctggactgaacgtgaagtcaaagagtggctggaagaaagaataaagagttccagacagtaa

SEQ ID NO: 140519 - DNA, 1314 bp, Enterobacter cloacae
atgaacggaaacaagtcagatgtgaagctaaaaaacgaaagggaattaaggttttatcgatggttatacaaaaatgaatctgccctgctaaattatcaactgaagccgtttgttaatgcgataagtataagctatttatattctctggacattaagagggcatccagagtcattaactctgcagtgcgttccttttatcatcctgatatagctaatacatttggcagagccagtcgggggcacattactgaaagtttcattccttcacgtgatttcgcctggttcaaaaaatgtcaggatgcttgttattatgtctggattgcaataagaacaataaatatcaaaacacttccggttgcttttacttctcttgatgtaagcgattatggctctccatacgtaccaacaatattaacttacgattacctcgatcttattcagtatcctgcaagccacacagaacgactcctgacaatcactgatttctttgatcgctgtgattccagcttaaaggggaaaatagagctactgaatgccataagggccgaatggtatcgattgtataactacaaggatgtatttcctttaaccaagaaagaaaaagaaaaatgtgagtgggcatggaagtatcttcaaaaaaacagaaccaacataaaagcaggtgcaaaaaaaaggaaggaaaataaagagtcagagagaaaaaaacaggagaatagcagtcagggtgcgttacataacagcagtggcgaaatggatgctcaagataataagcaaacaccgcatatagtcacattggctcaggttgctcaacatatgccacaacagcacccgatatcaacattaactgagctcgctcgacattgcccatcttctgtcggttataacgattatgccactcacagttctctcaaacatataagtgaagattcagcaagcataaatactatcactttgatgcaatatcttaaaccgtccagcaatgctgagaaacgccttataattcgctgtctctacacatgttggtatcataaagactctggttttttaaagcgctttaataaagcatgggaaggcgtacatttcaggaagaagtatcgaatcataaaaaaatcaacgctatcacctgaaacgacagaggcagacgatactgatctcactgccagccaaattccatccattagagaattacctcgtgaaaaaacactcgcggaagcactcagggaagtgtgtgaacaaaaccagacatcaccttctgttgatgatgaagatgcaaacaaaaataacaataaaccattcatggattttccttattaa

SEQ ID NO: 140520 - DNA, 435 bp, Enterobacter cloacae
atgctgaagtcgccctctgccttgcttttcagtgctgcagtattcagtaccgcttcgcacgccgtcatcctggaccagcaatggggaagctggttcggcaccatcagtgcgatggaatttgaaattaacacagacaatgtcagcaacgagcgcctcacgcttacctgtactggcgggcatctggcccttgcctatagcgtaccggctgaagattaccgcgtgtcctctgaaaccggcctcgcagagccgggactgaacatcgattcaaaaacgtattcactgggcggagccgcttttatggccctgaaaaactccggtgaccgtggtcaggtcaccgtcacctccatgggacagaatctctcaaaatccttcaaaactgccggactccgggaggcgctgcaggacatcacctggcaggactgcgtcagtcactga

SEQ ID NO: 140521 - DNA, 357 bp, Enterobacter cloacae
gtgcgcaatatcattacattacttctgagtctggccgtgctgatgctgccttccatgtcatttgcactggatgtgtatggtgaggttcacccgcaacgttacaccttctttctgactcctcagggcggcaatgccctgaaggcggtcaatgacaaaacagccgctttactcaataccgctcagcagggaaatatgcgcgatgcgctcacggtgaacgcccttcagaaagagggctatgacagggtgggaattgcgcctttttatccttcagaccgcagtcagtctgccatacgcgatgacggtcaggcggtatccccatattatcaatgttgtatacttcaccaccctcaactatag

SEQ ID NO: 140522 - DNA, 1380 bp, Enterobacter cloacae
atggaatggtggttatattcgaagcagaaagatgctgacgtgaaaatgccgacgttagcgatcgctgctgtgtatctcgtggctattgttgtggggatcattcttgagatttttaactggcctcagaataaacaggtgacgctattttttttcttaccgtccgtcatacttccgctgagcctggtaacgtgtctggtatttgcgctgaaaatgatagtcagtacgtccgtaaattatgcagaaatgcgtaaatatattgcgaacgacaggacgttcaggctcaaaagttttgcgggtcaaaacatcgccattgcagcctggtcgaacctctctccggtcgagcagctggcgctgaatatgctaaagcttgaaggcgagtttccgctggcgcccaaaactccgctaaaaattgaagcaaccgaagcgtttgaccagatgccatacgaagctgtcttttcgcgcctgctcgcgccaatggccgataagctcaaaatgagtgcgtatcagctaagggagacatgcgtctgggttcgtgggggcgatgcgaactgtgttgaggatctgagacgagccatggagcgtctgaaaatacaccatgcgcgcggcggcaaaattaagttttacagcgagtgcccagactacacgattatcggggagtggatagcggcaagcgacacgtacatcgttaacaggctgctgatcgcggtcgatctgcatggggaagacagtgacagtaaacgaatggaaaacgcctgcgcttttttattcactcaccaatacatgcacgtagagggggagaagccagtttatttgtaccaaccgatgagtaaggtcacggacgtagaagaaacgatgccggtatatctcgaggttggacctgcgatgccccctaaaacgctctggtacaccggattatcccgtacggaaaaatatcccttgatgcaggcgctggatgctaaaagcgttgcgatggaacggctggaaatggaatcctcgctaggggaaaagagcgagggatacagatggctggcgctggcgcttgcggccgatgcggtaaaatatgcccagggaactcagctggtggccaattcagcaatgaataaattttccatcaccgcgctttcctcacaggaaactcatgtccccgaaacatgccgatgggacgtttggatccttcccttagttaacggggttatgatggggctctttttattattttcgttatttctcattatgataataacaaataaacccggagagataccttccataccggtattaggggcaagcagcatgctctctgtgttggttccggcggtaacaggagttttcctctctatcaccagctcaaaccgggcttgcagagatatgggatgctag

SEQ ID NO: 140523 - DNA, 696 bp, Enterobacter cloacae
atgaaaacattatgctcaggcatagctgcaactgccgtactgatggcttcaggctgccaggcgaaagaaccaccaacgcaggtggtctaccgttttgatgaccatcgttatctggagctgaaaggctgggactgcgaaggagagctctggtatacagatacgctgcggggaatacattctgaaccagtcagtcagttctatcgcatctttactaaaaaatacgtccatccgtcggagcgttacattgcgattccaacctggcattcaccaggctcaatagtctcaaaggattacggcaaaacctggtacccgtcctcattctcgcccggagaaaatgaaccgaatggagacaatgcccctccctatgatgacattctttccttcactgtcgtgaataaccagggatttctgcagacaaagcacagtctttatatgtcatctaaaccatttgacgacccgcgcgtgatgcccggaggttcaggaattaagtaccagcttgaaaatggagaagtggatgaaataacttcagatgcaccaggctggaaatgggggatggtgtatttcacaaaaggatggctggaaggaaaagtcgtcagacgagaatccaattatcagaatttgcccgatacgatcccggaagtgaaaggttacaccggctgggaccatatgcgctgtgacatggacgcggggcgctaa

SEQ ID NO: 140524 - DNA, 1101 bp, Enterobacter cloacae
atggattatatacgtctatatgaaaaagctgagaaggaatctttattgacatttaacccagccgagataaatgtcaaacaagagaattatagttgcgatcaaattctagaaatgcttgaatacaatgaaataaacctcaacacagattttcaaagatcatctgacttgtgggatgatggtcgtatgagtaaatttatcgaatccctatttttgaaattacccatcccgcctttttactttaatattgtttatttagacaataaccctgagaaaatccattgggaagtaatcgatggtttgcaaagactatcagctctacgcaaattttgctttggcgatcttaaaaatcgcaaattgaaattacaagagctagatttttttactgagttaaatggaaaacactacgatgaaatacctcggcatttaattcgaaatttcaaagcaagtcaattacaactgcatctggtttatcccaacactccctttgaaataaagtatcgtatatttgaaagaattaatacaacaaatttaacccttcgtgaccaagaggtacgacatgctttatatcagggcggtgttgttaaattattaaaaaaagccgtcactgaaattctaaaaaaaaataatataaatataaatgatgatcgtatggatgctcaagaaacagttctgagagcaatttcattttcttgctttggttattcaaaatatccgcaaggtagtaatttaaaactttttttagatcactcaattaaagctttaagtaagcttaatgagaaagaacttaaaattatctatgaggaattcaaatctaatttcgagttttgcatagaaatgctgggtgctgattgctttaagaacaaaacaacggaccgaagcgtctttaataaaggactattcgactctcttatttatgccgcgtcacaagttaagtgttcaagtaaaaataaaacattcattaagaataagacagaatacaagaaaaaatatgagcaatgccttaaacaagaacgcttcaaaaaatcaataagtaatgccacaagccgccaagacaatgttatatatagactaacaaaagcatctgatatatttaaggattga

SEQ ID NO: 140525 - DNA, 1107 bp, Enterobacter cloacae
gtgataactgaattgagaattaaaaacttcaaatctattaaagatgaatcattaagactatcgtctttaaacttgataacggggattaatagctccggtaaatctactttactacaaagcatactattacttaagcaaatgaatgcttctaaaactattatttcacttgatgaacatgttgttgaattaggtactatagaagatgctcttcatcaattttacagagagaacaaaatagaaataggtttaacattaaatagcaaagagtcgttcttaatgtctattgatgaacctgataaaattttacaacaagactatgcttctataattctagatgggaataaaagttttttaactagactattaaaaaagataaaatatttagctgctgaaagaatgggtgctgaattttcctatgaacttggtagtaacaaaaatcatcttggtaaaaatggtgaaaatacagttagttacatatttgaaaatagaaataaaaacgtgtcaactaaagatttaatacatcctaactctaaaaaggctgaagggatcgaggataatttattgaccaatatcaatgagtggatgaaggaaatctctccaggtattaatttagaatttagttcagatcaaaagattagggcatcaagtatgtctgcagtctattatagctcaactttgtttaataaagtcacgcctaaaaattttggatttggaattagctattgcttacccataattaccctcttgcttacatcaaaaaaaaatgacgttattctcatagaaaatcccgaagcacacatacatccgacaggccagacaaagttaggttatctatgtgccatcgcggcaaaggcaggaattcaacttattattgaatcacatagcgatcattttttcaatggagtacgcctagccctaaaagatggcatcgtaaaaaaaacaaacttagcaatatattattttgataaaaaactagagggggaactatctagtcaaaatctttcaactataattagttcagttgagctgcatgaaaatgggaaaataaaaagcgcccctgagggttttttcgacgaatggcaaaactcattgtttaaactgttatga

SEQ ID NO: 140526 - DNA, 876 bp, Enterobacter cloacae
atgatatatttaaattcactatcaattacatctttacaatctttactaggaagccaagattccttaaaaaagacaatggaatttttgagcctaatagagggtaaattccttttatgtgtaccatttaacaatccaaattacataattcaagataatatatcattaaagcaagctgttaatcatattacagacattgatttaaaatccttattaaccacaattctaacagatagcacaacttatcttggtgaatatcccagcgattatttccatcagggtaaaaattctttctttagtgcttttgatacttatttagcaatgaatgatcaagattgtattattttgtctttacacagtgaggcttattgggttaacaacactattccattgataaataactcagttataagcaatcattttaactgtccgacaactaatttcagcacctttatcgatggaattcatgtatgggagccattgataaagaaatttattatgaataaaaaaaagcaaggaggttatctttgccatgccatttcagttaagcatttgattccaagtgacatttatagtatttatctacaggaaataaatgatccaaatgttaagatcacaaatattcgctcaatggcaaagcttgtagcagagtgttgtggttatgactttatgcaagatatatcaaaccgtaacagaactggatctattattcgtgatatatattttaattcagagaaggatgtatatatttcaacagatatcaaccacggtagattcgaggttttggataataatggcactcacatatgtgaaattgattttgaaggcacacaaaccaaaccaagagacacaactcgaagacataatatacgcttatag

SEQ ID NO: 140527 - DNA, 492 bp, Enterobacter cloacae
gtgaagcagggcggggcgcatatcgaacagctttcgctgggggtttatgacgccgttcgccgcttgctgggacggctgcgtccgcgccagcttgacgacctgtcacttgagcaggcgatacgctccctgatgcgcgagatggagctggaaagccgcggcattgtcagccatctcgactggcgaattaatgaatctgcgctgagtgaaggccagcgcgtgacgctgttccgcgtctgtcaggaagggctgaataatatcgtcaaacacgccaatgccagcgcggtcaccattcagggcggccagcataacgatcgcctgacgctggtgattgaagacgacggctgcggcctgccgccgggctccggccagcagggttttggcctggcgggcatgcgcgagcgcgtgaaggcgctgggtggcacgctggctatctcctgtacccacgggacgcgcgttagcgtcagcctgccgctaaggaaccaccatgtttaa

SEQ ID NO: 140528 - DNA, 309 bp, Enterobacter cloacae
atgggtgccaactataccaacgatccggtatggataatgaccctgatggcagtggcgttctttggtaatggtttcgcatcgattacctggtcgctggtgtcgtccctggcaccgatgcggctgatcggtctgaccggcggtgtgttcaacttcgttggcgggctgggtggaattaccgtgccgctggtcatcggttatctggcccaggattacggttttggcccggcgctggtttacatctccgccgtggcgttgattggcgcgctttcttacatactgctggtaggtgatgtgaaacgagtaggctaa

SEQ ID NO: 140529 - DNA, 1068 bp, Enterobacter cloacae
atgcagatgctaacctctgattttaaaaagtcccatatttcattaataatcaacggaactaaattagaaaggcgagttgatgttgaaaataaaaacggtgatgtttttatgtcagactattctcttggcgcagactttagcataaaaataaacttggaagattatattttcgctaatttaatcttcaaatataaaggcgttgagtttgacacaagctttaatgttaaatgcttagttggtgaattggatattttcaaaaatagtgctgggtattggttaacgatagatcgaaaaaaaggtcgaacagacaggcataaagaaattgaagatattataaatcatatacttaaaactcattcttcaaacttaagagaaaatactaaagatgataagttgtctgatttttatttatattctgtgactgggcagtctattaattatgaatggaaacaatatgaaataaatggggtgaaattagagcaatatataaatggggaaaacgatctttttgtttatgcacacaagtatggttttttatataacacaaaattcaatgacattgacctaaatgttatgcatatactatctggtattttcaaaagagaaccattatctctagctgttgaggaatactatggcgatttgccttttgaagaatctgaaagatatgatgaagatgatggtgttggctttatattcaaatttaaaaatgatggattaaaaacttttacatgtccgtcatcattattaaaaaaagaaattcaattgaatattactgaatcacctacgagaaaattaatcccgtgctataacgaatattacagcgacatatccgtttgcgaaagggatataccattaaatataagtgttggttcgtcattcaatcgttgggttgataaattcatattcacaccaatggcttcttcacctccaaatgagattgatttggaacagcagttatctatacttttaaattattatatgtcattacatatattaagttgtactgaggctagcttcaaggctaaatacaaagagtgttggcttgagttggggcttattaattaa

SEQ ID NO: 140530 - DNA, 591 bp, Enterobacter cloacae
atgctgaacccaggattcgttacccgcaaagcgcttgctaactggcaggatgttcccacttttctcccccagttccagtttcatgaaaaacaccaaatggtcatccacacttcccaccctgaaaatattctgccgttgattgcaaactttgacattcgtcaggatgccgtgattcggcggttaatgtctttgcggcaaataccgaaaaaattattacggaataaacaggccgggtcgatgagtaactttgggttgcacagttttacccttttgacccaatcagcgtcagagatctgttacgggttaagaggacaattctggcgtacagatttcaaccttgaaaacatgccagatgccagcgcttttcagacgccagtcgctgcgggtaaagcaaagctgctgctgcgctatcaggtaacggaacgcgcaccaggccaacatgagctctccacggaaacctttgtttattgtcccgacagaagcactcagctaaaaatgacagcttactggctggtcattcgggcaggcagcggctggatccgtaaaagaacgctgaaggcacttaagtcgaatattgaagggctggagtga

SEQ ID NO: 140531 - DNA, 789 bp, Enterobacter cloacae
atgtctgccatggatttatccaaaatgggcactgccagagtggctctgaataccagtgattgtgatcatatagttatagagaagtggcctgtcagcgaagttgagtgggccttttataaatacgtggcaacagagcttaatcaggcagtggttgcaactcctaagctcttgtctgctgatgcagccttacgccaattaagtatggagtatattccttactcggttgaacaagccaatgtggcaaatgattatgccatagctatgctgggccgcctgcatcgttatcctgcgcattctgaatggctttatcacactcatacatggacagaaaaagcgttagaaaactctctcgtgcttttggcgttaccagaaaaaagtgcacagcagctacgacgatttcagcaatgtagtaatgagttatttggctaccaaagcctggtttcaggcgacagcaacgcaggcaactggggaatgagagaaaacggtgatttagttctttttgactgggaaagatttggcaaagggagtcctgctatcgacctagctccccttataaagggaatggggaaaaaacaaatgtttatggccctttcagaacgctattgcgagctatcctcccacaaaaatatcatagatctggccagagaaattgctatagccaaagcctggattgtcacggaagtgattaccctacttcaaaagcggcaaaaggctgcatttcccatttatctaaactggtatagagagcatcttccagactggttagacaacgtcaaaaaaatgttatga

SEQ ID NO: 140532 - DNA, 369 bp, Enterobacter cloacae
atgactgcgaaagatcagtttgctgctcatgttggtttggactgggcggataaaaaacaatatacctgcgttcagtttaaaaacggtgatcgcatatttcatatgattgaacatacgcctgagacacttgatatctggctcaatgagttacaccagagagcgaaaggcaggattgctattgccgttgagctgaagaaaggcccggtggtgtatgcactccagaagtacccatttgtcactgttttccagtacacgctttgtcactggcccgctaccgacatgctttctggcccagtggtgcgaaaaatgatccgccggcattggcttataacaaaccaagaccaaaccagcgacaaagccaattcttga

SEQ ID NO: 140533 - DNA, 1695 bp, Enterobacter cloacae
atgtccaatacattaacaaaagtacaggatgcaaacgctcgccgtggtggtgatgtactattagaagttcttgaaagtgaaggagttgaatacattttcggcaacccgggcaccacggaattaccgttaatggatgcacttttacgccgccctaaagtgtcctatattctggctctccaggaggctagtgccgtagcaatggctgacggttatgcccaggcatccggcaagcctggtttcctcaacctccacacggcgggcggcttgggtcacggcatgggcgctttacttaatgcggcctgctctcaaactcctttagtggtcacggctggccagcaggatacgcggcactttatgaccgatcccctgctgcttggcgatctgtgtaatatcgcaaaacctgccgttaaatgggcgcgtgaagtgaccagcgcggatcagcttcccgtgttgctgcgtcgtgcatttcatgatgccgacgccgccccgaaaggcgcggccttcctgtcgctgccaatggatgtaatggaggaattgagcactgttaacatcggctctccgtctaatatcgaacataaatctgttgcgagttctctgcctctgctagctgaaaaactcgcggcgtttgcccctggtaaagtggcaatcattgcaggcgacgagatcagccagtcccaggcggctaaacaggttgtcgatctagctgaaatgctcgcggctgacgtgtacggctcaacgtggcctagccgtattccataccctaccgcccatccactatggcgtgggaacctcacgacgaaagcaacggaacttaataaggcgctctccggatatgatgcgatctttgcgctgggtggaaaatcccttatcactatcctgtattcagaaggtgacgcggtgccagcatcctgtcaggtgttccaactatccgccgattctggcgatctggggcgcacttacgttagtgaattgtctgttgtgggtgatattgcgctttctctcgatgcgctgttacctcacctgcacaaaaccaccgcggatcgtcgctctgattacctgcgccgttttgatgaggccaaggcaaaatttaacgctgacaaagcgaatcatgaggagctggttaacgaacaatacaacgcagctgtaatcactccggtagtggctgcgttcgaggctgcgcgtgcaatcgggccagatgtggcgatcgtggatgaagctatttcgacgtcggggggcttacgtaaagcactgaacagtcctaaagccgatcaatatgctttcatgcgtggcggcggtctgggctggggcatgcctgcagcggttggttactccctgggattaggtaaagctccggtggtgtgttttgtcggcgatggggctgccatgtactccccacaggcgctgtggacagctgcgcatgagaaattacccgtcacgtttatcgtgatgaataatactgaatataacgttcttaaaaacttcatgcgctcgcaggatgaatacacttcagcccagacagatcggttcatcgctatggatttaatcgcacctgccattaattaccaggctctgggcgcttcgatggggctggaaacctgcaaaattcatcgcgcctgtgatatagctcctgcagtcgaagccgcgattgccagcggcaagcccgggttgattgaaatcatgatcagcaaaggttaa

SEQ ID NO: 140534 - DNA, 915 bp, Enterobacter cloacae
atgatgaaaccgacttttaatcaattaataagcttttgtactgtggcagaagtggggaacattggtcgtgcggcggagaggctgagcatttcacagcctcccttgagcaggcagatcgcacagcttgaaagcaacgtaggggcgaaactttttacccgggatgcgaaaggcgtgaggctgacaattgccggtgaacaatttttaacagacgctcacgcaatcttggcccttatgcaacaggcctgtaataacgtgcgagcagtagcggatggacaacagggatttttgaagcttgcggcgactatgtacgcgtcctacagcgtggtaccgcaggtcgccatgcgacacaaagccagttaccccgacgttaagttgctatttaaagagctggtgccaacggacttaattagcgccttacaggatgggagcattgatgcggcaatctcatttggagagcccaccacgtcagatattaattctcttgtgattttgcaggagccattaatagcagctttaccggccaaccaccatttcgctgataacgaagcgttaaacctggcttgcttgggggacgatcagtttattaccgtgcctcgagctatggcacccatgctgtacgacactattctaagccagtgtcagaaagcgggttttagccctcatatcggattagaggtatcaagccagcagacgatcgttaatttcgtggctaacggatttggggtagcgcttattccggcaagtatgcagcatgcgcaaatacgaggagtggtttacaaagaactcgcaggagcaaatacggtacagaatgttttaatgtggaatgcgagaaacaaaaacccgagcctaaagcggtttttaagcctgtgccgcgaaatccgtgacgaactgaacacagcacaggctggagagtaa

SEQ ID NO: 140535 - DNA, 129 bp, Enterobacter cloacae
atggaagaacgcgccatcaagttagccaggcaaaaagcgcactataagctgcacaatgccgaacataaggtatatgaaggctacagggattttttacgccgccagatcgccgctacggccgtttcctga

SEQ ID NO: 140536 - DNA, 786 bp, Enterobacter cloacae
atgaagcagagcgctgttatcattggtgcgggcataagcggcctttatgccgccacgctgcttgaaaaagcgggtgttgattatgtgatccttgaggctcgtgacagaacgggcgggcgcgtgctgtctggcctggaactggcgggcacctccgctggcattcatgtagatatgggagcagcgtggttctggcctgatattcaaccggacttcgcgcaactgatcgagcggcttaatcttccggtaatgtcgcacggccgtccgggtgacatgctctacgaacgccagctggattcgccccccgaacgctacccggcatgggagagctccccggcgtctttcaggcttaagggaggaatgcaggcgctgacggcggcacttaaaagtcagatcccggctgagaagattaaaatcggccatcaggtggtggcggtttcccgggctggcaaggaagtgcagatccatacccggtccgaaggcagtaaaaaagccgtattttccggtgagcatgtcttcctcgctttgcctcctgccctggcagctaaaatagatttcagaccggcgatgccggaacaggtactgtcaaactggcggaaaatcccgacatggatggctccccatgcaaaatatgtcgctgtatataaaacagacatattgcatgagcggcagctttcagggaatgcaggaagccgcgtggggccaatggtacgttcaacgtttagaaagagcgagaaacagcgccggccgttaagagcgcatctatggaagaacgcgccatcaagttag

SEQ ID NO: 140537 - DNA, 519 bp, Enterobacter cloacae
atgaccacaccaagagtaaccccctggcaggatgaagagcccgttgacgccaatcttctcaacgcgataaaggcccgtcggcccggcggaaaactgatagctattgaccgggtattactgaagagtgcccccatggccacgggctggaacgaactgatggtacgggtacgtcaggaattttcgttcagccttgaatatcgggaactgatcatgctgcgtgttgcctggctgaataaagcagaatttgaatggaacgtgcattaccctgcctatctggatgcaggcggaacggctgaaaaagcagaagccctgcggttatcctccgtgccacacatctttaatgacaccgaaacgttgctgatacatcttgcggaccagtccacacggaacgtcgtggttgaggagaacatcatcggggcgctgaaaagcctgttaggtgaaaaagagaccgtggaagcggttgccactgtcgccgcctataacatggtatcccgttttctcgtcgcccttgccatctga

SEQ ID NO: 140538 - DNA, 885 bp, Enterobacter cloacae
atgatgaatcttttacactggcgcttactggttgccgtggccgatgccagtaatatttcgcgtgccgctgaagaggtcggcatgacgcaatcgggtgccagccaggcgatcgctcagttagaggcttcattaggatttgcggtattcacgcgtgagcgacgccacgtcggcgtgactgcccagggtgaacgggtggtcaaagaagcaaggagcatgctggcgcggctggacgccatccgcgtactggcggataagagccgggggctgagtggcgggcgcattcgtcttgccagttttccctcggtgacagccacatttttgccaggactgctgcgcgactttaagcgcctgcatcctgaaattgaggtggtcgtactcgaaggaacggaccaggaggtcgaagagtggctggcggcagatacggttgatgtgggtgtggtcatgaaccctgttcccggacgtgctgaagcgatcttaggacaagatgcatgggtcgcggtgttgtcggccagtcaccgtcaggctcgctatgtacgttcgcgcggcatcacgcttgaggaactggcggaccagcccttcgtgctcgccacgggcggttgtgccgtcaacggagaaagcctgatggaacaggctggtttgcagctgtctgatgtacgtgtgaccgtccgcgactggatcagcgcctgcttgctggtacgcgaaggcatgggcgtcacgctgataccagaatccgccctgcctggtgaattacgcgggttgtgcgtcgtgcccgtgacgccttcactctgccgggaatttgggctggtttgttcggcggcgggaaaatcttcccaggcaacgcaggcgttattagaagggttgctcaaaatgaaaagatctgcgtga

SEQ ID NO: 140539 - DNA, 564 bp, Enterobacter cloacae
atggattactttcagactagtgggttattgataaatatattaacaatgttagttgccgttggctcatcatgtattagttaccttgtttacaaagagagcacctacccagacgtcattgtttacctcgaacaaaacaatgaagtcaaaactgttttaaatattgtaattaagaatataggtaaaagtgctgcaaaagatgtaaccttcagttttaatgaaaatacctttaagaattcactgcctaatggtgagcatagtgtgttaacgaaaggtgcattggtttcaggcataccattccttgcacctggttcaggcaggatattgaggcttggaaatttcgctgattcgaagaaaattttaggtgaccacaaaattagagtaactacaactttccgtaaagctaatagcaagaaccctttcgcaaaaaatattactaatgaaagttatattgaattgttatcgttggctagggtggatgcctcagataacagtaatgagaaaaagattgctgaaaatctagccagaattgagaaagctttgcttaatatcaaaacacaacactaa

SEQ ID NO: 140540 - DNA, 2343 bp, Enterobacter cloacae
atgtttcacaaaatcgtcaagctaaataacattaaacaattaaatcatatatcacctcccgaccatggatttgggctattaaatttaatttatggtaataatggtgcggggaagtcaacaatttgtaaagtgcttaatatacttaatggaaaagactgttccttgttggagaggttaaaatctattgagtgtaatgcgaatgacaaaattgactttaattttctatttgtggagaatgaaaaaccaaaatccattactagtaaaaatatagaagagctaaagtggaattttaaagtattcaaccaagaatttattgataataatgtttatgcgggttccaaagtagccagtagtaatttaaaaaactatcatgatttttgcttgggtgatgcttcagttgaaaaacagaatgagataaatctacttaagattgaaaatgaaacaaatatcaatttagcaaatgtgataaagcaaaaagtcgagtcaaaattcaactccaatatggatttgaagagcgttattaaaattaagagtaagaaaaaatttgacgtggaagcagaacttgaaaatttaaacaaaaaactcatagatatatctgatgtatcaattattaaattaagacccaaaccaaaaagaatctcttacgcaaagcctgtaattgatttaaagttcttcgatatttcattagatagtatatctaaagaagctaaaattaaagttgatgcccatatagcggaacatttgaaagaaagagatgttgcatggcttgagagtggagttgcactgataacagacaaagagaattgtcccttctgcgcgcaacctctaagtaaatcaccaatatattcgatgttcacggattttttggggaatgagtatgataatgctgtttcaaaatttgaaagtgatagttctagtgcttatctcaaattatcgcagaagtgtaaggatttagatggaataaaaaatattatagaaagcaatgaaatagcaataaatacatggagggataaagttcaactggaaaatttaaattacgataacaattctatagtcgaatgtttttatgatctgttggctgaactcgacagcgcagtgcaacagaagttaaaagatattttccagccagtagatttctctgctcttgagttgaaatttgatgcgttatttaatcagattgattttgatatatataatcagaatattgataagttgaatgatgtaatagatgactatctattgactctagataaagaaagtatagatgatgttaaaaggagtatcttagatgcagaaaactataaattaaaacatcaagaagatacaatttctgatttggcgacttacgcttcttatgagaaaaaaagaaaggataatgaagcgaaaatcaagtcgttaagagaagagatagcaacagaacaagaagaattgatatcaaagcataaaactgaaattaacaatttacttattggttttaatagtaacatcagaatagttgaaataaatagggacaataaagctggaggtggtaatactaggtttaaatttaaaatcgcctttctaggaaaagaattatctttagaaaatgaagaggaaagtaaatttttacttactgaagctatgagcatgggagacaagtcagcattagctttagcctttttcctttctaaatttaaaagtaaagttaatgaaaatgatatcatagtgtttgatgatccaatgtcgtcactagatagtcacagaagaaataaaacgatagttgaattatctgatatattaaataaaggaacacaagtttttgtttttagtcatgatgctacttttttaactgatatgaaaaagtattcaggaaacgcatccttcacaaagtgttatgaattatctgttaatatcagtgatttaaatgaatacgatatcaacagttctaaagtttttaaatcgaaaataatttataaaaatgattttgactcctatgttaagcattcatatgagcttgaatataaaacattacatgcttttgttaagtgcccgacagaagagatgaaagtggcaaccgctagattaatacgtcctattttagaggcttatatgaggatgcatttgcctaatcactttacagaggggcattggcttggcgaaatgattagtcttattagaggcgagactgatataaatagcccactatatgatagctcaaattgtcttgataaaattgcgcaaatcaatgatttttcgaaaaattatcaccatgctgatggttttgatactaagattagagagttaaatgtacaggagttacatgttgtagcgaaagatactcttttattcattacaggtatttaa

SEQ ID NO: 140541 - DNA, 312 bp, Enterobacter cloacae
atgaaaaaaggtaccactgaaattattgaacgctggacccatttagcggtcgaggccaaagagctggggctcgccaccattcccatcgatccggaaaacatgttgatggtgctgggggatctgccggccagttcggctgaaaagtcagccgattaccagaatgactatcaggctgcgatcgacattctgcgcaagagagcggccagcgaacttgatggcggttttagagcgcaccacaacgcacttatctatgcggcaaatgaactggaaaatgcccaggcatttgggcgggaggtcagtcatgagtcttga

SEQ ID NO: 140542 - DNA, 387 bp, Enterobacter cloacae
atgcaaaattccgtcgcaattaatcagccagttaaaacccctcaaatgctgttcggatctgacaacatcaatgactttggcaaccgcgtacaaagctgccggatggaaggtgattcaatgcagccgaccatcgaaccatgtgaggttgtggctttcgttgattgcggtggacgtgcgcttacctctggcatttatgtttacacaatggatgcttttggtcgcccatgccttttcattaagagaattgagccattagctgatggctcattaaaaatcatctctgataaccatcattacgaaactttcatccttaataccgatgaacagaaagaaatcaaaatttacggtcgggtggtggcttctttggctgtgaggcgcttcgtatga

SEQ ID NO: 140543 - DNA, 219 bp, Enterobacter cloacae
atgataactgatactgtagttctcaataaagatgaaacaagctctatggtcatgagttgggcgcacgatataacttgttgttcatcttcattatggttactccttgaaaaaatgacctccgaggaagaaataagagaacacgcattaattactttagttgtaaaaacattagaagaagtaaacgaacaaataaataacttcgaaattaaatcactataa

SEQ ID NO: 140544 - DNA, 216 bp, Enterobacter cloacae
atgagcactcaacaattggtatctgaaaatggtcccatccaccagctagctatggatattgatcgcgtggtaaacgtgcttgaatatgccgaatctgatccagatactggctataagccagcagccctcattcaaatttgcattaaccaattaaagaaaaatctttcagttataaatcgcgaaatcgggcatgattggccggagaacaaacaatga

SEQ ID NO: 140545 - DNA, 225 bp, Enterobacter cloacae
atgagcggtattaagagcctaaggctgaaagcaaaagtgacccagggtgagctggcagcgttgatcgctagctctcaaggggccgttagccactacgaaactggtcgtcgaatcccagatattgaagttgggaaacgcattgtgagcgcctttaagcagctcggatatgaaaccagtctggatgaggttttttccgatgaacataccggagaccaacttcgataa

SEQ ID NO: 140546 - DNA, 318 bp, Enterobacter cloacae
atgaacataccggagaccaacttcgataacgcactgctgccagatacccactcacaagctgatgccgagtggattaagcagcagttacttagcctgacacctactgcacgacaaaaagctatccagcgttatgcagctgtgtatcaggagacgttcgaggctgaacccgtttcctaccgcaaggagaaccgggcaaggcatgaagcaaacacaaggcttcgcctgtttgtaagaaatcagggcagagctttacaggggtataccgccgaacctcccctggctggatcgcaatcgcgctcctcattgtttcgggtttaa

SEQ ID NO: 140547 - DNA, 783 bp, Enterobacter cloacae
atgaaactggaagcatcactcaaacattttagtcctcagggaatgcacatcagcgacgacgtgaaaggaacctctccggatcgtatcaccggcaccgatgttatggcggccattggtaccaccagcagtcgagcgcggtttggcctggctgccttctttggtaagaccgggatcagcaaaagcgatgagcagttggctgtacaggctctggcgcgtcatgcaatggaatcagcgcccaggaatgtacgtaaagcagctgcaggcgagtttggctggtgcatgcaggtgctcgcacaattcgcctttgccgaatactcccgttcagcggaaaccagcgtgacgtgtcacagctgcggcggcagcggattaacctctcagtatgaagatgtgatcaaacatcctggagtcttcaactctgagggaatggaaatcgtcccgccgaaaatcaagcacgaactggtcaagcgtaaatgcgcggcatgtaacggtaaaggtgagctgttggctcgatgccgctgcggcggaaaaggtcaggtgctcgatcgcaaagccacaagcgagcgcggcgcgccggtgtttaaaacctgcgagcgctgcagcggaaatgggttttctgccgtatcatctgcaactgtccatcgcgccattttgaagagactcccggatctccatcagtcttcgtggtcacgtaactggaaaccattttatgagaggttggttgatacgctgatcaaaggtgaaaggcaagcggcggaagagtttgagaaggctacccgttattga

SEQ ID NO: 140548 - DNA, 582 bp, Enterobacter cloacae
gtgattacccttgctgatattaaagcctcatggcgtctgatactgctggtggccgtcattgctgtagtcgccgtgctgtgtgtcctgctggcaaatagccgatctgacgtcgctacgctgaaaagtgcaaacgacgttctgcgcagtgacaacaccctgcaggggacggttattgctgctcaggctttcaacttcaatcggtttaacctggtggccgaaaacgccagccgactaaatgcactgattgatgccagctccgataaaactgttatcgaatatcgggagatcctccgccgtgaaaaaacctgtgatctgcctgttcctgctgatgtcgctggtgggctgctcgaatacacgaaccgtctacgtgccagcgcaatgcacaccgattccgggaacgctgacgcagccggtgatagcaccactaccaccagcgcgctgacgtattgccaggctgttctctggatcaagccgctgctggccgctatcgaaaaagcgaataaccagctggctggagttcgtgaaattgaaagtagcagaaaagagtcacaattggagaatttaggcagctcatcgcattga

SEQ ID NO: 140549 - DNA, 204 bp, Enterobacter cloacae
atgtttgaaaattacgcttacgctacaaaagaagagcgcaaccgcggtgagattgttaaagcagcattagaaattatcaaagcgtcagtatcagcttcttccagttacacaggaagggacaagcttgaaaaggacatcaagtttgctgtagcaaatattgagtcactggcagacgctattgaaaatgcgatgaaagacaagtga

SEQ ID NO: 140550 - DNA, 603 bp, Enterobacter cloacae
atggcccgtaaaaatagctttaagaaggcctacgtcggtatcgttattgatatggctctggcccgtaacaagatctctaaccgtatggttgcccagcgactggaaattgacgaggccactatccgcaactggcgaaaggaacatgccgactttaaccgtgcctttaccgaggctcgcgaagttctgatggaaaagattaacaacgttgcaggtaaaagcctggacgttcgcaagcgaaagattgttagccggggaccaaaggggctgacaacaaccattgaagatgttctgcccacgcataacgatattgctgttttctcgaagtctctcggtcttggtaccagcgtctatagcgaggaagaacgtcagcgtgatgtgcttcgcgaggtgatgaaacacaaagtggccgggaaatactccgcgctggaggcggcgcagctgcttgaggctgagggggtaaaagttccggcaaccctgcttatggagctgggagcaccgaagattttcgaatcgttcaacaatatggacgaggcagccaaagccgacgcggcgaacctgaccccgcaggaagcagcagatatctacaaaaaatacctgggctga

SEQ ID NO: 140551 - DNA, 330 bp, Enterobacter cloacae
atgaaacggttctgtttggcgttagttatgatggttactgctccggcgatggctgcaattcagtgcggcaactacacgatgaccggtgacggaatgactgttattaacggtgaaactgtcacatcacagaagataaaatttctgggaaaagatggtgactactcaaacatgaaaatggacatgggcctgatgccttcccgtgatggtaacaattacggctttgagtttgtgaagcgtaacggaaaagctttcctgagcgtccagctgctgcagaacagcatggacgcgccgaaaaccatcggatctttcctgtgtaaaaaggtaagttaa

SEQ ID NO: 140552 - DNA, 564 bp, Enterobacter cloacae
atggcaagtgatttagatgtggtgaacgaagtcgataaacaagaagaagaattgatcgaacgtgcagagttgttatttgaacatcaaaaaacacaatatgaaattgctagcgatggtgttcgtcgtcttgaagacaaagcgatgaaaacatttggtgctataagtgtcattatcactatcgcattacttgttgtgcgttactggtggaatgatatcttccctcaaaaatcagatgttttacatgtagtctgttgggggtttttggtgttttttttaggcatgttctttatatcttggggctttacatttagtgcaatgcaattacaggatgtggaaaggccttcatctgacgctgacagcctagaaagtttttatatgcatcagaaaagatacaactctttgacggcttatgctcgggagtattctagattgactgatgttgttgatttaggtcatcttgcaaaagcgaaactaattagaaattgttttgaagccatgcattttggtgcttggtcctttgtgtgttttttgctcacggtagttgtcataaaattcaataattaa

SEQ ID NO: 140553 - DNA, 654 bp, Enterobacter cloacae
atggcagtatctgaccagacccgcagcggcgaccttgccgaaacattcaaatctgagcgggaaacaacaaagaaccagatccgcgtcgctttgcctggcatcgttcagtcattcgatcctgaagcagttacggcgattgtgcagcctgctatccgttctgttgaaaccgataacgacggcaaccgcgttaccaaaaattacccgctgctggtggatgtgccagtggtatttccgcgcggcgggggatgcacgctgacgttcccggttaaagccggtgatgaatgcctggtgattttcgccgatcgctgcatcgatttctggtggcagaacggcggggtgcaggagcctgttgacgatcgggtgcatgatttatcggatgcgttctgtatcgtcgggccgcagtcgcaggcgcagaaaatcagcggtatcagcaccagcgcggttgagttgcgtagcgacgatggcggaaccaaactgagccttattccttcaagtggggcgatagccggtaccgcgccgggaggtttcaacctcaacggcctgaaaattctgcctgacggccgcctgcagctggtggatggatcaatcgttgataagcatacgcatggcggcgttgaaagcggcggcagcaatacaaaacctctgggagggtaa

SEQ ID NO: 140554 - DNA, 132 bp, Enterobacter cloacae
atgagcgaaaaaaatatagaacataatacatgcaacacagaagaaaacgaggcgggaaaattctttgggtttgatttggaaaacgaatacatcggcgggttcgatgttggagcatgggggaaattactttaa

SEQ ID NO: 140555 - DNA, 426 bp, Enterobacter cloacae
gtgacgaaaacctttaccggtagcctgaacggctcttccccgataacgattgaagttccggctgaagataacactgtgaatattgcttttgtgaccaacacacctaaggctggccctacctctctggtctgggttgaggatggtgaaacgccactgtatgcgcaggttgtcgatagtcgtaacagaagcttcatcgtgaaactgcgtggccagaacagccatggcggctgcaatattcattccgttaacaccgcggttaactgcaactcaggaacaagcgcatatttaagagtcgcttataaagcagaagataacccgcatctgcctcagggcagctatacgggtgttcttcatctgattgcgcgtgactggcacaacacggactggacggcaaacgtgaatgtcgatctctccattgtgaagtaa

SEQ ID NO: 140556 - DNA, 762 bp, Enterobacter cloacae
atgaaaccaacatggctacataaatttgaggttaaggaaaatcgttgggtttacattcctgatgccgaaacacatcacttaggacaaaaaatacacacctatatcaaacacaaatggaagtcaccgctttatatgtttcatctcagagaaggtgggcatgttgctgcggctaactatcatattaaaaagaaatattttagcctgattgatatatccaatttttttggagctacgagccaaagccgcgttacaagggagcttgggcggttaattccatatgtaaaggcgagagaaattgcccggctatcgactgtgaaaaacctcaatggtaatgggttaaagcatgtaatcccatacggttatccgcagtcaccaatattagccagcttatgttttcaccaatcattttgtgggagtaccatcaatactgtcagcaaatcaggccatgtatcggtgagcattttcatggatgacattttgctttcaagtgatgatcttggtcagttggagaatgcttttgatattattcttgaagctataagaagatccggctataccgtcaatgaaaacaaaacccagcctccttccttgatggttaacgtttttaacctcgagcttagccaaaactcactacgtgtaacgtcaaaaagaatcgttgaatttttacaggcatttatttccagcaaaaatccccatgaacgtaaaggcattgcatcatacgttggtagcataaacacagcccaagcaaaattgttcaggtga

SEQ ID NO: 140557 - DNA, 165 bp, Enterobacter cloacae
atgactaaacaacataaaatcggcttagttaaagtgctcggaactaccacggtagttttggcctttatcaacgagtcgtggactttagttgaaaaggtgctgagcctctttaacatagtccctaactacttgacgtgtacaaatgaaaccaacatggctacataa

SEQ ID NO: 140558 - DNA, 417 bp, Enterobacter cloacae
gtgctgggcacgtccacactactgaccggagccattcagcaggtatgcacgggtgattatagccaggcagtaaaaaaccgcgtggcgagtatcggcggcaatgatgaaacagacatagccaggagccagacagtcacaacgggtaaagacctgatcgagaaaattggccagatacgtaaaagcgtggcggcagtacaacagcagattattgccccggttgtgtggattggctctggcactatcaacgtggcacagctgatgctcgacacgctcgacgtggtgaaagaactggcagagcaaacggcaagccacacgcacagcaatacgggcacgccgaccaatgcgggagcaatccggaacgccggagcgaaagcggacacgctgagcggcaaatactccccggtgattggcaagtaa

SEQ ID NO: 140559 - DNA, 348 bp, Enterobacter cloacae
atggcgggtaacgattccgggatgtaccagtttccacctgaagggacgctggttgaaattgcttttactggcggaaggccgggtaaaccctttgtgcggcagaccgtaccggagggaaccagcttaccggatatccagcctggcgagcagctgcagcagcagcgtgcggaagtgtctcagcgcgtcaccctggcgggtgactgggtgaggccgacagaccagacgatcagtgaaacctcaatggcgcgggttgttaaggccgcttcggaacagcgggagctggtcagccgcgaaaccacggtaaggctacggataaaattaccgtgctgggcacgtccacactactga

SEQ ID NO: 140560 - DNA, 222 bp, Enterobacter cloacae
atgcgtcccaacattacaatcgtgatccccgatccatacattccacttgatgcatattgccgccgtactggcatgtcgcgaagtactgctgagaatttgatttcctacggaaaactccctatcaagcctaaaggtgcacagaaaaaagggctggttgaagtgaacatggtcaccttaaccgtaatggcgttaagcgaatgcgatgtttcgcttaacgcgtaa

SEQ ID NO: 140561 - DNA, 582 bp, Enterobacter cloacae
atgggcaaattctcttacggacaaatcagccacagcaatgaagtactcgacagagtgattaatgcttatggctttacgtctaagctgatgcttgccgatcactttggaatggcatcgagtagcctggctggacgctacaaacgaggcggctttcccgctgacatggtagttaggtgtgtagctgaaactggcgcatcgttagaatggcttgctactggtcaagacaggaaatttgacgacgaagaactcgacattataaaaatgcctcgtcgaaaaatcgttgatggccttctttacgatgctggcaggtacatgttggataaggtctcattcctcccgggagtccctttacctaagtccccaatctgcgtccaggaaggtaatagccaatttatcgtggataccttatttactgaggtttatgacgatcagtggttggttgaaattgaaggtaaaataagcatttgcacacttacccgcatcccaattaagaaagtcagagtaagtggcgtcggcatggcctttgattgtgcaatagaagatataaaaattctttgtagggttgtattaacaataagataa

SEQ ID NO: 140562 - DNA, 567 bp, Enterobacter cloacae
atgattgactacaaaacagcatcaaaagaccaactcaaagcggagatgaaacgcttagctggcgttgtatctgacacgccctttggtacaaaaaaagaattctttcacctccctgaaattttgaactcgggcgaacgtccggtggccattgccagtggcatgatggacggcaacacctggctcatcacactgacaaataaacgcgtaattttccttgataagggcatgatttttggtgttaagcaggttgacatcaacctcaacaacattgtgagcgtaggcggcaagacggggcttatgtttggtgaaattatgatttctactagcggccaaaactacacaatcaaaaatgtcatgaaaggctcagttatacccttcacaaatttagtgaacgaaacaaaaaactctctgaatgctcctgcctcgcaacaacaagaaccgaccaaagacactcaatcattcgatgatcaaatggcgaaaattgaacgtcttgcaaaaatgaaagaagaagggattcttacagaagaagaattccagcagcagaaaaaattcattttgaatggttaa

SEQ ID NO: 140563 - DNA, 576 bp, Enterobacter cloacae
atgtctgtaagaaagttagcttacggccaacgggttgctgatttttacactgtagacagaactgatggtaaagacggcaagcgggttcgtaggaagtttgtcactaaaggcgaagcgctggcgtttgaaaattacacactgcaaaaatttgaggacacgccctggttaggccagggcaaagacaaacgtcgtctttcggatatagtccatctatggtttgagcgccatggaataactttgcgtgacggcgagaaacgtaaaagcaacatgctctgggcagatctgtgcatagggtcgcccccggctactgaattcttagcccagcttttcaccgcgtaccgggcaaaaaggctcgatggccattttgcccgtactaagcgcgttactcaggtttcgcctcgcaccatgaacttagagcacgcgtatttcctcgctgtgttcaatgaattgaaacgacttggcgaatgggaagcgccaaacccgctagataacattcgacagttcagaacagaagaaagtgagatggtctttcttactggtgacctgcccccacgattagatacaacactcagttag

SEQ ID NO: 140564 - DNA, 699 bp, Enterobacter cloacae
atggattcatatttagatattttgcctaaaggttgtacagctgttgctgtcaaaaccaaggggcacaactttttcatcgatcataagggattatcatctactggttgttgggttgtatcaaaagacagggtcgatgattatgtaattgtttttcaccaaacaagcacccttaatcatatctacattggtgaatttgtcgaaaaaaaagctgaagagtataccgaaagaaaaggaaagcaatatccgcgctatcgaatctacataaaaaatctgaaattagccttaaaaacaaatacaaactggacttcttttgttggaaaaggcaatgggggcttcgaaaggatatatttgaaaaacgaaggacaggtaaatcctagatatttagatcccgactcaactgaagccgaagagggatatagaaaagactcaagtcgaatgacaagtgcaagagataaaaaattagctgaagcacggaagaaaaaggataactacacttgtcagtcatgtgagaaacgatacttcgtaaacaataaatacattatagattgtcaccacataaatccaatcagtttaggaaaaagaaaaacaattttagatgaccttatttcgctgtgcccaacatgtcatcgaattgcacatactcgaattcccccatattctttgaaagagttaaaaggctttgtagaaagctttacttaa

SEQ ID NO: 140565 - DNA, 771 bp, Enterobacter cloacae
atggatatcccacgtatttttaccgtcagcgaaagcgaacatcgcattcataacccctttacgccagaaaagtacgccacgctgggccgcgtgttacgcatgaagccagacacgcgcattctcgatctcggcagcggctcgggagagatgctttgcacctgggcacgtgaccacgggattaccggcaccggcatcgacatgagcccgctctttactacgcaggccaaactgcgcgcagaggaactgggcgttgccgaacgcgttcaattttttcataacgacgcggcaggttacgttgcggatgaaaaatgtgacgtggcggcgtgtattggcgccacatggattgcaggtggcgtcgccggaacgatgagcctgctggcacaaagccttaagcgcgggggaatcatgctcatcggcgaaccttactggcggcggcttcccgcaacggatgaggtcgctcgggcctgtggcgcctcgtccatcgcagactttctcaccctgcccgacctcgtcgcctctttcgatcagcaaggctatgacctggtggaaatggtgctggccgaccaggaaggctgggaccgatacgaagccgcgaaatggatgacactgcgtcgctggctggagcaacaccctgacgatgactttgcgcaggaggtgcgagcggagctgaaaagcgcgcctgaacgccatgtgacctacacgcgggaatacctcggctggggcgtgtttgcgttaatggcacgacaggaggacgtttgcggtaccgcctaa

SEQ ID NO: 140566 - DNA, 279 bp, Enterobacter cloacae
gtgttgatcctgatggcgaaagcgttcctggaggcgatgacgcgcgatgatacgttgggcttaaacccatatgaaattaccttctacgatgcattggcagaaaacgaaagtgcggtgcatgaattcggcgatgaaacgctcagaagagcggctgtcgaggtcactcgacagctgagaaagtcaaccatcgtcgactggctggtgcgtgaaagcatacgtgcacggctccgtattggtgttcgtcagactctgcgtaattacaaatttccgccagattaa

SEQ ID NO: 140567 - DNA, 240 bp, Enterobacter cloacae
gtggaagattactacactaaaaagaacatcttctgggtgccaaaagccgcatgctggtacaccctgaaaaacaaagccatgctgccgacctgcatcgtgctgtgggtagatgaaaccacggggaattatgtcaagctgggctctgttacctggctggtagacaatccgctggatggaattgaaaaaaacaccccgaagatgaacctcatcagccagtttttgccaggcacgaggttttaa

SEQ ID NO: 140568 - DNA, 2136 bp, Enterobacter cloacae
gtgcccttcactgtaatcagcatcgtatgcctggccgttgcctgctttattttcttttatttacttcgggccattaaaattgttaacagtctgaaaaaatacacccaatcaattaatagcattgaaagcaactccccaagggaacagcttgcacatctgcaaaatctctttaaacgtccagaactcaaacatgcgtggaatgagtttgaagagtcgttacacccgcagagtgagttggaagatggggaggaaaaaatcgtccgcatacgtgccactgcgccaagttcgagctacttctctgagcaacagttagtcgatattccacttaataccgaattcttcaaacacctgcccggtattctgaccggtgttgggattatcggtacgttttacggtctgatgattggcctcaaccacttcgaccccagcactccagagcaggttaccagcagcgtcaataatttgctgcacgatgtattgtacgcattccttggctctgccgtggctattgccgcctcaattttcgtcacatggctggaaaaactgtccatagccaagtgctataagtatctcgaaaaatttaccgccgctatcgacaagctctacgttagcggtgtgggcgaggaatacctcgcctcgctggtgaaatccagtaacgaaagcgctacccaggcacgccatctgaaagagagcctggtcaccgatcttcgcgatatgctgctgcatctcgccgaaagccagaaagttgaaaatgaacgcctcgcgaatacattgagtaatacctatcgcgaatcaggcgcgcagtttgccgaccaggtgagcggagcaatcgaaaatagcctgaagtctccgctggataaaattgcgggtgcggtacagaccgccagcggcgatcaaagcggcatggtacagaacatgctgcaggatgtgctgaccgcatttatggcgaagctcgataccacctttggccagcagtttacgaatctcaacgaaatgatggggcaaaccgtcggggctatccagacgatgcaaagtggattctccgccctgctacaggatatgcgtcaggttagcgacgattcccgtcagggaagtgcacagctgattgaacagcttctctctgaaatgaaatccggacaacaggcgatgcaggctggtatgaatgacatgctgaccagcttacaagcctctgtcgcgaaaattggcgctgagggtgaaggcgccggtgaacggatggcacggcagcttgagaaaatgtttgccgacagcgaagcgcgagaaaaagcgcaggcagaacatatgtccgcctttattgaagccattcagaattcagtgcagcagggacaaagcgcaaccatggaaaaaatagcggcctcagtcgaagcactcggggaacagttgggcagtctgtttggccagatagataagggtcagcaacagatatcagcgaaccagcaggctaaccagcagtctctgcacgaacagacgcagcgtgtgatgagtgaagtagacgatcagatcaaacagttgattgaaaccgttgctagtcagcatcagggaaccaccgaaacgctgaacaaacttgcagaacagaccaaccgacagattcaggatatgcaaaacggcgcggataaaatgcgtgttgccgccgagcgttttgaacacgcaggcgataaggtgtcggaggcgaatcacctcacggctgacgtattgaataaagtgcagtcggcgggctcctcgctctcccttgcaaccagcgaactcagttcagtagtggccgattatcggaacaatcgtgaagccgtcagcaaatccattgccatgctggagctgcttgcagccaacactcagtctgaacagactacccgcagccaatttatcaccgatctcaaacagcacggtgaacgcttgcagagctataaccgtgaagcacagacctttatggaaaatgtcagcgatgtgctcgggaaaggctttgaagacttctcagagggcgtttcgcgcagcctggataaaacgctgggcaaactggacgtcgaaatggcgaaagcctctaatctgcttgcaggctctgtcgaacagatcggtgaaagcgtcagcgagcttgatgatgttctgtctcgcgtgcgtgcctga

SEQ ID NO: 140569 - DNA, 738 bp, Enterobacter cloacae
atgtttgggaatgcatttggcgttaaaaagcgccgcagtgatgaagctgagaagcccttctggatttcttacgccgatctgatgaccgccatgatggtgctatttctggtggtgatggtcgcgtcgctaagctccgttacacaacgcattcaacgcgcggagcaaggagaaaaagtcaggggacaggacatcgccagattatgtgagcgcctggagctgcatgcccgcagtgtaaacaaaaccatcgtggtggattgccacgataaccgcatcagctttggtgaagctggtcgtttcgatcacaatcgatttttcctgaacgtagaaggacaaaaagctctacaggatgtggttcctcttgtacttgaagcctccgacagtgaagaaggcaaaaagtggtttaagcaaatcgtcattgaaggatttaccgacaccgacggttcgtacctttataacctgcatctttccctacagcgttctgaatgggtcatgtgtagtttgctcgatagccgcagtcctctacaaaaaaacatttctgcagaacagcagatccaaattcgtaagcttttcctggcggggggcgtttcgtttaacaacgcgaaagagagcaaagaagccagccgtcgcgtcgagttgcgtatgcagttcttcgggctgaaagataagcatgctgcagacgaggtggatttcccgcctgttgtgaataaagaagtttgccagctggtaatgccgcaatga

SEQ ID NO: 140570 - DNA, 168 bp, Enterobacter cloacae
atgacgcccgcattgagttctctagcgcagcgcattgcagctaagctctcttccagccagcaggaggagcattttctgcgcaatgatttccacgcgctggcctctgctggccgcgagatggaaaagcgatttgataaagcagagaaaatccccccccccgccacatga

SEQ ID NO: 140571 - DNA, 1515 bp, Enterobacter cloacae
atgcggctggcggcactgcgtcgttttcgtcttgcagaagaactgaccgaacgtgagtggcgaatggtgttttatggcctcgccgataccgatccgctctaccctgacaggccagtattactggaggatgatacactcttcccccgcgtcgacagcgctattcaaaaacagattcaatccaggacactgaaacggaaggactgggcggcactttgttcaagttattttgcctacaaacacgaatcgccagaaatcaatccacactggtgtgtactgcgtggtcatatcgcccatggatactcagtagtaaaagccgctatccgcagagaaaaaccgtggatgaaaaccattgagttttatcacgacatttttacgcctcaggctggcggtgtgatatcacaacaactactttccggtgagagcaactccctatcatctttagagaaaatagcgcaaattcccgacagtagctggttgtggaaacgtattttcacggtgctgctggcgcagcttgatactctggatgatcctcaatacctggacaaaatcagctggctattgagcctggccgcgcagtgggtacgttttcgtgatgacattattacggcaacgctgactcgctattaccattcaacctatcgcgatcaagctcattccgccctgaaacaggcagctcttgaatactgggataacccgcagctcaagagtcagcagaataagtggcatcagtatgtttctgaacctgtcgctgcaatggtgcggggctggttagcaaaacaagacctgatgcatttctttgagctactacgcggcaacggcgatgtcgatcaggcacgactccactactggctgcgcttcgcaaaccagatgggatttacccgtatcgtgatgggacccgatgcctggcacgatggtagcagtgactttgtgaaattccgcgaggagaatcgtggaaggctgagccatctgcgtggtgggcgtagtttcgataatgctatgattatgcagataaacgattacattttcgttgagttttccgggacggggaacgcgatgtatgcctaccgagtgggtcaggctccctttaaccctgagtcacattcattagatattaatatccagttgaaagataaatatcgtaatgttcttcgtcttccacataccccaagagcagaagggtacaacaagacccgcatcaccggctggatgcttaaatacgaagatgaattgcgtaagttaggtatccgctggatggctgaagagcccgtcaaatttgtagataaaaaagcgccctctcccgcctcggtatctgacatcaaaatcatcaatccattgcgggatacagcaatacagcgcctggttgaaaacacctcatgcatcgtcagcgataaccgacaaaaaggtggcgtgctctctgtacagctcaaagcacccgacgacacgacggaaagagagttacttcgactgggtttcgcccctgtgctcaaagagccgcatcgctactggatcaaataa

SEQ ID NO: 140572 - DNA, 3243 bp, Enterobacter cloacae
atgctgaaacgtctgctaagtaaactgacgggaaaccgtcagcagatagaacaccatctgagaaatcagtatcaggttgaggaaaacggactcagttttccgcaatctttagttgatgacccagatctttgggctctggcatcctggcttgagcaactggccgaagaagactatctgatttcactaacagaccgctggttattgagctgggataatttgtatcgcctactggaggacgaggaacactccagcagtctgcctctaattggcgttccagagatattaccattacgtgcaagactgagttcgcgtggggcattaaacgatagtgattttcgtgtctggattgcggaatggactttggttccaacccgtaagtcgattcgtttcaatcgtaccggcgcaatttttaattatgaaaatcaacagcatttgttatcacgggaaaactgggctcttttgcagacaatagagcagcttagtacccagcaaattcagaccccaggcgaaaccactaaccagttggggtgggccgcaattcgcaaatgtgcgaaacaggcctctgcaaaatttgatgactatttagaaaaaacgcacgttatcaaaccaacgtcgttgtcattacgccttcgtaaggctacggttgctgataccgcggttatcgagattgaacctcactttcaagaccagcccgctaactggctcgacagttttgacaagaactcacaggttcacgatagctatcgcatacccggagagaatggcgaactcagccatgtcatcatcccacctgaagtgaaagaagttctgaattcaatacatgcaatcccagggcgtagagtggccggtagtgaagcgctttcctttgttcgcaacccctatactttcctgggtgaagatgccgccagtgttatttcccctgaagaacatgagcaagcactttttgatgcccacattttcttccatcatttcagacttcagccccgtgtaaatgatgagaacaagatagacgatattaaactggtacttgagcctatctctcccataccacaaccggaagtgacatttcttttctccgcaccatgggaactggataaatttgttcagagcttaggtatcagtgttgctgcgcaaatgccagcaggttcctggcagggttacgaactggaactaagtcaattcactgaacagcaatggcatgattgccaatcgctgttgtcgcgctggcaacaggaagttgaaggtaaagaatttaacgatgtccttgatctcggtaaatatggcgatcgcgttatcggcattggtgaatttgaaaaaatatcctcgccatggctgaccaaggcgcaaagtgaaaactggctccctgatggggtcgacttctccgcattttcggttgaagccctggatggctggcaaccagataacctgcaacatttcgatgaactgcaggaaagaatcactcaggcagaagcgactggcgaaacgcatatcatcttcccctggaatgagactgaactgccattggatgcggcgaaaaccttcagtaagaactgggaaaagcagcaaaatatagcacatgatttaaagagtaacgttgttgaaaaagcagcccgggcagtgctcaaaattgaacagaatattgaagaagctgtttacattaaactgcgccgagattcactcctcaatgcgcgtcatgccgagcctgaaattccactgagccttaaagaacacatccggctcaaagaccatcagcgtgaaggcgtggcctggctccaacagcttttccttcgttcgcctcaggaaactacaggttgcctgctcgcggatgatatggggctggggaaaacgctgcagatcctgagctttttggtttggttcattgaaaaattccctgacgagccacccagcctcatcgttgcccctgtctctcttctggataactgggagcgtgaactggacaatttcttctatacatctggcattccagtaatgaaattgtatggcgacaccatcaaagcggtgaagtacccgaaacaggctattcctgctcatctgcagtctcaggggatcaaaaatctgcttaaacccggctggcagggtgacgcgaaaattattctgacaacctacgaaacacttcgcgatcaggaattttcactggggcgccagccctggtccattatggtgtgtgacgaggcacaaaaaataaagaacccggcagcattaattactcatgcagccaatgcgatacaagcacgatttaaagtggcatgcaccggcacgccagttgaaaacacgcttgtagatctctggagcctttttgatttcgctcagccgggtctcttaggagcgctcaatgaatttggcaaatcctacgttcgccctatcgagaacgaagcgggtcgtgatacaggacagcttgaaagtttacgagcgttgattgaaccacaaacattacgccgaactaaagaagaggttgcgcgtgacttgccacaaaaaatcgaagtcgtcagctgtaagcaactgccgctttctgcccctcaaaggcaactgtatctttcttcgatagcgaactggcaacaacagcaggcgcttagtgaaggaatgcagcaagcaggcgcgggtatgttagggttattgcatcgtcttaaactcatttgtgcacacccggcagtcgttaacccagaacctcgctatcgggaagcctcacccaagcttaattggatgttgaaaacattggatgaaattaagcacaccagcaaagacaaagtaatcatctttactgagctgcgcgatcttcagcgcgagatacaacacgctattcaacagcgatttggtttccgtccagtgatcatcaacggcgacaccagcactaaaagtcatagtcagaataaccgccagcgactgattgatgatttccaggcccaacccggctttggcgtgatcattctctccaccgtcgcggttggttttggggttaacgtacagaaagcaaaccacgttattcatttcacccgctgttggaatccggcaaaagaagatcaagcaactgaccgcgcttaccgtatcggccagacaaaggatgtgtatgtgtattatcccacggtaacggactctgaaatcacgacgtttgaagaaacgctagatgaactccttcagcgtcgccgggcattggcgagggatatgttgtgctctgcaccagatttaagcagtgctgattttgagaacattttaaaagggtcttaa

SEQ ID NO: 140573 - DNA, 1308 bp, Enterobacter cloacae
atggcacttccaagacaaaaactcaccttcgagcgcattcgaaaatttgctttatctgaaggaaaaacccaggcatttctttgggatgcggacgtaacttccctggcatgtcgggcaactcgcggaacaaaagcttttgtgttccaaagcgtatatgcgggaaaaacccttcgcatgaccattggcaacattaacgattggaggattgatgatgccagggccgaagccaggcggctgcaaacattaatcgatactggaatagatccgcgtatagctaaggcagaaaaaattgctgaagcggaatcacagcaggctgaatctcgtaaaacgaaggtaaccttcacaagcgcttgggaagattaccttgaagaattgagaaccggaatcagcgcaaaaactaaacgcccatattctactcgatacattgccgatcacattaacttgtccagccgtggaggggtaagtaaaaaaagaggccggggcccaacctcggctggaccattggctagcttactcgacctaccgttatcggaactaacaccagagaacattgccgcatggctaagtacagagagacaaaatcggcctaccgtcactgctcatgcctaccggctgttgcgtgcatttatcaaatgggctaattaccagaaaaaatatcagggaataatccatggcgatattgcacaagatcataacgtgagaaaagtggttccagtatcagcgagtaaagcgggagattgcttacaaaaagaacagttaaaaatctggttcagtgccgtacgtagcctcaataatcccattgcatcggcctatctccaagtacttttgctcaccggtgcacggcgtgaagaaattgcgtcacttcggtggtctgacgtagatttcaaatggtcaagcatgaggattaaagacaagatcgaaggcgaacgtatcatccctctcactccttatgtttctgagctgttaagtgcgctagcgcaattcccaaattctgacgtaaataaggagggttgggttttcagaagtaacagcaaaagtggcaaaattattgaaccgcgttcaggacacaacagagcgttagctcgagctgagttaccacatatcagccttcacggcttacgccgtagttttggcactcttgctgaatgggttgaagtgccaacaggtattgttgctcaaattatgggacacaaaccaagtgcactggcggaaaaacactaccgccgtcgtccgttagatctgttgcgcaaatggcatgaaaaaattgagaggtggatcttacagcaagcaaatattgtaaaaaaataa

SEQ ID NO: 140574 - DNA, 450 bp, Enterobacter cloacae; identical to SEQ ID NO: 78961

SEQ ID NO: 140575 - DNA, 1185 bp, Enterobacter cloacae
atgttaaatgtcgctatcgtgggaacagggaatatctcgcataaccatattcagggctatttgcagtttggtcagcgttgccggatcgtcgcgctggtcgatatctacccggaaaaagcccacgagaaaaaagcacgctacggcctgacggatgcccgcgtgtacgcaagccaccagcagatgctggcgtcagagcccgatgtggatatcgtcgatgtctgtacgccgccctatgttcacgcggagatcagcattgatgccctgcgcgcggggtgccatgtgctgtgcgaaaaaccgatggccgcctcgctggaagagtgcgacgcgatgatcgccgcacagcaggccagcggtaaaacgctctccatcatcgctcagaaccgctttaccgatgctttctggcgcttaaaagccgcactggattccggcctcgcgggaaaaatctgccatgcgcaggtggattcgttctggtggcgcggacactgctattacgatctgtggtggcgtggcacctgggaaaaagagggaggtggctgcacgcttaaccacgcggtacatcatatcgacgccatccagtggatgctcggcttcccgtcggaggtcgtggcaatgatgaccaacgtggcgcacgacaatgccgaggtggaagacctcagcgccgcgatcttcaaatacccgaacggcgcgctcacgcagcttaccgcctcggtggtgcaccacggggaagatcagaaaatcatcattcagggcgataaagcgcgtatctccgcgccgtggcaggcctttgccagcgtcagcgccgataacggcttcccacaggaaagccacgatctgccgcgagaagcgcaactcaacgcggtttttcacgacacccgcaaactcgaatggacgctacacaacgggcagattaacgacctgctttatgccattgagcacggcacggcaccgttagtggatggcctgcagggcaagcgttccctcgaactgattaccgcaatttataaatcagccattacccgcaccgtcgtcccgctgccgattcagcgcgatgacccgttttaccgtaccggcgggacgaacgccctcgccccccgtttttatgagaagtccgcaagcgtggccaacttcagcgaagtcggtgccatccccctgggaaaagatctggatcgaggaatgtcatcatga

SEQ ID NO: 140576 - DNA, 1152 bp, Enterobacter cloacae
atggataaggtacgttttggcattattggaataggtaatatcggcacggtccacgcgcgctatttactggcgggtacggtcagcgacgcgtgcctgacggcggtttgcgataatgcaccggaaaagcacccggccattcgccagctggtcggcaatctccccgtgttcagtgacgcccaggagatgatccagagcgggcttatcgacgcggtgattgtcgcgacgccgcactacgagcatccgcgcttgtcgatgctggcgatgcgcaacggcattcacaccctgtgtgaaaaaccggcgggggtatacacggcgcaggtgcaggagatgaacgcctgcgcccgggagtgcgacgtggtgtttggcatcatgtacaaccagcgcccgaacccgctttatcagaaggtaaaagaccttatcgacagcggcgagctgggcgagatccgccgctccaactggatcatcaccaactggtatcgttcgcagagctactacaactccggcggctggcgcgccacctggaaaggggaaggtggcggcgtcttgctctaccaggatccgcatcagctcgatctctggcagtggctggtcggaatgccggtccgtctgcgcgcgttttgccagttcggcaaacatcgcgatatcgaagtggaagacgaggttaccgcctatgcggagtacgccaatggcgcgacgggcgtgtttatcactaccgtcgcggaaacaccggggaccaaccgcctggaaatcgttggcgaccgcggcaaggtggtcgtcgaagaggggaaactgcgctactggcggttacgtgaatccgaaaccgccttcaatgtccgctggcaaaacggttttggtgaacccgaatgctgggaggtctccatccccgtcgccccggaatgcagcgaacatcacgttattaccgccaatttctctgccgccattttgcgcggcgagccgctgatcgcgccgggtctggaagggatccgcgggcttacgctttccaacgccatgcacctctccacctggacagacgactgggtcgacctgccgctcaatgagaaacagtatctgcgcctgcttcagcagcgtattagcacctcagtggctaaagagaccgccagcatcacgctggacgcctctggcacctggtaa

SEQ ID NO: 140577 - DNA, 291 bp, Enterobacter cloacae
atgccgggcaggttaaaaatggaggagattgcggccctgacgggctattccgtcagtacggtatctcgggtattaagcggcaaatcgtataccagcgataaagcccgggaggcgatcgttcgtactgccagagaattaggcgtactggagtccatggcgagcggcagactgttaattaacggtatcgctgttttgcgccagaaagaacctttcagggacgcggcgatattttttatctggaagtcacaaaagggattactgaagcctgcgcgcggcacaatgtgtgggtga

SEQ ID NO: 140578 - DNA, 1011 bp, Enterobacter cloacae
atggtgacaattaaacaatgggccgagattgaggccaattacgatgatactttacttttggggaatggtgcaagtatcgcagttaatagcgattttgcctatcgtagcttatgtcagaagttgaccgagctcagttcagatgggcaactgacagccttgttcgaactatttgatacgcaagattttgagttgattctgcatcgtctgtggattgcaactcaagtaaatcaacagctcggtgtgcctgagaatgcaacgactgagaggtataagttacttagaaatctgttgattcaatgtgtgagccaaaatcatcctgagcatcatgagatatcggatctgctagttaaaattcgttcttttataggcaaattcaagacggttttatccctgaattacgatcttattgtgtactgggcatctttgcttgaggatacaactaccggaaaattaaaggattgcttcattaaccgtttgtttaatgaacagtttgactggagtgaatttagagacttacattggaaggatcgtgtaagaggttataagacgataggcttagtcttctacccacatggttccttgattttggcccaagacttcagtggtcaagagtccaaattacatactaatcctcatggtgacggaacttatcttcagcaaatttctcagcaatggagctctgcagcagttacaccagtttttgtttctgaagggacaagtaagcaaaaactaaatgcgattgctcgtagtcgttatcttgacactgtttaccgtgaagtactgccagagaaaaaggaaagtatcgtgatctatggatggagtatgggggaaaatgacagccatattcttgatgcactgaaaaaaagtcgtccatcaagggtggcggtatcagtgtatggcactgatacctctggctgtgatgcaattgaagggaaattaaaagcggtgtttggtgaaggtttgcttgtcgagtttttcgacagtgaaagtgctaactgctggtgccattaa

SEQ ID NO: 140579 - DNA, 576 bp, Enterobacter cloacae
atgggaaaaatcgtctatagcgacattgcaaattttatccccggagtaaacctgtcacgcatagagtcggaaaaatcaggtaaagagtatcgcttctatacagcacagttgcatcagattgatgattggcaacctgaagtgatagtttctgataaagaacaggtggttaagagtacgtcgttactaaaagtgacaagagaaaatgatgtcattattaacttagcgaatgctaaagctgttcttgttaagcaggagcatgcagggcgaatattgggtaataactttgttaaggtcgagttggatgttagcagagtttctccattattttggatttggcatttcaatgagagcaaagctatagcccaacaaaaatcatttgttctgcaggggtcaactgtacctaagttaactctgcaaatggttcgccaatttgaactcgacttacctggactaaaaaagcaacaagcgataggtgagctgtatcttcatctcaggatgaaagattactacgagtacaacttgatgaaattaaagcaacaatattattttgccaagatagaaaatttatcaaaataa

SEQ ID NO: 140580 - DNA, 1131 bp, Enterobacter cloacae
atggtgccgaagataaggtttaaatcattctcagcctccctaggtaagcataaaattgaggatattttagctcgctttgtttcccctgtatctgtttctaaaataggaaaatatcgagaaatagggattcgctcccatggtagaggtttattccataaagaggaggtgtctggtgctgaattagggaataaacgcgttttttggataaagaaagatgctgttatttttaacatcgtttttgcttgggaacaagcggtagcaattacttcgtcgaaagatgagggatgtattgcatctcaccgattcccaatgtatttacctaaagataacaaatgtaacactgactatatcagaagatacttcctgacaaaaaaagggaaatatttattagaacttgcatcccctggtggtgcaggtcgaaacaaaacgctaggccaaaaaaacttcgatgagttggttgtaactattcctgatgttacagaacaaaccaaaatcgctgattttctgtcctctgttgacgaaaaaatcacgctactgaacaaacagtacgacctggtttgccaatacaaaaaaggcatgatgcagaagatttttagtcaagaagtgcggtttaaggatgagaatgggaaggagtttccagggtgggatagaaaatttataggtaatattctaaagataggtagcgggcgagattataaacatttgaatgatggtaatgtccctgtttttggtactggtggtttcatgacaatggttgatcagtttctttttgaaggagaaacggtatgcattggacgaaaagggactattgataagccattttattacaatgggaaaatttggactgtagatactttattttacactcatgaatttaaaggcgtgcatccaaaatttgtctatcagttgtttttaacaataaactggaaagaatataatgaggcatcgggagtgccaagcctgtctaaaaataccatagaaaaaattgaggttaatattccttgtttatctgagcaaaacaaaatttccagttatctctctgcccttgacgataaaatcgctgtaaaaaaagcagaactgaacaagttaaaaacctggaagcagggtctactccagcaaatgtttgtataa

SEQ ID NO: 140581 - DNA, 261 bp, Enterobacter cloacae
atgaaaaagaaaatgacacttcatatatttattcttatttttatctatatgactaccgctttttttgcactgggtgtagttaccaggattgtaacggcagttatttatactggggaggtttatttatcgttatccggtgttattaaagtcgtcaagatgagtgttgttgcaggaatatttattgcagtgggatgtttaatattcaacaaaatagacgagtacaatgctcgtaaaaagctacccaccgaccccgataagtga

SEQ ID NO: 140582 - DNA, 669 bp, Enterobacter cloacae
atgacgaaacgaagcgatattattgataattcagatcgatacataagccgtgatacgcctaaaggtctcatctatacagaaaatttaggatggatcgatcttggccatgctaacccagcaggagccgaaaggttgtggcagcaaatggttatcccgcatggcggagatgacacatggttcgaagtcaattatcaccagagtatgtccactcattttgctggaataagcattactaccggtatatacagacgatttttagtccgccgaggacttagtgagcgtgttttacagggtgtggcactatcaatatttatggcgacatctcatcagtttgaatcaattcaggacttctggccttatattgttttaaccgatagtggatatagcgctgaagatcttgtttcaaatttattcggtttttgccaggcggtgaattatgcggattatacttcttttctgaatatatgtctgaaagagaaagcgtaccgcatttgggaccattatggacccgtgggtgaatacaaaaataaaagcgtgcttcctcttctgtttcctgatccttatgaaaaaaaagataatcttagaccttaccagggaaatttacctgcatttatgagttcgatcacacctcaggctaatccagcgtacgttcgtgagttaaccttatga

SEQ ID NO: 140583 - DNA, 390 bp, Enterobacter cloacae
atgaaaatatcgaagctgtttcttattagtttttttttaattgtgataggggcagggtacatattttgggctgcacgagtttttgtaccagaatgttatacacaaaacgattttttccgttatcatctaatgacccccgatcttgttaaaagggttcctagagtatcgaaccgctggtatttcctgagtcagacagatgagggaagtggtttaagaaccaatgagataatttttacaaatataaaagaaagcgatgccgatgcactcgttgagcagcttgagatgtgggtgaacacttatccgcaacgccacgaaatgatcagtgtttcagtagagaaatcaaacggggatttggagatacgagttattcactatgatatggatgaataa

SEQ ID NO: 140584 - DNA, 285 bp, Enterobacter cloacae
atgcagattgttaaaaaggggcaattaagcccctggagagatgcccttgttagaaagcattgtttaacgtcatcgtttgggaggattatgaagttaaagaatggtttcttgaataaaatggagggcgcaactgttacgaataacagaagtaggatcgcccgtcattgctcccacttcaaaacagaagcccttctgtcatggcgagaagtgggaatggaatttcttatcaccactggaatagtaataagagattactacattcatcctaacggaatgaatgagtaa

SEQ ID NO: 140585 - DNA, 462 bp, Enterobacter cloacae
atgctgaaaacggttatacccaaacaatacaacgaacgtgatcttaacatcattcatcttgccagtttattaaatccagaagttgaaagaggcgttgcattcgaacaagcacaagaacttgtagatgtttacgctgaacgaggtgaatcaagttacgctaatgctcttgttacgctattcaatgcagcgatgaagccaccgaaagagatcgaatgtaaaatgtcatccccacatcttcacgataagaatctgtctccttcggaacgtctggtattaatgcacctcgaatcactgtcatcattaacaaatgtgaagcaggaatcaatagcgatagtgttggggatcagtgtggcaactgtatccagtgcgattcgcaagctccgccgcaatggttatctaactactacgttaatcaaacctggtcgcggtaaaggttgcgacattacacttacgactaaataa

SEQ ID NO: 140586 - DNA, 1473 bp, Enterobacter cloacae
atgattagtcatgctttggaaaaaaaaactcattttgaatggatgctattcacatttgttttcgctgtagtggctgtgttttttacggttatccatccggtgacaatcatctcaggtgatgagtggattaacctttcttccggtaggcaggcatatccgcaatggggaggttttaatccgattaaggttgtgcctgaagtagctttccctctctttggtaacatagcctcatcgctcctaatgccacttggatttactttccttgaagctattgcctattttacagcgatgttagttgcaattcttgttgtggcgttcctttatcaattctaccttatgatgagagaggctgtaggcctgtcaacatatacaagctcagcgatggtgatattctatttactgtgcatgtttggcctattcagaactcttaacaataataacagcccatacctgttatgggagcaaaaccttacttgttattatcactacattatcccagcgcttataaacggaactctagcactttacgttttgcgaatgtcgccctcattaaagtctttcttttacgaaaaagctatattttctgggatattgatatttgccatttatctgtgtgtgttttcgaatatattcgctagtattgtgcttgctgtcatgtgcggagttatacttctgctgaaacttattaacaacagattcaaaattgttgagacagttaaggcttaccctttccactgtatcactttgataatgtgggtcatttctgctgtgtttgaaatgaacggaggaagagcagatcgcatgtcaaaagatcacctagatatttcaggtacggtcaactcgttttactcactacttaaactaatagaccgaacatttttcgttgttctggctgttggattggtttgcggcgtagtgttcttgctgagaaaaaaatcatgtgaagggaaacgatatgctttctgtgtatcagtaattactggagctattaccacattagcccttattttggtgtgcgcaaaagctagcgcaaactacgcgactcgaccagtagcaatgtggggtacatttatgtacttaatagtggcagctagcataggacttggatacatcatcgatcgctttgaggctgttcaatatattgtcccaataattttactgtgcttggttaataaggctacagatcaatcacattctttgcgcgagtctcacaatggaaacattcctttctccgtggcaaatgcaattggacaagatatgattgatcagattcagagagctgttgaaagcaatcagaggacgatgacattgcatgtccctaagggtgacaataatgataactggcctttccccgtgaccagaggaaaagcaatctctgagacgctgaagtcaaatggattaatacctcgtaatatcgagataaaaatccaacctgacagagaaatgaacgctaaatatggtatgccgatctga

SEQ ID NO: 140587 - DNA, 942 bp, Enterobacter cloacae
atgaaaatttctctggtcgttcctgtatttaatgaagaggaagcaattccgatcttctataaaacagtgcgcgaatttgaagatctgcaacaacacgaagtcgagatagtctttatcaatgacggcagtaaagacgccacagaatcaatcataaacgcgcttgctgtagctgacccgcttgtaataccactttccttcacccgcaactttggaaaagagcctgcgttatttgcgggtcttgaccatgcgaccggtgacgcgattatcccgattgacgtggacttgcaagacccgattgaggttattccatacctgatagagaaatggcaagcaggggcagatatggttttggctaagagaacagaccgctctgcggatggacgactcaagcgcaagactgctgaatggttctataaactgcacaacaaaataagcaatccgcagatcgaggaaaacgttggcgactaccgtctgatgtctcgagatgtagttgaaaacattaagcaaatgcaagaacgcaatcttttcatgaaaggcattttgagctgggttggcggccgcactgatgttgttgaatatgctcgtgctgaacgtgttgctggggattctaagttcaatggttggaagctgtggaatcttgcattggagggtataaccagtttctcaactttccctctgcgcatgtggacttacattggtttattcgttgctggtatggccttcatctatggcgcatgtatgatcgtcgacacgttagcattcggcaatccggttcgcggctatccatcaatgctggtttcaatacttttcctgggcggaattcagttgataggtataggcgtacttggcgagtatatcggcaggatatatgttgaagttaagggaagacctcgttacatcatcaaaaacgaacttaaggataatcggaaggacgataaatga

SEQ ID NO: 140588 - DNA, 363 bp, Enterobacter cloacae
atggtaaaactgtttactcgctatgtttcagtgggcgtggtcaacactgctcttcactggttgtgtttcggtgcgcttatgcatttcctcgatgctaaccagaccgttgcgaacgtcgttgctttctgtattgcggtaactttcagtttttttgcgaatgcaaaatggacgttcaaggctcaggccacttctgcgcgttacatcgcgttcatcgttttcatgggcgttatggctggcgtgacaggatatatcgcggatttaatcggcgctccacctgtcgttacccttgtcgccttttccggattcagtcttgtagccggttttttatactcacggttcattgtctttagggatgcgaaatga

SEQ ID NO: 140589 - DNA, 201 bp, Enterobacter cloacae
atggatacagttgtttgtatgatattcatgccacgcacagcagaggtgagcacctctttcgttgcgcgcattcatctcacccatagttacttgagttcagaccgcgtcattgaacagttacgggagttcaactggcattttacctgcagcggagctaagtcttggatagagcgttaccccctctcccgacttggccgataa

SEQ ID NO: 140590 - DNA, 1134 bp, Enterobacter cloacae
atggacgtcacttacacaattagcatggcgctttttagccttattattgcgcttttaattttcagtctccctgttttcaggtttattgatgaagaaaccgaagcggttcgttccaatagtcttgatggcatgcggtttttattggcatcatttgttattctccatcatcttgattgtttgcattcttatattacaaagggcatgtggtcaccaagttctttatggctcacatacatgggtaaatacggcgttgcgctttttttcatgactacggcatatctcttttggggaaaggtgagaaataaggaaaccgtagactgggtagacctttataagaagagatttttaagaatcgttccgctagcaactgcatgctcttttgctggattggttttgttgttttcattaacagatcatgaccctattacattggatacagtttcaaaaacaatgtcatggttcgatggtggcctctggaatagcaagcctaatgtgactgactttaataaatcatggatggcactggctggtgtaacgtggacgttgaggtgggaatggatgttctacttttcactgcctttactttttattcttaaaaagtggtctatggagttaaccatagtcctttttgcgttttctgtatatttattgcctggctttacaagagatgcatatctatggtcatattttttcgccgggatgctttgcagggaacttaaggacaaaataattatctccagactgcatgcaaacatacttttagtggctacagttctgattactggctttgcacagccagacctgttcaggtctccggaaaagttttttttatgcgtaatatttttctctgtaatctccggtgccgacatattcgggttactggcaactaaggctgcaaagagacttggtgctgttagctatagcctgtacttaacccagggattgatacttttccctttaagtcaagtaattagtaaggatgatgtttcgcatactgactacaaggtcatcacattatttgtttcagcatacatatcaatttgcctgctatcctctttgacctaccattttgtggagaggccattcatcaaatcgaaaaaagcatcattatacaaaactaatactgcttcataa

SEQ ID NO: 140591 - DNA, 204 bp, Enterobacter cloacae
atggggcttccaccgccagcgcaagactatgcagagaagcgcatgtcgttcgacaagcgcatcataaccagatcgtcatcgacatatctgctgagagctggtgcaacgcatcactgcgaaggaggcttgagcggagttgttctggaagtggatatctcattgagtgtgcgacggatcattgttggtacaaagcatggcaggtga

SEQ ID NO: 140592 - DNA, 366 bp, Enterobacter cloacae
atggacaacaccaaaatacacaaaacgctgctggcgctcgccattggggcggtgacacattccgtccaggcggcggatgataaaaaagaagatacgcttgttgtgcaggctgcacctgccagcgactttaaacccggcggcgaccagctggtaccggcctttcttgacgggcaggtggcgaacggcgggcgcatggggatgctgggccagcagaacgccatggacgtgccgttcaacatcatcagctacacctcgaagctggtggaagatcagcaggcgaaaaccatcgctgacgtggtcgccaacgatgcgggcgtgcagtacgttctgacctgctccccgttgattagtacaccccgatgttag

SEQ ID NO: 140593 - DNA, 261 bp, Enterobacter cloacae
atgaaaagtatacttgtattagcattgctattccccattttcagtagttacgcggcgacagaaattacttataacgaaccaactccgataaacgcaattcgtgtcggagagattaatttctttaaaaccggtagtgcaacccaatcggagattattaattcgctatctaaaaaagcagatatgattggtggaactcatttcgtaatttcatcacttagagttcaagataattcatacgctaccgctgtcgtatataaatag

SEQ ID NO: 140594 - DNA, 246 bp, Enterobacter cloacae
atgcttccccatcgacttaaagcggcgcgactgaaggccggactatcacagcaaaaacttgggatccttgcggggattgatgaagcaacggctagcgcacgaatgaaccagtatgagaaggggatccacacgcctgactttgcactggcttgcaagttagctgaggtgctgagtataccggtttgttatttttatacgattgaggatgatttggctgagtatatttacacatattttaatgaataa

SEQ ID NO: 140595 - DNA, 261 bp, Enterobacter cloacae
atgaatagagatcaggacatgcacccggcagatatcatcgccatgctccacaagcgtaagctctcactggctgctctttctcgccaggcgggtttgagttcttctacacttgcaaacgcgctctccaggccgtggcccaagggggaaaagatcatcgcggaggctctagaaaaagatgcggcgtcgatctggcccagtcgctattacgatcaatatggcaactatgtcgatcgttcaaagttaatgaggaccaaacgctaa

SEQ ID NO: 140596 - DNA, 519 bp, Enterobacter cloacae
atgaccggtgaacgtgccagggtggctcagtcgccaccaccctggcgacccgggctcccggcggtaaatcgccgcttcgcggtgccctcggcttattccttccggcttatcgggtacgggcggaggcaacgtccctgtaaagcccgccctctcggcgcatccatgcgcctcgccccggcctacaggaaacgcctcagcgatttacagccggaccagggcgtcgctgtaagttattcatttctcataagaaacgttcatcgcttcaggaaaaaaattactggggatccctcagccctgtgggagaggagcggggatgagggcatcagaccgcagtacagcccaatcgcccggtggcgcttcgcttaccgggcctacaaaaaccgcagtgccgcccggcattcagaccgcaccacactccagccgatagagccagtcgtcataccgcaccccattaatttcatatgccttttccagtacctgcgtacgcacaaacccggctttctccagcacgcgcactga

SEQ ID NO: 140597 - DNA, 408 bp, Enterobacter cloacae
atgccattcagaacggttattaaatggcttcatcggctcaccacactggcgctgctcattatggtcatcggcttcgcgtggctaaaccatcagcccaacccacgtgaaagcgataaacttctccggacttacaagatttcgaataccgtctggctctatatgaccgcgaacgaccagggtggcgcgaccgtacctacgatttaccgatattatttgtcgcatgcgttaaaaggtatggacgctgacattgtccagcagctttcgacaaaatcgccggttctggaggggacaggcagcatttctgaagcacggataaacgaaaagggcgaagtggccattacctacagcggtaaagtattctctctgcatgagaacgtttctaaccttcgattcacgataaaaccgtaa

SEQ ID NO: 140598 - DNA, 2589 bp, Enterobacter cloacae; identical to SEQ ID NO: 94630

SEQ ID NO: 140599 - DNA, 447 bp, Enterobacter cloacae
atgctggccatactcgatgatctggattttcgcacctggcaaaccaggcacaatctggcaatcctcgcagaacgggcagggttaatgaccagcggcaagtttatatcgcgtgctagccgtggatgtgaccgtctctactggttagatttgatcatcaccgataaagcaaaatttaacccttatgatgcgaaatgtgcctgtaagcaaattgaagttacagagagcttttttgctgcgctggggatgccgctaaagttggtttatcgggagcgtgcgcgcctgttaaatgaagaccctaacgaagttattcatgcatgggattcccgtctcatggcattacgtctgcaaaacatgcagcgaatggcggccgcaggacttgcacgaatgaaagcccgacgtgaagctgcgcggcagcgtaaaaaagattactacgccctcccctgctga

SEQ ID NO: 140600 - DNA, 1719 bp, Enterobacter cloacae
atgaaaaaaaatttctttatcattttggttgctctgcttttgttgatagcattcactgtgtctagtgttgttaagtacaatagtcttttatcggagaaaactttatacaccgtcgctggcacccaagaaaactacggtttctcagtggcaaaattcattatacagttgaatgagctttacacgctaatcaatagcgataatactattgacgatgttaggcttaaattcgatatcctttattctcgtttgaatgttatttatgtaaagagtgaggcgactgcacctctatataaacagcaaggctatgaagaaacaattgattcgataaacaaaaagcttgaagacatagacgggctgctttcgcataatcaccctgactataaaaaaataagtacaatcatagctgatataaaaccgctaactaaaaccgttacaaatcttgctgatatggctgaaatagcacaaaggaatgacgctcttaaagatttcaggagcaaacgtcagcagttatggactcttctgtttattacaggtgggttgatttccttgcttctttttgtcctatttatttacataagtaaaattaaccgattgttactatcagaacgggctgcttttgccagtaaaaatgcatttttaggtatggtaggccatgaactcagaacatctttacaggcaatagtgtctatcattgatgtagtaaccaataatctgagtggagggattaaatctggtcagatagaacgacttgaaactgctgtttcgaaaatggagcgccagttaaatgatttggctgaatttgcaaaaattgacaacggatctgtagagataaaaaacacctataatagcttgcaatcaatcgttactaacgctgtgcaggattgcattgctattcatgaaaaaaaggatgtcacagttaaaataaaaaacaataatgatgcagtgatttttacagatgctctacgccttaatcaaataattgaaaacttaaccagtaacgctattaagtacactgagcgcggggaagttaatgtagattactttatagaaaaaggtaaggtattaaatattgtcatttctgataccgggaagggaatccctaaagacaaactaaagtttatatttaaaccatttacacgagttgtagattcgaaatccactgtacctggatttgggatgggacttgctattgttgcagggataatcagactattaaaaggtactattcatatatctagtgaagtaaatgtaggtacaactgttacagtgagaatacctatcaagttgggagatagcagccttgcaacagctgaggtatctgcttcagctcccggagatgtcttcggcgttcttagcttgcttgttattgatgataatgaaatggcctgttcgtctctttccagtctgcttactaatgctggatacattgtcgaggctacaacctcgcctgaacgtgccctagaaaagcttctgcgtaaaccttatgacgttgtcctgagtgatttacaaatgccaggcatgaccggtgatgagctgtatgcaactgttagtagcagtcagaatcctaatcgatccacgcctttcatattcatcagcgcatacagtgatgcaccctctatcggacaggctcctttgttaactaaacctgttagattaaaagatataaaccttaaaatacatgaggttatgtcaaatcaaggacgagtcaaaagtgagtag

SEQ ID NO: 140601 - DNA, 489 bp, Enterobacter cloacae
atggttaaaataatttcattcttatccctaatgcttttgtcaattagtgcatatagcaatattggggatatagttatagatggttcaattgctaatgctaacagtgataaaggttatgtgattactgaaaagcagtttgattcgttcccacgggataccatcgtaacgacaacaccctggacgccaaccggtaaaaaagtaaaattcaagggcgtcgacctaagttatgttttaaaactcgctggcgctaatggaacaaagctaaaattccatgccctgaatgattatgaaatcattgtagacatgaaagacgttgaaaaatataacattttattggctacagaaatggatggaaaaaggcttcaaataagggattttggaccttattttttggtataccctttagatgaacattatattgagcttaacacgccacactatcttgcacggttcatttggcagatagacaaaattacggtactcaaatga

SEQ ID NO: 140602 - DNA, 984 bp, Enterobacter cloacae
atgagaaatttacttgaatattccggtagcttgataagtaacgatagtttgatcgtagcaccttacgattatcagaagcaaagctatgaaaatattttaccattgaacaatggtcttataaaaaactggaatatacaaaaattctcaagtaattactctgaaatagaacacctaaatgtgatcaatggcatgggagtgacattaggtgattctatcgtcgggatttctgtgctgtcagcaatcaaaaaaaagaatcccaagattaaaattaagattattcgaccggagactgcaccgtcatatgttgaggaactgtatgaattagcatcctcggtcatagatgagcttcattacatgccttttcatattcagaaattgccttgtactgcattgaatattgatgtgggaaatcagctatattctccagatttccatattatggaaatgcatgattattttatccaaggtcttggcgtgaaacttgattatgttaaccataatgagttatctaataaatggttaggcaatattgatctcggagcgccagcttttgaaaactacacactttttgcacctgttgctagcacaaaaataagaagtataccgtcgaagttctattatgacatagttgatatgctttctaggcgcgaaggaaaaagggtactaggtttcgtggatgtgaatcataaaaattatattaacatatcaaagtattcaccccatacaaaagatttcatagcgctaattaagtatgctagcaatgtttatacttgtgactcctctgcattgcatatagccgctggatttggtgtacctactgaatgcgtgtttaatacaataccgccagaattaagaacaaagtattacagtaattgtaagtcgatttatgttgggaataaaagattagaaaaaattcagagtagtgaagatttccaactggttaaaatggtggaaaataatttcagggagtatctttatggttaa

SEQ ID NO: 140603 - DNA, 915 bp, Enterobacter cloacae
atgttggagatgtttgaaaaaattgaaaaaaaacactggcaggataaaatcaagaaaatctccaaattcagagtaataaaaatgcaagatctcgatgatgcaaaagtgatagaggtactggcgaaggtattgaccaaaaaaggtatttccaaggtaaagcacaatagttacataagtaaggtgctacagatcactacatcagcgggctataagaagttgaatggtgcgaccaagtgggaggttcagcaactcataaaagtagtccaatccgttggcatggatatgattgagtttttccgtatttattatgaggataataaagaaattcaagatgcgatctggaacgatggccgcagtgaacactcttgtaaggtatgcctctatccagaaggttcggaagtaaacacagaatactcagcactgaaagtagctgaccaatggaacattttcccgacaaatgatttaaaagatgaactgctttatgaatcaaagcgaagcatagaaagtattgtcataaatccaaaggtaattagcagcactaagtatcgaattgcactacttgatgacgatgctaatatcaccgaaagcttaaaagaaatcctttcgaacgattattatcaagtagacacttatgataacttgaaaaaacttactcaagctgtcgcaacaaatccgtatgacgcatatgttttggactggatcatcggtgatgaaacaagctttaagttggttaaagctataaggtcgtcaaaaaataaaaatgcaatgataatcgttcttacaggtcaactatctggtatcaaagatgatgaaattgtaaagtcaattcatgattatgacattgtgggaccatacgaaaagccgattaaatcaggcatcatcaaatctaacattgaaaaatatttcgccagatag

SEQ ID NO: 140604 - DNA, 309 bp, Enterobacter cloacae
atgagcatgcaaaccgtccgccgtaaggcgctgcgtcagaatccttattcaactctcggcaagccgccgctacgctcctcccgtgaccgtatcacgcgtgccattaatggcacctggtcgctcagggagctgccggataacgtccgagaattgctaattgaacgggcagccctgcgggcagaaatcactaccctgactgtgaaagcgcaaggactcaaaaaatccgatgtatccgtacatattgccgacaggctgcgacgtatcgatgcaatcacctcactgctggaaaataggaaatgtaatgcctga

SEQ ID NO: 140605 - DNA, 216 bp, Enterobacter cloacae
atgcctgacatcacgcccgctccggcctcactgcttgaagccgtattcacccccatgaccgagtacacgcacaacgtgtattcggtgaagggtgatcggctggcaatgacgcttacaaaaatcggtgttgcccaggctaacagccagggcgacattcagttgtttatcaacccggactgtgccaccggtaaggtactgctctacagaaaggactga

SEQ ID NO: 140606 - DNA, 663 bp, Enterobacter cloacae
atgttaaccactgccgcgttgtttcagctcgcaatgcagtgtgctcccgccgttcaccccgataccatccacgacatcacccgcaccgaatccggcttaaatccatatgccatcgctgaaattgtcccggtaaagggcggcaggagccgcgtgatttctcatctgccttcgtcgaaagacgaggcgctaaaaattgtggaggccataaagcagaaaaaacaccgttattcagtagggctgatgcagataaccagcaccaacttcccgcagttcggcgtaagcgccgaatccatgtttaacccctgtgacaacatgactgttgccgcgaaaatcatcaccgactgctatcaacgaggaggaacattacagcgcgccctgagctgctattactcaggcaactttgaaaccggccagcgcccggaaagcgcgttcggcaacacaagctacgtacagcgtattggctacgttgtgccctcaacgcgggcagaacagcagacagcatctccctcatccggggaagcgcctgccgtcccgtccgacaacacggtttacccggatagcgtcatacgcggcgtaattccggcacccgacaccaccccgaccagcatcgctgcttatccgccacatgtcgtgcgcggcggcctcgctgtgtcttctgattaa

SEQ ID NO: 140607 - DNA, 300 bp, Enterobacter cloacae
atgactttacgtactatcaaaaccgctgcaacccgcctgattaccgcattttccgccctgtctgctgttccagcaatggcggccagcgctgaccaggcatttcagaaaggcagtgacgccattaactgggtcttcctcggcctaaccggtatgtcagtcgtcactatcagctgtgcggtggcctttatcgcctacaagatgcttgttgacggcaaggcctggcacgatctccagcgcgtgttctgggcgggtgtcctgctcgccggggcgtccgggttcggtgcctacttcgccgcctaa

SEQ ID NO: 140608 - DNA, 2751 bp, Enterobacter cloacae
atgaccatcctcaacaaggcgctgacccgaccggcggcgctgtggggggtcccgcttgtccccctgctgttcaccctgtgcatccttaccctggcggccgtttggtcacgtttttactggcttctcctgctgctcatacctgcctttatcgagctgagacggctggcaaaagaggacattcatttctttgacctgaagttgctggcgtttaaaacgcgcggcaaccgcgcggcgacccggcatttcgggacaaaggcgcttgtcgcaaaccagtacgacgccattgacgttacggagtttataaaacatatgcggctcaacgagagtatcccgctgtcccgctatctcccctggtcttcccacctgcacgagcaggtggtgaagaacaaaaaaggtgactttgtcagcacctgggagatcggcggtaccatttttgaatgcgaggatgaacattacctcgccaccctggacatgcagctcaacaacgttatccgctcctttgaggggctacccgttaccttctatacccatctggtgagcgacgaatttaccgacacgcttgaatgtgaatccgggattccgttttcagatgaaatcgcgcgtctgttttacgcctcccgcgagggcaaacctttctaccagcgtcgcctcttcttcaccgtctgcttcaatccgcacaccggcattgagcgggcgaccatgaagcagaagtccctgggcgaacgtaaaaccctgctcgacaacgccctgcaggtgatgcaggagcaccggcaagcgattggcacggcgctgtcacgctacgcggcgcggccgcttggcacttatgaggagaacgggcacgtgttctcctcccagctggcgttttacaactttctgatcaccggcaggtggcagaaagtccgggtcacacgcacgccgttctatgacgtgctgggcggcacggatattttcccttccaccgacattggccaggtcagccacaccgacggccagagctactttcgcgggctggaaatcaaggattacagcactgaaaccatcaccgggctgtatgactcgcttctttatgcccgctgccggtacgtgttcacgcagtcctatacctgcatgggtaaggatgaagcgcggggctgcatccgcaccatcgagaaacgcctgaagtctgccgaggatgatgcgatctcccagcaggaagatctgaaggtcgcccgcgacatgcttcagtccggcattatttcgttcgggaaatatcaccagacgcttattgtcagcgccccaaccagcgagcaggttatccgggacaccaacaccctggcagatactctgaaggatctcggtttcatcatgaccctgtcccgcgagtcactgtcggcggcgtatctcgcgcagctgccgggcgtgtatcacctgcgcccgcgtctggtgccggtgagcagcctcaactacgccgaaatggtgtcgtttcacaactttcacccgcacaagcgggacgggaatgcctggggggaggcgattgccgttgttccgaccccgtccgggggctgtcagtacgtgaatctgcacaacagccaggccgatgttgacgagttcagcgagaagccgccgggtaacaccatgctgctcggcagtaccgggacggggaaatcgaccctgctgatgatgttccagcatctgatgcagaaataccggcgtcctgagtcatttgcgccgggggcgacgaagaagcgcttcacctcggtggtctttgataaagaccgttcggcggaaatgtcgatacgcctccagggcggctcgtacttccgtttccgttcaggcgagaagaccggccttaacccgtttgcgctcgctccaacgaaacgtaaccgcaacttcctcaagaagctgatgcgaatgatttgcaccagggacggcaaaccgctcgacccgcgcgatgaagaacgcctcagcgaggctgtggacaccatcatgctggactacccgcctgagcttcgtcgcaacggcatcacccgcatgctggaagtgctgcatgaagccccgacgaaggacgcacggatgaacgggctgcgcatccgtctccagcagtgggcgcagggcggggagtttggctgggtgtttgataatgacgtagacacctttgatatcgacaatattgataatttcggcatcgacggcacggagttcctggacgacaaagacgtgcgcagcccgctcaccttctacctgctctaccgcgtgaccagcctcctcgatggccgccgcctggtcattttcatggatgaattctggaaatggcttcaggacccggagttttcaaaattcgccctcgacatgctgaaggtcattcgaaagctcaacggcattttcttcccggccacgcagtcgccggaggaaatgtgcaagcacgagatctcggcggccattatcgagcagtgtagtacccgcatcttcatggcgaaccagcaggcgaaggagtacgactacgtggacatgctgcgggtgccgaaagcggtttacgacatcgtgaccaccctcgacccctacgcccgccagatggtgatcatgaaatccccgctgcggcgtggtgacgtgcgcccgtatatcgcacaaatcaccctcgacctctccgggctgggtcgctacacgaagctgctcagcgccagtgcggacaacctgaaaatttttgacgagatctggcaggagggtatgaagccggaggactggaaagacgaaatgctgagacgtgccgtttaa

SEQ ID NO: 140609 - DNA, 717 bp, Enterobacter cloacae
atgaaactgaaaaccaccctgacggcgctgaccgtcgccttgtgtctctttcacgtcccggctcaggccggtattcccgtttttgatgaagtagccaacgtcaacagaatacagcagtggacggagaagcttcagcagtggcagcagacggttcaacattatcagtcgcagatgaacgcttataaacaacagctggcaacggccaccggtattcgggacgtccaggcattcctgaatcaggcaaaaaacctgacggctgacattaaaaatctgaaaaacagggggatttccttaaacgatctgttaaccggctccggcgggtcttatgctggggaattaaacaggctgtatgacaaatacaaactgttcgacaactgcccggagaacgccagcgaggcgtaccgggatagctgcaaacagatgctcctcaatcaggcggtggccgtcgaggacacttctgacatccaggaaaaaatttccgacacgctgagcgatattagtaatctcgccagtcgcatcgagaatgcgaaggacagtaaagaatcgcaggatctggcgaacgtagtgtccgcgcggagtatccagctgaacgccctgaccactcaatgggaaatgtcggtcaaacaaagtgagatgcgcaaccagctgcttgccgaacaacgccgcaaggcgcaggccgagcagatgcgcacagctccaatcgcagaccttaactaa

SEQ ID NO: 140610 - DNA, 285 bp, Enterobacter cloacae
atgaaactgaagacactgacctttattgttctggcctcagtggccgcgcttaccggctgcgaggataaaacctccgtagactggtatatggcacaccatgacgacatgctggcgaaatacagggagtgcatttttaatcataattttgtgcccaccgattgccaaaatgcacgctccgcccttcaccgtgaaaaagctaaacctgatgttgccgaaggatataagcaaatcctgaaagaccttgataaagctcgcgtgcaagagcctattgctgatctgaattag

SEQ ID NO: 140611 - DNA, 1008 bp, Enterobacter cloacae
atgagtggaatattcgtcggattaaacagccacatcatggaggggtttgacagcgtgctcaccagcgtggccgccgatacgggggggtggatggcacacctgttctccgtcgcggtgctctcgctgtacatcacgtggcgcgcctaccagacgatggcaggcaagcttgtccgccccttcgaggagatcgtgtgggacgtgagccggatgctcatcatcatgattttcgtcaccaacgccggaggctatctcgatctggtttcggatgccatcaccggcctgcgggacggattcagcggcgacgcgtcgatctgggcgcggctggatacggtctgggaaaaggctcaagcacttggggagaagctttactcttatgatgattcaacctatgtcgctctaaaaggcactctggcgcagtttctggtctgggcaggcgtcatgttactggtaggcatcacggccatcattaacctgatagccgaactggtgatgctgctgatgctggcgaccgccccgatctttatctactgcctgatgtggtcgtggttccgggatatgttcagcaactggctcagaattattctgggctgcatccttacatccctgttcagcggcatcgccctgacggtggtaatggattacctggactacatcctggcgggcgccacaaaagcatccgatgccaactacctgactctggccgttcaggtcttcctcggcacggcgggtgccgccgccgtgatggtcctgacctataagctggccgaggcgcttgccggtgcatccgcacagggtgccgcgcaggcacttgccgcgtcgggaataggttcagcccgtcaatccgcctcctccgcagccggtgcggtgggggataaagcctcacagaaccttaacagtaccgacagcgcaacggcctcgtctgcctccacggcctcccgcgccaccggcgatgcgcgcagccgcagccgcgccgccgttcagcggatgcaggaacgctaccagagataa

SEQ ID NO: 140612 - DNA, 141 bp, Enterobacter cloacae
atgaaatacggcatcacgctgctgatgctgtgcctgcttgcaggctgcgcacagcgaaacacccaacttccgcccgtgtcgggcaacccggagccggtcaattccccggccattattcaggagttaaccccccatgtctga

SEQ ID NO: 140613 - DNA, 687 bp, Enterobacter cloacae
atgtctgaacttaccgccaaagccctgagcgactcgcgctcgtttgagaacgccattcttgagcgggatatgcgcatgaaaaaggcgggctggatcgtggcggcgctcgccggtctgctgctcgtcttcgcccttgccgcccttatcctgctgctgccgctcaaaaccacaactgtggagctgtacacgctcgaccgtcagaccgggcgcatcgagcgcgtcaccaccgtcggcgaggacaagctggacacctccgaggtgctcaatctctcgcagactgcttcctacgtgaagcgccgcgaggggtacaactatttcgcccttcagcaggactacagagagacgcagatgttcaacagcgacgaggtcaacaaggaatacctcgactggtttaacagcccagacgcgccggacgctgtgtttcagcaggcggcctatgtggtcacggtggaagtcctctccaacgtaccgtcagagggcaccggctccagcatggtggagatgctgcgcatcaagcgcaccattcgaaaggtcaaggacaacaccgaaacgtatgattactggacggtgcgcatgacctaccgctatttcccgcagaagaaaatgacggcctccgagcgcgaggtgaacccgttcggcttcatcgtcaccagttaccagcggtttaaggagaaaagcgatgaataa

SEQ ID NO: 140614 - DNA, 894 bp, Enterobacter cloacae
atgaataaggtactgatgtgtgccctcctgctgaccgccgcgtcagcatggggtgcggcgacaccgcgcggcagcgcctatgacagccgcatgcagaacatcccctacaacagccagaacacgacagtgattaacacgcgggcgggttacatcacgacgctggtttttgacgccgacgaggaggtgatcaccgccaccgctggttttccgcagggctggacgatcacacccgaccgtaaccgcgtggggattagccccgcgccggtgaagcagccggtaacggatgcggacggcaaaaccgtccagaagattttcacccccacgcagcaggactggcagaccaacctgtttgtgaccaccacaaagcgcgactacagcctgatgctgaacgtgatcgataacgaccgcgaggcgggaaatctggcctttgtggtgcgcttcagctacccggacgacacccgcaggcagaacgacgcagcccgcctcgcccgtcagcaggagcttcaggccgcgcaggagaaagaacgcattcagtttgccctgaagaaatccactgcgccgcgcaactggaactacacccgcagggtggcggcaggttcggagtcgatcaccccggattttgcgtatgacgacgggcggtttacctatctcggcttttcaccgcagaagctgatcccgtctccgacggtcatcgtcggcggcagcgagcaggtgatcaccccgaccttcagcaccgagggtaactaccgggtgatggtactgcgctctctttccccgcgctttgtgctgcgctatggcagccaggtcgtggggattgaaaacggcagttacgggaaagtcaccgtggcgaacggcagcaccgtctcaccggatgtgaaactggagagcaaatga

SEQ ID NO: 140615 - DNA, 1197 bp, Enterobacter cloacae
atgatgaacgaacaggaagacattaaaaccgccgccgaactggaggcggaagcccgcgagcgggcgcgggcagagattgacggcgacaaacccgccgcaggcgcggtgtcaccaggacagccacaggtggtgcagcacgcgaaacgccgcagccgccgcacgctcgtgctggccgctatcagcctggtgttactggtcattatcgccaccggcggggattacctgatggcgaaactgaagggtgatggcagcgggaaaagcgcgagccacgaaccggaatcgcacgccacctcccccgcccgcgagcgcaataacctcggacgggatctgaacccgctgggacagctggcagacacaaccggccaggagaagaccactccgggcgataccgctgcaccgccgcaggcatcaccgccccccctgacatttgataaggtcagcgccctggcagacagcaccacaaccaccgcaagcagcgccccgaaaagcacagccagcagtaacgtatcacctgcgggcagcgcgcccgcgccaggctctgcaacacccgccgggcagccgcaggataacgggctggcgcgcattaccggcgtgaagcggctcggtctcgatccggatttgtacattccggccgaccggcatatcccctgcgcgatgatgcagcgctttgtatcggacgtgggcgggcgcttcaactgccttatcagcgaggacatttacagcgccagtaacgccgtgaacctgatcccggcaggcactgaggcgcgcggcctgtaccgcaccggcacgctgaaaaacgggcaggggcgtctgttcctcgccatcaccgagctgcgcacgccggaacccggccgcctggttattccgatggttgacagccaggccgtgggggcgttgggcgagaacggcgtcgcgggctggatagacaatcactggctggaacggataggtaataccctcctgctcggcacggtacaggactttgccgctgcggcctccggctcgtcgccgggcaaggatcgcaacacggactacacggagaacacccgcgcggccacggcggaaatggcaaaaacgctcctggaaaacagcatcaacatcccgccgacgatgtacctcaaccagggcgatgtgattggcctggtcacgggggcggacattgatttttcagacgtctacagactgcgcatgaggtaa

SEQ ID NO: 140616 - DNA, 1050 bp, Enterobacter cloacae
atggacgataacctgactgataccccgttagagggcaacgtcgcgctgtcacacctgcgcgatctgctgttcggggactacctgagccgggaggggctgacggaaattgccatcaaccgccccggagagctgcacaccaaaatcaacggggcgtgggaaatgcacgcctcgccggtcacgctgcgccagtgctcgtcctttgccagggcgctggccgtgtggaacaacgacaccattgatgaaacgtcgcctatcctctcggccacgctacccacaggagaacgctgccagatagtggtgcccccggcctgtgagcgcaacaccatctcgatcaccctgcgtaagccggactacttccagcgcacccatcagtcgtatatcgatgccgggttttatgaccgggtgcagggtacagaaaaggtggaatcaaaagacggggagctgagccgcatatacctgtccgggaatatcccgctgtttatggaaaagtgcgtggagtacggcaaaacgctctttgtggtgggggaaacaggctccgggaaaaccacctacatgaagatgctgctgcactacattcccgagacgctgcgccttatcaccatcgaggacaacccggaactgaagttttacagccagaaaaactacgttcatctgttctacccggcggacgccggagagggcgcaatcgtcacctccgaccgcctggtgcgcgcgatttaccgtatgaaccccgaccgccccctgctcgccgaggtgcgcggccgcgaggcgtgggacgccctcaagctgattgagtccgggcacgaagggtttatgtcttccctgcacgctggcagtccacgcgagtgtatttccgggctgattgaccgctgctacgagcatccggcgtgccggggcatgccggttgacgtgctgctgcgcaaggtactgcactgcgtcgacgtcattgtgagcgtggacgttcacggcaacgtgcgccgcatgagcgacgtctattttaaacccctgcacatgcaggccatgaaggagagtttcaatgatgctgcctaa

SEQ ID NO: 140617 - DNA, 402 bp, Enterobacter cloacae
atgatgctgcctaaactgaccggcctgacggcgtttgtcgtcctcctggcgggctgttcttcgccgccggagcctgcggccgttgactggtcacaaccggcgcagccggtaacgaccacccggccggtatgggaacccaaccgtcttatcgtggcctcgccggtgacggaagggcactggtcgcaggtgcttgcgcgttttgaacccggcgggatttacccggccgcacagtggtacgcggttgcgcacgcctcgcgcgcggtagtaaatgccccggacggccagcgcttctttgcggccaaaacctggctacgcgagggcggctacaagggtgtggtggagtttcgcccccactccggctgcctgacctgcgacacctcagaaatcgtcttctaccgataa

SEQ ID NO: 140618 - DNA, 318 bp, Enterobacter cloacae
atgaaacacaccgtaatcacggcggcactgctgtgcgcccttacttctccggcgttcgccgccgatggccagaatgccgacccgaatgacccgtgcgcgatggtgctgtgcctggccggaaagctcgacggcagcagtcccgccgagtgtgacccgatgtacaaaaatttcatgagcatcaaaaagaaaaaaaaggggtcgtttttacccgatcacaccgccgcagcgcggcaaaaaaaactgagcgcctgcccgtccgctgacagcgccattgtcggcaagatcatctcgaaatttggccgtatgaacggttggtaa

SEQ ID NO: 140619 - DNA, 336 bp, Enterobacter cloacae
gtgattaatcaaaccgtttctattaataacttttccgggctgctgaaagatgaggagcttcctgcaggtgatttgcagacggtgctgctcgttttgtcggaaatcagccagaaacaggatcattttcaggccaacacgtccgaactcgtccagctcgccgcgcagcactcgccgaccttccaggcattaccagctgaacgtcagtcgttcttccgctccgtgctcagtatgccggtcttcttttacaccgttccgcttagcgacgacgaggctgcggaatgggaaaaactcgacgataaggatgcactcgaatggcaacaaaaaccggatttatag

SEQ ID NO: 140620 - DNA, 309 bp, Enterobacter cloacae
atggcaacaaaaaccggatttatagccccgccgtggccgcatgtgcgtggtgattccgttagcgccgcgagcctgatttctcgcatcgagaaagaagcgcatcgcggctgcggcctgcattacgaaatctaccaatatcgcgccctgtgcgaattgcacgatgttctgaccagtctcagcgtccgtgatgctgagacgttcatgacagtagcggcggatcatggctttagtctgtccgttaacgactttcaggaaagtcgaatgatgtacttcgaaacgatggatgaaatcaggagagatcaagaatga

SEQ ID NO: 140621 - DNA, 2202 bp, Enterobacter cloacae
atgagactgtggattgcagaaaaacccgcagttgcgagcgatatcgcgaaagcgctgggcggcaacttcacccggcacgacggctatgccgaatcggcgaccgatatcgtgagctactgcgtcggccacgtgctggaaatggtgcccccggagacgatcaacccggcctacgccacctggtcgctcgacaccctgccgctgaagctgtacccggtacagcttcagccaaaagcgagcgtggcaaagcaggctaataccctggtgaagctgattcgtcgcccggatatcaaaatggttgtccactgcggcgacccggacgacgaggggcagctcttggttgacgaggtgctggagttcgccggaaacaccgcgccggtgaaacgggcgctgattaacgacaacaccgcgccagcggtgaaaaaagccatcaactccctgcgcgataacagcgattttcgtgggatgtacctgaaagccctgatgcgcagcgccggagacgcgatttttggcttcagcatgagccgctgttacaccctcaaagcccgcgataaaggctataagggcacgatttcggttggccgcgtccagacgccggtgctgggtatgattgtgcgccggtggcgcgacaatcaggcgcacagcgaggcgttttactaccagctcgcagggcagtttatcagcggtacggacgttgtcagcgcccgctggcagacgtccgaatacgcgccggtggacgataaaaagcggctgacggataaggcctggggggaaggactcgcgagggctctggccggaaaaccggccagcgtactcgcggccgccacagaccggggaaaaaccacggccgcgccgctgccgtttaacctgctgcgcctccaggtgtatatgaaccgcaggaacaaactgaccgcgcagcagacgctcgatatcacgcagaagctcaaggacagtaaatacattacctataaccgctccgactgttcttatctgtccgatgaacaattcaacgacgcgccgcaggtggtggcggccttaaaaacgctcgacatttttaacggccttaccaccgacacggcgcagaaaagtgcggcgtttgacagtaaaaaagtcaccgcccacaccgctattatcccgacgacgaacatgccggatttaagccgccttaccgacaaggaaaaggcggtttatctcgccatcgcgcagttttatctcgcgcagttcgtggcgaaaaagcgctatgacgagtcgatcgcggagattaaatgcggtgacgaaatgtttaaagtctcggcgcgtaaaaccacggatgcgggttttacgacgttcctgaacgacgcggaagaagacgacgaggaggacgaaaacagcaccgcgtttgaggccatcagccgcctgcaaaccggggcgacattaacctgccgcgaggtggtgatttcggagaaaaaaactaaaccgctgccgctgtttaccgaggcgaccctgctcgctgccctcgttcgcgtggccgattttgtcgccgatccgcgcattaaaaaactgctcaaggagaaggataaagacaaaaaagatgaacacggcggcatcggcacaccggcgacccgcgcggccattattgagacgctgaaaacccgcgattacatcaccgtggaaaagggcaaatttatcccaactgccgccgggctggcgttaattgatgccctgcccgactcggtgacgcagccggatatgaccgccgtttgggctgaaaaacaggcggcggttgaaaccggcgaaatgaccatcgagcgctttattgatggtctttacgcggaagtttcccgcctggttgagagcgccgatattgccatcagcgcgacggaaaaacagcccgttaaaacggcgcttaaccgcctcgcggttaaatgtccgtcgtgcggttctgagctggttatgacgccgaaaacctgcgcctgtacgggctgtcagttcaaaatatggctggaagtgcgcggcaaaaagttgacggaaaaacaggccgagaagttaatcggcaagggcaaaaccgacgttattaaaggttttaaatcgaagaaaaacgacgacacctattcgatgatcgtcacgctgaaaaacgtgcaaaccggggaactcggttttgaatatccaccacgcgatccgctgaaaggattgaacgtatctatgccgaaggagctgaaattatga

SEQ ID NO: 140622 - DNA, 393 bp, Enterobacter cloacae
atgaaccgtatccaggacgaattaacctcagagcgcgcgctgaaaaagtttttacgtgaaagtgattttgcctttctggagatgctgagcgcacgtatttcagtggcacttgatgaaaagcgcgcagagcatatcgagcaggaaaagctacgccgacagcgggaagaaaagcgcaatgaattgctggcgctgattgaatcggagggcttttcaccgacagagctggttagtacaaatcccgccaaaaagtcggcaaaacgcaaagctaaatatcagtattttgaaaacggcgggcataaaacatggtcaggcgtcggacgcgtgccggttgtaattcagcaagaacttgacgccggaaaacctcttgaatccttccttattaccaccgactaa

SEQ ID NO: 140623 - DNA, 1908 bp, Enterobacter cloacae
gtgatattcgacaaactgaatcatttgctgtcgccgatagcaaatgccgtcctggcctttatcgcctttttgcaggcgcatcagctggcgttagcgctgctgtccggcgtcatgctgccttttatattttctgcgaaacacggcggtcaggaaaagccgacgtttctgcaaaggatcttaattctgctttccatgatctgttttgttttcggctcgatagcgccggtggccgtctggtttttacagcgcatttatggccgggaagatatcgccagcccgccgctgcttacctggacaatggcgctgctgtttaccgtcgccggttttattctgcacgtggttttacggcgtctgatctcgcctgaatttgataaggtcaaacgcggcatggtgaaaaaaaccagcatggagcgcgaccgcagaaccgacgttcgccgggtaaaagaaattttacccgtcaccaccgaatacgatccgatggattacatcgatctgaataaggggatttttatcgggctgagccgcgagggtgagccgcaatatattccgttaaaagaatggcagacccagcacgccgacattatcggcaccactggtgccggtaaaggcgtcgtaaccggtattctgctttatcagagcatcctcgccgacgagggcgtttttgttctcgaccccaaaaacgacgagtgggcaccgcacctgtataaaaaagcgtgcgcagacgccggaaaaccctttgtgcttatcgacctgaataaacaggaataccagatgaaccttatcgacggtatcaccgccgaccatctggaggaattattcgtggccggtttcagtctggcggaaaaaggcgaggcggcggatttttaccgtatcgacgaccgcaaggcggcgagaacggcggcgcagttcgtgaaggataatccgggcgcaaccatccgggatatttataacggcgattatgtccagggcattggggaaacaattaaagcctttcacggtaaaaccgaggagctggcgatgctcaacagcattaacgctccaggcggttttgcgctgaaggagattttcgacaaaggcggctgctgctacatcatcggctcgatgcgtaactctaaaatcattaccgcgcagcgtatgattttagtgcgcctgttccagctcgcggaattgcgcgaccgcgtcgcggggaatatccgccccatcgccatctttaaggacgaggttaaatatcacctgtccaaaccggcgctcgaagggttaggcgcggcacgcgataaaggcgtccatatattaatggcgcaccagtcaattgccgacctgcgcgactgtccggcggatttaaacggcgacgccgtggttggggcggtcgtggaaaactgcaagtttaagctggtatataaacttcaggatccggacaccgccgaatggattgcgcgcatgtcgggcacgattttagtcgatgatgaaagccggaaagtcaccaccacggcggtgctgacagaaaaagtcgataacgagcgcatgcttcgccaggcggaaagctattacatcgacagcaatatgctccagaacctgccgaagttcgtcagctatatcttcagccagaacgcgctcgcgtttccgtcgttaatctcaccgctcaaggttaaaaaagccccactggagctgtttaccctgccgccggtcgcagtcgctacggtggcagaagttaaaccggtgctggatctggattttgataaaacggctccggcagttccggcacctgacattattccggtcagcgcaacaaccaccaaaaaaccctcagcaacgtcaatccccactccgccggtgcagcctgacgaggagtggctgatggcatcacagcccgctccaaatgacgaaatacattcgttgctggatttataa

SEQ ID NO: 140624 - DNA, 747 bp, Enterobacter cloacae
atgcttatttcgtcgtatcaggaacgttatgcacgcagcactgaaaaaattcgcgtactgctgaattttcttaaggaggaaacctacagcgattttcaaatcataaagctgctttttgattttaaatctgaccgccccctctaccggttgctggagaaggtggagaaaatggggctgattcagaagcacgtgcatgaatcccgcgcgtccagaatatccctgtggggcattaccgccgacgggctggccgtgatcctcacggcggacgacaacataatgcccgcccgctttgaaccctaccgcctgaccggctggtcactcgaccatcaccttgataaccagctcgtgcgccttacgctggagaagaacggcgcgacagggtggattaacggcgaccgttcaacgttcctcagtcagtacagcgtcaaacaccgtcccgacgggcttatcagcctgccggacggcaggctgatcgccgttgaaaccgaacgacgtattaaaacaaaggcgcgctatcagtccatcatggcgagccacttgctggctatcagcgataaaaaatggcggtacgcgttttacgtcgccccggacgaggcgaaaaagcgcgccctgaagattattttcgacagcatcgccagcgtgatcgtgaaaaaccagcatgtgcaactggaggcaaaacaccgcgatgtctttcgcttttataccctcgacgaactgaaaagcctggagctgaacaactatgcgtaa

SEQ ID NO: 140625 - DNA, 528 bp, Enterobacter cloacae
atgcgtaaaatcgcccttctggtgctagccgccgccctttgtgtgcctgttttatccactgccgcgcccgtcctgacggcgggtttttcgccgtccgacgggcgccctgcccttgaggttgtgctcggcgccataaacaacgccaggcagagcattgacgtcgcggcctacagcttcaccagtaagccggtcgcgacggcgctcgcaggtgctaaccggcgcggcgtggccgtgcgcgtggtggccgacgaaaaggccaacagcgaccgctacaccgccgtgacgtatctgataaaccagggcgtgccggtgcaccttaacggccgttacgccatcatgcacaacaagtttatggtgatcgacggcaaaaacgtccagaccgggtcgtttaactacacggccagcgccgtttcgcgcaacgcggaaaacgtgctgctgatcgaggacgcgccgcagctggcggaggcgtaccagcgagaatttaaacgcctgtgggatgagggcacccctatgaatgcccggtactga

SEQ ID NO: 140626 - DNA, 432 bp, Enterobacter cloacae
atgacgatgaacctgcacacccagacaaccgcccctaaagctgcaccggcgaccagcgtatccccgctggagcagtcaggctccccaaaaacgaaatttcctgaaatcaaaaccgtcaaaacggcggtggttaaactgatcagcgacatcgagggcaacctcgaccagcgtctggcataccgcgaggccgtagagggactgtgccaggaggcggccaaccggatcacccagtgcatgcattcacgcagtacagggcagacgctacgtgaactccgcgagctgctgtcggtgacgctggacaccattatcgtggtggattttgaagggcagcagacccgacttaactatggcggtcgctcagctgaagacgtgatcgccatgctgaaagcgctgcaccttgaagggcgtaaaacttggctggaagtggagtaa

SEQ ID NO: 140627 - DNA, 966 bp, Enterobacter cloacae
atgacgatgaacctgcacacccagacaaccgcccctaaagctgcaccggcgaccagcgtatccccgctggagcagtcaggctccccaaaaacgaaattttccaggggcaaaagcaaagcccgtgctggcgcagtcaaaacagacctttaccagacagtaacggacagcatcattgcagccctggaaagcggcgttaagccgtgggtgtgtccgtgggttcgcaacggcgcagcggcgggattaccggccaacttcagcaccggcacggcatacagcggaattaatatcatgctgctgtggtgtagtgcggcaaaacagggttttcaggacgagcgctggctgacctacaaacaggcgcaggagctgggcggccaggttcgtaaaggtgaacacggcacgacggccatcttttacaagacgctggagaaagaggacgaggacggggaaatcgaaaaaatcccgatgctgaaagcctttaccgtgtttaacgtggagcaaatcgacggcctgagcatcgagagcgtgccgcagccggttgccggtttcgatccgctgccgcaggcggaagcactcatgacccggagcggggcaaaaatcaccgagcagggcgtaaaggcgttctatcgtccggccaccgatgaaatcgtcctgccggagcggttccgcttcgcggacgcggcaaacttctacgccaccggcctgcatgagctggttcactggacgggtgcagcgtcccgcctcaatcgtgaaaaaggcaataagtttggctctgaggcgtatgcgtttgaggaactgatcgccgagctgggcagcgcgtttctgatggtggatttggggattgcgggagaggtgcagcatgaaagctatatcgcgtcctggctgaaatccctgaagggagacaagcgctacatctttaaagcggcggcagcggcctcaaaagcgcaccgctggctgatggactgctga

SEQ ID NO: 140628 - DNA, 240 bp, Enterobacter cloacae
atgccacgacgctatgaaattgacgctgcctggcgtgcggccatcacccgcgaacaggatggccgtcagaccgtcacgaccgctgcctttgtccgggaactgcacaagttcaattggcactggacgccccgccaggctaaccagtggatagaaacgtatgtgacggtattccgggacgtctcccccaacgagggagaaaaccgtacgttccagctgtttaacccgaacggagggcgctga

SEQ ID NO: 140629 - DNA, 216 bp, Enterobacter cloacae
atggggtttccttcaccggcaatggattaccaggaaagccgcctctcgctggacagctactgtaaaaccgggcgtccgggcgtattcctgttccgcagcgattgcacctcattccgggagggtatcaggcagggctcgctgctaattgtagattttggaggtacgccggttgatggttctctggtgctatgtgtcctggaagaacaattcaggtga

SEQ ID NO: 140630 - DNA, 384 bp, Enterobacter cloacae
atgcgcgctaaagaaagacttccccggaaacactattcccctgaattcaaaatggaactggtcaggctggctcttgaagaagaaggcagtattgccgcactggcccggaaacatgacgtcaatgataacctgctctttaaatggataaggctctggcagcgtgaagggcgggtctgtcggccccgaaaaaactcatcgtcgcttcctgccctgatacccgtgcagcttcaggcgggctcttctctcccaaccttcgaactaccatcctgctctcctcccgctacctgccacataaaatgtcggggaggagaaataacactgactcatccctctgctgaactcatgagcactgtcctgcgcgaactgatgcgggggccggtatga

SEQ ID NO: 140631 - DNA, 348 bp, Enterobacter cloacae
atgataaatcttcccgcaggcacaaaaatctggctggttgccggtatcaccgatatgcgcaacggcttcaatggcctcgccgcaaaggtgcagaccgcgctgaaagatgacccgatgtccggccacgtcttcatcttccggggacgcagcggcagtcaggtaaaactgctctggtccaccggcgatggtctgtgcctgctgacaaagcgactggaacgtggtcgcttcgcctggccctcagcccgcgatggcaaagtgttcctgacgccggcgcaactggcgatgctgatggaaggtatcgactggcgacagccaaagcggttactgacatccctgaccatgttgtag

SEQ ID NO: 140632 - DNA, 1536 bp, Enterobacter cloacae
atgaacgatacctcttctgacgacatccttctgctgaaacagcgcctggccgaacaggaagcgttgatccacgccctgcaggaaaagctgagcaaccgggaacgcgaaatagaccatctgcaggcgcaactggataagctgcgccggatgaacttcggcagtcgttccgaaaaggtatcccgccgtatcgcgcaaatggaagctgacctgaacctgctgcagcaggaaagcgatacgctgaccggccgggtggatgacccggcagtgcagcgcccgctgcgtcagacccgcacccgcaaaccgttccctgagtcactcccacgggatgagaagcggctgctgccgactgagccgtgttgcccggagtgcggtggttcgctgagttacctgggtgaggatgccgccgaacagctggagctgatgcgcagcgccttccgggttatccggacagtccgtgaaaagcatgcctgccgtcggtgcgatcgcatcgttcaggccccggctccttcgcgccccatcgaacgggggatcgccggaccggggctgctggcccgagtgctgacctcaaagtatgcagagcacacaccgctgtatcgccagtcggagatctatgcccgccagggtgtagtgttgagtcgttctgtactgtcgggctgggtggatgcgtgttgtcgtctgctggcaccgctggatgaagcccttcagcactatgtcctgaccgacggcaaactccatgctgacgatacgcctgtcccggtgctgttgccgggcaataagaagacgaagaccgggcgcttatggacgtacgttcgagacgaccgcaacgccggatcagcgctggcccccgcagtgtggttcgcttacagcccggacagaaaaggtatccaccctcagacccatcttgcaggcttcagtggcgtactgcaggctgatgcctacgccgggttcaacgagctctaccgcgacggccatataaaggaagccgcgtgctgggcccatgcccgccgaaaaatccacgatgttcacgtccgtaccccgtcagtcctgacggaggaggcgctgaaacggatcggcgagctgtatgccatcgagtcggagatcagaggtaaaagagcagaggaacggcaggcagtccggcaccaaaaagtgctgccgctgctggcgtcactggaggggtggctgcgggagaaacagaaaaccctctcaaggcactcagaactggcgaaggcgttcgggtatgcgctgaaccagtggccggcgctgatccgctatgcagaagatggctgggtggaggtggataataacattgccgaaaacgccctacgacgggtcagtctggggagaaaaaactggctgttcttcggctcggatcatggtggtgagcgcggtgcgtcactgtacagtcttatcgggacgtgcaaattaaacggcgtggatccggaacgctatctgcattatgtacttgatgtcatcgccgactggcctgtgaaccgggtgggtgctctgctcccgtggcgggttactctgcctgcctga

SEQ ID NO: 140633 - DNA, 705 bp, Enterobacter cloacae
atgagccaaaaattcgcagtgatgattgcttacgacgacgatccaaacgtcaaaaggtattcacctgactttcaaacgcaggatgagtttgctaaagggtggcagtcggctcttaaaaaggcacaccacacctcaggtcaaaaatcagtcatcacctgcggatgtcgtggaaaaggagaaaagcgactttatgttcgtgctttaccgaacggtgatgcctttattctcgtcaaagccgctaacacgggcattgagcatgatccttcctgtgtattcttctcccttgatgcccggcataccggcctgaaaggatatgcgagtggtgtggtccggattacaaccgaaggtgatatggctgtaaggctcggtatcggtatgacagagaaagatcctcctgaaaaatcagaagtgcctcccctgccccatgttcagcgaccagaaggaggtcaggcctcaatgaccctcctgggcttgcttagtcttttgtggacagagtctggtctgaatgtctggtacccgaaaatggcagggaaacgtaacgattcactggtacggtatcgtctgcttgaaaccgctaaacaaattcgtaccggcagagcctgcataggtgaccatttattcattggtgtacctgacccgaaacaacctgtcgctcagtcgcaaattcagcgtctttcatcacaggcgatgagtgataaacggtaa

SEQ ID NO: 140634 - DNA, 1428 bp, Enterobacter cloacae
atgaaacgttacactcatgatcttgagacagacctgaatgatgtggataaaacaccatctctgatccacaaaactttgttaacagcttcgaccatttatgacctgaaatatctggctcaggtattaaatgatgaaaatggcagtaattggtcccgtgcatcccttaaacgtcaggttacatgcatacctgagcattgtgagctgagtatcgcagatggacgctatctacagactttaataccttcacgacctgctgattatgaggacaggcactttagctttatcgatctgtttgcagggataggtggactgcgaagcggatttgatgccatcggtggtaaatgtcttttcacgagcgaatggaatacttattccagccgtacttaccgggcgaactggtattgcgatgagaacgagcaccgcttcaattcagacatccgtgacatcactcttagcaaccggcccgaggttactgatgacgaggcatacaaatttatcgatgcctctatcccggatcatgatgttcttcttgcgggatttccatgccagccattcagcatcgccggtgtcagtaaaaagaactctatgggtcgcaaacacggtttcgagtgcgacactcagggtacgctcttctttgatgtggccaggatcatccgggcaaaacaacctgcaatttttgttctggaaaacgtaaaaaatctgaagagtcacgataagggtaatacctttaacatcatcatgaaaacgctcgatgagcttggctacgacgtcgcaaacagcgaaagcacgggcgcggatgatcctaaagtcatcgatggccgtcatttccgaccccagcaccgtgaacgtatcgtccttattggttttcgccgcgacctacgtctgaaagacggttttactctgagagacattaaagacttttatccggacaagcgcccttctctctcagatttactggatccgagcgtagatagtaaatacatcctctcccctaaactctgggagtacttatacaactatgcaaagaaacatgcggcaaaaggcaatggttttggttttggactagtagatccttccaatgttaatagtgtcaccagaaccctctcaagccgctatatgaaagacggatctgaaattcttattgatcggggctggtctcatgaactgggagaaactgatttccataacacatacaacatggaccgtcggccacgcatgctaacgccacgtgaatgcagcaggctaatgggcttcgataaacccggggaaagtgttttccgtatccctgtgtccaatacacaggcttacagacagtttgggaactccgtggtcgttgatgtctttgcggccgtcgccaaactgctgaagtcacgaattgaatttgcagcctcccagcgcttgcggcagttttacgacgaagtcagctga

SEQ ID NO: 140635 - DNA, 456 bp, Enterobacter cloacae
atgctcaaaaacagattttctttattgtgtcttgctgtggcatcgtcacttactcttactgcttgcgatgtagttgatgctgcctatgacgagactttaaatgataatgcacccgaaattgtaatagctggaggattcaaaattgatatccaaggtaatgcagttccggttgagggatatgataattgctctttgaatactcttcagggaagcgttgatacggataaatcaaattgtattgttctggatagaacacgtaaaaaagtaccggttctagttcatttgtcatccggtcccgtcaaagaagaatggaagatcgagcaccaggttgaaaaaaccaaatccggcaaaaatttcatccaaactcgtatgattagacctgacggtaactttgtagtgcctgcatcctcagaacgagggatctttagtggcaaacattacagtcaagccagctaa

SEQ ID NO: 140636 - DNA, 1542 bp, Enterobacter cloacae; identical to SEQ ID NO: 30088

SEQ ID NO: 140637 - DNA, 2967 bp, Enterobacter cloacae; identical to SEQ ID NO: 5007

SEQ ID NO: 140638 - DNA, 561 bp, Enterobacter cloacae; identical to SEQ ID NO: 5006

SEQ ID NO: 140639 - DNA, 660 bp, Enterobacter cloacae
atgcgccagaatttaccagtgacgggtcgaaacttagaactcccaaaagatgccaatattctttcgactacctcccctcaaagccatatcacgtacgttaatcctgacttcattaaaatcagtggtttcactgaggaagaactattaggccagcctcacaacatcgtaagacacccagatatgccgcctgctgcatttgagcatatgtggagtacattaaaatctggccgctcatggatggggctagtaaaaaatcgctgtaaaaatggcgaccactattgggtaagtgcttatgtaacgccaatagctaagaatggttcgattgttgaataccagtctgtaaggaccaagcctgaacctgagcaggttttggctgcggaaaaattatatgctcaattgagaagcgggaaggccgcgaggccgaaattggctgctagcttttccgtgaaaatactcttgctcatatggggtagtattatatcaagcgcaatggctgccggcatgcttactgatacatcaataagcagcttattgttagccactttaatgtcaggaagcttaagctctgttagtgttttggctattctctctcctcttggaagactggttgaaagagccaggaatatttccaataacccattaagtgatgtagccccctga

SEQ ID NO: 140640 - DNA, 876 bp, Enterobacter cloacae; identical to SEQ ID NO: 14822

SEQ ID NO: 140641 - DNA, 444 bp, Enterobacter cloacae
atgaacccattcaaaggccggcattttcagcgtgacatcattctgtgggccgtacgctggtactgcaaatacggcatcagttaccgtgagctgcaggagatgctggctgaacgcggagtgaatgtcgatcactccacgatttaccgctgggttcagcgttatgcgcctgaaatggaaaaacggctgcgctggtactggcgtaacccttccgatctttgcccgtggcacatggatgaaacctacgtgaaggtcaatggccgctgggcgtatctgtaccgggccgtcgacagccggggccgcactgtcgatttttatctctcctcccgtcgtaacagcaaagctgcataccggtttctgggtaaaatcctcaacaacgtgaagaagtggcagatcccgcgattcatcaagggggaaccgcagaattcggaaaaaatcgtacgctaa

SEQ ID NO: 140642 - DNA, 1746 bp, Enterobacter cloacae
atggaaaattcaatctcatccttcgtcacaaaactaatacctttaattgaaacagaccgagacggtttattatttattgatggtgcttggggtactggaaagacgcattttatcaaaaccaggcttaaggatttatatgataaaaacacatacttttatatttctctcttggggatttcttcgctagaagattttaaatcaaagattattgaatgttactatcttgctgacgctgaaaacatcacaaatcagattaattcaatagctgatagtgccagcttactccgcggaagtcctgatgactctggcgtcataaaatctttatttaactccataggggctagcatcaaaggaaaagtattatcaagcctttctggaatatttattttagatgatattgagcgcgtcgacaaagaagaagtcacatcattaatccttaattactgtcatacactctattctcagaaagagagccgagaattagattttatagtagttgggaacacctctaaagaagccaactttgaaataacccataaagaaaagttaatttctgacactatatctttcacaccaaattttgaagagctttgtgatattatcctccccaggttatcaccacttccagaaactgataaacaagcttttttgaacataatcaaaaatcaaggcatagttaatcttcgtattattaatagatgtatcgataaaattcttcctttatatgaatacattaatagcaatcctgacaaagaatggaatgttcgctcaagtgacgttattggttgtataacctcatcaattatcctccaccatagccacaataaaagcatagaaatactgcataagcactcaccaaaaaattacctcataaatcaagacgacaacgactcatattctgaaaaagaattgtggacattatataaaaaatatgcaatccccgatattgttagagattacagcatggggctggaatcttcacaatcaacacaagaagtgatattttcaaccccaaaaaaaatgtctctcgaagatatagccattgcagaccaacctcatatccatgatgttgatgaaatttcattatcccaatgtttccatgacataattacaaagaaaaggattgtgccaatatactcatggatgttaatggtacggaattacatcttcctcactgaaaatgaatatttaccgacgaatccgttattaagcaaagattacattgaacaaatggcaaatgactttagccttgaagaaatctctgatttcattgataagaaaggtggctttgatcacctgcgacgctacggtttatcatcgatcaaccaagatccttatatgaatatttttctgaaaaaatatgaaagccacattaccacagctacaattaaatcactacgccatgcagtagaatatgatggatggtacagcattgataccactaaaagcattgatagccttgatgattattcaaggttcagacctttgcagattattggcagctcgtttttgctaaagcacctattattatcctggaaaccgatagatatcgaatcatttgattcctacttagctaacctatattcctttagcaatatcagagaatatttaagtgaagaaaaaccacatttaatacgactagaaatacatacatatatttatttacgatctaaaaaaccaaatttcaaatatggcgcaataaaacgattaaacggtacgttaaatgaaatattaacaagactttaa

SEQ ID NO: 140643 - DNA, 2127 bp, Enterobacter cloacae
atggcaactgcaatcgctataaaaggccgcaagggcggcagctcaagttcccgaacccctaccgaacagcctgatgatctgcaatctgttgcaaaggcaaaaatcctcgttgcactaggagagggggaatttgcagggcaactgacggcgaaagatatctacctcgacggaacggctctggagaatgctgacggttcccagaacttcagtggcgtaacgtgggacttccggccagggactcaggcgcaaaaatacattcagggcatacccggtaccgaaaacgaaatcaacgtgggaactgaggtatcgagcgctacagcgtggacgcgcacgtttaccaatacgcagctttcagcggttcgcctgcgcctgaaatggccttcgcttttcaagcaggaggacgacggcgatctggtcggttactcggttaattatgcgattgacctgcagacggacggtggcgcatggcagacggtactcaataccagcgtgaccggcaaaacgacgtcaggttacgagcgcagccaccgtattgatttacctcaggctggaagtacctggacaatccgactgcgtaagattacgtctgatgccaacagcgcgaagatcggcgacacgatgatgctgcagagcttcaccgaggtaattgacgccaaattacgctatccaaacacagcgctgctttatatcgaattcgattccagccagtttaacggctcaatcccgcagatctcctgcgagccccgaggccgcgttatccgcgttccggatacttacgaccccgacacccgcacttatagcggtacgtggactgggacatttaaatgggcctggaccgataaccctgcatggattttctatgacctggtggttagcgaccgtttcggacttggggatcgtcttacaacggccaacatagataaatggacactctaccaggttgcgcagtattgcgatcaaatggtaccggatggcaaaggcggaagtggtaccgaaccacgttatacatgcaacgtctacattcaggaacgcaacgacgcttatacggtcctgcgtgattttgctgccatcttccgcgggatgacctactggggcgacgaccagattgtggcgctggcggacatgccgagagatgtcgattttacatacacgcatgcgaacgttattgatgggcgatttacctattccagcagcaccacaaagaaccgttacaccaatgcgctggtgtcctggtctgatcctgataacgcttattctgatgcgatggagcctgtttttgagcaggcgctggttgcgcgttatgggtttaatcagcttgagataaccgcgatcggttgtacccgtcagtcagaagcgaatcggaaagggcgatgggggatcctcaccaacaacaaagatcgcgttgttactttcaacgtaggggaagatggcaacattccgcagcctggctatgttatcgctgtagcggaccgaaatctctccgggcgcgacctgggcggccgtatctctgtggtgaatagtcgcgtgctgacgctggacagggcgccggatgcttcggcagccgacaggatgattgtcaatcttccatcgggtgtttcgcagtcacgcaccattcagtcgataacgggcaataaagtgaccgttacgaccgcttacagcgaaacgcctgtggttgaggccgtatgggtcattgagtctgatgagctctacgcacagcagtatcgcgtcattacggtaactgataataatgacggcacgttcacaatcatcggtgcaaatcacgatccggataaattcgatcgcattgataccggagccatcattgaccagcggccggtgagcgtgatcccgccgggcaaccagtcgccgcctgcgaacatcgtgatcagctcgttttccgtggttcagcaaaatatcagcgtcgaaacgatgcgcgtgagctgggaccaggcgcagaacgctatcgcctatgaagcgcaatggcgccgcaatgacgggaactgggttaacgtgcctcgcagctccaccacgtcattcgacgtcccggggagccatgtctggaccttgaagagtttgcaccagcaaaacaggaaatcgtctgcagccgatcattcggtgaacgtgtaa

SEQ ID NO: 140644 - DNA, 627 bp, Enterobacter cloacae
atgccattccttattcatgaacctattagaaccatacgtctctatggtgtacttggtgctatgtttggccgagaattcaaactttctgttgcttcacccaaagaagctatccgagcattgtgtgtgatcgttccgggttttgagagtttcctgaataccagtaagcaacgaggtttaacttatgcggtattcagcgggaaacgaaacctcttaaacgatgagcttaatatggacaggagcacagaggaaatccgcatcgcgccggtgatcatcggcagtaagcgagccggggtgtttcagacaatcctcggggttgcccttgtcgctgttgctgcgttcgtcacgggaggggccgcgattgggattggtggtaccgctttcgctggtggatggggcgctgtggcggggattggggcatcaatggcgatcggcggcgtagtccagatgctttctccacagacaaccgggctcgccagtaagcaatctgcggataaccaagccagctacgcctttggtggagtaacaaacacgacagcccaggggaatccggtaccacttctttatggccgccggcgaatcggcggcgcgattatttctgccgggatttatgtcgaagatcagcaataa

SEQ ID NO: 140645 - DNA, 516 bp, Enterobacter cloacae
atgaaaaaagtagctttcttagttttaggtatgatgattagcggagttgctgtttctgccgagtggcatactagctataaaaatgatgaaatgagaggaaccgcacaaaagttttctcaaacagagtctgataacgcagtagactttgattttccttataatggagggtcaaagttaactatagtactacgatcaaagaaaacagaattgaaggctggtcagaaacctgaatcactaccactgactgaagctataatcgtgatcagtaagggccagttcagttgtaattcctatgatggatgtcatgtttccgcgaaatttgacgatggtaaaatccaaaggtatgcaatgtctggagcagcagatggtagctcagatgttattttctttgataactcatcatctttcattaagaacctcaaaacccataagaagctaattctcgaggcggatttcttccagtctggctcaaggcagtttaaatatgatctaaccggccttaagactgagaaatga

SEQ ID NO: 140646 - DNA, 252 bp, Enterobacter cloacae
atgagctcattaaaacttgtaagtactgtaaaattcgcaaattctaaaggtagtgaagccaaatatgagatttatcacgatgcagttagcaatgattaccaagcagaggtgtcatatctaactgacgtattgtctactgcgggtttcactgcaagggtatggtataaaactccgctaaccatctatcggctccctgggaacactatctcagaccttgaagatagctgcaaagaccattttgaaagtaactaa

SEQ ID NO: 140647 - DNA, 303 bp, Enterobacter cloacae
atggacgtgggtatcggctggacatatgacggcaaaatatttactgcccctgttgaaccaccacaaccagaaccgactcatgatgaactggttcagcaagccgaactccagaagcaaacccagattagccaggcgaatgaatacatcgacagtaagcaatggccgtcaaaactggcactcggtcgcctgagtgatgctgataaagcacttttcaatcaatggctggattatctggatgcactggaggctgtagatacttcggaagcgccggatatcacctggccctccgaaccggaggtttaa

SEQ ID NO: 140648 - DNA, 264 bp, Enterobacter cloacae
atgacgctttcagatgctgaaggtcttgtacgcattaacggcgaattagttacgagccaaaaggttaaatatcttggagcccaaggtgacgaatcaaaggctgtttggaatatgggcctgatgccagcgcgtgacgggaacaattacggctttgagtttgtgaagcgcaacggtaaatcgttcctgaacgtccagctgctgcagaacagcatggacgcgccgagaatcatcggctctttcccgtgtaaaaaagttcctgattaa

SEQ ID NO: 140649 - DNA, 144 bp, Enterobacter cloacae
atgaaacaaacattaattgttattttaatatgtttttgtcacacggctttagcatatccataccgtatctatactgtcccggaaggggcattagtaaaaaacctgtctcttatacacatctccgagcccacgagaccgtactag

SEQ ID NO: 140650 - DNA, 222 bp, Enterobacter cloacae
atgagcacggtttacattgtcattttaacctatatcaaaccactcgaagagattgacgcagcgatacatgctcatgttgagtggctaaaaaggggtattcaaaggggattttcctggcatccggtagacggatcccaagaaacggtggggtcattctcgctaagtgtgaaagtcttgcctctcttgaagagcgcttgcgcgaggatccttttcaggcgttaa

SEQ ID NO: 140651 - DNA, 1623 bp, Enterobacter cloacae; identical to SEQ ID NO: 31773

SEQ ID NO: 140652 - DNA, 498 bp, Enterobacter cloacae
atgattgagttgtattcaagaggtataaaactggatgaccttcaatttataacagatgaacttaaggaaggagcgcgggcaggacattatgcgaaggaattactagacccggtatcatttaacgggcttgtagagagccttagaaaaactatttcgatgattgagtcaggtacggaaatggccgactacatttacattctagccgagcttcatacagataagcctgttggttatatctggttccagacacaggctgccccaaatggatttttatttcttgagataaaggcttttggagtaggagcaaagtttcgaggggatggtatcgcttcacaattcctgtctgactttctccacctttttgccaaacatccacttgaagccagatgtttctcatcttcgtcacaaatggccgacatgctcaagaggcgaggatttacactcgatactgtgttgccatcaggaacgcaggttttgatcagaagacctttgctataa

SEQ ID NO: 140653 - DNA, 684 bp, Enterobacter cloacae
atgaataaagaacataacccgtatgctggtaaaatcatcgtggtctctatcccaaaaggcggggtgggtaaatcagcgctaagtatgaatattgcgccagatgtcgatccagatgtgttttatgacgctgacctgataccagcaattaccacgttcaataacttcagggaggatgataaaaaatggaacgtaataaggctgaagaacggtgttgatagcgctgaaaaatttgcagcggacttgatggatgctaaagagaaaggtttaacggtgctggtcgattgtggtggttttgactctgcaatcacacgaacagcagttgccgccgctgatttaatactttctcctttccatgatgatccttcggatattctaggcctgattgaatttagccaggtattggaagaaatctcaatcaaaatgggcaaaacacttaaggctcatatcgtgatgaataaagtgcatccgtcgcgaagcaacttccgcgacctggacgattatttgaagcagttcagtaaccttgaacgcctcgatactgcaatcccacttgataagagtattccagcaaaatttggtgaaggtcttggtattgttgaacacctcactacacgccacggacgagctggaaatgccatgcgctcattgtttcttgatatgagaaaagcattggacgaagtacagtaa

SEQ ID NO: 140654 - DNA, 291 bp, Enterobacter cloacae
atgagtacaaaaaaagatatgttaaatcgactttccggtgttgctaaaagtgcaccgcttcaggagagttcttcagagtatgagtccaccggccagctcgacaaaaccgaagcgaaaggtaaaaagtctaagccggttcgcaaggctaagaatctccagataccggcggatttgtgggaggcatacgaaaccatcaagagcaacaacacaacctcacttctaatgacgggttacattctggaagcattcagggaaaaactggcgagagacggggcgtttgataaaaattaa

SEQ ID NO: 140655 - DNA, 900 bp, Enterobacter cloacae; identical to SEQ ID NO: 133729

SEQ ID NO: 140656 - DNA, 336 bp, Enterobacter cloacae
atgatccgtatcgatgaaatctggttgtctactcagcccatggacatgcgtgcaggtatggatacgaccatggctcaggtggtgagagcctttggctacatcaaaccgcattgtgcttacctgttctgtaataaacgtggccatcgcatgaaagtgctggtacatgatggattgggcatctggctgtgtgcccggcggctggaacagggcaaattccactgggctaaagttcaccagggtgaaagcgtggccctcagcccggaacagttacaggcactgatccagggtttgccctggcagcgcattggacgacagcaggtggtgacgatgctttaa

SEQ ID NO: 140657 - DNA, 1260 bp, Enterobacter cloacae
atgaagctcaacgccaaacaggtcgagaccgcaaagccaaaagacaaaacctacaaaatggccgatggcggcggtttgtatctcgaagtgtcggccaagggttctaaatactggcgcttgaaataccgacgcccctctgacaaaaaagaggatcgcctcgcttttggtgtgtggcctactgtgacgcttgctcaggcaagagcaaagcgcgacgaagctaaaaagttgttagtgcagggcatcgacccaaaagccgaacagaaagaagctcaggccgagaactcgggggcatacactttcgaaactatcgctcgtgaatggcacgccagtaacaagcgctggagtgaagaccatcgatcgcgcgttcttcgctatcttgagctttatatcttccctcatatcggttcgtccgacattcgccagctcaaaaccagccacctgttatcccctattaaaaaagttgatgcgactggtaaacacgacgttgctcagcgcctacaacagcgcgtcacggccataatgcgttacgctgtacagaacgattacatcgactctaatccagccagtgatatggcaggtgcgttatcgacaaccaaagcacgacactatccagctttaccttctagtcgcttccctgagttactcgctcgtcttgctgcatatcgcggtcgtgtaatgacacggattgcggtcgagctttccttactgacttttgtgcgttctagtgagttacgtttcgcgcgttgggatgagttcgacttcgataaagccctttggcgcgtacctgcaaaacgagaggaaattaagggtgtgcgttactcgtatcgtggcatgaagatgaaagaggagcatatcgtaccgcttagtcgtcaggcgatgaatttgttagaccagttaaagcagattagtggtgataaggagctgcttttcccgggtgatcatgacgcaactaaggttatgagtgaaaacacagtaaacagcgcattgcgtgcgatgggatatgacacgaaaaccgaggtctgcgggcatggatttaggacgatggcgcgtggtgcgctgggtgagtcggggctatggagcgatgacgcgatagaacgtcagttaagccattcagagcgtaatggtgtacgggctgcttatattcacacctctgaacatttggatgaacggagagttatggtgcaatggtgggccgattacttagattatattactcataattatgccagcccatatgactttgggaaatataagaactga

SEQ ID NO: 140658 - DNA, 1068 bp, Enterobacter cloacae
atgagtggttccggctttgcattcgaaaacaattactatcataatatgaagtatttcgatgaagatgaggtcgaaaccgtactaatttgggtggaagacagttcagacatagctgtttggacgcaggcgttccccttaaaagacaaaataatttttgaatttcaaacaactgatatgtttgattttggtgatgataaagtctcaacaggatgcgaccgtattgctagtctcattaaagcgggaactataattttaggtaaaaacataatagtttgtctggatagcgattatcatactttaactaaattcaataaaacaaaaagacaggagttatacgagaacaaccacgtttatttaactaaaacacattctatagaaaatataaaacatcactcttctaatatggatatttttttcagtcgctctattgggacacatgaaagccagcttgcattaaagccgtctgatattgcaatggcattatcaaaggagatatttggggccctaacaaaatacttattccttgaaacattacagctaaccaaagctacacatcaagatatttcaaacaagcataaagatatacttaaaactttaatatttatatcgaaggcagatgagaaagatttaaaaaacaatacttcttttttctcctcattacgttggaaacagggttcgtcacgctttcaagatatagaaaaaagtctaaataacatcatcgaaaataattcaaaacttgatgattacaacacatttaaaaatgaacttgcggggattggaatctcagacaataatacatatttatttttaagaggccatgatattgaagatttcttctgcgagatactcgacaagagttttaaagcgacgctagacgagaaaatcaaaagactaaaagccgtttgcgctcaaaataaaatcaaagctgatgctgtaaaagaaaaaatagcacacattgaaagaacatataaaccttatagcgatatttcaaatgctactgattataacctgtcacaaattccgttcttttgtgacacttataaccggatttctcaggattacgtttag

SEQ ID NO: 140659 - DNA, 1140 bp, Enterobacter cloacae
atgccgcgtatagttgaaagtaatttctacaatgtgataaaaagaaaattgcataacaatataagccttgatcagccagtgactatcctaaccggatataatggttgtggcaaaaccactcttttaaaatgcctacatgaaacaataacactgtataacaatggaaactttccacacgctcgcaaaggttggggtgtcgaaatcaaatttgacaataacttcaaaattaagaattataatatgccacctgaccttaaaagaatggatcttgaggatcataatttcttcactgaaaaggtcgatattaactcctcattatcaaatggctacaacatcattcttaacagacttaacactcttcctgaaaaaagcaaaaaaaacaaagataattttaagtatgcgaaagaaaagaccgcaatagaaaataacggcctcatgcaataccctggaaaagaaaacctaagaaatgaagttttttcgatattactttgcgatgagttattttactttaacggcgaagagagtgataataaaacattgaaacttgaggaaatggatattttctcacgcaataacaacctttctaaaaccctttatatgctgctccaagagtttgctaaaaaatctattttaactgacaacgataaaaaggctaaggaaagcataaatgaattaaaaaaattaatcatagatgctcctgaaaaattgagacttgccataactgataaaattaaagaaattgaagaaaactccagcagcaaagcgctggacgaattcatggagaccctcaatatattcttcagccttaccagacgctctgtatttattgatgaggatggttttatctcacttaattttgatgaacaaaccattagatggtatgatttatcaaaaggtgaaaaaactttaatttcgctatttcttgtaacttatctcaatagagataaaaatgtcattttcctttttgatgaacccgacttatctttacatataaaatggcaaaaaatacttattgaaaatttagccaagatggcgccatcttcacaatttataatctcaacacattcacctgcattgattgggaattatgaagcacaaaaaatcattaatatcagcggaatgataagaggtcaacaatga

SEQ ID NO: 140660 - DNA, 567 bp, Enterobacter cloacae
atgaccacccttacgctacggcaggcttttgaagcctgtcagaagaacgaaaccgcctggctgaaccgtaaagccgaactggcggccgcagagcaggaatatcaggaacaggtgctggccggggatgaccgtataccgggcagaatgcagacactgcgcgacattatcgatgtcaaaaaatgggagataaatcaggccgccgggcgctatatccgctcccatgaagcggtgcaacgcatcagtatccgcaaccggctgaatgactttatgcaggcgcacggtgctgaactggcggccacgctcgccccggagctgatggctctcagccagcagcccgcactcctgaccggccatgcgctcgaccgttcggcccattacctgagggaagccctgtccgtgtggctgagtaccggtgaagaaattaattattcggcagaagacagcgatattttaacggccatcggattcaggcctgacgcggcttcgcgggtggataatcaggaaaaatacacccccgcacagagcctgatttatgcccgccggcgcacggaactggccagtaagtag

SEQ ID NO: 140661 - DNA, 246 bp, Enterobacter cloacae
atgatgcactgtccgttctgcaaaaagtcggcgcatgcccgtacctcccgctatctgtcggagaacgtcaaacagcgctatcaccagtgcaccaatattgagtgctcggcgacgttccgcaccactgaagccatcgacgaggttatacggcccccggcggagaaaacgccacctgtcgcggagccggtcacacccccggcaccccgtaaagtgcagggctgctacagctcgccataccgccattaa

SEQ ID NO: 140662 - DNA, 738 bp, Enterobacter cloacae
atgaccgacaccccctttatccctgattacctgaaaccggcgctggagcgactggccgccgccagagcggcccatcttgaacaggcccgccggatggaagacaccctgacggccatcacccgcgcggaggagcagaaagcagagctggagcagggcaacggcagcgacacccgcacatggcgcgccgctttccgcgccgggggggccatgctgaccgatgagctgagaagcggccatatcgaacgcgtggcccgccgggagctggcgcaggaatgtgacaacctgaccgaagtgctggcctttgagcgtgaccagttgaaagccacctgcaacagcaccgcgcgtgcattccgccaggcgcatcatgctgtgctgagtaaatacgctgaggaagagcttaaccgcgcgctgaatgacaccctcgggccactggtccgggcgatggtgctgaaagcggaggtgatggaaaacccgctcgccaacaccaccggccatcaggggtatatcgagccggagaaagaggtcatgcatcaggtggtgaccttcctgaccgggaaagtgagcgccttctccgtcacgccagcggatgagcctgtgctctccctgaccggcttcccggccgtcgcgcttgcgcatatggaccacgacgccgccagcacgcccggcgagcgtaaggtctggcaggagaaaatgcgtcagcgcgaggctgacctgaaagcgcgggggctgctgccatga

SEQ ID NO: 140663 - DNA, 267 bp, Enterobacter cloacae
atgcacaccgctttttcttccccgtcttcagcccctgccgcgcccctgatgccggtttctgatgccgttcaggagcgttttattcgcctgcccgaagtgatgcatctgtgcgggctgtcccgctccacgatttacgacctcatcagccgggaggctttcccgaaacaaatctcgctcggcggaaaaaacgtggcgtgggcgcagtcggaaatcaccgggtggatggccgaccgtatcgccgaacgcaaccggggctatgacgcatga

SEQ ID NO: 140664 - DNA, 228 bp, Enterobacter cloacae
atgaaacagcccgccatcaccgtcaaagacctcgaatgcctggagcacctgcgtaacgtcggccagttcgtcggcgagctgatgcaggtgcaggactgtacttccctgcgtcgtgacccgactcagcagttacagctcacctccgtgatttacctgatgaccgcccagctcgacggcgtggtcgagcgctgcaaccaccgctggttcaccggggagggcaacgtatga

SEQ ID NO: 140665 - DNA, 867 bp, Enterobacter cloacae
atggcttccagcaaaactctcgaacaggcaattgccgatatcaccatctggcgcaaaggcgaacagcgtgcgccgcataagcctttattgcttttgtacgtgctggcgaactatcagcaggggcatgtgagactgtttgattacggaaccgaggtacacgagcaactgcttagcctgttagaacgctttggcccacagcggaaggcgcattacccgaatatgcccttctggcggctcaagagggacggattttgggatcttcagaacactgagttctgttcgaccaccggcagtaagcaaccgctcgttaaagaacttgtggaacataatgtcgcaggtgggtttgatgaagaacactttgcattgctgagcaagaacaaaaacctgatcggctcgctggcgcagcaaatccttgaagcgcactttcctgaaagcattcaggaggagatcgcggatgagatgggttttgatatccagcaaatccgtaaggttcgcgatccgcagtttcgtcagcaggtactgcgcgcatataactatgagtgcgcaatctgcgggtttaacatgcgtcatgataacgcctctgttggacttgaagccgcgcatatcaagtggaagcagtttggcggaccgtgtcagatccagaacggactggcactgtgtgcgattcatcataaggcgtttgataagggatcgattgggctggatgagaatatgcgggtgctggtgtctgaggcggtgaatgggggcgggattgttgggcggctgttctgggattttgccgggaagcagattgcgttgccgatggtgaaagggaactatccaaaggagggatatgtagagtggcatcgtagggaggtgtttaggtga

SEQ ID NO: 140666 - DNA, 1401 bp, Enterobacter cloacae
atggggaatgaagacttcaaactaccgcctggatggcattgtagaagccttgttgattgcacaaaaggtggaaatatttcttatggcattgttcaacctggccaacatcaagacgatggtattggaataattcgtgtaaataatatacaaaatggaaaaatttccgttgccgatgtattaaaagtttctcacgatgttgaaagtaaattttctaagacgcgattagaaggtggggaagtacttttaacattagttggttcgaccggcttaagtgctattacaactaaagacttacatggatggaatgttgctcgtgctatcgcagtgattaaaccttctgatgaaataagcgcagaatggatacatatttgtcttcaatctccttatacaaaatatttcttagattccagagctaatacaaccgttcaaaaaactcttaatttaaaagacgtaaaggaaattccattacctatacctcctattgaagagagaatgaatcttgaaaaaatttattttgatttagagagtaaaattaatctgaatttagaaatcaaccaaaccctggaacaaatgtcccaaaccctgttcaaatcctggtttgtggatttcgacccagtgattgataacgcgctggatgcgggaaacccaatcccggaggctctgcaatctcgcgccgaattgcgtcaaaaagtaagcaatagtgtagatttcaaaccacttccggcagatattcgtgcactgttcccggcggagtttgtagaatctgaatcgggctggataccgaaaggttgggaaagtgaaagttttgattcattctgtgattttattcagagtggaggaacaccttcaagaaaggaaacattattctggagtgacggtacaataaaatggctttcatctggcgaagttaaaggtaaaatagtcttagacacaaaagaaaaaattacacaaactgggttactgcatagctcagcgaaattatggaaaaggtatacaaccgtcgttgcaatgtacggtgcaactgcgggagaagtgtgtattattggcgataaaatgacagctaatcaagcatgctgcggattgtattcagaaaaatacccattctatgtctataattttgtcagcaataaaactgatgaattgacttcaaaggctacaggttcagcgcaacaaaatcttaataaattaattatatcctcaacaaaatttatacgtccttcaaatgcgataattactatatttgaagataatgtagctccattgtttatgaaatggttttctaattcctctgaaaataataccttaacaatactccgcgacaccctgctccccaaactcatctccggtgagctgtccctggaggatttccccgacctcatcaaacaaacagaagccgcataa

SEQ ID NO: 140667 - DNA, 384 bp, Enterobacter cloacae
ttgagccagattagctggtttgatattcagaaaacgaccttcactcccgaagaaaatgttcttgagctgctggagaaaagcctcgatccctgggtgtccgaagatactttcgcggtgaaaatattcatcaaagataatatttcacattacttcctgcgccgggatcttctgccggaacaggagctgctggaggagcagcaggacggcgtcacgctgcgctgccaggcggcccacgagaaccagatcctgccgctgctgttctactggctcccccatattcagatcctggaaccgagctggctgaaggagaaactcatcaggacgctggagagctatctggccgtagagcgcaacccgaataatcaagtgatctcaatcacataa

SEQ ID NO: 140668 - DNA, 1563 bp, Enterobacter cloacae
atgaagcctgaagagttccgcgctgatgccaaacgcccgttaaccggtgaagagtatttaaaaagcctgcaggacgggcgtgagatttacatctacggcgagcgcgtcaaagacgtcaccacccatccggcgtttcgcaatgcggcggcctccatcgcgcagatgtacgacgcgctgcacaagccggacatgcaggacacgctgtgctggggcaccgacaccggcagcggcggctatacccataagttcttccgcgtggcgaaaagcgccgacgacctgcgccagcagcgcgacgccatcgccgagtggtcgcgcctgagctacggctggatgggccgcacgccggactacaaagccgcgttcggctgcgcgctgggcgccaacccggccttctacggccagttcgagcagaacgcccggaactggtacacccgtattcaggaaaccggcctgtacttcaaccacgccatcgttaacccgccgatcgaccgccacaagccggcggacgaggtaaaagacgtctacatcaagctggagaaagagaccgacgccgggattatcgtcagcggcgcgaaagtggtggccaccaactccgccctgacccactacaacatgatcggcttcggctccgcgcaggtgatgggcgaaaacccagacttcgcgctgatgttcgtcgcgccgatggacgccgagggcgtgaagctgatctcccgcgcctcctacgagatggtggcaggcgcaaccggctccccgtacgactacccgctctccagccgctttgacgaaaacgacgccattctggtaatggatcacgtgctgatcccgtgggaaaacgtgctgatctaccgcgatttcgaccgctgccgtcgctggacgatggaaggcggtttcgcccgcatgtacccgctgcaggcctgcgtgcgcctggcggtgaagctcgacttcatcaccgccctgctgaagaaatccctggagtgtaccggcaccctggagttccgcggcgtgcaggcggatctcggcgaagtggtggcctggcgcaatatgttctgggcgctgagcgactccatgtgttccgaagccaccccgtgggtcaacggtgcgtatcttcctgaccacgcggcgctgcagacctaccgcgtgatggccccgatggcctacgccaagatcaagaacatcatcgagcgtaacgtcacctccgggctgatctacctgccgtccagcgcccgggatctgaacaacccgcagatcgaccagtatctggcgaaatacgtgcgcggctccaacggcatggaccacgtcgaacgcatcaagattttgaagctgatgtgggatgccatcggcagcgagtttggcggccgtcacgagctgtacgaaattaactactccggcagccaggatgaaattcgcctgcagtgtctgcgccaggcgcagagctccggcaatatggacaagatgatggcgatggtcgaccgctgtatgtccgaatacgaccaacacggctggacggtgccacacctgcacaacaacagcgatatcaacatgctggacaagctgctgaaatag

SEQ ID NO: 140669 - DNA, 1080 bp, Enterobacter cloacae
atgatgaagaaactactgactctattagagtttatggcgctcgggatttctggcgcaacgcatgcgtacgagtgcaaattttacgccggagcagacgatgtgttaattatgtccccgggtacacaaccggtgattacccccctgcccgtgggcacggtaaccgccccaacgcagatcagctccacgatcattatggagacaacaccgacgttaagatcgcactgcgcaggcggcgatgacggcggagatgtttatcagttaaccgataatgcaatggaggagacgagcattgatggcaaagccgcttttcgtacaaacatcccagggatttactacacgctggcgtttttcccggatggtaatggcgtaacggcatggttccccccaaacgcgaacacattttatagaacaggtatcatcgggtatgactatgggcttcttgatgagaaaaactggcacgttcgtatggaaatttggcagacaaatgggttcacaggtgtacccgcagatgaaaatttcctgactgcgagcagtggccctatcggtcaaattattattggtaaccctaatgggacaacaaaagatgatcatccacgtccgctggtgaatatgtcccagatgtcattcagtattcccttaaaccgtccaacgtgtgcattacgcgccccgacaacggtgaatctgggggactggtatcccgcagaagtcgaaaacggtaataccactaaagtcgggtttcagattacggggacatgtataaatacagtgaaggttgaatatacattatcatccactcataccacctcagataaaaagtattttactaacgccgttgaaggtaatagtggagtaaccgcggcaggaggcgtcggcgtcaggattctggataatcagggtgataactatcctgttccagctgatagctatgcgcgaatccttgctgtgggcgaagtgattggagtggacccggtgaattttgtagacagaaccctttgggctcaactggttaaaatcggcagcgaacctgtgaccgtcgggactttcggtacctctgttaccttccagataacctacgagtaa

SEQ ID NO: 140670 - DNA, 609 bp, Enterobacter cloacae
atgcaacaatcaccgtttactttacaccagcccggtctgatgttgcttatcggtctggctggtagcactctgcctggcgtaagccaggcaggttcaggtatggatgtaaacctgacggcaaacattgttaacaatacatgccagctcagcgtcgaaaacggcggggaaatctatttgcccaccgttgcccgagactggttttataacagagataagagcgaccgtttaacgccgaccgatgatgaagcaggcacgcccttcaccattcacgtagataactgctatgcgggcggtggagagggtgcagatattaaccaactgaaatttagtttttcaccgcagaatggtttctggagtaaccaaaaccaggtgtttaaaaacgatgcgacagccggcgcagctgaaaatgtgggtatcgttattttctctgaaaaatacaaaacgaacgttttgaaaagtgacggtacgtctaacgttatttacgacgttgctggaagcagtgagagctatataaaggattatggattttacgcacgctatcagaacgtaggaaccgtcaccagcggcacggtgatgagcagcgttctggtgaatgtgagctacgaataa

SEQ ID NO: 140671 - DNA, 585 bp, Enterobacter cloacae
atgagagtgagtatgaaaaaaaatcttaagctgtcggtcgttgccatgacgatgcttgcgttatcaggttcagcgcttgccaacggcaccaatctggatgtgaacttcaccgccaatattcgcgaaaccacttgcgatatgaaactggttggcggtacgggctccgatacgcaacaaacgctgactattggtagcaatagccaggtgcgtattgacgatgtgaaggccggtactgcgaatgccaatttcaaaatcgtgatcgttgaatgtccggcatccctgacctcgctgaaaaccacggtaaaagggtcaccatcgggttatttgaccacggggctagtcaaccagatcactaaagcaaacggtggtgcagattattctgcggtcgaaattgccagagcagatacaccgctggctccattcactattaactctaccgttgatacagagcgcctggtctggactgcaacagaaatccaaaacaaggaagtacctttagttgccacactacgtgaaacccaaacaaacaaaatgaccattggcgattttcaggctgtggcgacatttgaatttagctacgagtaa

SEQ ID NO: 140672 - DNA, 2592 bp, Enterobacter cloacae
atgttatttaaacgttctcttttatgccttgctataagcgcagcattacccttttatgcttgtgcagaaaatatcgcatcagcagatacgcagcctgatgatgaagaagcgattgaatttaacgatcagtttcttttaaatggcagctcaaatattgatattaaccgttttgcacatggcaacccggtattaccgggtacttatcgcacaaagattaaccttaacggtaaattaaaatctaccgtggatgtaacgtttaaagataacggaacaccgcgcgcggcgccatgcctgacgaaactgctgttggcacaatcaggtatagataccaagacgctggataaagtacaggaagatgatgcgtcatgcatagatattaaaaaggcctttcccggcgcaacggtaagttatgacagcggtaaacaggcgctggatcttaatttcccgcaggtctatgtcctgaaacgcccggcaggttatgtcgatccgtctctttgggaaaacggtattcctgccgccctgctctcttatgatatgaacgcatggcatagcgagagcaatggcagtacatcagaaagcgcctatatgggtttacgttacgggatcaatatgggcccgtggcggttacgttctcgcggtaatcttaactgggacaaagataacggtaccaagtattccagccaggatatctatttacagcgggatattacgccactcaatgcgcaattcgtcgtaggtgactcctatactcgcggtgacgcgtttgactcaataagcctacgcggtacccgaatgtacagcgatgaccgcatgctgccgatgggctctactggctatgcgccggtgatccgcgggacagcaaacagtaacgcgaaagtcagcgtcacgcagagcggcaataagatctatgaaacctcggtgccaccaggggcatttgaaattaatgacctaagcacaacgggctatggcaatgatttactggtcaccatcgaagaagcagatggcagcaaacgctcctttaccgtgcctttttcatccgttacccaaatgcttcgcccgggcgcgacgcgctgggacgtgggtcttggtgaattaaacgacgattccctggttgacgcaccaaaagtcggttatggcacgctttactatggcctgaataataccttcacgggttatattggcgcgcaatacagcgacatggatttttatgcgggtattctgggcctcgcgatgaacacctcaattggtgcgttcgcacttgatgccacccagtcccatgcgaatattgaaggccttaatacgcttagcggtcaaagttatcgccttaccttcagcaaaatgattgaggcgacagatacgtccttcaacgtggcggcctatcgtttctcaacagaggattacctcagtcttaacgatgcggcacagctccaggacagtatcacgcgacagaaatattctaaccgcagctatgcctcaaacgacgcgctatacgccgactatcagcgaaccaaaaatcaggtgcaaatcagtcttaatcagcccttgaattcgggtgaaaatagctttggttctctgtacgtcagcggtacatggcaggattactggaatgccaccgggtcaacgtccaactacaacattggatataacaatagcttcacctatggcagttacagtctgtcattacaacgaacctatgaccagtatgggaaaaaagatgacagcgtttatttgagtttgagtattccactaaacgtgttttcacatgacggttcgcgttcaggtggtttctctaacgttaatatggggttgcgttccgatcttaaaggtggcacgagcgttaacacttctgcgggtggcaacacgcaagataataagatcagctattccgtcagcgccgcctctaacagcggtaattacggtaatctgaatcaaataagtggctatggttcattaaatagcgcatacggtcctcttggattatcggcttcattcggcgatgacaacagcaagcaatattccgcatcctatagcgggggcatggtattgcattccgggggcattgcattcgcaccgggaagtattggtgacagcgatgcactggcgctggtaaaagccagcggtgcgaaaggagcaggtattggcttcggcagtagtgaaattggtgattccggttacggcattttaccttatatgtcggcttatcgtgaaaaccgtgtttatctggatatcagcaccctggaaaacgacgttgaaattacaaacaccagtgaaattactgttcctcgtagcggttctgtggtgctggttaattttgaaacgaacgaaggtcgttcactgatattagagctccagcgaaccgataaagggtttattcctctgggtgcagatgtattaaatgagaaaaatgaatctgtcggcaccgtcggtcaggcgggtcaagcttatgtccgtggcgtagaggatcaaggcgtactgcacgtggtctggggaaatgataaggacagtaaatgtgacgtccgttatcaggttttacaaaacgctcaaaaagtaggacttacaacggtacttaataaccaacagtgccaaatgtaa

SEQ ID NO: 140673 - DNA, 744 bp, Enterobacter cloacae
atgtctcgtttagtattcggtaaaggtctgaaggccacattactcgcaaccgcttttttgtgcgcatcaaatgccaaggcggatatcgtcatatccggcacgcgtattgtatacacgcagtcttccaaagatgtcgtggtaaatctcgataaccatggcactaaaccccttctggttcagacctggcttgacgatggtcgcgatggtgtaaacccgcaagagcttaagctcccatttatcattaccccgccagtatcacgtattgatccgaaaaaagggcagtccgtgcgaattacctacacgggtacaccgttacctcaggatcgtgaatccctgttctggttcaacgttctggaaattccgccaaaatccaaaaatgtggataaagaaaaccttaaccagcttcagctggcattcagaacgcgtattaaattcttcttccgtccagacggattaaaaggcactccaggtgatgctgctaaaggtttaacctggacgcagaagaaagatggaaatgcaattaaactcgttgcacacaatagctcaccatataacatctctgtttcaacggtgacctttaaaaccgggccaaaaacgtatgaggtcattcatcaggcagtggcacctttcagcgatgctgtgatgacgataaaaggtttagcttccgtggaaaatggcagcgtagagtatgacgccattaatgactatggtggaacagaccattacgaaaccggacttaaataa

SEQ ID NO: 140674 - DNA, 531 bp, Enterobacter cloacae
atgaaaacttatattgcactgctcttacttttctcagctaactgtatatctgcaccagttcaattaaaccctgatttgaggttttacgaccaaggaaagttggttaaagagaaacagatggggagaactgggaaatatgaaatatccatgagcgaagagggtaagataggaaatgttcgatatagattctggctatcagatgggtcaggcacttttcaaggggaacctgataacacattagatttaattaaagataacagtgattctaactggtctttgcggtgtgacagagacaacatgacggataaagttacgtgctcagctacgaaatacgatctgaccgtaagctattttgataatgggagtaagagagtatccttgggaagtaacaactacccagattcagctatatatgcaaggatagataatggcagcgtaatgcaggggcctggcgatggttattttgctttgaatgatggcaaggatattatatctgctttgttatcaggtaaaactgttaatactcagtag

SEQ ID NO: 140675 - DNA, 171 bp, Enterobacter cloacae
atggctatcgggaagagacagaatcagaaggaatcacctgaggaagagttagatcgcttgctggatcaacttgagttgacgccggatcagcgtaattttattgattctatgcgggtaaatgaggacgaagagaaagatgaaaagtcgcgcttgtatagtaccaatacgtag

SEQ ID NO: 140676 - DNA, 990 bp, Enterobacter cloacae
atggcgattcagtcgagagttgctccaggctactgtgttgtacaacaaccaggtacccttgattttcaggcaagacagttgtttggtagttcgcaaaatgaaacttcagaatattttatgcaactgaatagggatacggcctggttaaaacctgggcagatattgattgttgccgatccgcataatgaaaaccaatctcacataatcaatagtttggttaacgcaaagaaaaaggtcaatgctgcattagcaactatagatgcatctactgctgattttttaaataaaaattacgataaaattaaatccataaccttctggggtgacactgtagtcggaaacgcaagtggtattggagattcttacttcaagcagattgagagtattttggtaaaaattgaaagcacatatcaaaaccagtttcgcacgcaaggaactttgattggccagcaattttatattgaacggaatgctctattttcccagttaaaaccgctattaaataaaattacaaaaaaacaattgaggtttaaagattatgtcgacttaaaaagagcgctaggcttatcgacgaaatcaattgttcatgaatggagtactgtcggtataggtgcaattcccggttattctacctatattgatagagtctccaaaattacggcttacatgaaagccggtggatgggtagcgctcggtttttcttttatgagtacatccaatgatgtttatcatgcatgtacggttgacagggaagatgaatgtggaaaagttgctgtgactgaatatagcaaatttggtggcggtgtcgctggagctgcattaggctccacctttgctgcacctatttgtcttgcattgggggtcccgaccgccggggcaggaacgcttgtttgcgggttaattataggtgctgctggagctgcagggggcacgaaaatcggtgggtttgttggcgagcagattggtagcttaatattcagtggagaatga

SEQ ID NO: 140677 - DNA, 417 bp, Enterobacter cloacae
atgtcttatatcgattcaaacttagttggcaatgaagaagtggtttatcgtgggcatgttactttgtgggcttggttgccatgggtagtgtggggcttaattttaggtttcactactcttatagggttcatcctgatccctttaggttattttgttttgcgttcaaatgaggctgcgataactaacaagcggttgatcgctaagtccggcttaatcaagagagatactgtagaaattcctatcaggaaaatttcgagcctgcaggttaagcaggggatatcagggcgtttgctgggttatggatctcttattatcagtgatactggagctgttcacgctccaatccgctttatcaaagatccaatgaagttcaggcagcgtttctttgagcttcaggaagagatagaaaataaataa

SEQ ID NO: 140678 - DNA, 1734 bp, Enterobacter cloacae; identical to SEQ ID NO: 126004

SEQ ID NO: 140679 - DNA, 543 bp, Enterobacter cloacae
atgcgccacggcgaacccgaatacaggggcgccggaaaggtgtcgtacagggaaatggtgggatggatcgacagctataaccgctcttcaacgggccgcgacagaccttcggagatggctcaaatcctcgcgtaccgcgcactgacgtttctcagcagccctctcccgcgagccctttcatcgttgaaaacgctggggtgtgaaccgggcttaattgatgaggtttttcgggaagcagagctgccggtgttccgtattccggggttccggctatcgcctttttactgggcagcgctgtttcgcgttctttggctctgcggcctgtctggcgagtcagagcgcgtaagcgccgcaaaagaacgtgccgttaaggcggcagaaatcctggtgaatgtagcgaaggactctgacggccccgtcttgctcatggggcacggggtcatcaaccggttcattgcaaaagaactgatcgcatcaggctggaaagaacagactcgtccgggtaaggggtactggggagcgggggtttacagcatggtatag

SEQ ID NO: 140680 - DNA, 396 bp, Enterobacter cloacae
gtgtcaaaaatcacgtcatctatcacaacactctgtctttcaagaattttattgacctttttcttctggatggcaggcttttatgggttgttcaactttggagagattgtgctggaaatggtggatgtgggtctcacctggcccgtcttattcgcgacaggcaccattctctgtcagcttgtaggctctgctctggtgatttcgaattttgccggctacggatggattggatcggcaatgctgattgtgtttacattactcaccattccggtggggcatccattctggaaatttagcgagccccagcgcacccaggagtttcatatcgcgcttgaacacataaccgttatcggggggctcatgatgagcatgcttttgtcaggtcgtaaacgatga

SEQ ID NO: 140681 - DNA, 633 bp, Enterobacter cloacae
atgagagaaaaggttcggcagaaaggccgcccaaaagatccgtcaaaggagcaggcgatactgcaggccgcaagaagcctgtttctcgagaaaggcctcgatgtcacgacggaagaaattgcccgcgttgccggggtggcaaaagccacgctttatgccaatttcgcggataaagacctgcttgttgaggccgtactccgtaaggaatcggatctgaccatcagtgacagtgatttttccgagcggcatcatctgtcgttgaccgaggtcttaaccgcgtttggcaaccgttttgtccgcttcatcaaccagcgcgagctgacgggctgggaccgcttaattgcctccgccgctattcgtcatccggagttacccgcgcgtttttatgcggcaggtcccggcagggcgcagcagatgctggagacaattatcggtgaagccgttgaaaagggcttactgatcgcgtgctccccgcgcgaagcggctgacgacctggccgggttgtggctcgggatgacaagccttgagataaagcttggcgccagaaaaagcttatctgatgaagaaattgctcgtcgggttacgcatgcgatcgctgtttttatgtgcgcgtattcagtggaaaagcgctga

SEQ ID NO: 140682 - DNA, 402 bp, Enterobacter cloacae
atgcaccgttccctgaaaagtgcgctggcgcaggggaacaccttcatgacgatggaagaacaacagcggtggttcagtgactaccgggaagaatttaactacgaaagaccgcatgaagccctggcgggtgcaacgcccggaacggtgtggcacccctcgaagcgacagtgggatggccgtgttcctgactatgcctatccgtcaggaggaacggtctacagggtgaaatcgagggggacactctatatggggaaaaaggggacggtgttcctgagtgaagcgctgactgatgagtacatcatgctggaagaacaggatgatggcctggaggccatcatcttcaacggaataacgcttgcgtactacgaccgaaaaacccagagtgtggtgcggatagagtaa

SEQ ID NO: 140683 - DNA, 1431 bp, Enterobacter cloacae
atggaaaactatttacgaaaagttgtaatcgagggactgttcgaaaaaaacaataattattctattgattttattgaaggagccaattgtatttatggggataacggcacaggaaagacttctataattaatttaatcgtaagttcgctaagttgtgatttaaataagcttaagactgtgccctttgagtccctttctttatatacagcaaaaacaggacaagttagggctaaaaaattcattattgtccgcaaaaaaaaccctgaaatcatagatagtaagctcgaaactgggtacataaagattgaaatcgttaatgaccctgattttatcgaaatccctttttacggaaataatcaactaccaggttattgggaggaagttgaaaattccatttccgccaagatagagaattttaagaagaaggtactctccgaacttacactcactcatgttccattattaagggtgcatgatagcgaaatttttaatgaaggaggccatgatgaatatttacaaatggttcttagaaagaaaagaatccatcacaaacaaattactgaaatcatggaccctagttttagagtcatttcctcaatacagtcacaattcatagatgaagttaacgctcgtcgcaaacaaataacagcttctttagaaaaccttaaatcgagaataattgaaaaagtaatgattgaccaaaaactcattactcagtctaaaaaagcattgcattctgtttctaaagtaatgaatagcccagacaatactgttgatggcaatagctattttaagaagttaaaagatgctaacattgatgtacctgaagaaaaagtaaaagagcatttccaattatggtctgatcttggttataaatgccgaacagaatatgcagaactttcaagtttcaaaatcacaaataatgaaaaagaactggaagcccgtcgaagatcccaagaaaagttcaataatacttacatgacattattctccatcacaaatatttatgaccgttttctatcgattgtggaagacgttgagaatatgcaaaatcagaaagaccaaatctggaaaatattcacagattatgaaaatgaagttaactcatattttaacaattcaaaaatattcaagttatcagaagatggggattttaaaatcttctctaaaaaaagaaaaattgaattaaccgacttatcttccggtgaaaaacatattataaccatacttggcagagcaactctttctaacatgaatggggcggtatttgtagctgacgagcctgaactttctcttcatcttgactggcaaagaaaaatattaaattccattaaaaaactttcacctttatcccagataatagttgccacacattcacccgccatatttactaaaggtatcaacaaaatcaatctagaggactgcaaataa

SEQ ID NO: 140684 - DNA, 855 bp, Enterobacter cloacae
atggctggcactcctacttatgacatcgaagaaaaccttcgaagaatagacatgcagcgaacattaaaatttattgtcgttgaaggtagcgatgatgttcctatctatgaaaatatcatatcggcaagtacggacgaagatatagacttcgatgttattcattcgggtggcaaacctcggataaaaacatttattaatgaaaaccctagcctgagtaattgcatatttatcatcgatcgcgactttgatgttttggactgtcataatgagaaactagttcacttagaaagatattcaatagaaaacttctatttttgtgaagacgttttaaaagctgttgtcgccatgtctataaagctcaaattagaagctgtaaaagacgtgtttaacatggacgaatttatagaacatagcactccgcttttaattaaactttttcacgccgtatattattatcaaactgtggaggctgtaagattaaataacgaaggttgcgatgcgcaaagttggagcgatgcattcatttgcaaggataatagttggaatgtatgtccaaaaaaagttgacgaccttattaataagttatatccaaatggatatgacgttgaaactgcagagcagcattattctgaacaatataattcatctggaaacataatctatgatttccctggtaaaatgttaaaggttgcacttcagcgatatctaaaagatagcgttatgaagctaaatactaaattgggaagcaaattcagtaatactgatgttacatgcactttattaatgtcaaacttacatcgttctaaaaaattacaaataaacctaactcctgtttacgaatttcttaatcgataa

SEQ ID NO: 140685 - DNA, 627 bp, Enterobacter cloacae
atgcttgccgtctctgtgttcagtctgcaactttactttaatggcagtattagcatggaaggtgacaatgcaattgcactacaggcaggaatgccggaaggcttagcggcattcctgcggtttacctcatcgccgatgttaatagaattcatatttggcatgatggtatacgaattaagaaacgtaatatcatcaccccccaaaattaatgtcattgctgtaatttcatgctcgttagttttctgtttctactttgctcaatacaaagcagcacacgggccttttaactatggattatgggcgatcctgctgattgcgacacttgttgcctatgaaatgaaaaatgagataaaagagataaagatgctatcatttttcggtgacatctcttattcgttatatctgacgcatattgccattaccatgtatttagataagtttggagcaaatataccaatttacaatcagtgggtaggaatgtccagacttatccttttgttcatcataacgataaccactgcatatattttctacaatgtagtagaaaggccatttatcagattatcaagatctataatatcatgtaaatttcctgcattaggaaatgaactaagcagacagagttag

SEQ ID NO: 140686 - DNA, 330 bp, Enterobacter cloacae
atgcagcaagtgcgttctattcaataccttcgaggcattgcggccatattggttgttggcttccacttcagaggtaaccttaatgatatttatccgataaagaatttcggtgatttaatgttcataagcggatcctttggggtagaccttttcttcatgattagcggatttattattgcgctttcaaccgcaaagagtgaagacaacatgttaactaaatatgttgtaaaaagattcttcaggatttatccgttgtttattattacgttggcaatattttatttatttcaaacgaagataatttttcattctggagatctgcgttactga

SEQ ID NO: 140687 - DNA, 240 bp, Enterobacter cloacae
atgcctcgccaaccggatattcgtgctgcttttattgcggccatacagcaaaaccctaagggctatctctgcctgcacaaagacaaattcatcgctgaactgcaggagaggcactggcatttcagcctggcggatgcaaattcatggatcgagcgattccagccggagttcgccgataagacgacaaacggaagcgagaaccgatactggatcctgcgtaacatggggatggtttactaa

SEQ ID NO: 140688 - DNA, 642 bp, Enterobacter cloacae
atgccagattttgaggacatcgcagatgatcgttatcgctcatcacctttcgcgagtgaactaattgcacatctgcgtccctttgctgtctttcatacgacagtcgtcggagaacgtttagagcatacaattcatggtgaggccatgtgctacctcatactggagggaagcgtggcctcctaccgccgggatgatgagaccctgttgttcaccgtgcaggcccccgctttgtttgggataggcaatgtgacggacgtcttttttgatgagtattgtaaagtcattacaccagggctgacgggtgttatctcggtagaaaaagcgcgggaagttgtggaaacccacaatctctggaacattctatctcaacatattatgcatgttaccaatcgcctctataaaaacatgcttcatcgaattgcgccctctgcctatgagattattcgtggacagttaatcgatttgatgcgcgaagaagacacttttcgcaaatcgataaccgctgaacgctatatccgcgataaaacccacctctcccgcagcggcgtgatgcgcattctggcggatttgaaaaccggcggatttatcgaaatggaagaaggcaggcttatcaaaatcaacaagctccccgctaaatactga

SEQ ID NO: 140689 - DNA, 660 bp, Enterobacter cloacae
atgaataccaggctagagacgttatcccctcaggcgcggatctccgccttagcgacaaaacctttctccgcaattgaattactcattaatcacatggtgccattctcagagcggatggtaatcgagaaaggtgaggttatgcactattatcgcgacgaagcacgctattgctttttattgttaagcggcagcgttgccctgcaccgtcgaggggatggcatcattctcaactctgagtcggctccctttgttctgggcgtcagtaaccagcataccaacggccatatgtacgtcagggcgttagaaacatctgagattggtatgctggcgctcgccagcttcaatcagatcattgcgaatgacaatttgtgggaacacttcgccaggctgctaatgtattcggcttcccgggtatacgagcattgcgcgatgatttcgcagctgtccgcgtacgatattatctgcactcagctcgtggagcttatgcaggaacccgagtccattcgggaacatactactgcggcaaattacattaagagccgtacatggctttcacgtagcggcatcatgcggatcctctccgaactcagaacaggcggatacattacgatgcagcgtggggttctacaggagataaatcatttaccgttaaagtattga

SEQ ID NO: 140690 - DNA, 519 bp, Enterobacter cloacae
atgaaaaagacgattattgctgctgctttcgctgcgactgctgctctgaccatgtctaatgcattcgcttctgctggtaccgttaattttaccggcgaaatcatcgatgcagcgtgcaccgttgatgcgggttctgtaaaccagaccgttgatctgggccgttacagcaaatctgaatttaccgctgctggcgataaaaccgctgcgactaaattctcaatcgttctgaccaactgcccggcaaccgtaactggtgcaaccatcaagtttgacggttctgcagatccagcaaactctaacctgctggctgtaaccggtggcgcaacgggtgttgctattaacctgatgacggctgatagccaggatctgccgctggcgggcgttaacagccacgtatacagcctggctgaaactgtaccaaacacgctggacttctttgctcagtacgaagcaacgtctgcaactgttggcgtaggtccagcaaacggtgtagctaacttctccgttagctaccagtaa

SEQ ID NO: 140691 - DNA, 678 bp, Enterobacter cloacae
atgaattttcttagcaaaactttaattgcctgcgcagtaatttcagcaagcgtgtccgccgccaatgcgggtgttattattggcggaacgcgtgtcgtctatgatggcaataaaaaagaagcttccattgatgttaacaacccggataagacgccgtaccttattcagtcatgggttgagacattaaatggtggcgctgagaaagctccttttattattacccctccactgtatcgtctcgatggtggacagcaaaacattgagcgtgtcgtggtgaccggcaatttgccacaggataaagaaagtctctactggctaaatattaaagcgataccgtcagcgcccaaaaaagataatacgctgcaaattgcgattaaaacgcgcattaagctgatataccgtccggcaggcttaaagtctcagcagccgcaggagttgagtcatcagttaacctggcgccggaatggaaatcaacttcaggttaccaacccaaccagctatgtcattaacttcaatgaaatcagtctgggcggtaaaaaaattgaaaatgtttcgtatgtacttcctggggaatcaatgaatttcacgctgcctgctggcgctaactcaacctctattaattataaagtcattaatgattatggggcggtgagtgacgtgcaaagcgcaagcttgtga

SEQ ID NO: 140692 - DNA, 2541 bp, Enterobacter cloacae
atgatgatagtaagggaatataataattttaaacctgcgcgattggctttattaattgcatttgccctcgcgggttcaatgcagaatgccatggcgcgtgattacttcaacccggacctggttgaactcgataatccgcaaaatggaggtaaagccgatctcgctgcgtttgaagcgggctcgcaggcgccgggaacctatcacgtcgatgtgatgctggataacgaacttgttgatacgcgtgatatcgaattcaaaacctctggtgctcccaatgatgaggggaaattagaaccttgtctgaccgtggagcagcttaaagagtggggcgtaaaaaccgatctattcccggcgctggcggtggacaacgagcgttgtgcgaacctgcacgcgataccatccggatccactgaattccagtttggcgcacagcgtctgctcatcagcatcccgcaggcggccatttctcgtcaggcgcgtggatacgttccaccagaacagtgggatgacggtatcacggctgcgctgctcaactacagcctgagtggcgccaacaaccgctcgcgcaacgggagcagtgataccagcaacacgcagtacgctaatttgcgtccgggaatcaacatcgggccatggcgtctgcgcaattacacgacctggtcacgggatgaagatggcaaggacaaatgggatagcgtttatacctacgcccagcgcgcgatcgttccgctaaaagcgcagatgacccttggcgatagcactgcgcccgctgatgtcttcgacagcatgccgttccgcggtgcgcagctggcctccgatgatgatatgcaacccgactccctcaaagggtacgcacccgtcgtccgcggtattgcgcgtaccaatgcgcaggtcattgtccgtcagaatgggtatgagatttaccagacctacgttgcgcctggtgccttcgagatcacggatatgtatccgacagggggagccggcgatctgcaggtcacgataaaagaggctgacggtagcattcaacaattcaccgttccctttgcgtcattgcctgtactgcagcgagaagggcgatttaagtacgccgtcacgggtgggcaatatcgttcctacaacagtagtgtagataagacgccgtttgcgcaaattacgggcatctatggcttaccgtatggcttaacggcatacggcggtggtcaaacgtccagccactaccagtcggtcgctgccggtatgggtaagaacatgggagatctcggcgcagtttctgtcgacgtcattcaggcatggtccactccacaaaatctgccgagtgatagcggccagtcctggcgagcacgctacagtaagaactttgtcgaaaccggcactaactttgctattgcaggctaccgctattcgaccaaaggcttttacggtatgcaggaagtgcttgattcatatggcgataacggtgtgatgcaaaacagacgtcgtaaccgtatggagctgacgatgaaccagtctctgggcggttcattaggctcgatcatggtgagcgctgttcgtgaagattactggaattccgggcgagcgatggagtcctggagtctggggtataacaatttctggaacggcatcagctacggcctgacgtatacctccacgcgaaacgggacgcctggtacctacggtaacccgacgagctatgacaaagaccggatggtggcatttaacatcagcgtgccgctggataaattcctgccgcagacgtgggcaaactacagcgtcaataacagcaaaaatagcggaacgacccatacggttggcatcaacggcaccgcgctggataacaatgccctgaactggaacgttcaacaggggtatggcagcgataatgtcggatacagcggcaacgtgaacggtgattacaaggggacctatgctgaggtgacggcagggtacagctacgaccagaacagtgagcgtctgaactacggtatccagggcggggtcatcgcgcatgctgacggcgtgacgttatcgcaaccgctgggcgaaacgaacgttctggtaaaagtgccgggagcgaaaggtctgacggtgcgaaaccaaacgggcgcgaaaacggactatcggggatataccacggtaaataacgtcaacgtctaccgtaaaaacgatatcgtaatcgacccagaaagtatgtctgatgatgtagaactggatctcacgacccgaaccgttgtgccaacgcgtggggctgttgttcgcgctgaatacactgccaacgtcggtcaacgtgcattatttacgttattgcgtggtaacggaaagcctgttccatttggggcgattgtcagcgtaggtggtattaaaaacagcggctttattgtcggcgataatggacaggtttatctcacaggcctaggcgagaatgtcgaccttatcgcgcaatggggtgagggtagtgataagcagtgtaaagcctcatacgtgttaaaacctaccgatgttaaaaataacattgcggttgtcagtactgtctgtcgatag

SEQ ID NO: 140693 - DNA, 924 bp, Enterobacter cloacae
atgaatgcatttaaatattttttgctgttgcttttgacgttaatatccgtagaaagctttgcaggctgtacgaacaatatcgctacgcaaaactttaatttaaattttaatacaattactgcgcagcgggacgtggcgccaggaacggttgtcgctgcacagtcgggtatttacaatgtgaatttctcatgtactgattcctcgaatacctatcaggaagcgatgaacggtacctctctgggaaataacctttatgatataggcgtaagtgggtacggcatacgtgtgtcagaaaatgattcaggcggcgggttccaccactactttcctatggcatttgctcttggtacttatagcgcgtcatatatgtataaagttgagttggtcaggacatctgatcctgctgcatccggatcgctacgcagcggtcaaattgctaacgtatctatttcaaaccaatttttcattgcgacatggaacatcactggcggaagcattacgacacttgcctgtagtctttcttctggatcgctgagttttccgataggtaatatccctgcgacaagctttggctcaacagtgggtacaacgccagttaatactcaggtttcgcagactctcggcttaacctgcaatcctggcgcaaatatcaacatttctttgagtggacagcaaaaccctgatgtggccaataccagcgttttagcgttatcgggtcagggtggcccgggggtagcgcagggagtaggtgtacaaatattatatggtggtacacctcttaatcttaataataccgttttcctgcagcaatctggcggtgggttggcgtcattcccaatcgtggcccgttattatcagactaaatctgttgttttacctgggacagcgaacacaacagcaacgttgaacattacctatcaataa

SEQ ID NO: 140694 - DNA, 510 bp, Enterobacter cloacae
atgaatattaaatgtttagtcctgagcttgtcagcaatgataccgtttttgtcttattcagcagatacggtaaatattaacgtgacaggtaatatcgtggcatcaccctgtattgtcaacggaggagcaagcagccttaatgttgatttaggtaatattcaggcaacagcactggcagctcctgactcatcatctactgcggtaccgtttacactgacagtcacaaattgcccaacaggcaccagtactgtccgagctgatatagggggttctgcatcacatgatgcgcctaatctttatgagaattcaggtacggcagggaatgttcatgttgttttgtataatggcgtgacgggtgattctttaggtcctggttctacagtatttttaccagtgcagagcgaccgtacagcatcgatggcacttaaagctggcgcatattctctttatggcaatacgacacctggtacgattaattcggttataattgttacaatgagttatcagtga

SEQ ID NO: 140695 - DNA, 510 bp, Enterobacter cloacae
atgaatactaaactctttttatctgccttcctcttgagttcagccccgttaattacctgcgctgataccaatatcaacgttacaggccaggttattgccagcccgtgtgtcgttgacacgggcaccgtttcgaaagtggtcaatctgggggaagatacaaagcagaatctcattaatgccggtgatgggggcgtctggtctgattttgatctgctggtgcaaagttgcccagctggcaccagcagcgtaacggccaaatttaccggtaatgccgatacgcaagatcccacggcgtggaaaaacagcgggaccagcaacaatgtggcattacgtattgccagcagggatcatgcgacaacatatagcgtgaacagcacaatgcaggtgaatgtcgacagcagcacgcgcagttcgacattcccgctgtcagcgagaatgtttacgccgcagggaaattccactgccggaacgttccagtcagtaatgaacgttgattttacctatcaataa

SEQ ID NO: 140696 - DNA, 687 bp, Enterobacter cloacae
atgttgattaattccttgcttgggcatgctatatgtggtgttcggttccagcctatctattcttcacaggaaaacaagataaaggcatgggagatgctaagtaccttacgtcagggaattgactgcgaaacgttttttgaaaagatgtctttaaatgcaagctctcgtttgctgcgctggcagttgcgtataatttctctgtgtgaagaggccggtgactattttattaacgtccccgcaaggttattatgccaatccgaattggtcagtgaaatattgcccagcctgcgttctggtatcgttattgaggtgcaagatccatgcaatttcattttgctaacaaatgaagagcgagacagttttaatacattgcatcagaagataaaaaaaacaggtgcaaagatatggttagatgatgttaaaagcgagcatttagcgctgctgggtgaacgtattagcgtatttgatggcgttaaagtagataaaaaaagcttatgggaaaatagatgtaccccctgggtcttacaatcaatgatagcttactgctcagtaatggtagagcaagtacttattgaaggcatcgaagataacgagctctttgctttggctcagggttcagggtgcaatttaatgcagggatttctttggcctgaaaaaaggttgaatattgattatgtctcggtctaa

SEQ ID NO: 140697 - DNA, 642 bp, Enterobacter cloacae
atgataaatgttttaattaaagaagatgactttttatatcaccatagcctcaggtcatttgttgaagatttttttaacaatgaatatgcaaaaaacgtcaattttctcaaaggctatgaggtggagaatattgctcgggcggaaataatcgtttatgcgttcagcaaaggtgagcattatacctgtttcccagaattaaagtgtgcgcctaaatgcgccatcattggtattatagaagcggaagaaccgtcatcatcgtttttaccgttctgcattcagcagactttctttgtgtcacgctcagcgccactctatctattgaaaagggtattccgtcaggcatggggtgcatacagtgcttccgctctccctttcttttcaaaagcctgcgaaagctgtaagcataaaacgttatcacagcgcgaattaaatataatggccgggatttacaagggggaatccgtcaaaaacatagccagggagatgatgctcacgccaaagacggtctatgcccataagtatgctgttatgcataagtacaacctgagcaatgagcacgagttgcttgaactcctgaacagcttactggaaaaacgctgtaacccgaatttgtttcgcgaagcattagatcaatttcgttag

SEQ ID NO: 140698 - DNA, 582 bp, Enterobacter cloacae
atgctgaaaaatctgcacgtgattaccggtattatctttgccctcaccatattctgcctgctgcaagttgtcacgggagggttgttctactctgccgtcagtaacgatcgccataacttccagaactccggcgtgctcaatgcccagcaggaaagcctgagcgacagcgtgaacacgctggtgaaaacgcgcgtcaccgtcacccgcgtggcgatccgctacctgaaaaaccagcgtgacccggcttccctggcggcgatcaataaactgctgggcaccgcaggcgactcgctggcaaaagccgaagcctataacaaagagtggcagaaactgccgcaggttaagggccaggaggcggcattgaccgacgagatgcagaaatcctggaaccagatgcacgaagtcatgcgtttatcgattgagtatctgcgcgccgataattatcaggcctatggcgatctggacgcgcagcaggcgcaggacgatatggaagcggtctataaccgctggcgcgccgaaaacaacaccctgctgaaggccgcaaccgaagagaaccagagcagctttacgcagatgcagtag

SEQ ID NO: 140699 - DNA, 561 bp, Enterobacter cloacae
atgtttacaggaaaaaaagtgcttttagccgtggcaatggccacgcttatttctggatcggcattggctgcagaacaaggctcaggcaagatcaaattcaaaggggtggtgattgatgcgccgtgcagcattgctcctgatagcgttgataaagaagtcgatctgggtgaaattacgactgccgttattaatgccaataaaaaatcgtctcccgttgcggtagatatcaacctggaaaactgccagctggacgatccaggcgatgaaaccgataccccaatcaccaaggttgacgtcacgttcaccagctccgccacggatacaacggataccagcctgatgaccaacacctatgccagcggtgcgcagaacgtgggcgtccgtctgctggataatgcggaagcgaacatcaccctgggtagcgccagtgaagttaccctgctggcaggctccgccacccagacgctgcactttaaggcgcagatggaagtgctgagcggcaaaacggcaacgccgggtcaggttgaagccaccgcaaactatgtgctggcgtataaataa

SEQ ID NO: 140700 - DNA, 2445 bp, Enterobacter cloacae
atgatgaaacataaatcaacatgcataatcatcattaccgccctgttaatgacgaaagtcgcctctggtaccgaatttaatattaatgccatcgataaagatcagcgcaacagcgtcgatttaacacagtttaaagatcgcgcctccgtcgtccccggtcgttattttgttacgatttcaattaatgacacccccttagcaaacggctggcagttaacgtggaaaaaagtgaatgatgcagttcaggtctgtattcccgccgaactggccgacacgttcggcctgcaggataaaatacgggaatcgctcactgaaaaagagggctgtatagacttcgccccgctgccggacattcattttacctttgaacaagcaagccagacgctaaacgtgtccattccccaggcgtggctgcagtaccgttctgccgactggatgccgccgtcaacctgggataacggcgtggcgggcgtcctgctggactacaatctttttgccagccacttccagcccaacagcggcagcagttcagataatgccaacacttacggcacggcgggcgcgaacgtcggcgcctggcggctgcgcagcgattatcaatacaaccaaacgcacgcggacggcggttcagagcataacgggcgcttctcgcgcgtttatatgttccgccccctccccaccatgggcgcaaagctgacgctcggcgagacggatttccagtcgtcgattttcgatgccttcacctacaccggcgcgtcgcttatcagcgatgagcgcatgctgccgtggtcactgcgcggctatgcgccacaaatctccggcattgcccaaaccaacgcgacggtcaccgtaagcctcgccgacagggtcatctatcaaacaaaagtcccgccgggcccgttcatcattcaggatctctaccagtcggtgcagggcacgctcgacgtgaaggtgacggaagaagatggccgggtgagtacgttccaggtctccgccgaatccgtccccttcctgacgcgtcagggccaggttcgctacaagctggcggcaggcaagccgcgaaaggacgcatcgcatgacgttgaggacagcaccttcatgagcggcgagttttcctggggtatgctgtcgcaaacttcgctctatggcggaacgctggccgatggtgaccactaccgcgccctggccgccgggctgggacaaaacatggcgtatctgggcgcgctctcgtttgatatcacccgggccaccagccagctgccgggcgcggatccgcagacgggctacagctaccgttttaactacagtaaacggttcgacaccaccggtagccagcttacgctggcgagctaccgctactcggaccgtcagttcctgagctatgcgcgctatctggataacgacaacagcgacagccagacggaaaaacagaccctcagtgtcaccgccagtcagtacatatcggccctctcgctaaacctttatctgagcatgctgcgccaaacctggtgggacgactcgccttccacgaccggcagcgtcaccgcaggctataacttcgacgttggccgctggaaaaaccttggcctgaccctgtcgctgagcagaacccattacgaagatgatgaagaggacgataaccagttttatctctcgctgagcgtgccgctcgatcctgaccatcgcctgaactacgacctgcgcaacggcgacagcctgagccagagcgtctcctggtacgatacctctgaccggaacaatacctggggcgtttctgctggcaccgagagcgaaaaagccgatgcgggcgcacagttcagcggaaactatcagcactattcttcgctgggggatctcaacgtctcgggcagctataaggcgaatgagtacaactcaatgagcgccagctggaacggatcgtttaccgggacggcgaaagggtttgccctgcaccgtcgcagctacggcaatgagccacgcgtcatggtcagcactgacggcgtgggccatatcccgctgaacgtatcgcatgacgaaaccaacgcgtcgggtatcggcgttctgccgtcgttttccagctataccccggccagcgtgcgggtcaacatgaacaatttgcctgacggcgttgacgtcgatacgcgggtggtcacttccacctggacagaaggtgccatcggctatcgtcaaatcgcgacccgagccggtaacgatattgccggcattttgcgaacgccttccgggacaccgccgctcggcgccctggtccgcctgcaggataacggcctgcaggtcggcatggtcgccgaggagggccgcgtctggctgggcgccgtccagcctgagcaacagttcctggtcacgtggggagacaaccaacagtgtcgcttctcgttaccttctcaccttgaaaacagtatgcagctcatgctgccttgccagtaa

SEQ ID NO: 140701 - DNA, 762 bp, Enterobacter cloacae
atgatgaaactcaccccattcaaggccctgagcctgatattgctcggcaccgcactgaacgcgcatgccgccattaacctggaccgcacgcggatcgtttttcccgaaggggacaaggcaagcagcctgaaagtcgataaccagagcaaaaccttaccctacctggcgctttcctggattgaagacgaaaacgggcgcaaagaggacagccacttcatggcgctaccgcccattcagcgcatagaagcgggcgcgtcatcgcaggtcaggattgtgaagcaggcagcggttgggcagttgccgaaggacagagagtcgctgttttacttcaacctgcgagaagttccgcccaaaagcggcgccagcgaggcgcgcagcgttatgcaggtggcgatgcagagccgcattaagctgttctggcggccaaaagccatcaccaaaaagccgggtgatcaaagcgaaatgcgcatggaaattaccgccaccgcaacggggctcagcgtacataaccccacgccctattacatcacactcgcgtggctgagtaaaaatgcgaaaacccagctgccgggcttcgacagcctgatgattgctccgtttgccacggcgtccacctctaccggcgactaccacgggagctactacagcgtgggttacattgatgattacggcgcgctgaaaaaagtggacgttacctgtgcgggtaaggcgccatgccagctcagcgagcggaagggtcaaaacaatgcgcaagctcgttaa

SEQ ID NO: 140702 - DNA, 1062 bp, Enterobacter cloacae
atgcgcaagctcgttaattgtctgtttttgctgctgttcgcccttctgcccgtcagagaggcgctggcgcttgactgctatctcggcgtttccggcgggcccgtcgaggagacaaaaacgatctccccttttgccattcccagcaacgcgcaggtgggggaaaagatatgggaatctgacgatatcaaagtccctgtgacctgcgaccacaacaccaccagtaattttgaaaaagaggacatctacgcctgggttaacccctacccgtcggcgtccgatccctactacgaactcggcgtaacctatgaagggattgactacgatgcgacggggcaacccaacggggttgatacctcccagtgccttgataacaaacagatcactatctatacccccgcccaaatccagcaaatgggctgggagaaccgcatctgttccggcaatgcgaacgacattcacacctcacgcacgttcatcgtgcgctttcgtctgtacgtcagaatcaaggtcatgccgccgcacggctacgtcagcacgctcggggactatatcgtggtgcagttcgacggcaagggcggcgtcaaccagatgtccgatgcgaaaaacctgaagtatcatattaatggcctgaacaatatcaccgtgctggactgcggggcgaccttcagcatctatccggaaaatcaggagattgattttggtacgttcagcgctcgcgacataatgaatcagggaaagcgaacgcgcacgttctcggtcagaacgaccaagatacaggacgccgagtgttccgatgggtttaaaatggattcgtcgttctatacgaacgagacgctgagcgaagaagataccgccctgctcatcggtaacggcctgaaattacgcatccttaacggaacgcagccctacacctttaaccgatacgaagagtatgccgattttaccggcagtacgttgcagtacgaacagacctataccgctgagctgacgccggtgccgggaaaggcgatccagtccggaccatttgaaaccgtggtgctgttcaaaattaactaccactaa

SEQ ID NO: 140703 - DNA, 135 bp, Enterobacter cloacae
atgcgcgggggcaacatccttgtactccagcgcattcctggacacactgatattaaggtaacgatgcgctacgcttactttgcacctgaccacctgaacgaagcggcattgcccaacccaccaacaattttataa

SEQ ID NO: 140704 - DNA, 705 bp, Enterobacter cloacae
atgcaggccgctgattatttaaagatgaagttccagagcgacagacagttggctatttatggacagcaaggcgttgccgggacatggaaagcattaaagggaatcggctctgatatctattcaggaatggagcgtgtaagctggtactcatcatgcttaatccccagctatcacgatgtatgtgatgaacttctctcagaagaaaagaggatgtacctctcaattgtgtctctttaccgttatcgcgatgtaatagcacagatgctctatctttattttaaaagtgttctaaatgactctgaaaatggaaatgaacaaaatcgcgcccgcaagacgggttcacaggtaaccggacttgttaaaaatatcccgacaagcaaagcagcgcgtttagcaatagcatgggggttggcaatatatctctccaaatctggcctgctctcagaaatcgtcgtcgaacggcttgcacgtcgtgtaccgaacgttgtcatggcatttcaactcattggcacggaccagaagtgcgcgcttgctgctcgtcgcctgaaaacgttggacccaaagtattacgccaccctctatgccgcacaactggagatgctctattactttattgaaccattcctgtctgaactgattaagaaagttcaaatgggattctacagggattttgaagcgatttatgacgacttaagggacaagtag

SEQ ID NO: 140705 - DNA, 267 bp, Enterobacter cloacae
atggaacgcacagcaaaactattcaaaaagggtcagaatcaggccgttatgctgcctgctgaattcgcgtttgatacggagagcgtctacatccgacgggatgaggaggggaatgtcgttttggcggcaaaacctgttctaataaagagctgggataattttctccgcatgctggcagaaacggacgtaccagatacgtttttgagcaaggaggaacgcaatcagagtgttacgacaagagaccctctggatggagcatgctcatga

SEQ ID NO: 140706 - DNA, 399 bp, Enterobacter cloacae
atgagacatatgctggatacgaatattgtgagtcacttgtttaaacgacacccggaggttgtaagcagaatgacatgtctggcgccgggtgacgtttgtatctcaagcattaccgaagcggaattgctgtatggtgctgacaagaagaaaagcagtagattgaaagaaacaatccgggagtttctcaataccatcacgatttgcgactgggacagcgacgccgcagcaacgtacggtgaactccgtgcaaccctggaaaagaaagggaaagtgatgggggatctcgatcaactgatcgctgcacatgctatcagtcggggaacaacgatcgttactaacgatcgtgcattcagaatggtgcaggagcttgccgtcgaggactggacgacaacgttgtga

SEQ ID NO: 140707 - DNA, 234 bp, Enterobacter cloacae
atgaacgaaaaaagatggctgatgtcttttattttgattttgctgacgctgatcttaacaatggatattattgctttgctaacttatttttttgcaaaggcctatctctatttcattcgtaatatccctgttgagataagtctttttgagttagtgaggattattaagggcgcatcattgggtgggattattgttggtataggttgctggtatatttattttaaaaaatactag

SEQ ID NO: 140708 - DNA, 246 bp, Enterobacter cloacae
atgaaaaaaatgattttttcctttcttctttttttacttatgggtttcgtcactattttagccggatgtgttttagtttcggtgtttagcagattcccggttttattgatagaaggacattggccttcttattcgtctgctaatttcctggatgactttaactttagcctttttaatggggttgtttttggttcgctcatgtttattgtgaatttattcttgaaaataaaaaaatacaaatcatag

SEQ ID NO: 140709 - DNA, 471 bp, Enterobacter cloacae
atgctaacttattgttattttaaacaaccctcttcaacgcagcaaaataccttcctgagtcgctttcatgcatatttaaaaatactgcatatactcactaatacgccgctcggcgttcttttgcgtggagtattcatatgctacctaataatgttagtcgcatcagcgctattgctgttgcggtactgctcgcgttctctctttctgcctgtagtggaagcggtggcggatctcactcaacggccaaaaataaccctgcgacgggaagcagcagcggctcagatgatggaagtggcacaaccgcgagcaatggcggttcgggcagcaacggatcgggcaccggaacgggttcaggtaccgggacaggcgctggcggcggaacgggttctggttcagggtcgggatcaggttcaggctcaggctcaggctcaggctcaggaggcagtggaggaaccactaccgcaggcgtaa

SEQ ID NO: 140710 - DNA, 1239 bp, Enterobacter cloacae
atgaatcaaaaatcctggctgctcaacctcagcctgcttaaaacgcacccggcgtatcgcgccgtgtttattgcccgctttatctccattttatccctcggcctgctcggcgtggccgtgccggtacaaatccagacgatgacccactccagctggctggtggggttatcggtgacgttaaccggcggggcgatgttcatcggcctgatggtcggcggcgtgctggcggaccgctacgagcgtaaaaagctgatcctgctggcgcgcggcacctgcggcgtgggctttatcgggctgtgtctgaacgccatgctgccggagccgtcgctgatggtgatttatgccctggggctgtgggacggcttcttcgcctcgttaggcgtgacggcgctgctggcggcgacgcccgcgctggtcgggcgcgagaatctgatgcaggcgggggcgatcaccatgctcaccgtgcgcctcggctcggtgatttcgccgatggtcggcggcctgctgctggcaaccggcaacgtggcgtggaactacggcctggccgcggcggggacgtttatcaccacgctgacgctgctgcgcctgccgctgctgccacctccgccgcagccgcgcgagcatccgctgaagtccctgatggccgcgattcgtttcctgttcagcaacccgctgattggcgggattgcgctgctcggcggcctgctgacgatggcgagcgccgtgcgcgtgctctacccggcgctggcgggagagtggcagatgagcgcctcggaaataggcattctctacgccgccattccgctcggcgcggcgtgcggggcgctgaccagcggcaacctggcacagagcgcgcggccggggttgattatgctgcttgtcacgctggcctcgtttatcgctatcggcttctttagcctgatgccggtgtgggcgctgggcgtgctgtgtctggtgatctttggctggctgagcgccatcagctcgctgctgcagtacaccctgatccagacccagacgccggaaggaatgctcgggcgcattaacggcctgtggaccgcgcagaacgtcacgggcgatgccattggcgcggcgatcctcggcgggctgggggcaataatgaccccggcggcgtcagcgagcagcagcgggtttgtgttagcaatggttggtgtgatcttattggtggcgctggtggaattgcggcggttcaggcaggagagagtgttgaccctgtag

SEQ ID NO: 140711 - DNA, 219 bp, Enterobacter cloacae
atgcgtgaattaaaccaaaatgaaatgagcagtgtcgctggtggaataggtgctggtaacgggaacggtaatcacagtggtaacggcaatggtaacagtggtggtaacggtggtacctgcaacggcggcaatggtggtaatggtggccgtgggggtaatggcggcaacggcggtaatggcggaaactgtggtggtggtaataatggcggacgccgttaa

SEQ ID NO: 140712 - DNA, 243 bp, Enterobacter cloacae
gtgacggcggtaatggcggcaacgggggcgccggtgggaacggcggtcgtggaggaaacggtggcacctgtgggtcaggcaatggcggcaacggcggcaatggtggacgtggtggtaacggaggagatggcggtaacggtggcccaggcgggaaagggggcaaaggcggaaaaggaggccccggaggacatgacggacgcaatggaaaagatggctgaatctttaccgggtcaacatgactga

SEQ ID NO: 140713 - DNA, 2133 bp, Enterobacter cloacae
atgagtaaacgctctcttaaaaccctcatcgaacagctggatctccagttgcgcccccgggttccgctggtccaccagacggaatcgtcagagtgcggcctggcctgcctcgcgatgatctgtagccactatggcaaacagagcaacctcatcgccctgcgtcaacaatttaacctgtcagcacgcggcaccacgctggcaggcatgacgcaaattgctgaacagcttggactcgcaacacgctgtttatccctcgatctcaatgaactcagcgcgcttaagaccccttgcatcctgcactgggattttaaccattttgtcgtactcgtcagcgtgaagcagaatcgagccatacttcacgaccccgctcgggggcgaagaaaagtaggtatggaggagatgtcgaaatacttcaccggcatagcgctcgaagtatggcccggaagtacatttgccgcacagccaacaagccatcagttcagcctaagatccctggccgcgaaggtgcacggccttaagggaatgttaggcaaaatatttttctattcgctcattattgaaaccatcaacctgcttataccaataggcactcaactcgccctggatcatgctattcccgccgcagatatgggcttgttaacggtgatttgtatcggcctgtttctctttactttactgcgcgtggcgttgagtgctttacgttcatggtcctcgctgataatgacgacgcttattaatgtgcagtggcagtccgggctttttacccatctcgtgcggctgcccctgagctattttgagcggcgcaagctgggcgatattcagtcgcgctttggatcactgaacacgcttcgggaaacttttaccagtagcatcattggggcactcatcgatggaaccatgatgatgggtgtcatcgtgatgatgatactttatggcggctggctgactagcgtagtcataggctttactgcgctgtatgttctgaccagactactgacctacagtacctatcgcgagttatcggaagaaaccctcatcagagatgcccgcacccggtcctatttcatggaaacgttgtacggtatcgcgaccgtaaaaatgcagggtttgagtgagagacgcggcactcactggttaaatctggaaattgacacgatcaatacagagataaaaatcaccaaaatggatctgctttttggtggggtaaacgcttttattattgcctgcgaacaaataacaatgttatggctgggctcaaaactcatcatagaaaacgcgatgacaattgggatgttcatcgcttttggcgtgttcagggaacaatttgccgacagaatctggtcactgacaaattttctgatgaagttgcgcatgatgcatcttcataacgaacgcgtatccgatattgcgcttaacgtaagagaaatgaaaaagcctgacagagaaatcataaataccatgcaacctgttactcttgaaacccatgcgctgagctatcgctatgacgagcattccgccgatgtttttcgcaatctctcattcaaggtttcagcaggtgaaagcgtggcgattacaggaccgtcaggagcggggaaaaccacgcttatgagagtactttgtgggttatttgaaccactttcgggctctgtcacaatcgacggttatgacattcaacagctgggtttaaacaactatcgtaaaattatcggctgcgttatgcaggatgataagttgttctctggatcaatcagggaaaatatttgtggctttgatgacaaaggcgataaggaatggatggaagcctgcgcccgcgccagctatatccatgacgtgattatcaaaatgcctatgggatacgagaccctaattggtgaactcggtgaaggattatcaggtggacaaaaacagcgactctttattgcgcgcgcgctatatcgcaaacccggaatattatttatggatgaagcgaccagcgcgctggatgaagagagtgagagctatgtcaatgcagccatcaaaaagttaaacatcacacgcattatcatcgcgcatagaaaatcaactatcgcatccgctgaacgtgtgattcaactaacgccactaacagaacaacatgagcccagccagaaatga

SEQ ID NO: 140714 - DNA, 690 bp, Enterobacter cloacae
atgagggaactagctgaattaattgataaaaagagatctggctggcattcagtgaaacaatggctgcaagaagcaagcaatagctatgaagtcttaccttgtaaccttgcgcaagctcgcgctgatttacatcagcttcagataactactttctctccgcttggggcaatttcatatgaaacgggaggaatactcattgataatggttggttgcgaattttaggctcaggtcacaccagactgtcaagaagtctggcttcatggacgcaattgataactgctggtcagacatttcaggcattattaattgctgatgatgcatctggaggtttttttgcacttaacgggggagaattaggtaaagatctcggtgggatatattactttgctccggatactcttgaatgggagagcctcgatacccactattcaggttttctgcattgggcactttgcggagatttggatttattctataaaaatgtacgctggacgggttggcgcgaagagatggctttaatgaattgtaatctcgtttattctttctatccttttctctggaccgaacagcagttgtctgtagaaaagcgttcgcgagttacgatacctgttgaaaagcactgggcactttgcctggatttacaacatcaattaaccaacatgcagagcgacgatttgcttcctccttga

SEQ ID NO: 140715 - DNA, 186 bp, Enterobacter cloacae
atgttgcagatagagaaattgacttatagatatgatgtgctgatgcgacctgtgctcaattttttgacaaataatagccatagaaagtccgatcttgtcacagcgcggatcggctcgaagatcgatgtccgctgtgagcgtagagcggaaattgtctttatgaatgacttttacattgccaaataa

SEQ ID NO: 140716 - DNA, 384 bp, Enterobacter cloacae
atgcaaatcaaatttggggtgttgttactcgtggtgcttgtgccattgacatcgactgcagcaaaagggagttttattttttcggtcggtaatgagaaaactttgtttgattctggatgtgtaaagacaattgattatgtagagaaggatgagataggtgcagagaatttagtctttagattttccgatgaatgtggcaaaaggttgtcggacatgacccgacagaatatcggaaagcatatgaccatcgcctacgatgataataaaattacttccgctatgattgcctcgcgcctgagtaccagtttcagaatatccacaaaagacataccaagaataatgttaatgcaaatacttaacgattatgatggtgttcgtgattaa

SEQ ID NO: 140717 - DNA, 1068 bp, Enterobacter cloacae
atgattattgcttcagccgcgagtttaccgtttgttctgaatgccggattcggccagccgccgcagggtgaacggcttactgaagtggaggcctctccacagtatcgcgaggggaaattccacaatacgctgccgacgcccggttataacggtgacaaaaatatgctgggcgcgatgtgggagtttctgaccaaaaaaaccgaaaacgctcgcccggcccagccgctgccgctggtgaaaaccgatcttgcgagcctgccgctggagcaggacaccctggtgtggctcggtcactcctcgtggtatctgcagctcgcgggtaaacggatcctcattgacccggttcttggcaactatgccgcgccgttctcgttcctcaataaggcttttgccggcgagtatccgtggcgggcagaaattatgccggcgatcgacctgctgattatctcgcacgatcactacgatcatctggattacgccaccatcagggcgttactgccgaaggtgaagcgggtggtgacgccgctgggcgtcggctcccacctgcgttactgggggatgaagcccgagattattgacgaacgcgactggaaccagtcggtgcgcatcagcgatgcgttgacggtgcacgttctgccggcgcgtcacttctccggccgcggcatcaaacgcgatcgcaccttgtggggcagcttcatgttcgtcacgccagagcagaaggtttactacagcggagattccggttacggcccgcacttcagggccatcggtgaacagtttggcgaagtggacgtcgccatcatggaaaacggccagtacgaccaggactggaagtacatccatatgctgccggaggaaacggcgcaggcctcggcggatctgaacgcgaaagccgtggtgcccgggcataacggacgcttcgtgctggcgaaacacgcctggaacgatccgctgatccagctggcaaaagccagccaggataaaaattatcggttgctgacgccggaactgggcgagcccgtccgggtaagcgacaccgcgcaaacctttcgtgcgtggtgggaataa

SEQ ID NO: 140718 - DNA, 1395 bp, Enterobacter cloacae
atgagtgaattcgcacgtagccgggccatgcgtcagttttatcggaatgtctttacccgattcattgatctccccgaagcagatgttatgcccgctaacatcgtggcggaaatcttcagctttaagagcgccaatattaccaccctcgaacccatgatacgtgcggcagaaacggggctggaggcgaacaaagattctgccttaaaaaacatgttgtgcgcaatcgtgctggccaacagtgcgcttgatgagtcccgtactggcgataaacagatattatcttcatcccaatgtgcgcagctgaccgaatatgttgtctcggcattaaacgccgacagtaatattcattatcttgtcgccgccattcagctactgtttcgcgtaaatgaaatcagctcagcgctattcataataaacaacaatctttcgcaggtaagcagctcggctccggttctgaaaattctgctgctgatctgtttaatggaaaacgactttaatcaggcgatggtcgtgattcaggtattgaccgccgatgcgttacttattggtgaagatcctatggccctgctaatgattacctgtgggatctaccggcttggaggcattccggattcttacattgattttagatcgcttaacgcgagcgagtacatcgcggcgaagggtgcctgggaaaactggattgtaaaaacctcaggtaccaaaacgacggtgttgctaacctgtactcgcgaggaatatttcgaacacgccgtaccgacgctttactccctctatgaaaccaatcgcgacgtcctggatgttcacgttcacgtgttcaatggcagcaatgagataaaagaaagtctgctggcgcttcgggaacagtttcctgagctcaatctctctgccagccatgagacgatcgccagcaatactgacaccgcagtgatcagcgctgcgcgtcgcattgttttcctgcgccatgctctgagtacttttaatacacctattattgctattaattcaaatgttcttgcgcgtaaaccctgggccgagcccaacgcgtcgctgatgttgttacaaaccgaaaactcgccgttctgggaagaagtctttgccggttttatctacgccaggccttgcggcatcgcacaacgctatctcgatagggtcgcacactttatcgacgttaacctcaccagcggcaactgtgcgccgggccttgaacaggtcgcactctttgcgtgcctggatagcctttcgccacaagaccagcattcgattacccgtgctgagcgttccacagtagtggatagccacgctgcggatgaggcgttttgctgggtagcaatgaaagcagagggcccctgtcaggagtttaaatcgacgcttatcggtaaataccaacgctaa

SEQ ID NO: 140719 - DNA, 3213 bp, Enterobacter cloacae
atgcacgcctgggctaacccggagagtatagctattggtgtggatattgatggacaggcgatcctgagggggaaacagttggttgcagggatgggatgccagaacgttgaactgtttgaggcagggttaggggatttgcttgcggtcgatcccggtgagtttgattacatcattatccaccagagttttgcttttctgggcaaaagcgagcgggaagcactcttgcagtggtgtcacgcgcatttatccgtcaacggtgttatcgccataaaatggtctgtactgccgggaagttcagcgcgtctcgcgttgggtgaagcgctacgctttcatcttgaacgggcagaagcgggcagcgatctgctggcttctgcccgtgccatgttgagttttatgctattaactctggaagaaggtgcgctcaagaacgaagtcctacgtgcagaaaaaatggacgacaacacactgattctcgccttcttaaccccgactgacggggcatgtactttggctgccttctgttcacaggcggaacaggtgggtctgcagtatctgggcgatatccttccgcagtcagagctaggaagctattataatccgacaattgaagaactgctcgaggccgtcagtgccggagccagcagaacaatggcacagcagtatcttgactatgccgtgcagcgctcagaacgctttactttgctttgtcacctgaacagtcaccagcctcccaataagccggatcttaatcagcttagaaacctgcactgggccggaagctttgtgccggtcgaaatggatcccgcaaaagcaccgcatgaattcagaaacagcaacggtcgaatcattcgcaccgacaatgccgtcattatccgcatcatggaattgctgggtaatgtctggccgatgtccttaagtttcgagcagctactgctcaactgtcgcgcccctgaaacgcaggaggattatcaggatacggtcctggatgccctcacaacgctgtttatgacaggcgcggacggtctcttttggagtgcggctcctggcccgtataacgctgcgcaaaacgatgagctggcaccggtgggggggctgccttccgaacgtccggtggatgccatgcgggttatgaatttgtggggagagtgggtctccttaacgcccgacgagtggcgttatcttcagtacgacatgaacaaagcaggacaagcaaactggcaacactactcgtcgctgaaaattaaagggttgctgacgggctctccggaggcgtggaaaaaacatctgcagtgttttctgcgtgcgggcatgatcgacgtactcaaatcgcagctttcgctgctgttattattgagcgtcgacagggtacagggtggattgttgctgaagggcaacgccgaatccgaattagccgatcctgatgtcgatgccatttatgcacgagcgaacagtctcattcaacaagggcgctctaaagaagcccgggagtacgcccgcgcattgatggagaaaaaacccgacaatattcatgtgcttcgctgctactcaaaaacgtgcgtcttaacctctgcctgggatgatgctctggcatcgctttgcacgctaatgggatattatttttccagccttgatatctactatgatctcgccacggtacttcagcgcaagcgtgagttttacggttcgcggctcattgtccgtactttactgcgcctgaataaaaaaaatattgattactggctcagtatggcatcgctgcaccatgcttacggcgatatgtcgttggctgaaaaatgctgtagggaaattatgcgctttcagcatcctggtcccagttcgcttggactcaccggcatcgtcctgagtgacaaccataaaatggcagaagcgcgctattttatggaaaaagctgttgagctcagtaattacaattttggttacttcagcaatttacttttcgtgatgagtcatgacgctagcgtgaaggctgaagagctgctggaaaagcatatcgagtttggccgccgtacggcatcctgggctgaagagagcggggtaacgctggcgctaactaattccctggaacctcagcgcaaacttcggctcggttttgtttccggagatttgcgtaagcatccggtggcaaatttcctgctgccatactgggacgccatcaatcgcgaaaaatatgatttagttgcctataacacgcttttcctggaagaggatgacgtttatcgccacctgcgtcagagcgctaccctttggcgccaggttgatgctatcagcgatattgagctggcgaaactgatcgcagaagatgggattgatattctgttcgatttatcgggccataccgcttacaaccggctaccggtcttcgctctgcgcccggcaccgatccagatcacatggataggctacccaggcaccaccgggatgaaagagatggattatattttgctttcggcgagcctggcacagtctccggcccttgaaaaacagctggtggaaaatgcgatgttcgtggcgacgcgtaagagtttcgaacctcacccgcgaagcccggatattaactccttacctgccctgcacaatggctttatcacgtttggtagcttcaaccggtcaaaaaaaataaatgaccaggttctggatacttgggctgcaattttgcagggctaccctgagagtcgtctcttaatcggtaatatgaccgatgctgaaatgatctctgccatgacgaagcgctttaaacagcgcggagtttcgcaaaacagattacttttccgtggactggttgaactggacgaataccttgctcagcaccatgaaatcgatattttactggatgccttcccctacagcggcggaacgacgacgcatcatggagcctggatgggcgttccgacaattaccatgaatggcccgaccataccctgccagcagggcgtagatattatgcgttcttacgggctggaacagtttatcgctgatgatgaggatgattatatttataaggcaatagactggcgtcaacatattccagagttagctgaaatacgtctggggatgcgtgataggatcccggttaatcccttgccagattttaatattgccgagaattttgagcgggcgctgcgtgaagcatggaaaatctattgtcggggagaaaagccgcgtccgtttcttattgccgaggagcgttcgtga

SEQ ID NO: 140720 - DNA, 1167 bp, Enterobacter cloacae
atgaccgtgatgcgcactgcaatgatcctggatgcgggttttgcctcactgccgttacaacaggccataaaagcggcgggttttcgtacgctcgcctgtagcggcaaagctcaggatgcaggtatgaaatatgccgacgcgacctgcgtgcaaaattatgccgatagcaaagccgtacaggcgattgcccgtaatgaaaaaattactgcgctatcccccggcgtaaccgatgtgtcctatctttcaggttgccgtgtggcggatgagcttggccttccaggcttcgactcacccgaggtcagcgatcttctctttttgaaagatcgcttcagaaaatgggccagcggccaaggctaccctataccgcgggctgtgagaagtccacaggacgcgcacgcgctaaccttcccgctgctggttaaacccgttgatgcttacagtggtatggggatttcacttattcatcagccgtcagagctggatgaggcggtaaatatcgcctgctctgcatcgccgggagggcagtgtgtcattgaaacattctgccagggggccctatatagccattccgcttttattcgcaatgggcaaattgtctgcgaattttttgttgatgagttttgcacggtctatccgtggcaggtaaatagcagttgcttgagcgtcaatctcagcgagccgatgcgcgaccgcatcagcgagtgtatgcaggccattgtcagcgacttagctctggtggatggtttgttgcacacgcaactcatcgctgacgaacaggatttttggttgattgaagtcacccgccgatgccctggcgatctctactcgaaattaattgaactctcaacgggcgtagattattgccgtgaatttgtgttgccctttattggtggggagagtgcgttcccgaatcggcgaccggcgcgccagcgatacgttgcgcgccatacggtctcttgcgaacgtcagagccgattttttggcttcagctacgctccgctaccagccacgatcattcagactatcccgctgaaacagccgggcgatgaactcgcaccagcacctgaagatcgcgccggactggtttttgctgagtttaccgaactcaatgccatggcacgccacacgccgcagctaaaaaactatttctcatttaattcattgtaa

SEQ ID NO: 140721 - DNA, 1116 bp, Enterobacter cloacae
atgcacaggcctctgtctctcgggtttatcggcggtgggatcaattctgccatcggtcttactcacaacatcgctagtcaaatggacgggcattttcagcttacgacgggctgctttagccgcgatacgtcgctgaaccagcagacgggtcgagcttggggggttaaagacgaggctatttactccagcgcagtcacgttacttgaagaacaacatgcgcagatggatgctgtcgtcatactgacgccaacaccctcccaccgtgaaattatcctggcctgtctggagtatggcctgccggtgatcagtgaaaaagcgatggttgcaagtgtaggcgacgcgagggatatcgcccggcgagtcttcgagatgaaaggacaactgtacgtcacctataactacaccggttatcccatggttcgcgaattgcgtaagcgtctgcttagcggcgagttggggaaaattcagcatgttatggttgaaatgccccaggaagggtttattcgcagccgcgaggatggcagcgttcctcagcctcaggaatggcgacgagttgatggggatattcctactgtttcgctcgacctgggtgtccatgtgcaccagttggtggagtttctgacggataagcaagctgaagatgtctatgcgatcaacagcacctttgcccgtgtttcggacgttatcgatacggttaacctaatctcccgctatagcgacgacatggtctgtaactactggtacggcaaggcggcgctcggttaccgcaatggtttgcgaatccgtatatatgggtcagaaggcagcgcagagtggctgcaaatggagccagaatatctccgactcgccgatcggcatggcaacgtgcgtctgcttgatcgaacggcaggagataacactgtggctaatcagcctcgctattgtcgttttaaagcagggcatcctgccggattcatagaggcattcgctaactactacgccgacatcgctgccagtttacgcggtgatgccacgggatatagcttcagttgtgatacggccgttcgcggtctcgagtttctcgaaaaagcgcagcagagcgccgtgacgtctgccaaagtcgatttacatcgttaa

SEQ ID NO: 140722 - DNA, 1125 bp, Enterobacter cloacae
atgacattactggaacagatacagggctacgataatcatttcttcaagggcatccgcgacatgcatgccaacggacttccgctggttctctatggagccggttgccttgggcagatgaccgcggaatttatgttccgggaaaatttgcctctcgataagatagcgttaaaccgacattacatcactgaaggcatgaccttccatggtctgccggtggtagcaattgaagaccttatcgaacaacccggtgaatttaactgtatcgttgcgctgcaatacgtccatgatgcattgcaacgggaattacgccgcggcggcgcaaacgtgctggtttacgatcctgcctttatcggagtcagcactacgctgtggtatacgcagtcgttttgtgacgagcatagcgatacccttgaagctgtctatgccggcctcgcggacgaacgttcaagagaaacgctggtcgcgttccttaaacagcgtctcagtgcaacccgcggctactaccaggcagtatacgagccagcccactattttcctgccgatattctccgccttcagaataacgaagtgtttattgattgcggtgcctacaatggtgatagcatcggcgcgtttatgcaggaagttgtcaatcaaggcgttgagatgccggagaaaattgtcggtttcgaaccagatgccggtaatttttctcagctttgtgacaatacccgacaatggccattctgccagccagtgcaaaaaggggtatgggagaataaaaccgtactctcttttcaatctgggaatgcgctctcttctcggcttgtggagcaaagcagcgatacggttacaattgagctcgatagcattgataatatcttgcagggcggtaaagccactttcataaaaatggatgttgaaggtgcagagctcaaagcactccagggcgccgctggcaccattcgcgcctggcatccactattagcgattagtctttatcataagccggaagatcttctgactattccacaatatattcaatcactcagcgctgattaccatttttatcttcgtggccaccatccggaactggcttttgagctcgttctatatgctgtgccgaaatcgaggttattacagtaa

SEQ ID NO: 140723 - DNA, 249 bp, Enterobacter cloacae
gtgcacccgcttcgtcagctcggccagtatgatctctctggccccttcgagcccctcaacattacgcttgtcataaaccagttctacgaacataagtgctccgctaatcactgtttgaatatacagtatttttgctttggcggttttgtctgtcaaggcatgaaccacttgtttttaaattttggggaacatactgctggcgtgtttgttatcgatttgccctacagggctgatgtggtctggcgctga

SEQ ID NO: 140724 - DNA, 150 bp, Enterobacter cloacae
atgaacaatttcaaacacaagaataaaaatatttggtatatgttttacagcgatcgttcttaccaccactacatgactgttgtgaatccgtatttattaaaatactgtttagccctgatgaacaagaacaaccacctgttgctctgttag

SEQ ID NO: 140725 - DNA, 273 bp, Enterobacter cloacae
atgtccaatcttggatatttaatgaccgattttgatcgtgttagctatctggctaatctgttaacgacaagagccactggtggtcgccagataataatgagtacaccagtttacgtagccaacttttacaaaatccaacaatatcacagaaaattccatcttttgtccgacacaatagaacgctggattctttttggtcttttattcaacccaaatttagcacgtatgcagaccgaagagccttcatctctgagcaatttacacctcttttag

SEQ ID NO: 140726 - DNA, 519 bp, Enterobacter cloacae
atgagtattaccattagaggtgaagatgcaacatgtttatttgaaatgttatctaatcctaaagcgatttgtatcgagggacatacaggatccgggaaaacaacggctggaaagaaaatagcagaaaagttcggagccaaatttttcgatacagatagctatataattaaagatccggcttcagatgttattaaaccatatgaagatatggtagacatcgcaaagttatcaaaagaactaaatgaggaaaaaggtaaaaagatcattgctggtatatgtcttcggaaaatattaagattagctaaaacatctgaacaaccaatatttatttacataaaatgtatatcaagaacatcatctcaatggatagaggaaaatatattagaggatcttagggaggggatcattggcatagacaacatccctgagcctcatgcaagtgattatcgatatattttggaaatgaatcctcagcataatgcagatattgttttcgaacgattggaagaaaatagctaa

SEQ ID NO: 140727 - DNA, 594 bp, Enterobacter cloacae
atgctgaaagaatgtgagcctccgggttttctaattgggaaactgtatgcagattttagaaatgaagataactatgttgaggcgtttaaaaagttaattcaaagcataggggtggtttttaataaaaacatcatgagcgacaagaacacatctgataatcttggtaccgctttagataaagcatctcatgcaaatatccctatgatgtgtaaaccatttcatagaccgtttcaatacatgggaatgcaagttccacaagcagaaaaaatctttggatgtaaaagcaatgaagttggaagcattattattgaagacgatgattgtcgtatgtaccttgaagcagaaggtaatttcattagttatatagaagttgatttcaaaaaaaccgctccacattatcaaaacaaagagttcgattcagaaattttccttggcgcgctgagcataggcttatcagaactagatcaagtcggcaagaaaacacatagtcatgcttattatgatcatcgacggaaattaaaaataactgtaagttgtttatacgatgaagccccaataaccgtatcctttagttctaaatattacggaatgtaa

SEQ ID NO: 140728 - DNA, 300 bp, Enterobacter cloacae
atgagtattagtgtttttttaagccataatcacaatgacaaaccatttgtcagaaagctagcacgagaccttgaaaatcatggtgttcgttattggcttgacgaagcagaaatgaaaattggcgactctctgattcaaaaaatcagggagggaattgatggtgttgattactttgctgttgttctatcacctgactcaattaatgcaccttgggtagtaaatgaacttgatgtagcaataaattatcaaataagcggtaaaaaaaataaaagtattacctattatgctgaaagaatgtga

SEQ ID NO: 140729 - DNA, 801 bp, Enterobacter cloacae
atgacagtccactttcacggaagtcctatctggggcgataaggatgcgcctacagatatgctcataaaggctctgtaccgtgatggtggagcgttcatttcatttgcaagaccggagcagatgaagaaagtggcaatgatcccatgtgacatcaggcttgataacggcgcattttctgcatgggataaagctaaaaagaaaaagacaacggtggactgggggaagcgaagtgagaagttttatgacttcgttggtaaatggttcagccgaattgagtggtttctgatacctgacgtcattgaaggaacagagaaagaaaacgatgagcagttagcattagttccacactggcttgcgtccaaggccgtacctgtatggcattctgatgaatcgattgatcgacttgtgaggctttctgagcgttatgagtgggtcgctataggatgttgcggaccgcacagacatatacgatctaagtggtgggagcagcgcatggatgaggtgtttactgagctatacatcaatagaaaatccccggttaagctccatggattgaggatgctagatgtcagggtgcttggcatgtatccgttcgccagcgcagattctactaacgttgccgttaacgtaccaaaaaccgagaaaaggtttcctgagataacagacaaattagctcgcacagctgtgctgcgcgcagccatagaaaacgtccaccctccatcaataccggagtggatagaaagaaaggcaaaagaaccggctcaggccggttttttatttgaattcacagacgcagcgtga

SEQ ID NO: 140730 - DNA, 306 bp, Enterobacter cloacae
atgcctagtttgacattcagctcgcagtacattggatttcaggactaccaaccagacccagaagacctgtgctcattatgtggtggtaattttggcaaggcagccatgattgaaggaaaggataagattcacatctgcatggagtgcgttgaccttcttggggtgattaagaaggagcgagacgataagaagcgtggtgaagcagtttttgccattgctgaattatgccgagaatctgcgagcaacggacactcggcagagcttatctacgacgctatcaagtcaggaaaaatcgtaatcgactag

SEQ ID NO: 140731 - DNA, 357 bp, Enterobacter cloacae
atgagattcaccaaagaggcacttaaacgactcaacgaatcgccaattagcatcaggcttatgaatggatgctttaaccgtgctgaagctgttgctgagttctctcgtcaccgttttgaacttatcgttgatgtcacccaccctgcacttcactggcagtgcggcgataggcatgaggtaaatttttaccttatgaaaggttgctgcgggcatcgaattgatatgcctgattcgcttaaggaaaaggttgctgaaatgcaaaaggcggcaactatgagtgattccgaggcgagagagatcagcatgagaaatgccgagcttttcatgagcagcctctcagagatgggattcaactag

SEQ ID NO: 140732 - DNA, 153 bp, Enterobacter cloacae
atgatggtgctgtttcaggaagtgcgaacagtgcagccgattggattcaacaacaaaccggatttgatactcgctctgtggctccggctatcaaagattggctgggcttcggtaatcagcaagcaggaactgcggcaagcggttatggactga

SEQ ID NO: 140733 - DNA, 369 bp, Enterobacter cloacae
atgttcccctttctgaacacatttaagcgattaataagcaaacagcaagaaacacataccgctcctcagaaatattcaaatgaacagcttatccagtgggctaccggttgcatgctggaagggctcccggatgacttctaccaggccagactgctatgcactcgccaatccgatcctgaaaaccccgatggatggatagtcaacgttaatcatgatgtgatgcttaaccctgactccgcatatgagcggttccagccagccgatgacctctaccctacccagtgtgtggaaatgttacttgatggcaaggaatggagtaatgcatcaataacattcaataaagaaaacgcatcgtttaaatggagttag

SEQ ID NO: 140734 - DNA, 1524 bp, Enterobacter cloacae
atgcgccacgcgcctatctccatagctgcagccacggcaatttttgtgctgggcgtttttatcatcaatatccaggtctggtactcggcgcgggctgacagccttgccggggcgcactacgtcgtcaggaatatgcacgtcattcttacagaagcgcatcatgcgacccaggttgcaatgcggcttgctgagaatgagtgtgatgctgaaggacagtatcggctcggcaccgaagcggcattacaaccccatctgagaacgatcgttattctgaaaaaagatgcggtctggtgttcctccttgccgggaaaccgcgtgttgttggttaacggctcagcgctgcctgaagtgccattgctacttgttccatcgaaaagtacagtcaacggcctgccggttctcttataccagacaaaccatgccggaagccgaatcatggtgagcatcagcgacagccatatccgggatgcgctgaatatgccactacgtggcgtggcgtattcgctgctggtcggcaatcgtcgtttaggccaatcaggcgatgtcttgacggcagcccattcaaacaacgatgttctgacggtaaaagacgttgattatgccttcgcgattcaatttaacgctccgcctatttttagcctgacgcgattattcgaccaggccggtggagtggtgttatttctgctgctcgtttcctcgctttctgcttatcttctgcagcgatatctgtctaaggatatttcgccggaagaatcgctgcgtaccgccatctacagaaatgaaattattccctattaccagcccgtcgtgagcggaaaagagggcaccttgcgcggtgtagaggtgctggccagatggaagcattcgcaatctgggtttatttctccctcgtcatttattcctcttgctgagaaaacagggctaataattccactaacccaaagcttaatgcgtcaggttgcaacgcagatgaatgcaatttctacgctgctgccggaaggatttcatgtcgggattaatttcagcgcgtctcatatcgttgcctctaccttttttgaagagtgtctgaattataagcgcagctttgtgcaacaggatcttaacctcgttgtggaggtgaccgagcgtgaacctctccacgtagatgaacatctcgttaagaccctgaatgcgctacatgaaatagggtttgccattgccctggatgattttgggacgggatactccggtctgtcctacctgcaggacctgcacattgattacattaaaatcgaccaaagctttgttgcgagggtgaatgccagagaggattcaaccgtgatactggattcggtactggaactggcaaaaaaactgtcaatccgtattgtggcggaaggggttgaaacccaggaacagcttgattacctcatgcgcaataacatcacgtttttacagggctacttcttctacaaacccgttccttttaaggagttgataaaaattctgttatcgaagccaaaggttaaagtgagggtggagtga

SEQ ID NO: 140735 - DNA, 495 bp, Enterobacter cloacae
atgatgaaggggattataattactctggcgttattgttatcagcttgtacgtgcgtacctcagcagagtgctgccgaacgggcggaagaattttactccaactatctgacattttttgcggaaagtgatggggaataccctcagcttagagagtacgttgcggcagatacgctatcccgacttaacgagatagagtctattcctgaacaggaaatcctggggtcagattatttcgcttatgttcaggattatgatccctcttgggtgaagcggctcgaggttggtgcgccgcatcaattcatcaatggcgaagttcttcctgtccggattggtattgagcacggcgggtttcttaatcttgaagtctatatgcgtcgtgaagacggaaagtggaaaatttaccgcgtgagtgacgtaaccgatcgctacgagcaccccatatttaatgccggagcaattactcgggcaaagtcattagcgaaaagcggactttaa

SEQ ID NO: 140736 - DNA, 294 bp, Enterobacter cloacae
atgtcacaggcatttcagcagttagagatgccagctgtgttttgccttgcggacagtcagtggataggtgagcaactgcagtcactcagtatggccgccaaacaaaaagccatgcagcgttatgcagcagtgtatcaggagacgttcgaggccgaacccgtttcgtaccgcaaggagaaccgggcaaggcatgaagcaaacacaaggcttcgcctgtttgtgagaaatcagggcagagctttacaggggtataccgccgaacctcccctggctggaacgcaatcgcgatcctga

SEQ ID NO: 140737 - DNA, 708 bp, Enterobacter cloacae
atgagtggaacgactttttcggaccggctaagagacagcatgcagaaggctgggctgacccaaagccagttagctgaagcagtcggagtgtcacagggggcaattcagaaacttgtatctggtaaggcaaagtcgacaactaagcttgttcagatagctaatgtccttggtgttcgccctgaatggttaagcgaaggcgttggtgcgatccgtaaatcagatgatttccctccagaagaaaagtggagcaaagtcgagacctgggatagcaacacgcctttagaatctgatgaagtggaagtcccattccttaaagatattgagtttgcatgcggtagcggcagagttatggaagaagattacaacggttataaactgaggttttcgaagtctaccctgagaagagttggagcaagcacagatggttcaggcattatctgtttcccggctgccgggaacagtatggaaccactcataccagacggtacaacagtggctgttaacatcgaagacaaaaaaatcgttgatggaaagatttacgcgatcaatcaggaagggtggaagcggatcaaactcctataccggacaggcccggatgagttgactatccgtagctataacgcagaagagtaccctgatgaggtagtgaagatgtccagcgtagaggtcgttggtagagtgttttggacttctacagtttggaactaa

SEQ ID NO: 140738 - DNA, 321 bp, Enterobacter cloacae
atgacgaccaatacgacaatcaaaaaattatatcagcttgttgatattccagattttcgctacagcaaagatagttcaagtattgattatggtgatattgcatcagattgcgatactaaaactgtttctatctttgaagccattaaccatatcagcttaaatattttttccattgctgaagataaagaaatcagcaaagaaaagatattaaacctttcttgtatcatcgctgaccttgcagaaattggaatggcaacgaataaaatttctcaagctgcctcatatctttctggattaaaggatggcaatcatggcgcatga

SEQ ID NO: 140739 - DNA, 195 bp, Enterobacter cloacae
atggcgcatgaattttcattagaacaagcgaaagagaaagcatatcaggcagaaataatctgcaaaatgattgagttataccccaacaaaatggactgttctgaaatcgaggccattgcagcattattaagtaagttaaccagtgatgtttgtgcatggttaattgaagagcaagctattagatccaacgcttag

SEQ ID NO: 140740 - DNA, 225 bp, Enterobacter cloacae
atgtcaacacaagatcgccaagacgtgcaaggtgtgaatattaaagctgaacaacttaacttccttatgcaaacaattcacgctcaccataaggattttgactgccatcaacttgatggccttttaggtctggcttatgaccttgccgggtcggtatatagctggcccgaggcagaggaaaggatcgttttagaaaatgaagatgcacaaagaaaggtgtattaa

SEQ ID NO: 140741 - DNA, 213 bp, Enterobacter cloacae
atgaaaacgggacaacaaccagcttacccatgccctcgcactgattctcctcagggtatgacatatcgccagtatcttgtaagtcagctcgcgcccgtaatcgctgctcagttcttcgaaagtagcgcatggaccgactacgacgacatgggcggctctctgatgatgatggtcgacagcattattgaagctgaaaaggagacagcacaatga

SEQ ID NO: 140742 - DNA, 462 bp, Enterobacter cloacae
atgacaattaaatttagtgtgaataaacaggcattttatgatgaaaatacagatgttatacccgacgatgcagtagttattaccgatgagcagcatctatcgctgattagtggtatgaacgatggtgagagacgtgtttacatcggcaataatggtgagctaacgctatcagacagcaagccatctaaatggcatacctgggatagtgataataatgcgtgggttatttctgataccgaacgggaacaggctgcaaaggcagatgcagaaaatatgaggtctgctctccggtcaactgctgatactgaaatcagctggcggcaggatgctgttgatgcaggtatcgcgacggatgaggaaaccgccgcgctatctgaatggaaaaaataccggattatgctgatgcgcgttaatacagcgaaccccttatggcctatgcctccgggagggcaggccagttaa

SEQ ID NO: 140743 - DNA, 429 bp, Enterobacter cloacae
atgcaaaaatatgtattcagtgccaagaaaaatgctttctttcctgtagagctaaagtcgtcctatcaaaaggcaggagagtggccaaatgatggaatagaaatagaagactctgttgcaactgaattcatgcaggagccacctgaaggcaaatacagaaatgtaatagcaggaatgccagcatgggtagatattccgccaccaactcaggaagagttgatatctgccgctgagcaggttcgcaagcaactactggcccatgcagatgctgttatgctggactggcgaaccgagttgatactggctgaaatcaacgacgccaacagagcgaagctatcggcgtggctggcctataaaaacgaggttaaagcggtcgatgtgataactgacccgaagaatgttaactggcctgccctcccggaggcatag

SEQ ID NO: 140744 - DNA, 582 bp, Enterobacter cloacae
atggccgttattggttatatccgcgtatcaacaatcgaccagaacagcgatttacagcgtaatgcactaacaagcgcaaactgtgaccgaatttttgaagaccgtatgagcggaaaagttgccagtcgtcctggtcttaaacgcgctttaaagtgcgttaatagcggagacaccttggtagtgtggaaactggacaggctaggacgcagcgttaagaacctgatcgcactcatatcagagttacatgaacgcggtgcccacttccgctctttaacagacagtattgataccagcaccgccatgggacgcttctttttccacgtgatgtcggcattggcggagatggagcgcgagctaattgtcgaacggacactggccgggctggcagcagccagagcacaaggacgcatcggtggaaggcccaacgcattaaagccgcatgagcgggaacaggttgcacgtctattggttaaggggcatacccgccagcaactggccattatctacggcgtggggttatcgacgctgtaccggtactttccggtagatggtcagaggaagaatgacacggtaggattgtaa

SEQ ID NO: 140745 - DNA, 1521 bp, Enterobacter cloacae
atgaagaaatttccttgggcgtgcgtggcgctgaccgcattgtcgttatattccagttcgctgctcgcagctaactttagcgccagctttaaaaacaccgatatccgcgaatttattgatacggtaggccgcaatctgaacaaaaccattctggtcgacccgtccgttcagggcacggtgtcggtcagaacctataacgtgttgacggaagacgaatattaccagtttttcctgagcgtgctggacctgtacggcctgtcggtgatcccgatggataacggcatggttaaagtggtgcgctcgagcattgcccgcaccgccggtgcgccgctggccgacggtaaaaatccgggcaaaggcgacgagatcatcacccgcgtcgtgcgcatggaaaacgtgcctgttcgcgagctggcgccactgctgcgtcagctcaacgatgccaccggcatcggtaacgtggtccactttgagccgtccaacgtcctgctgctaaccggtaaagcttcggtggtgaaccgcctggtggatctggtccagcgcgtggacaaagacggtattcagcgtcgtgaaatcgtgccgctgcgctttgcgtccgccaaagagctctcggagatgttgaataacctcaacaacgaagagcagaaagggcagaacgcgccgcagctggcgaccaaagtggtggccgatgacgaaaccaacagcctggtgatcagcggttcggaagatgcgcgcgcgcggacccgctccctgatccatcagctggatcgcgagcagaacaacgaggggaatacccgcgtcttctatctcaagtatgccagcgccactaaggtggtgccggtactcaccggcatcggcgagcagctgaaggacaaggccggcgcgccgaagtcgaaaaccgcgccagcgtccagcgatctgaacattaccgccgacgaggcaaccaactcgctggtgattaccgcccagcctaacgtgatgaactcccttgagaaggtgatcgacaagttggacatccgtcgtccgcaggtgctggtggaagccatcatcgcggaagtgcaggacgggaacggcctggatctcggcgtgcagtggaccagcaagcacggcggcgtgcagttcggctccaccggcctgccaatcagccagattaaaaatggcactatgaaaggggcaagcttcactggcctggcgaccggcttctttaacggtgattttggtgcgctggtgactgcgctttccaccgacggcaaaaatgacatcctctccacgccaagcgtggtcacgctggataataaagaagcgtcgttcaacgtgggccaggatgtgccggtactttccggttcgcaaaccaccagcggcgacaacgtctttaactccgttgagcgtaagactgtcggtaccaagctaaatgatgcgccgcgcgataaatgcgcccatttccgtgagataaatggcatcgctgcggcgtttcattatttgcaaaagaattacaatcctaccgtgtcattcttcctctga

SEQ ID NO: 140746 - DNA, 534 bp, Enterobacter cloacae
gtgaatatcgacctgacccacgacagcctggcccccggcctgctgtgtcaggacggacagtaccgtcagattgtcaccgtggaagatgcggtgtgcggcgggtgtaacctgttcgacatcgaccagctgcgcatggaatacagcccggacgagtaccagaacctgctgatgtgtgagtttatcgacgatctggcgtccgtgtttccgctcagcgagctgcaggcctgcatggtggacagctgggaagtctggacagattttcacgcgctggcgctacgcccgtctggctggagcgaagtgtggatcggctatgacccggcgaagggaacgcagagcggcgacagcgcaggctgcgtagtgatggtgcagcctgccgtgccgggcggtaagttccgcattctggagcgccaccagtggcgcgggatgaacttccgcgcccaggccgacgccatcaaaaagctgacgcaacagtacaacgtgacctattcagcattgactccaccggcgtcgcccacggggtgtatgagaacgtga

SEQ ID NO: 140747 - DNA, 402 bp, Enterobacter cloacae
atgagcgactcaagaattttagcttcaatctttcgggaattacaggatgctgttctcgaattaagcaagagcgatattgagaaagttattgttggtgattatcaattctcaattaaaatagttaagaaaaaaagctccgcagttaataggtctactatgaaagaagataaaaatacaggctatgagtatttgctgggcttattaagccagtgtgcttcaagagaggatggtatatctgttttagaacgtgagctaaaaaataaagctgattatgaaagattcgctcgccaagttgaagttgctgttatgaagagtgataagctcgagaaaattagagataacattattgaatctacagttggcgccaggctccgttctgatgccatacagaataaaggttaa

SEQ ID NO: 140748 - DNA, 927 bp, Enterobacter cloacae
atgcaaatagtttcggttattaactataagggcggagttggtaaaactacggttacttctaatttagcagcagaactggcatggagaaaaaaaaatgtattggttttagacatggatgctcaagcaagcttaaccttttctctgctaactcctgactattgggataagaatctcaagaatgaaagaacaattaaaaattggtttgactgcgtaagtcaagctgaacaaacgatgccattagcagatctcagagtaagacctgaggcagtaaataatcgatttaatggtagaggtggttgtattgatttaatatcatcacatcttggtttaataaatgttgatcttgagttagcaactttgcttggcggagcgagtccgagccaaactcaaaaaaaatatcttaaagttcatggaaaattacgtgaagaactccaaaagcttggagaggaaatgaactacgacatagtattaattgattgtccaccaaacttcaatattgtcactaaaaatgcattaatcgcctctgataagatacttattccagctaaaccagattatctctctaccttaggtatcgattatctcaaacgtagtgttgattcacttgtaaaagattataatttttatgccgataaggatgaggattatgaacgagtttctccagaaattttaggtgttatattcacaatgattcagatacattctgaccaacctattgcagctcaaagacaatatatagctcaaacaaaacgattgcatgttcctgtctttaatgcgatttttagagaaaataaaagtatattcgcagatgctcctcgtgatggtgttcctgtcgcattaaaccgatactcaaatgctactcatgctgctatagtttcagagatcgaagagtttgttgatgaatttcttaaaaaggttgaggagtga

SEQ ID NO: 140749 - DNA, 159 bp, Enterobacter cloacae
atgcaggactattttctggagtcgttgatgctccagcgcattgatttttttatcaagcttgtagcggcgagtgagtgtgatgacgaagaaaagcagctggctatccagtgggtttctgagctcactgatgagctgatggcgaagattcgcgctcaataa

SEQ ID NO: 140750 - DNA, 201 bp, Enterobacter cloacae
gtggatctgcttttacgtggcggcagcattccgtctggggtcgggctgcgtattttctatcgcaaccagtgcctgcaggaaatgataaatggcggcagtggtattcctgaacagctgtcagggcaggtggttattgcgttctcccagaaatatctcattgaaagcgaaaaagcattttacatccgtaaattccttctataa

SEQ ID NO: 140751 - DNA, 222 bp, Enterobacter cloacae
atgaccccaaacattacaatcactctgaatacgccgcacgtcacaatcgaacgttatagcgagctgaccgggctacctgtagataccatatacgacttgcttgctgatggtcgtttgcctcgccaccgtctgcgtatggataagaaacgcgagaaggtgatgattaacattgtcgcgctgattgtagatgcgctttctgattgcaatgtcgcttttaattag

SEQ ID NO: 140752 - DNA, 888 bp, Enterobacter cloacae
atgattatgccagctcataaaaacacattccgccatgttagcgacactctgagaacgacaattttgattaatctaggtgggcagacagtaatcgaacgtatagtttctgcctatggatttgcatcgcgacaggcgttttgtaaccatctcggcatatcacaaagcaccatggcttatagatatgctcgcgatactttcccagcaggttggttgctcgtttgtaacttagaaaccggagcttcagtggaatggttgtcctctggagaagatgctgccaaaacgaatgagcctcctaacgaagagtttttacttataatgcaacagcatttacagagtggagatacaactctagatcaaccgattcgacagttcccaattgagattgaaattataaataacgaaggtgggaaggccgcaattgatagattagttaacgcatacggcttccccactcgacaagctttggctgatcatttgcgtatatccaaaagcacgcttgcgaacaggtaccttcgagacacatttccaagcgactggataattcaatgcgcccttgaaactggtgcctatctgctttggttaacaagtggaaaaggttctatattctcttatgtttcccattcagtatcttttattaagaagcaaaaattaactacagggttgttgcaggaggaaggccacattgcaatcgataaaagtttattagtgaaaaaaattaaagatccaattgctatttcagtcgataatataatttatatctctgatactacgtttgatgagatctccgacggtgattggttagttgaaattgagggtaaactccatataaaaactcacactcataccaattggaaaagttattgtaagtggtttagactcaacatttga

SEQ ID NO: 140753 - DNA, 987 bp, Enterobacter cloacae
atggatgatatgaacgaacaaaataacgaaaaaagtcctgacaatgaatccgtcagaaatagctatattaatcttttgagaaactcaacagacatactatcatccgaacaagtttattacctctttaaattgcttaagagaggtgatctagatgagtttcgccgtttatattggaagcatctatcgcagcataaatcgaagaaagagatagcagattttttcaagtcaaacaatagcggcccagaatatatcgatcgtaacatggaagataatttaatattaagggaagaaatagacatacttagaaaaaaacttcatagtgcagaaaaaaacttagtaatcaatgaagcgcgaacaaataatttcgaatcagctctacgtgataaaaattcgcagctagaaatttttaagacaaaggtcagtcaactagaggcatctaataacgagttattaagtcgcgtacaacaagagcgaattgaccaaaaaattcctggttatgtggaaaacgtcaaaaaagatctaagtacggatgacgaccactttatatttatgtctaaaatttgggctgctattggcggtatatttggaatgcttgctgttgcattttcatttatctccatgtatatcacaatagacttcaatacatctaagggatttgaattgttctacctcttcactagaggtctaattggaatttcactactttcatggttgtcttatatctgtttgagtaattctaaaaaatacacgcatgagtctattcgtagaaaagaccgaaggcatgcacttatgtttggtcaggttttccttcaaatttatggctcaactgccactaaggaagatgcagtattggtgtttaaagattggaatatgtcaggggattcagcgttttcagatcaaacagagcgacctccaagtatccagactctttgggaggctgcaaaagaaaaactcaaaacagccccggacaaatcctcaagctcatag

SEQ ID NO: 140754 - DNA, 456 bp, Enterobacter cloacae
atggcagaacgaaaactcggcacaggaaaatggatttgtgaatcctaccccgccggacgtagtgggcgtcgcgtgcgtaagcagtttgacactaaaggcgaagcactggcttttgaacgccacactttggaagaaacggaggctaagccctggctgggtgaatcagtagaccgccgaactctaaaagacgtcgttgaactctggttcaaactacacggcaaatccctgactgcttgcgagcatgtttacgacaagttggtcctaatggtcgatgcactcggaaaccctctcgctactgatctcagctcggatttgttcgcgcattaccgtgacaagcgcctgacaggtgaaatctactttagcgagaagttgaagaaaggtggcagcccggtaactatcaatctggagcaaagctatctgagcagtatgttaagcgagctggcccggctcggataa

SEQ ID NO: 140755 - DNA, 387 bp, Enterobacter cloacae
gtgactctcactcgtttcaagatcactaagtaccgaattaccttcgttaggaccaagggcaaaaagaaccgcagcattccgattagcaaggagctttatgaagaaatcatttctctggacggcttcaagttctttactgactgctactttcagtatttatcggtgatgtatagaccctccattgtgcttcctcgcggacagcttacgcacgttctgcgccatacgttcgcagcacacttcatgatgtctggcggcaacatccttgcgcttcagaaaattcggggccatcacgacataaaaatgaccatgcgctatgtccacctagcgcctgatcaccttgaaaaagcattgcgcttcaatcctatagcaacgatgccgaacatttaa

SEQ ID NO: 140756 - DNA, 855 bp, Enterobacter cloacae
atgagaaataaaaaacaatctattgtttgttgtatgaaatgccgaaaggaatgcatagatataaaatcattccaaaaacattataaaaaaaggcactttaaaattgttaagacagatctttcttccgagtatagagccgaaaaattcgcagagatcaatgcagatttgaaaaacagaagaagccttactgaattaaaggcagcgttgcgtgagcaattggttgattcacctttagaccaggttccagcttataatgttgatgtttatcgcttggctattagaaccctgcctcagggtgaggcatataaaatagctaaagattcatctaaaagtgctatttttttggctgagtataataccataaactcaatacataattctacttatcttgatagtgatgttgaaggtttatatataaaagaaataagcagtcaatcacagtctcatgaagtcgattacccaacggatgatgttgttagtgaggctatatttaaaaatagagtagtcaaaactagagtaaatcaatctgatttttctaatagggttgctgctaatttttataataaatgcgcagtgactggaagtggagggcttacctgccatgcagcgcatattgatccagtcagttcaggaaacaacaacacaagcaatgggttatatattatttcatgtcttcatattttgtttgatctgggttttatggccattaatcctaccgatatgacggtgcattttaaaaataagaccgattggtttgcaagctcgttgtttgaaggaaaaactatatccgtgccaaaaatagcaataaatattagagggcttgaaaaaagatgggctgcgtttaattcaaattaa

SEQ ID NO: 140757 - DNA, 1011 bp, Enterobacter cloacae
atgcactggctgagacgaaagatgatgcaaatcgttaaacagagttttttattgttagtgctgggaatatccgcatttttcatgccgcacgcgaaagcgtcatgcacgtcaccggatatgccaaagatgattgatgtggcctccatctctgttcccacctcgctggccgttggcgcgaccattccgggttcagagcagacggtgcacgttgccgggaattgctccagcacctacagcccggggatggaaatagtggcctgctattatggttccggttcagaaataccgggcctgccgggcgtgtacgactctggtgtcgccgggattggtatcgccctgatgaacgatcaggggcaacgcatccagggggccggtggcgtccactgtgattcccgcaatacgccggtggggtatctctcttcagatggacagctctcgttcaattttgacgtgactctggagctggtgaaaaccagctccacggtgtcctcaggctcgctttctcaggctcagacggagtttgggcttggcgtttacaatcaggagggcataggcagtccgaacaccatttcctattcaggtaacgtcacgttcaacgaagtcacctgctccgtttcgccgaaaagccttaccgtaacgctgggcgatttcccggtcagcgacttcaccgggacaggaaccctgacgtcgcctcagacgttcgacgttaccgtcaactgcaacgacaccgtgcagcccgaagtcatgttttccagcgcaaacggttatgaaacagattttcccggcgtcatcaaactcactcaggagagcggcgtggcaaccggtgtaggggtacgcatgttgttcgatggcgaagtcgccgactttgatacctacaaaaatacggcagccatcgcacaagcgaacgttccgctggcgatcccgtttgaggtcgcatatcaacaaacggcagccagcgtcacccccggcacagcaaacagcattgccacgattacgttgggatataaatga

SEQ ID NO: 140758 - DNA, 504 bp, Enterobacter cloacae
atgaaaaaaatcaccttactgctactggcaggccttctcacgcaggcgcatgccgatgagatcgcgatccagatgagaggcaatatcatcgccaatacctgctcggtaaacagcgccagtcagaatttgaccatcgatctgggacaagccgcctccagcgattttaaggatgtgggggataccggggagtggaagaattttgaccttacgctgttaaaatgcccgtccaccaccacgctcgccaccgcgacctttaacggccaggcagacagcgcacacccgacgaaatttgccagcacgggcagctccggcgggctggcgctggagctggcagaccgcctggatcgcattacgattgccccgcaggctagcttcagcgccctggttaatcaaagcgatcataccgtcgatttcccactcgccgcacgctactacgccacctccatgccggtgagcgcagggacgttcagcagcgtggtgcaggtgaccttcacttaccagtag

SEQ ID NO: 140759 - DNA, 2136 bp, Enterobacter cloacae
atggatttagataaattttcaaaaatttcagagtctcttcgacagtatagaagagctgagcttcgagatttcgagagagatatcggagctaaacctattgatcaactttacgtggacgcactgccaggtaacgccgttcttaattctgttttatcaagtaacacgacgtttttactaggaaggaaaggaacaggcaagagtactgtattcgcaaaagcccaatcttcattgcgagggaaaagtgaaataatatcagtatatatagacgtaaaatcgttgatagaaattttagattccaatacttctcctgttgaagaattagattctatggggatttcgttctctgcttatcgatctcacttattacgaaaagcaatgttaggtcgaatcatagctgaacttctgaaagaaataagagttaactcaggtaagcttacgttattggatcgatggaggggtaagaaaaagcagtacgatgagcttatgctctgtttaaataacatagctgaacgtgtcaaatcatctaagctcgagcagcatgagattccaattcttcaaaaaattagccaacagattagagttaaaaagcaacaagagaactctcaccaaaaagcagatgcagcaaaacttgggggtaaagcatctttaactcatgcagaaattagtacagagttaaatgaatctgcggtcgatttcgataaaactctggacgatactgagatttataacgaatactctgacgtagttctaaaatcctttccttttggagagattattgaggaaatacaaacactaatagcagaagccgggcttctaaggcttgtggttttttttgatgacttttcagaacttaacttcgtcgaccaaagattgtttgttgatgttgttctatcaccattaaacaactcaagtaatgaggcaattaagctgaaggttgctgcctaccctggacgagtttactacggaaaaatagatcctggaaaagcggatacaattagtttggatttttcagatttatatgaagcttcggaagttcaagaaatggaacggtcggcagcaaattatgcagaaaggctacttgttacccgttttgaagcctttgaagtaaatattagcgattattttgactttcgctcggaggttgaacgtatagaaatgatgaaactgatctttcaggcatcatttaacgtgcctagaataataggccacctccttcacgtgctctatttggatagaatctcaaaatctcaaaaaattacaaacacgtcgattaggctggcttcaaaaaaatattatgaaggcactatcgaaaagtacttcgatcgaatgaaccgatatgcattagaaccattcgaaaataaattagatagatacaatcaaaaagagttattaagatatttaattaatgaagctaaagaagttaggcgaaaaatttcaagcggaaatattggcggaggatatttttcaaacttaaaaggcattccaccgactagtcattttactgtaaacccagagcttgaagaaatgcttgcatctttggagcaaaatttttttgtatctcgctataaaaatatgagagacaaaaatggtaatgatgttattgcttacgctttgttcttgggtctatgcgaaagtgaaagaatggtttggggataccctgatggtagagagtttaggcactattttcagcagaggtgtttcgagtacacgagggcaattcaccagttcctgtcaaaaaatcagacaatcaagtgtaactattgtggtgcttgccacccaatggaattaaaggccagcttagaattatataaatggaaatgtccagagtgcgctgagggattatgcgtaatcaccaatttagccgaagatttcaaagatgaagttgagaaactagataaagaaattatgcttgagccggttgagttagaaattgttagtattctccatgacgaatctaaacgaatgagagctggtgaaatatctgctctaatcgatactacgcatcagcttgtaggtcgtcgaactagcaagctccgagacatgggactcatcataaaagaacaagataatgatgggcatatgaaaagtaacctcactgataggtgcgaagaaacttacttcgggaaaaagcactga

SEQ ID NO: 140760 - DNA, 390 bp, Enterobacter cloacae
atgagcgacctgaatcagtttcgtagtaaagggccggaactgttggtggaactggcacagcacacttctgagaccgtccgcgagattattgatatcgaacccgcagttgccgaccagattggtcaggccgtcgcgaaccgtatgatgcaggtctggggtgggcaaaacgtctattttccgatgggcatggtctggaaggtcagccagcgcgaccgggaaatcttcctggagtttgacggacgcaaccatcacgaactggcccgcaaatttggtgtttcgctacagtgggtttacagcgtggtgaagcgggtcagaaaagaagaactggatcggatgcagggaaaactgtttgatggtgaacccgatgccgatacggggaaaaaggagtaa

SEQ ID NO: 140761 - DNA, 429 bp, Enterobacter cloacae
atgatgactaagcagcgtcttattcaactcattcatattgcccgcagcgacctccagatggatgaggacacctaccgccagatgctacaggggctgaccggcatagcctcaaccaaagggatggataccccgcagctcaaccgcgtgctggaatccatgaaaaagaaaggctttcgcattaagcctgccgggaaagccaggtccggcttaccgctggatagccatccgcagtcaaagaaaatccgtgcgctatggcttgaaatggctgcggcaggcgtcgtccgtgactgttcagagcaggcgctggcgttgtgggttaaacgggaaacgggtatcagcgcgttacgctggctcagcaatgagcaggcaagtagcgttattgagaaactgaagaagtggcagcgtagagctgcgggagtgaagcaatga

SEQ ID NO: 140762 - DNA, 216 bp, Enterobacter cloacae
atgatggctgaatcaattgcatgtgccctgttctggtatggtttcgtggggtggtgtaccgctgaactgcaccgccgttcaggattttactcacgttacagcggtgccggacactggatcagttgggccgttatgttcctgtgctggcctgtcgcgcttcctttatatgtcgactatatcggtggcgcaggtaaaaggagtggcgatgatgactaa

SEQ ID NO: 140763 - DNA, 228 bp, Enterobacter cloacae
atgatgttatcgcgtaagaagaaagcaccgaacccttgtcgtacagctgctaaatatctttttgctcgcgctttttttaagaacgtaaggcccggcattcaaattggcgttattgctggacgagagcaggttaaaaattacatgtcaggtgcatggtggaataacgatccggttactacagcccgtaacattcatattaactggggtgggattcattatgatggctga

SEQ ID NO: 140764 - DNA, 690 bp, Enterobacter cloacae
atgccgcagaataatgaaaagctgctggagaagttaaaaaagttgctggcgttggctaaatccgacaaccctcatgaagctgcactggccctgcaacgcgcccagaaactgatgcaggcctataacatcacccaggttgacctcgcactcagtgatattgatgaaagcgtcagtaactactgggctgcaggtagcgttaatccgccgcgttacatgctgggtctgctggatattatccaggtggcatttggcgttaagtctattattcactccggctttaaacccagcgttggtttttacgggaataaagaccgggttgaactggcctcatatacatgggaggtactggccagacaattaatcgtggcccgtaaaaactatattcgacagcagaataaaagaatcaaaaacacgaccaagaccagtcgtggtgacaagtttgccgaaggctgggttctggccgtgcgcagcgaggttcatttgtttgctatgtcccgcgaagaacgggagctggcaagcctctggcttgaacaaaaataccctgactcaggcacaaccacgggccgtgggaccgggaaatcacgtgatgcagacatgtcccgccacatcggttacagagaaggggaaaacgtccgcctgcatcagcccgtcggcgggcaggaacagcataaactgagggctgaaagatga

SEQ ID NO: 140765 - DNA, 297 bp, Enterobacter cloacae
atgaaaggcatgaaattatataaccgttcgacgatctacaatctggccctgaaaacttttggccctgaagcacaggcgctgaagttgatggaagaagccgccaaactggccgctgccgctgcccgcaacatgaacggcctgggcaatgaagttgatctggctggcgagctggctgacgttgaaattatgattgaacagttccgcctcaacgggatgggtctgatgattgactttcataagcagaaaaagctggaacgccttgccgaacgtctgggggtgacttatgccgcagaataa

SEQ ID NO: 140766 - DNA, 189 bp, Enterobacter cloacae
atgtccatcaaatgttccaactgtaagaaaggtatcaccaccctgaagttcagcgacgccagcgtcattgcctctggcaaataccatgtgccagccgtcctcatcacgctggtatgtcctcactgcagccagcattactacaccgaagtcccggccatggagttcatcccctgcgaggcaacaaaatga

SEQ ID NO: 140767 - DNA, 612 bp, Enterobacter cloacae
atgagcgaagtaaataaagaagactacatgaaagaccgcaaggggcgtctggtgccggttgaccaggtgtctgactatgactttgcgatggattctttcgttaaagaacaggttgccgccgcgaaagttaaacgcgatgaactcagcgacttcaagcgtcgtgcctttgacgagtgctatgcctggcttgaccttgtggccgagaagtacggcagaacgcgtggcggtgccaaaggcaacgtgaccttcagcagcttcgacggtgctcagcagatcaccatccgcgtgcaggaaaccctgaccttcgggccagagctgcagattgccaaagacctgatagacgagtgcgtcaccgagtggtcggaaggcgcaaacgccaacctgcgggccatcatcagcgatgcttttcaggtggacaaagagggccagcttaacaccggacgtattctttccctgcgccgggtcaagattcaggacgagcgctggaaccgggcaatggaggccatatcggaatcactgcaggtggcaatgtccaaaacttatattaatttccgggagaaagataaacacgggaagctaattaatattccgttagatatcgctgccatttaa

SEQ ID NO: 140768 - DNA, 270 bp, Enterobacter cloacae
atgaaatccatcgccgatatcaatcagcagatgaacaaggtgcagtccgccattatggcgctcaacgccatgaacactaccgtgcagagcgtcatgattgcgggtagtaagccggttatccgcatcgcccgcaacgggcactgtgcccgcctgctggagcagggcaaagcgaattatacccatgttggtcatgacggctcagggcgctttcgtcagggcgtctttgaactgcatggctgccgtattacctggtcagagtcattacattaa

SEQ ID NO: 140769 - DNA, 1167 bp, Enterobacter cloacae
atgctggtactgaagcaacaactgaaagaggcccgcatcccgcaggcggtggtggcaagagccgtcgccgtttccgaggccacgctggcccagattgtgaaccataacgagtggccccgcaccagccccgaagaggtgcgccagcgtctggcgtcctggctggaaagtcaggggattgatacagcgaagagttttgatgctgtacagggcgcggtcacgccccgtacagcaggtactaccgataaaaccaacctcagtgaggaagagaacatgttactcaaaaagcaggtgttatttccagcaaccaaaaaagcgtttggccttttccgtgacccgttcgccgatgaagccatgcagggcgcggacgatgtgttcaccacgccggatattcgctacgtgcgtgaggcactgttccagaccgcccgtcacggtggctttctggcggttatcggcgagtccggcgcgggtaaatccacgctgcgccgcgacctgattgaacgcgtcaaccgcgagaacgcaccggtgattgttatcgagccatacatcatcgccatggaagacaacgacgtgaagggcaaaaccctgaaagcggctgctatcgctgaggccatcatcagcaccatcgcgccactggagagcatcaaacgcagccaggacgcccgcttccgccagttgcaccgcgtcctgaaggatagcagccaggcgggcttcagccacgttctggtgattgaggaggcccacagcctgcccatcccgacgctgaagcacctcaaacgcttcttcgagctagaatcgggctttaaaaaactgctgtccatcgtgctgattggccagcctgaactggcggacaaactgtccgaacgcaacatggaagtccgtgaggtcgtccagcgctgcgaggtggttgaactgctgccgctggacaacagcctggaagagtttctggcgttcaaactgcaacgcgccggtaagcagctggccgacatcatggacgccagcgcagtggaagccatccgcgcccgcctgagcaatctgggcagtaaccgtaaaagcatggtcagcctgctgtatccgctggccgtcagtaacctggtgatagcagccatgaatctggccgctgaaatcggggttccgcaggtcaacgccgacgtcgtcaagggggtttaa

SEQ ID NO: 140770 - DNA, 1770 bp, Enterobacter cloacae
atgagtgccgccctgactgaacgactggtttatgttgcccgcgcggcacgtgacgcggggcatggtaagcgcggtgcaatatacgacgccgcctgcgctgaactgggcatgtcccgcgccaccctgctgcgcaagctgaaggaggtatcagtgactgacaaacgcaaaaaacgcgctgacgccgggcgcagcgccctgagccgcgacgaagccgcgctgatatcggccacgctgcgcgaggccacccgtaagaacggtaagcgcctgtattccatcgcggatgcagttgagaccctgcggtcaaacggctttatctccgcaggtagaacagacgagacgacgggcgagtttttcccgctgtccgaggacaccatcagccgcgccctgcgtaactatggcctgcacccggaacagctggacgcgccagcaccttcttccgagatggccagcctgcaccccaaccacgtctgggagattgatgcctcactttgtacgctttattacctgagcaacggccataaagggctgcaggtgatggacagcgcgaagttctacaagaacaagcctgccaaccttgcacgcatcgccagtgaccgcgtatggagttatgagattaccgaccacaccagcggctggatttacgttgagtacgtgatgggtgcggaatcgggcgaaaacctttgttctgttcttatcaacgccatgcaggagcgcggtggcgcagatgtactgcacggtgtgccgaaaatactctacctcgaccccggttcggcaaacaccgctggcatgacgaaaaatatgtgccgctcgctgggcatcaacctgatagcgcacaagccgcataacgcccgcgctaccgggcaggtggaaaaagcccgtgacattatcgaacgcaagctggagccgggcctgaagttccagccggttcacagcctggaagagctgaacgcgctggcagttaaatggcgtagccactttaacgccacagcagtccacagccgccacggtaaaacccgcacggatatctggctgaaaatcaccgctgagcagctgaagaaagcaccatccgttgaggtctgccgcgaactggcggtggccgcaccggaaagtcgtaaggtcacatcaaaactgcgtgtgccgttccggggcgctgagtttgatgtttcgacggtaccgggcgtactggtcggtgaaaagctgatgattacccgcaacccatggcgcagcgatgtggcgcaggtggtactgaccggcgaagacggccacgagacgttcttcctggtcgaagaggtcagaaagaacgagtttggctttgccgaaagcgcggcggtgtttggcgaaagctataaagccctgccggaaaccccggcgcagacggcagcaaaagaaatcgaagagcttgtcaccggcacggataacgccaccgacgcagctgctgcgcgtaaggcgaaggcgttgccgttcggcgggaagcttgacccgtataaacatatcgacgacaccatgcttccggcctatatgcctaagcgcggtcaggcttcagacgtgcgcggcccgcgtatcgaacagcgcccgctgacccatgtagaggctgcgaaagccctgcgcgagaagttctcggccagcggtcaggcgtggacaccggagcattaccgccagttggcggcacagtacccggatggcgtaccggaagccgcgctggatgaggtgatggtcaccctgaccactccggcccgcagcagcgttatcagcatcgttaacggcaactga

SEQ ID NO: 140771 - DNA, 912 bp, Enterobacter cloacae
atgggacgcacaaaatcacaaccagttgaactagtggaagaggcatcgctgagtgatggcctcaacgttagtcttaatgccatgaccgaacatcgcctcgaaatcatgcagcagttcggtgatggtctgccgtatgaacgtgatcgtatcgttcacgaaacacggttttatatggctcagagtgctgaagccatgctggaggcgggtaagcggctggtaattctcaaggagaatgaacctcacggcgattttataaatattctcgaaaatgacctcggccttgagccgcgcgtcgcacgccgcatgatgcaggccagtgtgaaatttttgggtaatggcgatcaaaattcaaaacggacagcgctgaccgttttaggtaagaccaagttgtatgaactgatggttctggatgacgaagaactcgacgcattggctgatggtggaaccgtcgctggggcaacgcttgatgatattgatcgcatgaccagccgcgaactgaaggcagccctacgtgaagcgcgtgaaaccaacgcagcacaacagcgcgtactcgccgacaaaaacgaaaaaatagactctctctccaccaaactggagaagaaatcccgtattcagccacccaagcctgacgaagaagtgaagaagctgcgagcagaagtgacagcgttagcggttgaggcggaatctgccatcgcggttcgactgtccagcgcttttgagactctgtgcgcatactgcgctgaaaacatgattgatacccccagagactttatggccggtctggtctgccagctggaaagcaccgcgcgtagcctgcgctccacatttgacctgccggacgagccgacaggcaatgtcgtcccttcatggctcactgacccgacgccacagattgacgggcaggaggcataa

SEQ ID NO: 140772 - DNA, 306 bp, Enterobacter cloacae
atgagcaaagcaaatgtatccagttctgggtctcgcattctgcgcgttcttaaagcactgcgtggtcacgctctgaatggggtttctaacggtgaactggcatcagctctgggcgagtccccggcgaatatcaatcgggcactcaatacccttatcgaagagggattggccctcaaactggataacgggcgttttgcccctggagtccagctcttacaaattgccatggcgcatagcaccgagatggcgcgggcgcaggaccgtattaatgaaatcaaccagcgtgttatggctggcggtcgctaa

SEQ ID NO: 140773 - DNA, 225 bp, Enterobacter cloacae
atgaacaaacagcaagttcgagcacgactggttgaacggggcagcagcctacgtcagttcgcgcttaacgcgggctatgagccacgaacagtcactcaagcggtaagccgctgggctggcaaaaatgaacttcctcgcggacgtctgacctatcgcattctgcgtgatttatcagtcgtgatcggcaaagaagttacaccaggcattcttcaggaggcgtcatga

SEQ ID NO: 140774 - DNA, 411 bp, Enterobacter cloacae
atgaataaaaaggccgttgatgcagtgcttctgcgactcatgtcactgtttaatgttgataacgacagtgagctggctcgggtgctgaacgttaacagacagactttagccagctggagaaagcgagactctgtgccttattcaatttgcataaacatagccgaagagagaggagtctctctggactggttactcacagggaagggagaggaggaggtatcgaaggttgaatcagcaactcaaagcttcagtcaagcggaccttaaaatgcttgaattattaaatcagctagaccctgaggttcgacgagaccttatgcgaggcgctgaagaaaaacagcgtgtgattgaaatggaaaaacagatccaagagctgtccgcacagctaaataatttaaaaaatgtgggctaa

SEQ ID NO: 140775 - DNA, 771 bp, Enterobacter cloacae
atgaaagaacaatctttgcccatcgttccctggattggcggaaaacgtcgtctggcgaagcatattttaccgttgtttccggcccatacctgctatgtggagccgttctgcggagcagctgcgctctattttcttaagacacccagcaagatcgaagtcattaacgatatcaacggcgaactggtgaacctctatcgggtggtaaaacatcacctggaagagtttgtccgccagttcaaatgggcactggtcagccgtcagatttacaaatggctacaggatacgccggaagagacactcaccgacattcagcgggcggcccggttctactacctgcagaaacaggcatttggaggcaaggtcgccgatcacacattcggtacctctacaaccagtgcgccgcgcttcaatctgctgcgtattgaggaagaactgtcgatggcacatctgcgcctgtcgagaacgctgatagagcatctgaactggcaccagtgcatagagcgatatgatcgcccgcatacgctgttctactgtgatccaccgtactggggaacggaaggctatggtgtggcgttcgggctggaaaactatgatcacatggcagagctggcgcgtaggatcaaagggaagatgattatatcggtgaacgatatcccggaaatgcggcaggcgttcaatggactgaacattcagacagttgatatcagctacaatctgaaggtcacaggtaaagctacgccaaagaaagaattggtgatttgtaacttttaa

SEQ ID NO: 140776 - DNA, 567 bp, Enterobacter cloacae
atgggaacgtattacacacttgattccgctaatcgtctgccttcgccttgccatgtaattaccgtaaaatacgaacctgaagtgccggagttggccgctttccttcatcagatgtatcccgatggtctttccaagcacggtcataactatctctataaccccggccctaaaatggaagatgacagcggagtcagcagaagtctgctgatcggtctggtgtttgagttagttcgccgtagccattttcctgacaaaccctcccgctatcagtcactgtttgcctgtcagcatctgagtgaagtcaggaagttccggggattactggccgatgagagaggcgaagaggaaatcagaacggcaccgatatatgaagtcatcacagatgaaccggtgcatcgcggagatatgaggttattgaacagtgattgcccggtgctggaactgtatcaccgggcctggctttactggtcgggagaagcggccccggttaagactggtgaggaagaaccgttctgggaactgctgattccgcttccagtattcgttggtcgcaggataactgagtag

SEQ ID NO: 140777 - DNA, 324 bp, Enterobacter cloacae
atgactgaaccgaaacagcccggttttaaaaaagggttcctctttgggatcagaaccggagagaaaaataaaacttacacgctaagcgtggatgcatgttgcccaaccgaagcgattgcagaactgaaaaacgcgctggttgcacttgaagatagaagaagtcatttcgccagcggagaaaacaacgtcatgatgattggcaatgtggcggcgacatcacgatataaagctgcacctaatcctgctactcagttatcctgcgaccaacgaatactggaagcggaatcagcagttcccagaacggttcttcctcaccagtcttaa

SEQ ID NO: 140778 - DNA, 351 bp, Enterobacter cloacae
atgaaaaacctgaaaaaattcattccccctgttaaaaagccccgtctcagcggctggctgctgacctctgtgctgttgctcggcaccatcggtctggtatcgccccagcagctgccggtggttgtctacaagctgtcgctcatcacgctggcggctgtgctgggctactggcttgaccgttcgcttttccccaaagcccgccccggtcagtacctgaagcacgatgacaggctgatggctgatggtcgcttccccgtccagactggccttcacctagtcttttccgctgcgctaatccgccgtgcgctgattgttgcagcagtctgtctggccgtagcgacgggactgtaa

SEQ ID NO: 140779 - DNA, 729 bp, Enterobacter cloacae
atgaactggcctcaaatcattctcatcatcctgcttgcctttggtctgggcgtaactgccatcaagcatggcgagccacgcaacgataaatacagcttctggtggcagcttgctggcaacctgttgattgcctggctgctctggtgtggcggtttctttagtcaagcccgcgcagctcagccgccacaggctgctctgcagtatcgcgacgatatgatccgtaatgcccggcttgaatggggaatgtcagcgccggtggccgacttcgccgcacagctgcatcaggaaagcggctggcgacctgatgcggtctcgccggttggcgctcaggggctggcgcagtttatgcccgctaccgctgactggataagtcagttgatgccggagcttaacagccgtgagccgtttaatccggcatgggccatccgggcgctggtcagctatgaccgctggctgtggcagcgtgtcagcgccgccaacggctgcgaacgtatggccatgacgctgtccggctataacggcggtctgggctgggtacagcgggacaaacggctagcctcacagaaggggctggacagtgcccgctggtttggccatgtcgagatggtgaatgccggacgtagcgccgccaactggcgtgagaaccgccattacccgcagcgtatcctgcgggagctggctccgcgctatctcacatggggaggcagcagctgtgtggaacctggttaa

SEQ ID NO: 140780 - DNA, 651 bp, Enterobacter cloacae
gtgtggaacctggttaaaagattaccgtggcgcggcatggtgctggcgcttgttctggtggctgctctttatggactgaaccgctggggctatcacgacggttctgaggacgcaaaacgtgacggtggcgcagcgctcagtcggctgcagtcagcgtttgatacctacaaaaccgaacagaccacgcttgagaacgcagcgctgcgggcctgggcaaagcggtatcaggagcaggttgccgcaggccatcaggccgaagccagttaccttgagcagattgctcagcttgagagccagaacaaacaactacaggggcaaattaacgatgtcacacagcgctggattgatgaaaaaggtaagagccatcccattgagtgcgtgtttactcgcggtttcgtgcgccagtacaacaccgcgctcggatatgacaacgcatccgtcgacaccggtcattcagacacaactgccgccgctggcaccggcactcgcgcagcgtccgggcaacctgaagccgctgacgcctggctacgcgactcaggcgtctcccagcgtgacgtcctcgccaacatcatcgacaacgcgaagcagtgccgcatctggcgcagccagataaaccagctgctggacgaacgggaaggattacagaaatga

SEQ ID NO: 140781 - DNA, 333 bp, Enterobacter cloacae
atgacgttgcaggttgaattctggacggtggtgggctttctcatcaccttcatgagctttgtcggcggtatggccaagtggctgttcagtaaagcggaggagcgtcaggcggcgcggttcgcctcccttgagcagtcgctgcaacagtccgcctccaactggggcgagctggaaaaagaatttatgcggtttaaggcggatttaccgctgaactacgtccgccgcgaggattacatccgtggccagacggtcatcgaggccaagctggacgcactctacaacaaactggaagtggtacagcagtaccgtcatacaggaggtcaccatggttga

SEQ ID NO: 140782 - DNA, 312 bp, Enterobacter cloacae
atggttgatatcgcccgcgtgcgccgggaatccctgcgctggagtctgctggttgctctgaacaaaacccgcccgtataccgccagcgagacgctgctgctggatgtatcccgcgccatctacccggacaccacgccgctggagctgcgccgtgagctggattatctggccgaccgcaagatggttgatctggagaagaagccttccggtgactggtttgctgacctgacccgcctcggcgttgacctggtggaatacaccgtggaatgcggccccggcatcgcccgcccggaaaagtactggagtgaatga

SEQ ID NO: 140783 - DNA, 546 bp, Enterobacter cloacae
atggccagacgcagcacgatagaaaagctgccggaagacgtgcgtcgctggcttgagcgggcgctgactgaatccggcttcagcggatataacgagctggagtccctgctgcgtgagcagggttacgtcatcagcaaatcggctatccatcgctatggtcagaagattgagcgccgctatggtgccatccgtgcggcgacagaagcggcacgcatgttgaccgagggagctgctgacgatcaggatgcgcgttcagaggcggtgatcgccctgattcagaccgagctgttcgagagtatcgttcagctgcaggaagcggaagaaggcgaagtcgaccccaaagagcgcgtggcgctgctgtcgaaggtggcgaagaacgtggccacgctgtcccgcgcgtccgtcaacctcaagaagttccagtctgaagtccgggccagagcgcagcaggcggccagcaacgccgagaaaattgcccgtaagggtggactgtcaaccgatgcagtacaggcgctgcgtcgtgaaattctggggattgccacatga

SEQ ID NO: 140784 - DNA, 1524 bp, Enterobacter cloacae
atgagtcagcttgcccccgttttgcctgatacctcggcgctggatatccccgccgttctgatgccttaccagcagcgctgggtggctgatacgtcgccgctcaaggtgattgagaagagccgccgaaccggtatcacctgggctgaggcgtccgatgatgtgctgaccgcagcctcttcagcgcctgcgggcgggatgaacgtgtattacatcgcctataaccaggacatgaccgtcgaatatatccaggcgtgtgcgatgtgggcgcgggcattcaactatgccgccagtgaaatcgaagagggtttctgggaagaagacgaagacgacaaacacatcaagacctacaccatcaaattccctgattcaggcttccgcgttgttgcgctctcaagccgcccgtcgaacctgcgtggccgtcagggcatcattgttatcgacgaagcggcgttccatgagcaactggacgagctgctgaaggcggcgctggcgatgcttatctggggtggcaaggtgcgcgttatctccacccatgacggtgacgataacccgttcaatacgcttatcggtgatatccgggccggacgtcaggggggcagcgtacatcgtattactttccaggaggctgtgtcggagggattgttccaccgcgtctgcctgcgaaccgggaaagaatggtcggaagcgtccgagcaggcgtggatgacatcggtgtacaaattctacggtgccggtgcatccgaggagcttgactgtgtcccggccaacggtggcggagcctggctgtcccgcgcactgattgagtcccgcatgtcggctgacacaccggtgttacgcctgacctgcccggagggctacgagctgaagcccgacgacgtccgctggagcgagacgcaggactggctggacgaacacctcaaaccgttgctggaagctctgcctgctgacgcacgttctttcctgggacgcgactttgggcgcagcggtgatctgtcggtggactatcccctgctgcaggagaagaacctggtacgccgcgtaccgttcgtgctggagctgcgcaacgtgccgttcaaacagcaggagcaaatcgcgtggtatctgatggacggcctgccaaacctgatgggcgcggcgctcgatgcccgtggtaacggctcttacctcgccgaatacgccatgcagcgctacggctccagccgggttaggcaggtcatgcctactgaaaactggtatcgcgagcatatgccgccggtcaaggctgcgctggaagatggcaacctggtggatttaccgaaggatgaagacacgctggacgacctgcgggccgttcaggtggtaaacggcgttccccgcgtgccggaacagcgctcaaaagcgaagtctgacagtggcaaacgtcacggggattcagccatcgcgctggcgctggcgtacttcgccagccgtgaaattaacaaagggccggtgaaggcaagctcacgccgtcgtcgtcaggcggcccgtatgctggaggattactga

SEQ ID NO: 140785 - DNA, 1497 bp, Enterobacter cloacae
atggcccgtggactctgggtttcacccaatgagtttgtctcttttgccgaacccaataaaacgctgacggagcagatcgcctcgcgcagccgctccatcgacttcttcgggctgggaatgtacctgcctaaccctgaccccattctgaaatctcagggccgggatatccgcatctatcgtgaactgcgtaccgacccgctggttggtggctgcatccgcaggcgtaaggcggcggtcaagtcgctggaacgtggtcttgagcgcggtcatgccccggcgcgggtattcagcttcatccgggatatgctcgacgatctggatttgtcccgcatcatcggcgagatgaccgacgccgttctctacgggtatcagccctgtgagatcatgtgggggcgttctgttaaatcctggggcatcgccgatatcgtgggtaagccgccagagtggttccagttcgacaatgacaacctgctgcgttttcgggcaaaagacgccgggctggaaggcgagccggtaccgctgaacaagttcgtggtaccgcgtcaggacgcgacctacgacaacccgtatggcttccctgacctgtcaatgtgcttctggcccgtgacattcaaaaaaggcggcatgaaattctgggtgcgttttgccgagaaatacggttcaccgtgggtcatcggcaagcatccgcgcgggacagcccagggtgagattgacctgctgctggactccatggaggcaatggtggaagacgcggtggccgccatccctgacgattcctccattgaaatcaaggaggccgcaggcaaggccgacagcagcgatatttatcagaacctgattacgcttgcccgcagtgaaatctccatcgccctgctggggcagaaccagaccaccgaggccaacagtaaccgcgcctccgcgcaggccggactggaggtcaccgatgatatccgtgacgctgacgcagatatcgtggaaagcgcggtgaatcaggccatcaggatggcggtatcaatgaactttggcgatgtggccagccccgtctggaagatgtgggaacagggaacggtcgacgatacccaagcaacccgtgacgagaaactcagccgcgccggtgtggtcttcaccccgcaatacttcaagcgtgagtaccagctgcagaacggcgatattgacgagacaccaccgtcagagcgccagaagaacacgctgccgctgtcgttcgccgaggccatagatgctgatattcaggcccaacaggacctcgatgatgcgctggatattctgatgaacggtggcaccttaaacggcgtacttgcgccggtgctggagccgctctttaaccaggtgaaagacggcgttaacccgtctgagctgctgggagcgctggctgaactgtacccgcagatgaatgcggatgacctgcaggaacggctggcccgtatcatgtttgttgcaactgtctgggggcgtctgcatgagcgtgacaacggctga

SEQ ID NO: 140786 - DNA, 822 bp, Enterobacter cloacae
atgagcgtgacaacggctgaactggcgtactgcatgacgcttccgccaaaacgggctatcagctacctgaagtccaaagggtatagcttcacgtgggactgggaggagatgtggcaggatgcccatgcccgcgcctttaccgtcgccaaagtgacccgccttgatatcctggaagatatcaggagcgccctgcagcaggcactggatgagggcaagactgaccgctggttccgccagcagctggagccggagctgcagcgcaagggatggtgggggccacgtgacaccacagacccggtaacgggcgagccggtcaccatccagcagggcagcccgtggcggctcgacaccatctttcgtaccaatatgtccgtaatctacagtgccggtcgctgggcggagcagatggagaacgtcgacgacaggccgtactggatgtataccggcatcaacgacagccatacccgcaagagccatctggcgctgcatggtctggtgctgcgctatgatgacccgttctggcaggcgttctacccgccgaacggctggcgctgccgctgtggtgtcattgccctgagcgcagctgatgtgcgtgcccgtggcctgaaggtgtcaggttctggctcagccatgggatgggagctgaagctggtctcagagaaaacaggcgaaatgcagaacgtcgccaccttcaataccggcaccacgaaggtggccaccgacgtcggctggtcttacgcgccgggggcagcataccgtcccgaccttgcccgctatcagggtacgcttcaaccgctggcacagcaggaactgagaggataa

SEQ ID NO: 140787 - DNA, 459 bp, Enterobacter cloacae
atggcttccgataacctggtcaatatcaccattaacgatgaatccctgcgccggagcctccgtgcgctggacctggctgccacagacctggaacccgcgatgcgcaaaatcgccggaaccctgctggctgagacacagtttaactttctcgatgaggggcgtccggggtggactccctcgctggcagcgcaggagcgcgacgggcaaacactgcaggataccgggcgtctgatggggtcagtatcaaccgaccatgacgaccggcaggcagcggttggcactaatgtcgtttatgggccgattcaccagttcggtggtaaaacggggcgtaatgagtccgttgaacttccggcccgtccgttcctgccgctgacaggggacggtgagctgcagcctgaagtggttgtccccatcctcgatacgattgtccgccatcttgaagcagcggcccgtcgctga

SEQ ID NO: 140788 - DNA, 1098 bp, Enterobacter cloacae
atgccagccattcacatttttaaagccggtactcataccgatatgcacggcacgaaactgccgttcacgcaaagcgatcttgccgcctgcgtgaaagcctatgacccgtccgtccatgaagcgcctctcgttattggccaccccaaaacggaagacccggcgtggggctgggtgaaatccctgtcgcttaacggcggtgatctgctggctgagcctgaccagctcgacccgcagtttgccgaactggtgggcaacggacgattcaagaaggtctccgcctcgttctatctccctgactcaccgaacaacccgaagcccggcacgctttacctgcgtcatgtcggttttctgggcgcacagccaccttccattaaggggctgaagcaggtctcgtttggtgagaaagaagaaggcgtcgtggagtttgccgactggagtgatatcaccaatgcctctttatggggccgtctgcgcgattttctgatcgcccagttcgggctggacgagaccgacaaggtgcttccttcatggcaggttgattccctgcgcgaagaggcttaccgcgacaccgggaagtctgaaccggacttcagtgaacacaatcccaaccctcaacaagagaacagcaccatgactgaagaagaaatcaaagcgcttcaggcggaaaacacgcgtctgaaagcagaagccacccagcgggcagaacaggaagcgaagaacaggcaggacaatctgcacgcggacaacgtctcctttgccgagaagctggttggcgatggccgactggcccccaaagcgaagtcggttgtcgtggccattcttgacgcggtttctgcaggtgacaagccggttgagtttgccgaaggcgatacccgcaccccgctggccacggcgtttaagacgctgctggacagcactgatccggtactgaatttcagtgaacacgcgaccaaagaccgcgtgaacacggatatcaaaacgacgacagcagagtttgctgaagccgacccggaacgtctggcgctgcatcagaaagcgctggaactgtcgaaaaaagaaggcatcagctacgacgctgctgtctcccgctgcctgtaa

SEQ ID NO: 140789 - DNA, 954 bp, Enterobacter cloacae
atgtctgactatttaaagggtaagcgcgtcgttgacccggtgctgaccagcatcgctcgcggttataaaaatgccgcgttcatcggcgagcgcattttccctattgtccttaccgataaggaaggtgtgaccgtgccgaccttcggtaaatccgcttttgtggagtatgacaccgagcgtgccgtgggggctgacagtaacgttctggtgcgtgagaaaaccggcaaactggatctggtactcaacgagcacgatctggccgcaccggtggactatcgcgagcaggcggagtcgatgttcaacgaagaagccaaagccattcgccgtgtaaccagcggcgtcaacctgaaacgcgaactgtatgcggcccgtctggcccaggacaagaacgtctatcgcgcggctaacgtcaaagcgctggctgcggctgaccgctggggcggtggcaagggtgacccgattggcatcattgaaggcgggattgaagcggtgcgtaacgccaccggcctgcgtccgaacctgatgaccatgggagcaagcgtcatgtcactgctgaagttccacccggcgattcaggcggcgattggtgctaacgagcgcaagcgtatcaccatcgaaattctgaaagaccttttccaactggaagatgtggtggtcggcgagccggtctccatggcctccatgaaagacgcgcagaacaaggacaaagtcccgaccgatatctggggcgacaacctgatgctgcattacgtcggcaaaccccagccgggcaccgacagcgccgacgaaaacgagccgtccttcggttacaccctgcgccgtaaagggatgccggtggcggataaatatgacggcgtcggcggcaaggtgaagtactgccgttataccgatatctacaaagtcgccgtggtcggtggcgatgccgggtatctcgtcaccaacattgtgaaataa

SEQ ID NO: 140790 - DNA, 357 bp, Enterobacter cloacae
atgggtacaactcaacaggtcattctgaccaccaccgtgacggccagcgcggcgctgacgcaacagcgctttgtcggggccgataatggcccctgtcaggccggagccgtcgcgctcggcgtggcagaggtggatgccgctgccggtgatgtaacgccggtcaacgtactgggtattgttgccgtcgaggccggtgcggcagtctccagagggcagatcgttcagtcggatgcgaacgcatgcgccgttcctcaggtccccgcagccggtgagaccccggcaggcatttctgccgggattgcgctggatgaggctctggccgaaggtgacgttatccgcatcctgcgcggggtgtga

SEQ ID NO: 140791 - DNA, 498 bp, Enterobacter cloacae
atgaggctctggccgaaggtgacgttatccgcatcctgcgcggggtgtgacatgtactgcaccctggcggatttgcttgaacaagtaccggaaaggacgctcattgagctgaccaacgagtcggtgggctttgatgagcagcctccggtcaatgctaccgtggttgagagttgcatccgctacgccggtgaactgatagatgcccacctgcgtgggcgctataccctgccgctgacggaagtaccgaccgttctgcgcgacattgccatcacgctgacccgttaccgcctgtacgtccgccgtcctgaaggtgacctgcctgacactgtcaaggacgacaacaaagaggcacggcggcaactggaggctatccgcgacgggaagctcacgctggggctgcagtccactcagagagatgtgcctgagtccggtgaaatccgggcacgggcacgccgtcccacctttggcgggcgcgatggcttactggagaaatactga

SEQ ID NO: 140792 - DNA, 465 bp, Enterobacter cloacae
atgaatgttctgcccgttattgatgcggttgtcgcccgccttaaggagaaactcccgacgctggcagtggaatatttcccggagaaaccagcggaataccggctcaaccatccgaaaggagcgctgctggtgagttatgccgggtcacgcttcgacaagcccaatgacaccagcgcggttatccaggctcagaccatccagctatgcgtcacggtggtcttccggcagctcaacggtaaacagggcgcggtcgatgtgcttgacgtggtgcgccgcatcctcggtggttacaccccgccgaactgccgccgtcgcatctggctgacccgcgaggtgtttatcggtgaggtcaaggggctgtggcagtacgccctcgactttgccactgaaagcgtctttatcgaagacagcgatttaccgtccggcccgctgttaaccgaagtgaactatgaggaaagcgagtga

SEQ ID NO: 140793 - DNA, 252 bp, Enterobacter cloacae
atgaaagaataccgctattccggcccggccagcggcgtcacgctgtcggacggaaccgaaatcctgctctggccggggaagaatgtttccctgccggaggagcatgactatgtgaaggtactggtggcgctgaagcatctgacaccggtatctgaagagactaaacccgccagcacaccggttgtgcagtcaccaaagcgcaggaacgtcggcgacaacgatgtgaaaacggaggactcccatggcagctaa

SEQ ID NO: 140794 - DNA, 1428 bp, Enterobacter cloacae
atggcagctaactatctgcatggcgtcgaaaccattgaggtggaaaacggtgcccgcccggtaaaaacggtgaagtctgccgtcattggcctgattggtaccgccccgatgggggacgtcaatacgctggtgcagtgcctgtctgagaaagatgccgcggcgtttggcagccagctcaccggctttaccattccgcaggcgctggatgcgatctacgaccatggggcaggcaccgttctggtcattaacgtgcttgatccggctgtgcacaaaaccgctgtggccgatgaagatgtaacgttcgacaaggcgacgggcaaagcgaagctggctaatccggtggtcgcgcagctggtactgaaaccggacagcgatggccagccttatgtggaaggtcaggactactcgcttgatgcacagaccggggtgattaccaacctcggtaagagcatcgcggcagatgcaacggtgaaggccagctataactatgctgatccaactaaagtcaccccggctgatatcatcggtgccgttaatgcggcgggcaaccgtaccggcatgaagctgcttaacgacagcttcaacctgtttggctacttcgccaaaattctgattgccccggtattctgcacccagaacagcgtctcggttgagcttatcgccatggccgagaagctgggcgcggtgacttacatcgacgcgccgattggtaccacttttgctcaggctctggcggggcgtggcccggaaggcaccattaacttcaataccagctccgaccgcgtccgtctgtgctacccgcacgtcaaggtgtacgacgtggccactaacagcgaacggctggagccgctgagccagcgtgctgcaggtctgcgtgccaaggtcgacctggacaaagggtactggtggtcgtcctccaaccaggaaattctgggtatcaccggcgtggagcgccagctgtcagcaatgattgacgacccgcagagcgaggtgaacctgctcaacgaacagggcatcaccacggtcttcagcagctacggcagcggcctgcgtctgtggggcaaccgtatggcggcatggccaacggtcacccatatgcgcaactttgagaacgtccgccgcaccggtgatgtgatcaacgagtccctgcgttacttcagccagcagtacatcgacatgccgattacccaggcgctgattgatgcgctgacggagtcggtcaacgcctacggtcgcaagctgattggcgacggtgcgctgctgggcttcagctgctggtttgatccggcccgcaacgaagagacggagcttgccgccggtcacctgttgctgagctacaaatacacgccgccaccgccgctggagcggctgacgtttgagaccgagatcacctcggaatacctgttaaccctgaaggggaatagctga

SEQ ID NO: 140795 - DNA, 522 bp, Enterobacter cloacae
atggcaaagattgagatcaaccgcatcacgaatgccaacatctacctggatggcgctaacctgctgggccgggccgaggaggtcaaactgcctgacgtctccatgaccatgcaggagcataaggcgctggggatggtgggcaaggtggaactcccggcaggcttcgacaagcttgagggcgagatcaagtggaacagcttttaccgcgacgcgatgctgtctgctgcgaacccgtataagtcgctggcgctgcagtgtcgctccagcgtccagcgctacagttcgcaggggctgattgacgaaatcccgctggtcaccttcctgacgatcatgttcaagaagaacccgctggggacgttcaaacagcacgagaacgccgagttctccagtagcttcacctgcacgtacatcaagcaggtactggatggtgaagagttgctggagctggactatctggccaacatcttccgtgtcggtggtgttgaccagttgactgactaccgcatcaatatcgggggctga

SEQ ID NO: 140796 - DNA, 282 bp, Enterobacter cloacae
gtgaccgtcgagattgaagacaaaggtgggaactgcggttcgattggcatgggtaatggcacctggtttaccatcctcgatattccgggtgtggaaaccctttttaatacccaaaaaaccaatgacccgattgactgcacccgctccagagcacggaagctggctgacctgattgatgcatgggaaccccctgaccactggttcaccggcatcggcaaatctgaaggaaaggcgcttctcatcgccttcctgcgtaactgcaaaggctttcgcactcgctga

SEQ ID NO: 140797 - DNA, 315 bp, Enterobacter cloacae
atgtcacaaacccaatccgatacttttaagctgtcttaccccttcaccacagctgctggcaccagagttgagcaggttgaactgaaacgcctgacggtcaaagacctgaagcaggtgcgcaaaatcagtaaggacccggctgactgggacgaaccgctgattgcccgcagtaccggtattctcccggaagacctcgataacatggatcttgccgactatatggagctgcagaaacgatttcagcaagtcactgggctgggcaaaagcgacgaaaacgctgatgcaggcgcagggtctgttggcgaggtggtttag

SEQ ID NO: 140798 - DNA, 213 bp, Enterobacter cloacae
atgcagaacagccgcgagtggcggctgttaagtgatgagtcgttactgattgtcgccgaactcgcttttgatttgctcttcagcctgctccagccacatctccagatcgtcagtatcgagggcatcaatctcccccggctgaaatctaaaccacctcgccaacagaccctgcgcctgcatcagcgttttcgtcgcttttgcccagcccagtga

SEQ ID NO: 140799 - DNA, 2466 bp, Enterobacter cloacae
atggccagtgaattttcagtcggcgtcattattggcggcattgtcgggagcagcttccgctcagccgtcagtggcacccgacgcgccctagattccctgggcgatacatcgcgccgcctgcaggaacgccagaattccttaactcgtgcaactgaacgttatggccagttaggctcttcccggatgcagcgcctcaacagcgaactgctgcgggtaagccgcacaatggagcaaatcgagcgccagcagcgccgtctgtcagcggtctcggccaccagtgatgcgttgaaggctaaccgcatggcgctctatggtcagggggcagagacttatggtatcgctcgaacgttgggcgcaccggtcatggcctctgtcaaacaatattcatcgtttgaatcccagctacgcgatatcagcgtcaccggcgatctggattcaaggcaggaacaggccatcggtactgccattcgtcgggcatccctgcaggtcaatcagctccaggaatctctgttgggcggcgttggtcaactggttgccgatggcatgaatccgcagcaggcagcgacctttgccgggatgctaggtaaagcggccacggccaccaaagcggatatgactgacctcgcaaaaatgacctacgcctttagcgatgcgctgaaaattaccgatgccaaagagctggagcaggcgtttgggattgcggcaaccggggccaagctaggctcgtttgagctgaaggatatggcgaaagcgttacccggtatggccaaagccttcgctgcacgtggtatttacggcaaagacgccataacccagatcgtcgccagtctggaagtgggtaaaggcagcggctcagcagaagaggccgtcaccaatatgtcaaactggctggcggcaatgggacgcggagataccacgcagaaatacgctaaggctggcgtggattaccagggatcaatgcaaaattatgtagcccaggggttctctcaatatgaagcctccctgatgattgccaaccggtttatcgacggtaaaggcaaggcatttgtgcagcaatggaaagcggccggctcaagaggcgatcaggaaggccagcagaagctgatggagtccttcggactggcggaagtctttaccgatatccagaccgtgaaccatctgctgtctatgcgtcagggctgggataagtaccaatctaacaagcaggaaatgaacactccctctgcaatgtctacgctggacaaggatgcagcgaaacaaaatgatacgctcgaaggacgttggcgcagaacgcagattgggtttaacgactcggccattagcatcggagaatcattacgtccggcgttgatccagttgggggaaacgttcatccccttaatgaacagcgttggaaaatggatagcggctaatccgcaactcgtgagcggcacaattcaagtgattggcgcattacttgcgttcaagatggcaaccatcggcctcaagctcgggctgaatctccttatttcacctttcgtcaacgtctggaaaaatgccgtactcctgcgggccaactggcttcgcctgacactcgcgctgggtgaaggcggcaaacttcgctggctggtgaccggcttcagcgccgtcgccagaggtgccagaacactgggtggtgtgctctccggggggctggtccgcggcattatgatcgccgggcgtgccgttctctggattggccgggcactgctgatgaatcccattggtcttgctatcaccgccgtcgcggcggcggcttatcttatttatcgtaactggggggctgtcagcagttggttcaaacagcgctgggctgacattaaagaggcgtttaacggcggtatcgtggggattggtaagctgctgattaactggtcgccggttggtctgctctataaagcctttgcggctgcgctgaaatatctcggcgttgatctgcccgcaaagttcactgacttcggtggccatcttatcgacgggctgataaacggcatcaaaaacaaatgggagtccctcaaaaccaccgtcacggacatgggcgacagcgtcggcggctggttcaaggaaaagctgggcatccattcgccgagccgtgtgtttatcggttttggtgacaacattgcgcagggtgccgctatcggcctgcagcgcaccacaccacttgctgcactggccgggcagcgtctggccactgaaatgacaccggatgttccccgtatcccgtcgccggaaatcatggcggcgggatattcaggtcgtggcgcagttgcaactggcggcggaacatctggcggtatccaggtcagctttaatcctcagtttttcctcaatggcaaagaaaccgtagcgcctgccggactgaccggtgcgcttaatatgagcctgcgtgaactggagaaaatgctggagcgtctgctggctcagaaacaacgtcgggggtacgaataa

SEQ ID NO: 140800 - DNA, 885 bp, Enterobacter cloacae
atgtttgcggtactgggtgatattgagtttgaactgattacctactgggacggctttgaggccactttcggtgtcgattatgcggaacatgcccgcatcgagggtaagcccggcctgcagttcgtcggcgacaagctggacgaaatccagataagcctggtcttccatcagcattattgtgtgcccgacgtggagctggcgagactgagaacggccatgaaagcccatcaggcgctggcactggttttcggcaacggtgactatcgcggctggtttgttattaccgacgtgaccgcgaccagcgagcagacggacagcacaggcaacgtgctggccgtcaatgccaccgcatctctccgggagtacatcggcgacccgaagaacccgctacagcctcctgcgatacgcacgcaggttcccggcgtcggggctgtctcaggtgccgttccttctccctccggggtggcgcagtacgtccgcgacggcgtcaactatgcaaaacaggcacagtctgttctccagaccactatcagcgccgttcgggtggcgcagaaaatgaaggataaccccgccgtcgcgctgacccgcgtaccggggctgatgagcggactaggcaacgtgtccggggcgttaggccagagcgttccggcattcaatgcgctctctgaatccatgcctgatgccatcagtctggccagagccaccagtgatgcggccacgtatgtacaacaggcgcggtcttcgctgagcggcgtggacggcagcaatatcgcggcagcgctggatgccgtttccgggcagcttaactccgccagcaccaccttcactcgtatgtcgccggggttaagcaccatggcagctaaaattctggcgaggagtgtgtga

SEQ ID NO: 140801 - DNA, 213 bp, Enterobacter cloacae
atgtttcttgaacatgtcacccgtgacggggagcggtgggattctctggcatggcagtactacggcgacccgttgggctatccccggataattgccgccaatccgcacgtggccattacgccggtgctgccctccggactgttgttactgatcccggttatcgaggctgaagaagccaccacagaagaggatattgccccatggctgagataa

SEQ ID NO: 140802 - DNA, 1170 bp, Enterobacter cloacae
atggctgagataaacagcactgcacaggccgcatcagcgttaaccggcgtcagcgatgttctgagtccggtattcactctgtggtatctgcagaagaacatcactaccgatatcgccccctatgtcacccgcgtaacctacagcgataacatcaaaagcgagtccgataccatagaggtggagctggacgacaccgatggccgctggctgaataagtggtatccgggcaagggggacacgctgacgctgaaaatgggttatcagggcgagaagctgctgtcctgcggtacgttctctatagacgagatcgaggtgagttcgcccgcgtccgttgtcgctatccggggtgtggccacgtcggtcaacaacgccctgcggacaaaatccagtcgtggtttcgagaacaccacgctggcggctatagccggacggattgccaaaaagcatcagctgaagctggttggcagtattgagtccatcaaaattgaccgggtgacccagtatgctgaaacggacgtgggcttcctgcgtcgactggccagcgagtatggttatgccgtgaaagtggtcagcgaccagctgattttctctcatctggccacgctgcgcgatcaggaaccggtaaaacagttgaagccacaggatgtggccagtttttccctgcgtgacaccatcaaccgcgtctacaaatccgcaaaggtaaaacaccaaaagagcagcgataaaaagctgatcgtctacgaagctgatggcggtaccagcgaaagcgacaaacaaactaaaggcggtaaggtcaccagtgccgactcactgaaggtcaacagccgcgtcagcgacccggacagcgcccggattaaagcggattcggcgctggccaggcataacgaataccagcagaacggctccctgacgctgatggggacgcctcaactgactgcaggcaacaaaattgaactggtgggttttggacagttatccgggccatggctgataaccactgcccgccatgcgtttgaccgcaacagcggctacatcaccgaactggaggtggcgcgagggccggtcacgcagggcaaggcgaagaaaggtaaaaagactggcaagagtcagacactgaccgtctataaaccggacggcagcacatccacggtaacaaaggagaagaaataa

SEQ ID NO: 140803 - DNA, 513 bp, Enterobacter cloacae
atggcaggcgtcacccgtcaggtcggtacggtcagcgccgtcgatgccgacaaggttcaggcccgcgttcgtctgcctgagtgcgataacctgcgcactaactggcttaacgtactccagcgcaacacccaggataacaaggattactggctccctgacgtgggggagcaggttgaggtgctgctcgatgccaacggcgaggatggtgtcattctgggcgcggtgtactcagacgtcgataagccaccgttcagcgacaaaaacgtccggggcacgaaatacgcggatggcgcagagttcagctataaccgcgcgacacatacgctgacggtaaaaggcggtattgagcatgtggtgatcgaagttgcggtgggtatcagcctgaaggggaaaaccattgatttgaccgctgataccaccacggtgaacggcaaccttgaaatcaacggcaatgcccactcgacaggcagcatgctctctgacggccagaactccaatcatcactctcactga

SEQ ID NO: 140804 - DNA, 348 bp, Enterobacter cloacae
atgaaaacaacctcagtattctggcaaccggctctgcaggcccccggcgaaatcgtccgggggctggatgatatctggcaggccattcaaatcattctgcgcactcctcgcggcagcgacccgcaccgcccggagttcggcagcaatctgcacctttatatcgactggcccgttgagcgtgccattccgcatgtggtgcgcgaatccgtcgatgccatccgccgctgggagcctcgctgccagcttatgtcggttaaacccgccgtcgacggcgaacatcttacgctccgggtgagctggaaaggctctgacggacagccccggactcaggagttgctatggcgctga

SEQ ID NO: 140805 - DNA, 1104 bp, Enterobacter cloacae
atggcgctgacagaacccgattttattgaacgtgatgccgacaaaatcacggctgaaatgattgcacagtacgaagccgcaaccggcaagacgctataccccgctcaggctgagcgcctgttgattgacatgtgggcataccgcgaaatgctggtcagggtagcggcgcaggaagcagccaaacagaatctggtcgcctttgcccgtgagccgatgattgattacctcggtgaactggtcggtgtttaccgccttgccgcgcagcctgccaccaccacgctccagttctccgtggatgaggctctggccattgacgtgctgattccggcaggcacccgcgtcagcgcttccgacagcattatttttgccaccgatacggacgtggtgctgaaagccggattgctgctggtcaatgccacggccacctgtaccgaaccgggagccgctggcaatggctggcaacctgcgcaggtcagtcagttgctcgatgagattgataatgtcgacctgcaggtgaccaatctggcagccagttctggcggttctgagcaggaagacaatgacagactccgcgagcgtatcaagctggccccggaatcattcaccaatgccggaagccgtatggcataccgctttcatgccatgcaggcccatcccaacatcgtcgatgttgcggtgctttccccggttcccggcaccgtagaactgtatccgctgctcagcaccggcctgccggacgacagcatcctcacgctggtagagagtttctgctcggacgaaaaagtcaggccgctcactgataccgtgcgggctaaaacacctgtgcaggtggattacgccattgaagccaacatcactatctatcgtgaccaggatgctaactcaataaaggacaacgccaacagcgccatacagaactgggtagcgtcccgtaccgccacgctggggcgcgatattgtccccagtcagattatcagcgtgctgtccgttgccggagtgtatcaggtcgaactggtgacaccggtgctgaaggtggtggcagaaaacgaatgggcaaactgtacggcgatcactcttaacatgaccggggtgtccgatggctga

SEQ ID NO: 140806 - DNA, 579 bp, Enterobacter cloacae
atggctgagccgctacaactcccgccaccgcttgagggtgacatcagtctcagaacgctgggaagactcgccgggcggctggataacatcgacctgagcgtactgatggtctatctcgtcgatatcgtcgacagttccgcgctgccatggctgggcgagcagttctcactgttcggcgatggctgggagctggcggaatcggacgatgttcgccgcatgcttatcaaatccgctatcgagctgcaccgctacaaagggacgccgtggtcaatccgggaaattatccgccgtttcggcttcggcgaagtggatctgattgaaggcactggccagattggctacgacggcaaacacacttacaacgggcttttcgtccatggcgatgcggaagcctgggcggtttatcgcgtcatccttcaacagcccatcactaacgatcaggcggcgctgttacgccagacgctcgctgcttttgctccggcccgctgccatctggcaagcctggagtatcagtctgtcgccattcgctacaacaacaccgtcaactatgacggcagctataaccacgggagcagttaa

SEQ ID NO: 140807 - DNA, 1482 bp, Enterobacter cloacae
atgtcatcacccaccatggttcaggaatacccggaactcaatactcttaatcccctgctgaatagtattgttgataaaaccgttgataatgttgcacgaaaactgatcggcggttttcgtaataaacgaaattctcaaccgaatgccaagtcccccaacctcagtacaacggtggatgatacgcttaacgccacgtcgtctgcgagtgtgcttgccgtggcgaatcggggtgttcagtggaaggaaatgataagcaaaagtttcactcatggcatttcctctatttccaccatgaagtttgatggccagttcacgatcaagaatggtgtgccggaaggcctgaaagatgtgccaaattccccaggtgtctatgtggtttatgacagcgccggtgaggtgcggtatatcggcgatgcgaaggatttacagaaacggtggcatgccgggcatctgaatgaaaataaaaacgccgaaaagaatggcacagaatacaaaatggcggcggagtttgaatcgggctgcaccgtcaaatttatggtcatggattcggcagagacggcagcagcggtcgaggctaacattttaaaaaatgagaaacccccggtaaataagaaagaagagctgtgcacagaacagggtacacgttctaatatcgaagcaaaaaaaatgaaagatgcggcaaacgaggcgggaggtctagcctttggcgcagggaaagaggcattaaaaaatgtcgggtgggatgtgtttgaaacgctcagtaccacgatgattaaagcattgaaggatgaagttgttgacctgtttatcacccagaaagcgcaggtgaaaatccgtctaaaacgcttttttaataaaatatggcaggttatcgttaacctgataaaagccccgttaaatctgcttagaggtttattcgagtttgtgttaaatgcactgtctcaggccatcgggaaaatttatcagttagcaaaaaatatctatgatctgggcatggcggcactctcgctgatgaaggggagcaaaaccatgaccagagaagaaactatctataagatctctgaggtcattataaccagcgggacactggtgttctgggatgcggtagaaccggtgattgaatccggtatggtggctctttttgctccactggctccctttgccccttatatatctgcctccctgtgcgcgatgggatttggactgagtagttaccttttggccgatattgtccctaaagccgtcagcctaattctctcaacggaacctgcctataccgcaaaaggacgggaggctttccagcagttgattgctaaccatgaaaccagtgtgagtatggtggcagaactgcaaaaatatgcaggtagcacggtgaatctgatgagtgaaactcgggagcatacgtcagaactgaacaatgatgtcatcagactgactcgcttcactcttgccgaagagattaaaaagctgggagcgcagtaa

SEQ ID NO: 140808 - DNA, 858 bp, Enterobacter cloacae
atgacggttgtcacgattgttgagaagaacaaagactgtagcatcgacagtttcaaaaaaaatctccacgaaataggcaaaaagctgaaagagggacaagagagaagtaaagggatacaaaaagcggcagctgacttcaataatcggggttttttggaacgttggggtggcagtctcacttcgagaaatgacactgacttagcgacgatgattgcaagcctggggggcagtctgaatatcacccaggaagtgatcgagtgtttattacaaatccagtcagaaaaaaatgtcgtgctgaaagagtttcatctggcgttaatgaatacgattcgagacttgaaacacaacgacacgatgctggatctcagcagccgtgaaaactcaatggctatttttgaacatctgaaatcccaggtggaagacaaactggaacaggcacagcgtgtcgaggaacatgaagaggagattaaccggttacagtcattgagctggcaacaggaggagatgcttcaacgtttgcaggtaagtcaggatgagcacgcaacacagcttgcactcctgaagcaggttgtcccacaattcgagcgacagcagcaggagcaatggcaacagtcagggaagctggctctggcccttgaagagcaggcggatcagtaccagcaacagttggccttactgaaggataagctgaccttgcatgaaaacgtcgcaacaggcatggcagcgcgggtcagcgaattagagaagacgtctcgattaaaacgtgcaggactgcgcgattacttgctgtttgcaactagcgcacttgccgccggactggtcgttatcgaagtgatgcattttaacggcgttatttaa

SEQ ID NO: 140809 - DNA, 1122 bp, Enterobacter cloacae
atgtggcctatccccaaagtacccgaaaaaagtacaattgccagcttgtcatacaagcgatgggggattgttcttatttctattttaatggtttgttctgtttttggtttttctttgtggggaacggaggcatatactaaaatagtatttttcctgctacttccggcatttttcatatggttatgtatttttggcgcagcgctaaaccgttatgagcagtcaaggagcgctctttctgcctggaaagaagaaactgatagaactaaggctttatggcagcactggagccgacagcagttgtcagtggttggtaatgttatctttactcctgaggaaaacggggccgcgagttttcttggacctctgtctgatattccagcatatccagataaagtcaggtcgttgtcacattcctggggctcccttcgtgttttgtctgatatgatcgacaaacagcttgagcaacagtatcctggttatcggaaatttttgcatactatttatgtattgcaaccctctggttgggacaaaaagaacgtatgccagattattctgtctcaatgggaactgcttcctgaagtaaattgttccgttgagtgtattggaaaattccacgataacgttaattttgatggtttgatattagttcttagtttccaatgctggttggcaggtgtatcgaaacaattcagcgaaatggtctctgcccagcttttatcatcctcaactttttccagacaacatgctgtaccggtacttgccggattaggccgtgttatgcctgtggattatgagaatattgaaaaagatttagatatgctttttgaatacaatcgaattgacaagcgtgatttacgccatgtctggctttctggtattcctgctgatattaattcaaaactgattcagtatgcagatcgatgtcagtggaaacttccagagaaacatccttttaatttgattgatttttcttttggtccccctggtgaaatggtattccctgcttcactcgcattgttggttgacgcggctcaaaagactgaagctaaccaattattaattattcaggcatcacctcagtccagactgctttgttttattactcggaaactttatttatga

SEQ ID NO: 140810 - DNA, 1242 bp, Enterobacter cloacae
atgaaatggtttaacaccctgagccataaccgctggctcgaacaagagaccgaccgcattctcgatttcggtaaaaacgccgccgtaccgaccggctttggctggctgggcaataacggccaggtgcgcagcgatatgggcacccatctgtggatcaccgcccgcatgctgcacgtgtacgcggtggcggcaaacatgggccgtcccggcgcgtatgccctggttgagcacggcattaacgccctcaacggtccgctgcgcgacaagcagcacggcggctggtacgcctgcgtaaacgatgaaggcgtgattgatgcgtccaagcagggctatcagcatttcttcgttctgctgggcgcggcgagcgccgtcaccacgggtcacccgcaggcacgtaagctgctggacgatgccatcgaggtgattgagcgttacttctggagcgaacaggagcagatgtgcctggagtcctgggatgaagccttcagcaaaacggaagactatcgcggcggtaacgccaacatgcacgccgtggaagccttcctgatcgtttatgacgtgacccacgatcgtaagtggctcgaccgcgccctgcgcatcgcctcggtgattattcacgacgtggcgcgcaaaggggagtaccgcgttaacgagcatttcgacaccgactggaatccgatccgcgattacaacattgataatcccgcccaccgcttccgcgcctacggcggcacgccggggcactggattgagtggggccgcctgatgctgcacctgcgcgccgcgctggaagcgcgctttgaaaccccgccggagtggctgctggaagatgcaaaaggcctgttccacgccaccatccgcgacgcctgggcacccgacggcgccgacgggtttgtctattccgtgggctgggacggcaagccaatcgtccgcgaacgcgtgcgctggccgatcgtcgaggcgatgggcacggcctatgccctttataccgtgaccggcgaggcgcagtacgaagcctggtatcagaagtggtgggattactgcatcaaatacctgatggactacgaaaacggttcgtggtggcaggagctggacaccaacaacgaagtgaccaccaaagtctgggacggcaagcaggatatttaccatctgctgcactgcctggtgatcccccgactgccgctggccccgggcttagcccctgccgtcgccgccggattactggatagccaggccaaataa

SEQ ID NO: 140811 - DNA, 1383 bp, Enterobacter cloacae
atgagtcaacatacttccgatccggcaaccctgcgcctgccgtttaaagaaaaactcgcctacgggatgggcgatctcggctcaaacatcctgctggatatcggcacgctttatctgctgaagttctacacagacgtgctgggcctgccgggcacctacggcggaattatcttcctgattgcgaagttctttaccgctttcaccgatatgggcaccgggatcatgctcgactcccggcgcaagattggcccgaaagggaaattccgcccgttcgtactctatgcggcgttcccggtgaccttactggcgattgccaacttcgttggcacgccgtttgaaatcaccggtaaaacggtgatggcgacggtgctgttcatgctgtacggcctgttcttcagcatgatgaactgctcctacggcgcgatggtgcccgccattaccaaaaacccggacgagcgcgcctcgctggccgcctggcgccagggcggcgctacgctgggcctgctgctctgtaccgtgggttttgttccggtgatgaacctgattgaaggcaatgaccagcttggctatatctttgccgccaccctcttctcgctgttcggactgttttttatgtggtggtgctacaagggggtgaccgagcgttacgtcgaggcgcagcccgccaacccggcgcaaaaaccggggctgctgcagtcgtttcgcgccatcgccggaaaccgcccgctgtttatcctgtgcatcgccaacctgtgcacgctgggcgcctttaacgtcaaactcgctattcaggtctactacacacagtacgtgctgaacgacccgatcctgctgtcgtacatgggcttcttcagcatgggctgcatttttatcggcgtctttatgatgcccggcgcggtgcggcgcttcggcaagaaaaaggtctacatcagcgggctgatgatttgggtggcgggcgatctgctcaactacttcttcggcggcggctcggtgagctttgtggcgttctcctgcctggcctttttcggctccgcgttcgtgaacagcctgaactgggcgctggtgtccgataccgtggagtacggtgagtggcgcaccggcgtgcgctcagaggggacggtctataccggttttaccttcttcaggaaggtctcccaggcgctggcgggcttcttcccggggatcatgctcacgcagatcggctatgtacccaacgtggtgcaatccagtggcacggttgaagggctgcggcagctgatatttatctacccgagcctgctggcggtcatcaccatcgtggcgatgggctgcttctacaacctcaacgagaagatgtatgtgcgcatcgtcgaagagatcgaactgcgcaaacgtacggcataa

SEQ ID NO: 140812 - DNA, 177 bp, Enterobacter cloacae
atgccgatgctgcccgaaggtaaagacccggttaatcctgcccggtcctacctgctttccctcaactttgcccgtagttggctgaccagggcctcgttccttggcattgtcgccggcatgctcggggccgcttccctgagttctgcagcagggacagcctgcggcgccatcacgtaa

SEQ ID NO: 140813 - DNA, 192 bp, Enterobacter cloacae
atgaataaagcctcgcccgttgatttgagaaaaagcatcgaaatcgccaaccacctggcgcacatcgggattcgatttgtgccgatcccggtggcgaccgaggaagagttccagacgcttgccgccgagctatctcgacggcttgagcagatggcagttgaggccgagaagaatgaaggcggtgcagcatga

SEQ ID NO: 140814 - DNA, 867 bp, Enterobacter cloacae
atgacaacaaaaaaatggggtcataacgagcttgctcatgaccttgctgagcatttacgccagaacacagcgcgcatctgctgggaagacatgcagctcgggcccgccggtacgtgccgacctgatgtctactctattgctcatagctacagcaagttctgccctgtcgtctatgaggtcaaagtcagcgtaagtgatttccgggctgacgttacagcaggcaaatacaccaaatactttaactacgcaggcggcgttgtttttgcagttcctgaaggcatgctcaagaaaagcgacatcccagatggttgcggcttgatgatccggaaggaaactggatggcacacccttaaggggccgacaatgcgccagattgatacccttcctcgcgatgcctggatgaaactgctcatggatggcatgacccggcaggcagagaggacccaaataaaaagccgcgtaatcaacacctacctcagcgaccaaaaactaatgaagcgacatggcaacgaaatcgccgatcttgtttgtcgagcacatcggtcgaaggagcgccttgagcagcatattagggataacgatgaaaggctgaagacgctgcgccaggaaagcgaagaggagttgcagcgccgacgtaagcgccgggaggaatcggaggaaaggttaaccgacgctcagcaagatctggcgaaagcgctaggcctcgacccgaatgtacctatgtatgttctgacaagaacgctatgggaagcaatgcgccgactgaccgaggatgaagagataaagaggttgcgaggaatattgtccaaccttgagcgcacgctgaatgatggtctgaaaccattacccggggagaacgccgcatga

SEQ ID NO: 140815 - DNA, 531 bp, Enterobacter cloacae
atggcaaagggcatcaacaaagtgatcctcgtcggcaacctcgggcaagaccccgaggtccgttatcttccctccggaggcgcagtgtgcagcgtgacgctggcaacttcggagtcatggcgagataaagccactggcgagctcaaagagcaaacggaatggcaccgcgtcgttctgttcggaaaactggcagaagtggccggtgaatacctgcgcaaaggatctcaggtctatatcgagggtcagcttcgcacccgcaaatggacagatcaggcaggcacggagaagtacaccacagaggttgttgtaaacgtcggcggcaccatgcaaatgctcagtggtcgtcagggtggtggcgtaccagcaggtgctggccagcagaatggtaaccagccgcaacatagtagtagacagcgtcagcaacaacagcgaccgcaacatggtggtgaacaaggaggatggggaaccccacagcaagcgcatggacagcaagatgccccaatggacttcgacgacgacatacccttttga

SEQ ID NO: 140816 - DNA, 213 bp, Enterobacter cloacae
atgactcagacatacattccggcgtgtttaagagaccttcctaagaagcgtcagaagccacgcaaacaggcgattaaagaagcgcaagtggaagtcctgaataaggcaatcgcatcgataaaagacgatatgcgtgcgttcaaaacagaagagcagcgtcgcggtcattaccaggcgatcagcacactctcacagattcgtgatgagttgtag

SEQ ID NO: 140817 - DNA, 309 bp, Enterobacter cloacae
atgacacacgttaagtgtctgctttttgttctaatcaatcgatacaagggcccctcattttttgtgtgcactcgctttccgacggatctcaatcatcctgatatacatatcacgcaactccttattctgcttgatgaccatttctttgggcaaggattctctctcacgattccattcatcaacgacaccctggcacgccagataagcgtcattaacaatattttcagctggaatcatcgtgttgatatagggaaaggtatgtggattggcccctatatttccatacactttttatcacttaacccatga

SEQ ID NO: 140818 - DNA, 408 bp, Enterobacter cloacae
atgacgaaaatggacgatgactttttagaatatgatctggactggtttttatccagccaggaagggtacttagcgcattttgcaacagcaggtcaggggccgattcctgaaaggatcaagtcatctgtcgaggactataattttattcttgattatatttactcattggaacccttgtcagaggtctatgtgatagaaggcaatctgcctgctttttcaaatgaaaatgaacgttcttgctatctgcgctcatttgttgagatgtcaagtaaaggattgttcagctacaactatgaacaagatgggtataaattaatttcgcaaccaaaaacaccattgaaatatgaaacattgccaaatgaagtgaaaggtgtgatttatgttgcagatagagaaattgacttatag

SEQ ID NO: 140819 - DNA, 183 bp, Enterobacter cloacae
atgattatgatggtgttcgtgattaaccagaaaaaagcggcaaataataatttatttggctatgtaaaagtcattcataaatactatttccgctcttcgctcagagcggatatcgatcttcgagtcgatcctcgccgtgacacgatcggatctttctatggctattgcgtgtcaaaaaattga

SEQ ID NO: 140820 - DNA, 384 bp, Enterobacter cloacae
atgcaaatcaagtttggggtgttgttactcgtggtgcttgtgccattgacatcgactgcagcaaaagggagttttgttttttcggtcggtaatgagaaaacttcgtttgactctggatgtgtaaagtcaattgattatgtagagaaggatgagacaggagcagagaatttagtctttagattctccgatgaatgtggcaaaaggttgtcggacatgacccgacagaatatcggaaagcatatgaccgtcacctacgatgataataaaattacttccgccatgattgcctcgcgcctgagcaccagtttcagaatatccacaaaagacataccaagaataatattaatgcaaatacttaatgattatgatggtgttcgtgattaa

SEQ ID NO: 140821 - DNA, 537 bp, Enterobacter cloacae
atgtcagttttgtgccaggggcagacattgagaacaagagtcttagttggtcaacggggagcaggtcagcggttgttgtcaatgccaggcttcaaagttttaaatattgcattcataatggtagggactctacacatgaaaaaacaattgttactgcttatattgctcgtcacttcccaatcgtgggcaaatcaatcctcccctggggagcaagctaaacaaatggctgaagcagcatgtctataccaatacaatgttatctactctcgctttactttgggtttttctgaggaaaaagcaattcaagtatcttctcaaatactaactaattatttggagagtcataaagaaaattcaggggacttttttctttcctcgattcgtagaagcacaatcgcacaattacgggagttagaagtaaataaagcggcagtgcagcaactaaaaactcccccatcagattttaaagataattttttatcctcttgtaatgcaataaaaaaagagcaattggaaactatgcatgtttttggttaa

SEQ ID NO: 140822 - DNA, 402 bp, Enterobacter cloacae
atgtctcaagcagtaaagaaaatcgctgtggtggctatagtggtgaacctggccgcgggatgcgcgccgctacacccttccggctgccataagaccacggcaacgggtaattgcggttcaggacgctgggacgatcaggatgaatggggcgcgcaggcgcgggcaatcagggcggcaataaacgccgaaattgaagagccgcaacactggaaagggaaacaatgcaggttgcatattgaatttgctcaggatggcacacctttaagcatctcaaccagtaacggcaatagcgcctattgcgaagcgataaaatcagccgcccataaagccaaattcccggccttcagcaatccggaagtttatagagattttcaaaaatcaggcttcaacatgcgcggttag

SEQ ID NO: 140823 - DNA, 519 bp, Enterobacter cloacae
atgaaaattaatccgggtcttatcggcgttgtcgttattgctggcctttcggtcgctctcgttaagagttgctccgacgccagtagccttcagagcgataacgacattctgcgaagtgacaactctttgcaggggcaggtaatcgccacccaggcattcaacttcaatcgattcaatcaggttgcagaacatgccaataggcttaactcccttatcgacaccagcaccgaagaaactgtaatcgaataccgggagattctccgccgtgaaaaaacctgtgatctgcctgttcctgctgatatcgctggtgggttgctcgaatacgcgtaccgtttacgttccagcgcaatgcacgccgataccgacggacctgactcagccgatgatagtgccgctgccgccagctcaatgacgtactgccaggcagtcttgtggattaagcctctactggccgtgattgagaagggcaacaataacttcgcaggtataaggcagatagagctggaaaggaaaaactag

SEQ ID NO: 140824 - DNA, 540 bp, Enterobacter cloacae
atgatgtcgaacaaagcaaagctcagcgcagcagtgctggcgctaatcgcgtcaggggcatctgctccactcattttcgaccaattcatcagcgagaaagaaggcaatgcgctggtggccgttgttgatccgggtggggtctggtctttatgtcacggcgtgaccgttatcgatggcaggcgtgttgttaaaggcatgacggccacagtggaacaatgccggaaagttaacgctattgaacgcgataaggcattagcctgggttgatcgcaatatcaaagtgcctctgacagagccacagaaggtgggtatcgcatccttctgcccgtacaacattggtcccggtaaatgcttcccttcgaccttctataggcgcatcaatgcaggtgaccgtatcggtgcatgcgaggcaatccgctggtggattaaggacggtggacgtgattgccgcctgactaaaggccaaaagaatggctgttatgggcaggttgagcggcgcgaacaggaaagtgcgttgacgtgctgggggctcgaccaatga

SEQ ID NO: 140825 - DNA, 216 bp, Enterobacter cloacae
atgtatccaatggaaaaaattacgacgggaatagcatacggagcatctggaggggggactggatactggttgcttcagctcctcgataaagtctccccatctcaatgggcggccattggtgtgctcggtagcctcatgtttggtttgctgacctggttaacgagtctgtacttccaaatcaaagcggatcgccgcaaagctgcgcggggtgaatga

SEQ ID NO: 140826 - DNA, 591 bp, Enterobacter cloacae
atggccgttgttaacccacttgataagataattgatgatattgaacaaactaagaatgatggatacaaaaatttagacattgaaaaaatgcttatgtatcttgagaatttaaagcaagaaaatgtttatgatcatgatgttcagatggaattacttaagagcagcaatacaagtcaaattgaaattgccaaaatgaaccatgctgcaagcctggaggcttttcgttcagtaataactgtaggagcaaatgctgccagagcgtttatgattataaatggcggagcagcaatagctctgctcgcttttttaggtaatgtttggaataaagattcaagtccagatgtattgtcatcaatcttaggatcacttttaattttctgtatcggcgttctgtgttccggtgtttgctcagggtttacttatcttgcgcaatattgttatgcaacttcggaattagggtcagacagcaaatggaagatgggaggcgatgttaacaatatcatcgcaattttgtcaggagtttcttctttgattctttttggcgttggtgcttatgtaacttatgcctctatgggtaatcaatttggttga

SEQ ID NO: 140827 - DNA, 606 bp, Enterobacter cloacae
atgacaccacgtcaacgccgtaatcatattgaagcgctgggtaaagcagcgggtgcgccgcgtaaaagctggctgggtaaaagcatgcttcttacaggtattcagtcggcatggattaaatcattgctgacaacatggggcgagggggtaagcggtggaacagccccacgattgcctcgcgctcatgcatgctgggatgttcttaagggcgggcgatggtcggataaggcattgtctcgctttacagctgcactggaacaagctcgagcagagggattcagagggccgcaggcgttaaatcgtgctcacgccattttgtggccacagcccgccaccagcatcattgatgaagctatgcacgatgatgacgttgattttgtcgagcagtcagtgctgcaggcgcttgatataaatgacccggtttatatcgttggtttgcagtattacaccacacgcaaaaaaatctcagacattacgcgggagttacagtcgatcgcaccatggctaacggattgggaggccagaaaacgagtacgctggtgcctggaaatattcagggcgaaggtctttttatctacgcgaaaactcctggcagaacagagctag

SEQ ID NO: 140828 - DNA, 1020 bp, Enterobacter cloacae
atgcgtgcgcttcttcaacctgtgattgcacgggagctgggtgtcgttctgttgaagccgggcagagagctgatggagttgttcaccgcaggaagagtgttgatcgagcgccagcctgaaagcctggccgggtgtcaaactggtcgtgtttcggatgcgcggcagccactggctgaaaacgagcagctgcgaagcttctttttgaatgaacaggttctggctgctgctggtggtataagcgggcttgattactggttgctgaagtacggcggcggcgattgccaatacgctcatagcgattaccactaccacgaactaaccatcatgcaccatgagccaggatccatcctgctttgtggctattgcgataatcacttgcgagagcagtgtaccgaggaactagcagaactggcatggagaaacgtaattgcctttgttctggattcggttcgtatttcactcgctatcgacaaaagccgcgagatttctctcgctgaactctgctggtgggcagttcgtaaaggggttacggatgcacttccagaatcatgcgttcgtgaagcgcttcgtttacctcaagaaagcaagattggtcgagaaagcgatattacgccttctgtaccggccagcagcatcctttgggaattagtttcagctgttgacctgcctgatgcgctgacagaaccgctggtgggcgtgatggtggatccggcgccgcctcagtctttcatgcgtcgaccgaagcgtctgcgctgggaaagtcgcaattatctgaattgggtgaaaacacagccctgcgaatgctgccagcagcaatcagacgacccgcatcacttaatcggatgggggcagggaggcatggcaacaaaagctcacgacatcttctcgattccactttgccgaaaacatcataccgaacttcataacgaccgcctggcattcgagcgaaaatatggctcgcagctggaaatgatcattagagtgctggaccgggcctatgcgctcggcgttctggcgtaa

SEQ ID NO: 140829 - DNA, 369 bp, Enterobacter cloacae
atgggggtgatcgtgacagcctacaacatcctccctatgggtaagccacgcatgacgcgtgcagacaaatggaagaagcgccctcaagttatgcgttaccgggctttttgcgatcacgtccggctactgggcatttgcatgcccgaatcgaattctcacgttaccttcgttcttccaatgccgaagagctggagcaagaaaaagcgcgcagagatgaacgggcagccccatcagggtaaacccgatttggataaccttatgaagtctctgatggatacactcttcgaagacgatatgcatatctgggattcaaggataacgaagctctggggcgagaacgggcagatcattatcagggagagcgagtga

SEQ ID NO: 140830 - DNA, 201 bp, Enterobacter cloacae
atgaagaaaagctggttcactcataccgggctgacaaccgaagaagccaatgagctggtggcgcgctatgagtctaaaggcgtccccgtcgagaaaagtctcgatattgaccctcgtttttggatagtcagcgcattactacctcagcaaaaatcctcagctaagacagcgcaaagtatgcgttcccgggcatgggggtga

SEQ ID NO: 140831 - DNA, 246 bp, Enterobacter cloacae
gtggaacaaaaagaagaattacctaacaagggctatgcggtcatcagatgcaacgatggggttatcgttgcgcgcctgcactcatttcctgatagtggtcgcgcgctcatgtacagacgtggggatgaagtatcctttatgccgttacaggatgatgagatagtaggagcaccgacactctttacgcagatgcttgaacgggctggttatcgcgtttccaagaattctgttacactcccgtcatag

SEQ ID NO: 140832 - DNA, 534 bp, Enterobacter cloacae
atgacaataacatcttcgcccagactcattcttcgttcatttaaagagagtgatgctttagcacttctggactatctttcctcccctcgcactccctgttttcaggacgaaatgctcaactcagttgaggatgccgtagaagaagtatgcagaagagcaaatgatccaagccaatttgctgtttgcctaaaagactccgacctcgttattggccatctgtttgcagaaaatagtggcgagccagatgctaatacgtggtccgtaggttggcactttaatcagcgctatgaagggtacgggtatgcaacagaatcagttggggccctgtttaaatatttgtttaatgtcaaacaagcaagacgcctctacgcatacgttgaagactacaacctgtcctcacaaagattgtgttcccgccttgggatgcgacaagagggttgttttaaagagtttgtttcatttattacggatgaaggcgaggaaaaatatgacaatacatttgtttatgccttactaaaaaaagaatttaaatga

SEQ ID NO: 140833 - DNA, 819 bp, Enterobacter cloacae
ttgcttacatcatgctatgttagtttgctgggagcaggtcaaagatgttcaccgcgcctatgcttcagcaacaccttccagaacttttcaaggaatagagaaatggctcgtaagtatgtttatggtgataaaccaatccgcataacaaccgctgagatagttgaaaacgagtttgctggaaaggctacggctgctcaggtcgatgcaattttaaagaaaagatttccacattacaaagacaatacttatttgaatctgatagttaacgcagttaactgcaatcgtggtcactggagttttaacaggacagccagacgaacagatgatgccacccatcgccaccatgaatatgatcgacttttcaagcgcggaaacgttttcgaggtctatgattccgcacttcatggtgtgtttgaaatctatgaagcttcagacggcaaatggctaacacgtccggttaaaagtgagtttgaaaaggccatagaaacagcgtctcaacttacctcagaacaacgtagagagaagctggctacagccaacaccacgccagaaagggtcattataaagagctataccttcaagcgtaatccactcgttgtagcagaggtattagccttagctggaggtaagtgtcaaagctgcctacgtgacgcaccattcaagcgggaagatggtagaccgtatcttgaagtgcatcatgtggagtggcttgctaacggtggagaggactctgttgaaaatgctattgcactctgtccgaactgtcaccgcgaagcacactacggcacgcttgtgttgaagccgactaacaataagtag

SEQ ID NO: 140834 - DNA, 1209 bp, Enterobacter cloacae
atgaaaaaaagatatatagatccattcactcctgacttacctatagattcacctgatcggttttcagggcgtagaacccaaatggatagtgtagtagattctctcttccagctttctaataatcagcccaggcatacgattattaccggcgatagagggatagggaaaagttcagtactaactcaggttaagaatatttctgaaggtgatatgaatttactcaatcgcctgaatatagatccgggtgttgataaatttgattttatctgcgcttggcatgattgctcaactgatcaaaatccttctattttagcttcaggaattttaaagcaattagaaaacaggtttaagagtgtttttaatggccttaaactcgagttgaatattgcggggatattgaaagtagggggaaaagattcttctgtagctacgattagcgagatatcagaaaagttttgttcagacttaactacagtatcgaatcaagctaaagataaaggtaaatcaggtgtaatattgttttttgatgagcttgatcgagttagacctgattctggagttgctacttttttcaaactttcggccgagaaattgtctcgtgataaagttaagaatattgctttctttgcagcggggattaccggagcgattcaaaaccttgaagaagaacatgcttctatatatagaaccttcaaggatgtgccgctgccgaaacttcaagagtcagaggctgatgaaattcttaaaacaggattcaacgcggttaaatgtacctatgatgcagaagtgatcaaaagcgtatttagactctccgctggctatcctgagccagtgcatctattaggtagccagttattaaaatcagattccgacaatcatttagactctaatgattttgaaaatgcaaagaacgaggtaatcgaaacacttagaaaaaataaactggcttcatcgttacaagcagctgggtcgggaaagtatcaggagatattaagggcgatggcaaagttcgaaggagctaatgttcccttaagttatatttcaaatgaaatagggtatgaacaaaatcaatatagcgcaaacatggggaaccttgtaaagagggatatcatatcgcaagtggatagaggcgtatacagttttatagatcctctgctaaaagaatatattagtcgatttggcgtaatagatacccaagatgatgtatag

SEQ ID NO: 140835 - DNA, 207 bp, Enterobacter cloacae
atgtttaattgtaaccagcgaaggaacgataactactttacaactatagacgcaacgtccgcttctggcacgcaacggacaggctacgtggtcattgggtctgctttgagcgaacagcagaagctcataaatgggtttattctcatcagaccggggtacacacaggattcgtgtgaccccggtattgaggtcagtccaatagtttag

SEQ ID NO: 140836 - DNA, 1392 bp, Enterobacter cloacae
atgcataatactccctttattgaattgaataaaaatgatactgaaatgggtaccacagaatctgaacgttatctttcgaaattagcgaggaaagcctttctcaatttttggagctattcgaatccatataccgatgaaaataaaggaagtgaactatgcgactttatggttgtctttgggaaagatatccttctcttttctgataaacactgtgaatacccaataattgaaaatgataaaactgcatggtacagatggtataggagtgcaattaataagtctgtaagacaattgtcaggggccgcatcgtttatcaaaagatttccaaatagaatattcattgattcagaatgtaaaacaccatttccaatcccgttgccttcatcagaaaatttaaaaatacatttgatcgcagtaacgcgggggtctgctgaagcttgtgcaaaatattgggggtgtggaagttccagtagtttagttatcaatacactaattgaagaaaaagctcacaaagattacccattcatgatagggtggcctttgggaaaaggcaagttcgttcatgtatttgatgagttaacccttgatattttacttaaagaattagatacagctgcagattttgttaattatctgactaaaaaagaaaaatacttgagtacaaaagatgttggttttgtaatatgtggtgaagaagaattacttgcacattatcttatgcacccactggataactatgaaggtttttcattcccttctgtgccatccttcaaggagatggtctgtattgatgagggagcttggcggaatttttatgagagcgatgcatactcctcctggaaaaaatttaatgaaattagttatgaatgggaccgattaatagaaagtcagacttcacatataaaacatggcagtgctgcagttttaaaaaacagtgacatatctatgaatgatattcaggcccacgaactagttttaagggcgatggcagatgaaggccgagccacaaggcaagtacttgcctctaattacaacctaatactaaggaatgaaactacagatgataggattgtcagaacaataattatgcccaatcgccgaaatcgagcctatattattctagttttaaaatttgactcctcgatagactattatgagtaccgtgagttaagaagagcatcattaattggtttttgccgagcttgcagattgcgacaagaaggggttgatgaagtaattgggattgcatcagaacagctggattcttcatttacgactcaggattttatacttatgaattttgaggtgaaactaacacaaaaggaaaaagagaaagaagtcgaagcattgaaatccatgggaatttggaaggatacttggatttatgtttaa

SEQ ID NO: 140837 - DNA, 204 bp, Enterobacter cloacae
atgccgagaccaaaaacacagagtgaacgcactcaaatcatttccaggatcattgatttggtgaaaaagcatggccgtatcacgacgaaagaagtcgttgggatgttcgatctgcatcgcaccaccgcagagaaatacatacgaatagccattgcacggggcgaattgatccgctacggtcgttgcggcattttccgtgactaa

SEQ ID NO: 140838 - DNA, 555 bp, Enterobacter cloacae
atgcaatacataacgtatgaacatcatatcaacatgaccaatgcttctttgaaatccgaaaatcatttccatatgaaacgcagggggcaaattagctgccgacgaatatttgaagcagtgcgggagtgggaatctactttgcccggccaggcgcaggaaaaaatcgctctgctggtggcagagcagtggacgaaggaaggtggccgcggtatcgcggtcaacaagcagaatttattccggtatctgaaaaacgaaggtggttcggaaaaatataccgcttacatcatgcaactgtcgggggcaatcgtcgccgctatgcccattgagatcgccaggaagcatggcctcagtaatgccagaacagaagctgagctggtggcgagtgcaatcaaagaatgcagtgaggcgcatcaggcgaagttgctgggcgcaccgctgcaaaagctggaaaaagaaatccgcgaggcggcaatcgcattattcaacatgttacctgctgacgcggcgggaccactactggcgagtatcagcgccgtagcgccgcaatttttttaa

SEQ ID NO: 140839 - DNA, 315 bp, Enterobacter cloacae
atggcaacccgtccaataagtgtttattggttcaaaaaccgcgaccaatatgattcctgcatagagttactgacagattcgtgggttctacctgacgattaccgggattggcttatccgtttcaatcagatgattgatcgttatgaacgcagcggtatcgaggttatcaaagtagaaatagagcccaacgagttcaccaactggtgcctcgccaacgggtgtgaaataagcaccaagagctgcaacgacttcgctgttttccatggcggaagccagtcgctccgctacagagattctgatgggggatatgagtaa

SEQ ID NO: 140840 - DNA, 897 bp, Enterobacter cloacae
atgcttttttatgccctacgtgtgttaatgagaccgcgagatcctgatcttttttccaagggaaatattgaaaaggacatctctcactttgaaaaagcgatagagataaccgctcaaaagcttcattcaacctctgctacaccgtctgttcataagaaaactagttacaccttgaaattaagtttaaagccgaccgaaggtgttatggctggcgtaatctcacgacagcaaaagatcaaaggacatgataaggattttcgtgaatttgatgtagacaactatccaccaatcgtttggatttgggacagagaagagcaagttctgctggttgaaaagaaaacggctgtctttaaagaccctaatcaagtagctaaggcttttgaagatctcagcaacaacgattatctagcgcaactcggcctaagggtgttcatcgagccctgccttgaaatggaagatttctggtctgaataccataatctgcaatttatagacaaagtaagctttaccttagttatgccaaacatttttggaaaaacaaaacaagctttgtcagacgatttacgtaagattgagaaagatacaaatgctaatgcagttacaactacttttgaaaacagagatggcaatctcaaacttaaaagttcgcattgggcgtcagtattggttgattgggtcaaagacggtggcggctcatggttgataaaaggtcgtaaaacaatcaattcaaaatcaaccacagttactagcaatcaaacagctaaaatcgtacttattgaaggtgagatatctgaaattgaactcaatggatattcatccagtgatattaaggacatcatagccttacataaagaaaggtacacattcaaaaatgaagaatttaggcgtctggattaa

SEQ ID NO: 140841 - DNA, 738 bp, Enterobacter cloacae
atgccaattccaactcaatcacagatcggcggcgagcagcagaccgcgcaggccattgccgattcggtgtctacccagatgcgcgtagcgatccccggcatcattcagtcattcgatcctgacactgttacatgcacggtagaggtggcgcttcgcggcattgttggcaatggctccactgaattgaaaccgctggttgatgtgccggttatcttcccgcgtggcggcggttgcacactgacctttccggttaaagaaggcgacgaatgcctgctgatctttgccgaccgttgcatcgatttctggtggcagagcggcggtgttcaggagaccgtagatccgcgacagcatgacttatctgatgcgttcgccatcgttggcccgcagtcgcaagcacagaaaatcagtggtatcagtaccagcgccgcgcagttccgcagcgatgacggcagtacctattttgagataaacccaacgactcagaaaattaagctggtggcacctggtggctttgatgttgttgctcctgaatctactttttccgccaaagtaaccattaccgggctgttgacctggatgggcggaatggtcggtagtcttgcaagcggcacagcagcgaagattacaggcgcaatcgaattcttcggcagccttaagtcgaacggtaagatcatcgatgatacgcatacccacaaaggcgttcagagtggtagcggtaattctggcgaggtgaactaa

SEQ ID NO: 140842 - DNA, 162 bp, Enterobacter cloacae
atggttgtttctgattttggcataaaggtatccggcccctatcgtgagaagctaaaaattgccttgcggctttttcttggcagcctgtatctcgctacgaaccacgacgttaccgtggttttaagcaagacctacattcagggctgcaaagaagataaatag

SEQ ID NO: 140843 - DNA, 891 bp, Enterobacter cloacae
gtgggtacaaataagaacggaattcgatatagcgcactttttctttccgggttgctcttatccgggtgcgcgagtgcaggctttaattccgcgcagaacgctgagtacaaaagacgtccaggatggcagccgatagtaattttatcgacagatgattgtcagacatggaaatctaaagggaagtcactaattgactggagtggcgagacctgtggtcctgacgggttgattaaggcaatcaataaaaagccggagaatataccagctttttatgctgcatatcatgagtacggcacaggtggagttagggctatcgatgtaagagataattctcagctaaattatctcaattttgtaaatgatttagctaagaaactttcttcttcggctgttgtatcaaagatttatgatgattatgtcattgatagaaaacccatggggcttgcagaggtttcacgagaaaattttgtaaaacagctaaatgagttatcgctgaagcaacccgccatctatcaaaaaatgaacgacgtagccaaggctgattacgagaaaagtagtaatgttcacagtaacgaaaagcttggcgtgaattacaaaacagtctgtggtccttatacgattgatctgtcttctgctgatggttgggccagaattaatggcgcaaaaccagagacgcaaaaaattagtctaatcggctctggtggcagcactaaaggggaaccggataacatcaagatggagtggatggctgccactaatcaacccggtcgctgggtcgggcttgagtacatcaagcgcaacggaaaagccattctcaacgcacagtggctgcaagccagcatgaatgcgccgcgtcagtatgcaacatacgactgcgtgaaggtgaagtag

SEQ ID NO: 140844 - DNA, 2268 bp, Enterobacter cloacae
atgagcggtaacgcagatacgattaaagatttccttgtttcgctgggattcgatatcgatcaggctggcgctaataagtttgaagccgtgctgaaaggcgttaccgcgaacgttctgaaggtcggcgcggtggtggaaggcgcagcgctgagcattgtcggatttaccactcagatcgcgaacggtctggataaaatttactgggcatcccagcggacgggggccagtgtccagggcatcaaagcgctgggatacgccgcatcgcaaaccggtgccagcgccgagtcggctatgtcctccctcgaagggctggccggtttcatgcgtagcaatccgggcgcggaaggcttcctgaaccgcctgggcgtccagactcgcgatgccagcggaaagatgcgtgatactgcggccatctttactggcgttgggcaaaagctcaacaacatgccgtattaccgcgcgaaacaatacgcgcagatgcttggcatcgatgaaaacacgctgatggcgatgcggcgcggcatgaatggctttaccgccgattaccagtcgatgctgcaaaagacagggttcaacgctgataaagcggctgttcagtccaacaaattcatgacgtccatgcgcgggcttacgtcgctgttcggcatcatgcgggacaagatcggctcaaacctcgctggtggcctggctggttcgctggacagcctgcggcggcgcatcctcgacaatttcccgaagattgaagagacgctgaccagagttattaaaggcgtgatctggcttgcgaacgccttcacgcgaatggcgtggcggctcatacagggcgctggctctgtcattgactggtggaagcgtcttgacgatggcagtaaaaatctgctgaaaatattcggtgctctacttgtcgcatggcgtctgcttaattctgcgttcctgaaatccccgattggaattatcaccacgctgattctggcgatcggattactctatgacgattatcagacgtggaaagaaggcggtaaaagcctgattgactggtccaagtgggagcctgcaatagaaaaggcgaaaaaggcaattctctggctgcgcgataagcttctggggctgaaagattctgttggtggatggcagaactcgctggaaattttggctactttcatcgctggggtatgggtaacaaaagtattgggagcattcgcaaaaatatccggtcttccgatacctccatggcttaaattatggggagcgtatgctggttacctggtttcagatcgtgaaaacataaaagccagtgctaaatcatctttggactataccaaaaggaacattggtgatgctcttgctacggttggcatcaaaaccgaccttgggcgaaaagatgttagcgaggtaagagaatggcccgcatggatggattggctgcatggtggcccaggtaagattattcgtcaggcgcaaagcaatggcgtcgtttatggcgataatgttcagcctgacattcccggggcggaacagcatgttcgtagtaatgaaattgccccgcatgaaagagatgaaataaaaaaccgtcagcaggctgctaatggttatcttgaaaaaatctcagacgggattgccaaaatcggtaatttatttttctccccggctggagctgctgaaatctctccaaatatatcgggtgacccctcccagtttgcgcaatcagtcaaacgtccacaggccacagcccagggcaaagtattgctcgactggatggggccaatgttcaataaactggagtcgctttatcagttgcctgctggtttgttgaaaagcgtggcgatcaccgagtcgggtggtaaccagttcgccatgtccggcgcgggtgcaaagggtttgttccagttcatggatggcacggcgcgagacatgggcctgcgtggtaacgatgtgttcgacccggaaaagtcagctcaggcagccgctaagtacctcagccagctgttgcggcagaacggcggagaccttagtaaagcgctggcttcatataactgggggatcggcaacgttcagcgctatggcatggggttgatgccgcaggaaacgcgcaactacattccgaaagtaatgagcaatatgcccaccagcgcaccggtgattcagcaggaaacgaacattaacatccacggcgtttccgatccgcgcgaggctgcccgtttgactgttgaccgtcaaaagggcgtgaattcacagttaacccagcaactccccgcaggaccgagataa

SEQ ID NO: 140845 - DNA, 372 bp, Enterobacter cloacae
gtgaacgagccagattctgaatataacggcattccgaataaagacttctttgccaatctgaaagcccaggcatggtggctggtagctgatcgctttcgtaatacgttcaacgcggtgaaaaatggagaggaatatcctgttgatgagttgataagtatcgattcatcgtgcccgcacctggagaaactaaagcttgagctgacgaccccgcaccgagactttgatcgtaacggtagggttatggttgaaagcaagaaagatttggctaagcgcgatatcccctcacctaacattgccgacgctttcataatggcgttcgcgccgaccgatacaacaatggatatttgggaattgctcgggaggcaagcctga

SEQ ID NO: 140846 - DNA, 249 bp, Enterobacter cloacae
atgtttatcgtcatggctccgttgtgtattgggctgatgaatggaaggcaaaagaagacgagcttcttaaaagctgccagcgggcatatcaggcagccacagagagaagtgctgatatcgtttatgactccattggtgttggcgcttctgctggtgctaaattctcggaaattaacgaagacagacgacgtgaaaatccttattcacgaccagttaattatcaacgcttcaatgctggcgctggtgtga

SEQ ID NO: 140847 - DNA, 783 bp, Enterobacter cloacae
atggcaaaaccggactggggagcactgcaagaccagttcctcgccgagcatgccaaaacaggtatttcccccaaagactggtgccaggctcagggactgaattactcgaccgcaaagcgctacatcaagattgcgaatggtagtgcgaattcgcaaaaaaaaattgcgaataaaactgcgaattcgcaggcaaaaaaaggcgataaggccagaggtagcaagccatctgatggtgattgcgaatcctccaatgctgcgaatcctccagatacgaaacccgaacgtgtgcgcaggaacgtagtcaccaaccaccctcctttccagcctggcaaccagaatgcccttaagcacggcggctacggtcgcaggatgctgctctctgatgcaatcaccgaagatgcgaagctgctcacgctcgacgatgagttgttctggctgcgcgcggcgaacctgacggcggcggagaacattgggcgctggcagactgagcttgaaatagctgatggcgataccgccaataatcttcacgagctaatttcatctgcgcaaaaagccatgcaccgtaacacggcccgcattgagtcgctggaattcacaaaggcatctatagagcatcggctcgcctccactgacaaagtgtctctggaagcggatcgccttcgtcgtgatgctggcgttgatgacggtaatggagatcgtgaccttaatgacttctactctgacatccaaaccgaccctgaatccggccctaaggaacttctggacgacacaggctcgaaataa

SEQ ID NO: 140848 - DNA, 435 bp, Enterobacter cloacae
atgaagaacattaaatactggcacgtgaagctgtatcaacacacacagaatgcaggccttatcatgggtgctgctgcagccgaaaggttgctgcatgaaggctactcaaaggatgaagtttcgcttcctcctcgtgatggccggatcaaattgctgacggaaccatgcggtattgaggtgaaaactgttcgtgccgatgccgtcgatagcattgtgtgcacgccggtttacgaaggcgaagatgaagcgaaagctgattcagatgcagcaaatgggcgttacaactacgacaccttcaaggcagcagcaaaaccgctgatccaatggttgaacgaaaacgccaaccctcacgcatcggtcattgttgattgcacccaggctgtgctcctcactggggagatttccttcatcacgaaagagttcctgaaagactga

SEQ ID NO: 140849 - DNA, 642 bp, Enterobacter cloacae
atgcgtaaaccatcccgccgtaagtgcaaagtatgcggcgaatacttcgtgccgaaattccacgatatccggatccgctggtgctgcccggagcacggcgcaatcctcgcgatggaagaacgcgaaaaggagatggttaaagccgccgctaagcgaattaaggagcagaaggaggcagagaaggccgggcgcaaacgccgcaaggagaggctggcagagctacgcccagcaggatactacaaagcgcaggctcagcaggcattcaacgcctacatccgtgcgcgtgatgctggtttgccatgcatcagctgcggcgagaccaacccgcctgatcttcatggcggccagtgggactgcggccacttcaaaacggtcggcgctaaccctgaactgcgctttgaagagcgcaacgcccataagcagtgcaagtcctgcaatgccggagcgggtaaatacaccgccaaagaggcgactgtcgcgcagcaatacgaagcgggcctggtagctcgttacgggcaggattacgtcgactggctcaacgggccccatgaaatgaccaactaccgccgggaagacttcatccggatccgcgatgagtaccgcgccaagctcaaagcactgaaacagcgtgaggccgcatga

SEQ ID NO: 140850 - DNA, 177 bp, Enterobacter cloacae
atgggtgagtggctgttaatcataaccctcataggcacctctggcgtggctattgagaaggcgaatttttctactgaagaagcgtgcttgaaagcagcaaaggcatggaatgacgacgtgaaaaaaatgacccgtgacacatatcaggtttgtgtaaagacatccggagcaggctga

SEQ ID NO: 140851 - DNA, 222 bp, Enterobacter cloacae
atgacacatcgcaaaatagtcaaccgtatgcgcaaggctcagcgtgttagcgcttcaaaaatgcatgagcttaatgaggtcggcatggtcggcgtacatggagtgaaggatgtggaaattcacaatatctgcgtggatgcccacaatgtgcatgttggaatctggaatcaactccagcgctatatcaaccaactaactcgcaagcccggagccgcccaatga

SEQ ID NO: 140852 - DNA, 435 bp, Enterobacter cloacae
atgaacgtgaaacgttatgagtgggtggcctgtgatgagcatgcgtgccattgcgacgtgatagagagtgctgaaggcgatatggttgattacgaagactacgccgcacttgaagccagatgcgcggcgctggctgcggagaatgcggagatgaaggctgtatgtgaagaccgtcgcatgttcatcatgaatggggtgcagttgggttatatccaggttcctacagtggaaacagacccggcacttgaaaccattcgcgttgctgtatcaccgcaagaaccaaccccagcaacggactctttcctggctgaagtgcgggcgcagggtgttgaagcgttcgccaatagtctgagggttgccggtggtcatgagcatccatattcagaggtagctaacgagttcgctgcccagcttcgcaaaggagtgcagtcatga

SEQ ID NO: 140853 - DNA, 1131 bp, Enterobacter cloacae
atgaataagataaaacaaaaagcaatgatcctggtcgccttcatcgtagcgggatatgggttgtatcagtattttcgcccttacaatccatcaccgcagacactgacgtcatcaaagcaggtagccatgaacaagataaacgctgaaatgaaaccttactgcgtcgggcgctatgtactcgacttaccatcgtccttcacggcttataatgactctgcgccgctggataaaaatatctgggctgcggtgatttcaagacccgaggatacgtataaaacctacctggcgacaaagaaaatgtaccatccgggttttaagcagttaatcgcattacgcgaaaatgctctgcgagaaactaaaacaattgacactcagtatatgccttttttaaaaaaagtctggtcgttgccggacggtatggatggtgttatttttgaacggaatgataatgggggtactgcagattttattcgaacactggaaggctatttatatactaatggcgtagttattaaatttcagaagcaaaccattaatgattcgagctctatatataatgagcaacgaagagggcgcccagccagaaactatgtcgcaaatgatatcagccagatgcagtcgctgatggcgagaattagcggcagggataatgacgttattccaacaaaaccaggttcctgtatcacccatgcgtttattgccaccgacccgacggcaagggaacaggaggatattaacatagggctcattagtgctactttcaacaatatacgcgttgcgctttccactgataattttacgtgtgaagaaaacacggtgctggaaagaatgggagaaataacaagcaatatttcccgttcacggggaggcatagaaagaaaaggggcctttagtgttaacggactgcaggcccaggagtttctggcaacgggcttgcaggaagacaacgatgaatcacgatataattttgaaatgtatattaatgaaatgacggccagttataagactccgagttttatactcactcttgataatcaacgcatgccgccaacctcctacagcaaggaggaaattattgccttctgggatacgatcagccgtagtgtacgtgtgcgccccggcgcgttttga

SEQ ID NO: 140854 - DNA, 771 bp, Enterobacter cloacae
gtggcaagaccaaaactgaaagcggaagagcgttttgaccagttggttaagataatcaatagtggtcaacctcttgatatttggacctttcgagaagtggtctcggagtatggctctaagcgtactccgcctgctgacacgcttgtagctttggctcatattgctaaaggtgatgtgagtgtcgggattgaaatgcttgaagctatcctcccacatgctgatgttaactttgcgcggattttttgtaagctgcttgagcgtttttctctactcgaaaaatcggactactacatctattctttagctgataagtatccaaccaagtggtttacttatagggctggtggcgttgcgtatttggttgggaaactatcaaaatgcgtagaatattttggacgccattgcaaaatgttatcccaggaagaacatagggatgacgcagaagccttcttgcaggaggtaattcacgatatggatgaagcatacaaaaagtcaggatgctcttcagaacaatacatgcaagttgcccttgctgttcatagagtcatggctgaattcccgccaactgaatatcgtgctgacatcaacggtgcatctggtgggacttatcttgttgaggtagtcaatgcatcccctgaacaggtggttgcaatgaatatgcgacttgcagatgaaatttgttcaatcgatttactcgatgattgcaatcttattgcacgtttttccgttgaaagaaatagcttgaaagggtgtaaatatgcctataactag

SEQ ID NO: 140855 - DNA, 417 bp, Enterobacter cloacae
atggcaaaaaaccaaagcctgccgacgcctgagaaattccgctctgacttcccgcagttcgctgatgaaaccaaatttcccaccacgatgatacaggcccgtctcgctctggcagatgttttgatgagcgagtcccggtttggggaggatattttcccctatgtcgttgaattgttcgtggcgcattacatgacactttatgccgctgacatgcgctcgtcgtctgtagggggcgctggtggtgcgaatagtggtgttcagacttcaaagtcagtggataaggtttctgtcagctatgacgcaagtgtgacgcttaatcctgatgccgggttctggaataacactcgctacggttccgaattctgggaatacctcatgatattcggtgcgggagcgatacaactgggaacaccataa

SEQ ID NO: 140856 - DNA, 282 bp, Enterobacter cloacae
atgaaaaaaatctatgtgctgtctgcgtttaactttaacgatggagccagcatcaaggcttttacccccgggtttcatgacgttgaaaatgacgttgctgatcactggtttgtgaaagcgcattgctcgccagatggcgaagcccctgcgctggcagatgatccgcgtattgctgatctggaagcgctggtggcagagcaggcaacccgcattgctgagcttgaggagcaacttgcagaggctaaagccaatggcaaaaaaccaaagcctgccgacgcctga

SEQ ID NO: 140857 - DNA, 942 bp, Enterobacter cloacae
atgccaatgacctttgatcaggcaacagtcgacagcactggtgcttttctggttcacgagctggagcgactcgaccagacgctgaacctgccgctgacctcccagacgtggagccgcgatatcgaactgcgtgaagatgtttctatcgcggatgagatgagctctttcaccaacaccacgtttgcggccgctggctctccgaatgcaaacggtaagaactggatcaaccagttagctactgccatctccgggctgaatgtcgatatcacaaaaacaggctttcctctggaactgtgggggatggagctgggctggaccgtggttgaactcgccgccgccgctcaggttggccgtccgattgacacccagaagtacgatggcatgcagctcaaatggaacatggacacggatgagcaggtgtatatcggagacgctgcaaaaggtgcaaaggggcttttgaacctgtctcaggtaaccccaacgaacgcggcgaaaacttgggcgacttctacccctgacgaaatccgcgccagtattaaccaggtactgagcaatgcgtggacccgttccgcatattcaaaagtcccggaagacttgctgatcccgccagaccaatattctttcctggcaagcactatcgtttcatctgcaggtaatcagtcactgctgacctatctggaaaccaacacaattgctttccaccagaacggcaagccgctgaacatccgccctgtgaaatgggccatcggccgtggcgttgcaaacaaagatcgtatggtcgcatacacgaacgataaaaagtttgtgcgcttccctatggttcccctgcagagcgtgccgatccagtatcgcggcatctaccagctcgtaacctactacggaaagctgggtgctgttgaaccggtctatccggaaacccttaactacatggacggcatttaa

SEQ ID NO: 140858 - DNA, 495 bp, Enterobacter cloacae
atggctaacaccattctttaccggatgcctgcgggcattgccgggggtatttcacgcccacaggatttaaccgtagaaccgcatattctcgatgcaactaaaccgttcccggcgtatgggctgggcgggaagattgtcgggggtaagtttgttcccatcgaggcagccgacccggtgacagtaatggcggggatttttgttcgcccttatccgacggcttcgcagcccgacaagattcgccaggttggcatcggctacaactttgccggcgacaacctgaaacgcggttatgtcacggtcaatatcggtggtgacgcctctgctgttgctctctatgccccggtatttatgcgcgtcggcactccgaccgcagcaagcccgctgggtgctttcctcgcggctgcggacgatacaaacaccgttcagatcaccaacgcctatttcaatggtcccggcgacgccgacggcaacattgaactggcatataacatttaa

SEQ ID NO: 140859 - DNA, 1203 bp, Enterobacter cloacae
atgaaatatttctttaaaacccgccttgggaactcccgttttcaattggccgatggttcgattcttttcaaagacgtacctatcgggcgaaccggagaacaggtttatggcgcgcaagagctgcctgaattaacccctgacagcgacgggctgattgttgtccgccgaacgcctgaagaggtatttagtgaacgcactatcgcgtcgttcgaggggatgaacgtcactataggccacccgaaagacttcggcggcaacatcatttttgtcacgccggaaaactggcgcaggctggcaaacggtcacattcagaatgtcagacgcggagagggggcaaactctgatctgctgctggctgatgtcatcgtcaagacgccggaagctattcaggcagttgaagacggagacgatgaggttagttgcggctatgacgccgactaccgtcaaatctcgccgggtgtcgcagagcagtatgcgatcaccggtaatcacctggccttagtccctaacgggcgggctggttcacgttgtgcactgggagacgctatgccgagcactactaaaaactggtttacccggcttttaaaggcccgtaaaaccaacgacgccgccgaaatggcgaacttgatcgataacccaccagaaaatatgactggtgataacgacgatgtaacgtcatccatgacccctgggggggtggttatcaacctctcacctcaaaacccgatgcctgcgccaacgctgcctgtcacgactgatgcgcaagaagatatccctgcgtggggtaaagcgctcattgaggccgtggcaaaactcaccccatccaatccagcgacggttgatgaagatgaagacgaaaaaggtgaggaggagggggcagttactggcgatgctgcttatcgtgcagatctgattcagccaggcatccaactcccgacgaaggcgaaaccaactgcgtttaaacgtcaggttctggcttctgccgatcaggcgctggttcgttccatcgttggcgatgcggatgtcaccggcctgaaaaaagccaccgtagatatggcgtttaacgccgtgtctgagctggctaaaaaccgcaataccgcagcgcagactgtcgacagtttccgcacgatgaccaccaacaccacaaaatctatcgcggaaatcaataaagccgcgaaagaactctgggctaaacgaggctaa

SEQ ID NO: 140860 - DNA, 1452 bp, Enterobacter cloacae
atggcgaaaaaaacaggaagagtcgccactgccgactcttacgataactttgtcgcgcgagttggcatgcagcagccaaatcagcatgcagcgtcaacttaccgagccaattacaccagccgcaatcgtctgctgttggaatgggcttatcgttcttcgtggatcatcggcgcagctgttgatgcaaaacccgacgatatgacaaaaaaaggtgccagaataaccagtgaaattgacccaaaacggcgggggattctggaggcccgatttgaagagctaaaactctgggagcggctgaacctgatcctgaaatggtccaggctgtatggtggtgccgttgggctaatcctcattgagggacaggcacccctgacgccgctggtactggataaagtgggaaaaggcagctttaaaggcctcgctgttctcgatcgttggatgattaatcctaatctcggacgacgcatcaagaaactcgggcctgagcttggtaaacccgaaacttacgaaatcgttacttctgcgcagggtattcccccctggacagtgaactatagccggttgattcgaatggatggaattaccctcccgtatcagcaggcgctcacggaaaatgagtgggggatgtctgttgttgagagagtctttgaccgcctgacatcgtatgacagcacgagcgttggtgctgcgcaactggcttacaaagcacatttgcgaacagcaaaaatcaagaagcttcgcgaaatcatcgcgatgggtgggaagccattagaagcactaataaaacagatggatatggttcgtgagttccagacaaatgagggaatgtctctttttgattcagaagatacttttgagacacattcctatacttttgctggattatcagaccttctgagtgaatttaaggaagatattgccggtgccgtaggcattccccttgttcggttatttcgccaatcgccgaaaggtttttcaacgggtgatgctgatctggcgaattactacgacgatatcggtgctcttcaggaaaacgtcttaagagcgcctgtcaggctcctttatgatgtcctccatcgttctgaatttggcgaaccattgccagccgattttgcattcgaatttaatcccctctggcagatgtcagatgttgatcgttcaaccgttgcaaccaacaccactaacgcgctggctactgctgtgcgtgaacttggaatgcctcctgcagccgcacttaccgacctcagggaaacggcgcgcgtgacgggtattggcgcatcaatcactgacgaggacattaacaatgcgaagtcccagtgggaggaggatgaatctgaaaccatccctccgccgacgatcggaaatccagtatcgaaaaagcctgttggcgatagcaaaccagataggtcagatcgtagatggtacgtacgatggttcacaggggagcgctga

SEQ ID NO: 140861 - DNA, 429 bp, Enterobacter cloacae
atgaagaaatttttcactgatgcagcaacaaaaataactttttacgcgctgctcgccgctttgctttttgctgttactacaggtgccggttctttattgagagttgttgccgctgcctactgggtgatcgtattgcttggcgcggtagttggtttgttagctctcattattacgtttggtgtcgagtattcaaaggatgataagtcccggcgggagggtattgaataccttgaacgctttgctaagcgcaagaacgcaatagcgagagtatggggatggttctgcctggtgctgggggcttccatgcttgcatacggtgggtgggtgtttacagcggtagcctacgtaatagcgtcattgtttgtgcgcctgtgctgttcgcttgctcgtgataaggtcgagaaactaaccgaaaaagaggtggcttga

SEQ ID NO: 140862 - DNA, 132 bp, Enterobacter cloacae
atggcgtctgcccttactaacagcaacagcattaaaactgacaaccgtgaactggaaagtgccccaatagtaagtcatgatttcttcatcacttttatggtgcactttttcacccataacacagcaagttaa

SEQ ID NO: 140863 - DNA, 498 bp, Enterobacter cloacae
atggacgctaccgaaactgaagagctggaaaaaattcgcaagaaggcaatggatgaagttacaagtgctcttcaggcgcttgaaaataagttcccgggtattactgagggcgcagcagcattggcggggtcaggcgtcggcgctgcggcttccttcggtgctctctatacgcttggtacaacgggagtgtcagcagcaggcataacctccgggctcgcaacagcaggatctatcgtaggcggtggcatggtggcaggaattggaatcctggctgcgcctgtagcagtgttagggattggcggatacgcgatagtgaaacacaggaaaaatgggaagctgaaagtcgcccttactctggccattaaaaagctctacgatgttcaggaaaagttaatgtcgaacgctgagtactttaaggcagaaattgctgtcataaagtcgcacatcgatatgcttaataaaaaagcccccaaagggggactgggcgcagcgaggtaa

SEQ ID NO: 140864 - DNA, 159 bp, Enterobacter cloacae
atggttctggtgctgttacacgtcccactgaggtttccttgccagaagtttatcaatagccgcctcatccgaaaccggtgcatcgagcatatcgataaactctgcatactgctcatcgttaaaattaaatacgcgacgatcgaggatcacattctctag

SEQ ID NO: 140865 - DNA, 453 bp, Enterobacter cloacae
atgacaattaaatttagtgttaataaacaagcgttttatgatgaaaatacagatgttatacccgatgatgcagtagttattacccatgagcagcacgtatcactgattaatggtatgaacgatggtgagagacgtgtttacatcggtacagatggggagttaacactgtcagacagcaagccatctcaatggcatacctgggacagtgatacaaatgagtggttcatttctgcggatgcgcaaattaaattagccgataacgaaaaatcccgcttaatccaggatgcaaacgactatataaacagtaagcagtggccggggaaagctgctatggggcgactaaaggataccgaaaaagctcagtacaacgcgtggcttgattatctggatgcgctggaggcggtagacacctcgaaagcaccggatattacctggcctgaaatccccgcctga

SEQ ID NO: 140866 - DNA, 138 bp, Enterobacter cloacae
atggggctttacaggagttcatcacatgtatattggcgttgcaaataccacatagtttggacgccaaagtaccgcttcaggatcctgaaagataagctgggtaaggagctttacaggacaatcttctctgcggaataa

SEQ ID NO: 140867 - DNA, 153 bp, Enterobacter cloacae
atggaatggttcgaagccgcagacctgatcgttaaaggtatggaaggcgcgatcaacgcgaaaaccgtcacctatgacttcgaacgtctgatggaaggcgctaagctgctgaaatgttcagagtttggcgacgcgattatcgcgaacatgtaa

SEQ ID NO: 140868 - DNA, 675 bp, Enterobacter cloacae
atgtgcggacgttttgcacaagctcaaacgcgtgaaaaatatctggcttatctggccgatgaagccgatcgcgacatgccattcgacccggaacctattggccggtacaacgtggcaccaggcactaaggttttgctgctgagcgaacgcgaccagaaactgcaccttgatcctgttttctggggttacgcgcccgggtggtggggtaagccgccactaattaacgcgcgcgtcgagacggcggcaactagtagaatgtttaaacctctctggcagcatggccgggcaatttgcttcgctgatggttggttcgaatggaagaaagaaggtgacaagaaacagcctttttatatccatcgggcagacggtcagccgatttttatggcggcgatcggcagcacaccgtttgagcgaggcgatgaagcagaaggttttctgatagtaacgtctgcctctgacaaaggcctagtggatattcacgaccgccggcccctcgtcctatcgccagaagcggcccgggaatggatgcgtcaggaggttggagggaaagaagcggaagatatagctgtcagcggtgccgtgccggcaagcaaatttatatggcatccagtaacgcgcgctgtggggaatgtgaaaaaccaaagtcatgatctattagaaccagtctcgctctag

SEQ ID NO: 140869 - DNA, 582 bp, Enterobacter cloacae
atgaataactgtcgtgattgtagaaatccaatacaccacggagctaaaaaatgtcaccactgcggaagctatcagaactggatccgtcacctcaatacgtttgctctgtttactggcttctttctgacactgctttcaatatggacaattccatttattaatggtgtttttcaatctaaacaggcagaaatagttacctctatcatatctggcgagtcaaataagcttcgttttatgatcgccaataacggcaatcagccggcagcaattacttctattgaaattgacagcaagatgagtttcgggataggtacatggtacctcgataatcagcttgatggcacactccttgaaccagggcaagctaaagtacttaatgcctcaaacggggcacctataccttcccctcttccctatgaaattcagacgattttaaattccaaagacgatgtcccaaaaaactgtactttagtcatccaatatgtcgaacttaatggcagcaacaaaacgtttacttatccttttacatgttcgcctgccgaggtatctcaatcccatggcggcctatctgaccgtcaataa

SEQ ID NO: 140870 - DNA, 1269 bp, Enterobacter cloacae
atgtttgcgctctgtgatgtgaattcgttctatgcatcttgcgagaccgtattcaggcctgacctgagagggcgcccggttgtcgttctctcgaataatgacggctgcgtaatcgcgcgcagcgccgaggccaaggcgactggaattacaatgggagagcctttcttcaagcaaaaggacttatttcggcgcgctggggttgtttgcttcagcagtaactacgagctgtacgcagacatgtcgaatcgagtaatgaccacactggaggagttgagccctcgcgtagaaatttacagtatcgatgaagcattttgtgacctaacaggtgttcgcaattgccgggatcttactgagttcggcaaagaaatccgcgctaccgttctgaagcggacgcacctgactgtcggggttggaattgcccagacaaagacactggccaagctggccaaccacgccgcgaagaaatggcagcggcaaacgggaggggtagttgatttatccaatatcgaccgccagcgccgattgctcgccatcgtgccagtagaagatgtatggggcgtaggcaggcgcatcagtaagaagctgaatgccatgggcatcaaaacagctctggacctttctgaacaaagcacgtggattatccgcaaacacttcaatgtcgtgctggagcgaaccgtccgggaactgcgcggcgagccctgtctcgagctggaggaatttgcgccggcaaagcaggagatcgtctgtagcaggtcattcggtgaacgcgtcactgattacgaacaaatgaggcaggccatttgcagttatgcggcccgaggcgcagaaaagttgcggggagagcatcagtactgccgctttatttctgcgttcgtgaaaacctctccctttgcgcttaacgagccatattacggtaacagcgcgtccatgaagcttctcacccctacacaggattcccgcgacataatcaacgccgcggtaaagtgcctggacaaaatctggaaggatggccatcgctatcaaaaagctggaatcatgcttggtgattttttcagccagggcgtggcgcagctgaaccttttcgatgagaacgccccacgcgctggaagcgataagttgatggaggttctcgatcatctcaatgcgaaagacgggaaaggcacgctctactttgccggacagggcatacagcagcagtggcagatgaaacgtgacatgctctcacctcgctacacaactcgttatgccgatttattgacggtcagatag

SEQ ID NO: 140871 - DNA, 1560 bp, Enterobacter cloacae
atgctttataacactggaaccattgctatcaacggaaataccgctaccgggacgggtacaaactggacggcaccagccagccaggttcgcgctggccagacgattatcgtcatgtctaacccggttcagatgttccagatttcatccgtgaacagcgccacgtcaatgacggttacgccagctgcttccccggtgttgagcggccagaagtatggaatcatggtgtccgacaatatctctgtcgacggactggcacaggcgatgtcgcagcttatcaaagagtatgacgagaacattggcgcgtgggagacgttcgcaacaacctcagccaaccagaacattgccgttacgatcaacggaacctccgtaactatccctggtatcggcaaactggcccagaaaggtactaatggtgccctgcctttagagcagggaggtacagggtcaacgactgcagaagggagtcgcacaaacctcggtttaggagacagcgccaccaggaacgtcggaacagaggccggaacggtggcagcaggggacgatgcgcgtcttgagtcaatagaaggtaaagcaggtgggactgtttctggtggcgttgttgcatctgcaggaaacatagtgggagttgcttcagggtctggcggaaataaggctattactttgggtaacgttgcttcagacggtccggttgagaattatgttaactggctttctggtaattactatgctggcacttggaggctaggcgctgtacgtggttcaggaactgatttatcccgcgtgcaaatgaatctctatgacggtataagctcaaatgctgatttccgctggactcctcgtggcatatatcaggctaattgtcaccttgctccgggtctcggtggtggtggcggttatctcgatataaatgaccagaacaacgttaataatgcattttcccgtactaacctggtaacacctaacgatgcagggtatgttccagcgctgcgctggagtacatatagctcaggaggttatcatgctactaccgctatgggttcaatcagcggcggcacggcaaactggcctgagatacagatcgttactcacggggacggtggctcggcaggtactcgtatctttgccttcagcctgaccacaggcgatattgctgtctcaggtaatggcggctttattggtaactatatattttctaaacagccaacatcagatgtctcgctgaaaaaagagatcacttacaatgatggccgtcagtcctacagcaatatcaaagccctgaaaccttctacgttcatttataaaaatgatgatgaaggcagagtacgtcgcggtgttatagcgcaggatgtcatgcagatcgatccggattatgtgaaagaggttccgggtagcccgtgcgaaaatgaagagggtgagattgttcgcggggcgggtactttagcgctggacagtaacgtgctgctgcttgataccgtgctggcattgaactacgtcattaaacagttagagacaacacagaaagagctccaggagcttaagctaaaaatagcggaatcatga

SEQ ID NO: 140872 - DNA, 363 bp, Enterobacter cloacae
atgaaacgattatttgccgtggcacttttgctggcgtctggctgtgccgacaaagacaaagactatgccttcagaatggattacccggtggatgcggcgcgcttatctctggggggagatattcacgtaaatatcgactgcgccacgagggtagttaacgtaatttcagacagcagcaatggcattttcagccgacatataaataagcggctcagcaacatctgttataagaaaatggataagcttgatgtcgtataccgcttcgaacctgcacaaggtgtgaagcaagacatgatcgctactcagtacccacgcgtcccgccggtatcaaataccgacaaactgagcgatgggaattcgtaa

SEQ ID NO: 140873 - DNA, 432 bp, Enterobacter cloacae
atgtttctgaaaaaagagaagttcacctggcaaacagaatccctgaccatcttcgagctgtcggcactgcagcgtattgagtacatcacgtttatggccgcagaggaaaaggccgtcagcgctgacagcgacggcatcagcgatcaggaaatgacggccaggctgattggctcaaatattcgctgcggtgcgcgtttgatcgcgatgtctttgtggcataacgatccgactggcacggatgtggaaacactttatcagcaggtgcttagcggctggccgccggaggcgatcggtaaagccgaaatggaaataaagctgctctccggcatgctcgttccggttgaggatgacaatcctgccgatccggatgcctcagcggaggccgaaagcgcagaacccgttacggcggaaaagcccttgccagcgagctga

SEQ ID NO: 140874 - DNA, 744 bp, Enterobacter cloacae
atgccaacaccaaatccacttgctcctgtaaaaggcgccggtacgactctctggctttacaccggaacgggcaatgctttcgctaacccactctctgatatcgactggaatcgcctggcgaaaatcaaagagctgacgccgggcgaaatgactgccgaatcgtatgacgacacttacctcgacgacgaggatgccgactggaatgccaccgcccagggggcaaaatctgctggcgatacctcgttcaccctcgcctggaaaccgggcgaagaagggcaaaaagacctggtcgcatggtttattgatggatcagtacgctattacaaaatcaaatacccgaacggtaccgtcgacgttttccgcggctggtgcagcagcctgggtaaagccattccggcaaaagaggtcattacccgtacagcgaaaatcaccaataccggcaagccggagctggcagaagaaagcgggaccccgaatatccccgtgaccggcgttacgctcgataaagccacgacaagcgtggtcgtgggcgcaaccacaacgctcaatgtgacggttaaccctgccagtgcctcagatacctcgttccgcgtggcaacctccgacggggcaaaagcaacggtcaccgttagcggcaacgcgatcaccgtcaccggcgtggcggcaggcaccgctgacgttattgttatgaccagcgacggtaatttcgtagcggtctgcaaagtcactgtaactgtagcgtaa

SEQ ID NO: 140875 - DNA, 399 bp, Enterobacter cloacae
atgaaacacactctcattcgccagaaaattattgatgtgcttgaagcggccatcgggatcgacgtcatgttttttgacgggcgcccggcagtcattgaggaggcggattttcctgccgtcgcggtctatctgaccgatgcggagtataccggcgaagaacttgatgccgatatgtgggcggcaacgctacatatcgaggtcttcctgtcctcgcaggtaccagattccgaactggatgaatggatggaaagccatatctatccggccctcgctgatgttcccggcctcgattcactgttaacgctcatggttccacagggcttcgattaccagcgcgatgatgcgatggggctgtggacctctgccgatatgaaatattcaatcacttacgaaatgtga

SEQ ID NO: 140876 - DNA, 585 bp, Enterobacter cloacae
atgtcgataaaaggtcttgagcaggcgattgctaacctggatagcctggacagaaatatggttcccaatgccagcgcatgggctgtgaaccgggttgctgctaatggcgtctcggttgccgtccgaagagtggcgaaagaaacggtagccggtgataaccgcgtttcggggatacctgtaaagctggtcagacaaagggtgagaatcaacaaagcctcggcatcagggcactcagcggcccgaattaaggttaaccggggcaaccttcccgccatcaaactcggtgccgcgcaggtcagggcgacgaaccgaaaaggcccgctggttcgaaaaagtagcgtgctgagaattggccgttatgtttttcgcgacgcctttatccagcgcctggcgaacggccgctggcacgtcatgaagcgcattgcaggaaaaagtcgttatcccatcgacgtggtcaaaatcccattgtccgcgcccctcactactgctttcgaagcagagaagaaacgcatgcttgaagaggaaatgccaaaacaacttggctatgccctcaggcaacaactgaggttgcatctgacacgatga

SEQ ID NO: 140877 - DNA, 354 bp, Enterobacter cloacae
atggctgatttcgataatctttttgatgaagcgatggcgcgcgcggataccactatacgtggagtgatgggcgcagaggtaaggataacctctggatctttatccggcgtcacgctccgcggggtctttgacgatccagagaacatcggtttcgcagaagcggggatcagaattgacggaaccaagccgacgttttttgtgaactcatcggatgtaagcgggctggaacgtctggacacgctgaaggtaaacgggcgtgaattttgggttgatcgcgtgggcccggatgattgcggttcctgccatgtatggctgggtagtggatcacctcccggcggatcgcggcgtcgttaa

SEQ ID NO: 140878 - DNA, 414 bp, Enterobacter cloacae
atgacagaaaaagaaacccttatcgcccgactgaaagagctgggcgtaaagcttgatcgtgaggtcaacgtcacaggcacaattcaggagcttacattacgtatttctgagctcgaagaggagctcaacgaagacggagaagagggcgatgaggtgtccgtggccagtactactgctggcagtacctcgggccagccaggcccagagaacacctctggctctattaccgagaatcctgcgtcaaatgagcccggcgagctggtggcggttgagacactggtaaccttgcacattgatgcacttcacgccacacgcaacgagtccctctctattgttgagcctggtgtcgttattcgcgtgaccgacgcggaggctaccgaactgatttctcaggggctggcccgggaagtctga

SEQ ID NO: 140879 - DNA, 1026 bp, Enterobacter cloacae
atgtcagtttacacaacagcccagcttctggcggtcaatgagaagaaattcaagttcgatccgctcttcctgcgtatcttctttcgcgaaacttatcccttcaatacagaaaaagtctacctgtcgcaaattccgggcatggtcaatatggcgctgtacgtatcgccgattgtctccgggaaagtgattcgttcccgtggtggcagcacgtcggaatttacgccggggtatgtgaagcccaaacacgaagtgaatccgctgatgaccctccgccgcctgcctgatgaagatccacagaatctggccgaccctgcctatcgccgccgacgcatcattcttcagaacatgaaagatgaagagcttgcaattgcgcaggtagaagaaaagcaggccgttgctgcagtcctcagtggtaaatacaccatgaccggggaagcgtttgagccggttgaagttgatatgggacgcagtgccggtaacaacatcacccaggcgggtgcagctgcctggtcttctcgcgacaaaaaaacgtacgacccgaccgatgatattgaagcgtacgcgcttaacgccagcggcgtggtcaacattatcgtcttcgatccaaagggctgggcgctgttccgctcctttgacgctgtgaaggaaaagctggatacgcgtcgcggttcaagctctgagctcgaaaccgccgtgaaagacctgggaatggccgtctcttataaggggatgtatggcgacgtggccatcgttgtgtactccggtcagtacatcgaggatgacgtcaaaaagaactacctgccggatctgacaatggtgctgggaaatacccaggcgcgcggtctgcgtacctatggctgcattctggatgcagatgcacagcgcgaaggcattaatgcctcaacgcgctatccgaaaaactgggtgcaaacgggcgacccggctcgcgagttcaccatgattcagtcagctccgctgatgctgctgccagatccggacgcgttcgtttcagtcaagctggcataa

SEQ ID NO: 140880 - DNA, 204 bp, Enterobacter cloacae
atgttgtattttctagtgtgggagatttactccgctgattggattttagtaaagaaggggaatgtcttccttcgattagaagaggggcaggatatagactctcaggttttgttaactgagatgggtattgctgaagcaaacaacgtcagccgtcgccagtgtgttgttacctcaatccagtcaatccaaaaactcgaagcataa

SEQ ID NO: 140881 - DNA, 255 bp, Enterobacter cloacae
atgacgggaagaggcattaacacagtacgtatcggcgatgaagtgaagcacatcaccgagctcgatgcactaacactcatgcatgaatggtcaaagcttacaaaagaaaatgcagacctgtatgactataaccgtcaggttaaccgggggtggcgcggctttattcttcgcctgatgggtatccatttgcctgacaaaaaccgtgtttgccttcatggcattaatgtcagaaaagaatccatctatcccgactga

SEQ ID NO: 140882 - DNA, 264 bp, Enterobacter cloacae
atggatgagaaagaagtgaatttttcactcagctatgagcagctgacccggatagcggaagagcgtattcgtgaatgcaatctggacagccagggcgcgatttacatcagcgagtcagccaaggccggtgccgtgctgagctattggtatgaactggccataaatggctatgcctcagtgaatgccataaagagacaagagctcatagacgccgatcacctgcgcctcagacaactcatctggccggaggcggacaagcaatga

SEQ ID NO: 140883 - DNA, 579 bp, Enterobacter cloacae
atgacagaccagaacaatgaagctcgcgatatgtgggccgaagcgttgagtttaatgtttaaaggcgatccccaggaagaattgttccggatttcagatgatgagattgatgccctggaggggttgtctccggacagatggccaacggcaggacagacagacattaactgggatctgtctgttccggggcgcagacattcgatttaccttcctggtccacgggtattgcagcctgctgactgtgaacaaattgatctcagttctctggtgctggggaaagcctcttttgctgattttgacccgcttattaattccttctttcgactgacagattccagcctctgggtggaaattaccaacccgaaactcggaaaggccatactgcatatcgcaaaaggatggcctgtttcaccggtcctgttatctgtgcacgaagatggtggacttcatttcggggacgggacccatcgttatgaggtactgaagcggtctggaacacctcatttttattttctggctatgccggatgatgtatctgccattaataagcaacttacggttcagtggatgagcgactaa

SEQ ID NO: 140884 - DNA, 1002 bp, Enterobacter cloacae
atgcagctggaagactatatctcggccgggcggctgaacatttacactgacgtgctgaagctgaaacctggtgaagaactgggcgggtataactggaacaaagccgtttccgccgccatgcagccgctgatgcactgccttgaggtgacgctgcgtaacgccatcgattacagtattcgccatgcccggctgcccggcgctgccggacactggcgaaccgataccaactggatctttgatttaccccgctatatcggtgacaagacctggatacgccagaacaagcgctacaaaatcgatgcccgtggccagaagctcatgcgtgacgggaaaccggtttatgaccggacagcctgggaagaagactgtatccgtaaggtgtcaaaacgtatccgtgctgcgggcaaggcgccgacggcagagcgggtgatctccggactggactttggtttctggaccaattttctcacgaaaaactacgatgaaccgcggaaccgctcgctcctgtggccccagttgcttccgtcggtgttccccggcgccccggccggcaccccccgtcacgtgctggaaaagaaatttacccgtatccgtgacttgcgtaaccgcctggcgcaccatgaagcagtctggaaattccaggaggaagatccggttaccggtgcgccggattacaaccgcccggtatatggtcttcaggcgtccctgcagctgttgcgtcgggcatggaaagatatgctggaggctctcagctggctcagtcctgcaaggcatgctgcgtttctggcagaaggtcatcatctgcgtttcgaggcactggccacgcacgatggtttgctgagtttcaccggacgggcacagctgatgcacgacctgaacgtgcggcgcagtaaagagatcagaaaattattgcgggggctcggacagcaaaaaatcatccgcctgaccagccgtacccggatcattgccattattggtcccgattttatccgtaccctctga

SEQ ID NO: 140885 - DNA, 582 bp, Enterobacter cloacae
atgaaagatgccaaatcaaaagacctctctgagttgtttaacaccattacggtgcgtaatgtgccagctgatgtggatgaagctatcacgcggcaggctaaagccgccggcaaatcaaagagtgattttgtgcaggagtttctgacggcaacatttggcgatctgatcggcaatttcatccgcaccagtgaactggttgccctgatggaccaggaaatggcgaggatggccggaacagtactgagcgagcatgtttatgatctggagatgactcaggccggccaccgggagttctgccgtattctcgggataaaaaacaacgatgatttgcagcgcattatgctcgcggggatgccataccttcagatccgcgccggacagctgagagggattgacagcctggcaagggggaactccctgtatgccgcactgctggtcaacggggcgtcccgggatgaagagacggtacaggcgcttcaccggtcactttttaatatgttcccggaaactgtttttcaggaaatgattaatgaactgcgaaaggcaatgcgcatggacgcttttgaatggtcgcttatctga

SEQ ID NO: 140886 - DNA, 291 bp, Enterobacter cloacae
atgaatgcggatgccgaaaggtatttcagcgatcttatcgaggccaaaaagtttaatggctatacgctggtcagcggagaagactggcagaagcccacagtcgacgaaatccagctggtcaggggacttatctcccttactgacagccagctggccaaccggctggctgtgaacgagcggacaatccggaagtggaaatcaggccagaccagtatggtgtacacgacctggtgctgtctgtgctggctggccgggctggggatgccgctcgataagattatcaatggctga

SEQ ID NO: 140887 - DNA, 204 bp, Enterobacter cloacae
atgactgtatttctcatcctcaccgccatcgcatatggcatctttcaaaccggctgcatcattcagttagtagtgaaggggtatcagggctggacattattctggaaaaactatgaccgtctcccccatatttaccgttctcactggcgatatcagagacgcttcattttcagacgcatctggaaacgtatcttcagccattga

SEQ ID NO: 140888 - DNA, 243 bp, Enterobacter cloacae
atgtccagaggaatgataatcggcatgaatatagagattataaaaaagataaataacagaatcgctaatgagaatacggctgcgcagcagaccatagcgaatagactcttgatgctcatcacctcaaagaaaacatcgagtctgtcaagacgactgaaatatccccagagcacagtcagcgcgatccctgatatgatgccagacggagttaataccgaaattaacagcgtcttccatttttga

SEQ ID NO: 140889 - DNA, 339 bp, Enterobacter cloacae
atggccattgaaacttttgcatggtgcccaagaattaacgctgaggctgatacgtcattccggacgaggaaagcgaagtttggcgatggatatgagcaggtgtctggtgatggattaaacgccagaagtcaggagtggacgcttaatttcacagggaatgaatcctatatcgaggccataaagacttttcttgacaggcacggcggtaccaaagcgtttcagtggaaaccgccacttgaaccattagggctttatcgctgtgaggcgtataaacctacggggcttggcgccgggaaatttaaccttgaagcaacattcatacaggcattccgaccatga

SEQ ID NO: 140890 - DNA, 423 bp, Enterobacter cloacae
atgaagaagctgcttttaatcatggctttatttggcctgtctgggtgtgctactgaagctgttttgcccagccaagcaaaacaagcgccagcagaaagggtgttaaagtatcagcaaactttgaaaaatactgacgccacgttaatagtcgtgcgggataaggggtatttaggtagtgggtgctttacaggggtctacctaaataatgataaggccgctattttagatccgggtgaaaaagcagtcttccatttgcctgctggtgagtggagtgtagccatcaagggagaaggcaaagtctgtatttctgatgcggtgccagtaggctgttacgtacagctaaaggcaggagaaaccaaagctgtgcgattgtttgctgatccgagcgggaatgttgatgtcaaacctctgccattgcagtga

SEQ ID NO: 140891 - DNA, 600 bp, Enterobacter cloacae
atgcaagagaatctgatacgcattgagcttggaggagtgctggggaaaactttcgggaaaactcatgaacgtttggttcgaaccactggagaggctgttagggccctatgttgcactatacctgggtttgaagcattcctgaataacagcaaaagtagagggttgacctatgcagtctttaaaggcaaaaaaaatattgttcaagatgatttaggtcttcctgtttcagaatctgttgtgcggatagtcccagtggtgattggtagtaaaaaggctggggtgttacaaactattttaggtgctgttctcgttgtagcaggggtgatagtaacaggtctttcttggggatatgccgccccagttggtggcgcaatgattagttcaggcatcggactaatggcaggtggagtaattcagatgctctctccacaaaccgctgggctggccagcaaacaggatgcagataaccgggcctcttatgcgttcggtggcgtaacgaataccgcagcgcagggatatccggtgccgctgttatacggccgccggcgaatcggcggggcgattatttctgccgggatttacgtcgaagatcagcagtaa

SEQ ID NO: 140892 - DNA, 3177 bp, Enterobacter cloacae
atggcaactgcaaccgcaataaggggccgcaagggtggcggatctaaatctcgcacacctactgaacagcctgacgatctccagtctgttgcaaaggcaaaaatattaatcgcgctgggggaaggtgagttctcaggacagttaaccggtaaagaaatttatcttgatggtaccgctattgagaatgctgacggctcccagaacttcagcggtgttacctgggagtttcgtcccggcacccaggcgcagaaatacattcagggtatccccggcaccgaaaacgaaatcagcgtggggactgaagtttccagtgctaccgcctggacccgtacatttaccaatacccagctttctgccgttcgtgtacgcctgaagtggccttccctttaccagcaggaagacgacggcgatctggtcggctattcggttaaatatgcgattgacctgcagaccgacggcggcgcctggcagacggtactgaataccagcgtaaccggtaaaaccacatccggttatgagcgtagccaccgtatagatctcccgcaggccggcagtacctggacgcttcgtctgcgtaaaatcaccgctgacgcgaacagcgcgaagatcggcgacacgatgacgctgcagagcttcaccgaggtgattgacgccaagctgcgctatccgaacaccgcactgctgtacatcgaatttgactcaagccagttcaatggctctattccccagatttcatgcgaaccgcgtggccgcgttatccgcgtgccggatacctacgatccggaaacacgaacctacagcgggacctggacgggggcgtttaagtgggcatggactgataacccggcatggattttttacgacctggtggtgaccgaccgcttcgggctgggtgatcgcctgacggcggcgaatatcgataaatggacgctgtatcaagtggcgcagtactgcgatcagatggtgcctgacggtaaaggcggcagcggtaccgagccccgatatacctgtaacgtctatgttcaggaacggaacgatgcttacaccgttctgcgtgattttgctgccatattccggggcatgacctactggggcggtgatcagattgttgcgctggcggatatgccgcgggatgtggattacagctatacgcgcgccaacgttatcgacggccgatttacctacgcaagcagcaccacaaaaacgcgctataccacggcgctggtatcctggtccgatccgtctaacgcctacgctgatgcaatggagccggtgtttgagcaggaactggtggccaggtatggattcaaccagctggaaatgacggccatcggctgcacccggcaatctgaggcgaaccgtaaggggcgctggggcattctcaccaacaacaaggatcgtgtcgtttctttcgatgtcggcctggacgggaacatcccgcagccgggttacatcatcgccgtggcagacgagctgctttccggaaaggttatgggcggacgcatcagcgccgttaacggtcgcgttatcaaacttgaccgcgtggcagatgcggcagcaggtgatcgccttattctcaacctaccttccggtgcatcgcagagcaggaccattcaggccgtgaacggtgaatcagtcacagtcaccacggcatacagtgagacgccacaggctgaagctgtttgggtggttgaatctgacgagctttacgctcagcagtatcgcgttgtcagcgtaagcgataatgataatggcaccttctcgatcaccgccgcatggcacgatccggataaatatgcccgtatcgatactggcgcaattatcgaccagcggccaataagtgtaatacctcctggtaatcagtccccgccagctaacatcgtgatcagctcgttttctgttgttcagcagaatatcagcgtcgagaccatgcgcgtcagctgggaccaggcgcagaatgctatcgcctatgaggggcagtggcgccgtaacgatggaaactgggtgaacatgcctcgcagctccaccacgtcatttgacgtcccggggatttatgccgggcgctacctggtgcgcgtgcgcgcaattaatgccgctgaaatttcctcaggatggggatattcagaagagaagacactgaccggcaaagtaggtaatccgcctaagccagtaggattcacggccacgggaattaactgggggattcgtcttaactggggtttcccggcaaataccggtgatacgctaaaaacggaaattcaatacacagccaacagtgacttttcagatccattattgctgtcagatgtgccttatccatccgctgaatatacccagctcgggcttaaggctgggcaggaattctggtaccgcgcgcagctggtcgacagaacaggtaacgaatctgggtataccgactgggtaagggggatgtctaacgataacgccgatgattatcttggagatatcgcagacgatttcctaacctctgccgacggggaacgcctcaccggtgacatcgataccaacattgagggaatactgcagaacgccctggcgaaccacggaacagttgagcaccagtgggcacaatacggggaagtgcgtgccgatattctggttgttaaaacgacgattgctgaagttgatcaggcaatggccgaactttcgacgcaggtgcaggcgcaaattgaggatgttaccgcttccctggaagacaagcttacagccgtcgtagatgcctccggtgcttcggcaatctacaccctcaaaacgggcgtgagaataaacggggtgatgtacaacgccgggatgtctattgcagtgcttgcagaggcagggaagccggtagtcacgcgggttggtttcaacgctaaccagttcgtgctgatgagcggcagtggtgatacccagtattcgccgttcgcggtggtaaacggtcaggtgtttatcagctcagcgtttattcaggatggcacgatcaccaatgccaaaatcggcgacttcatccagtccaacaattatgttgcagggtcgcagggatggcgaattgataaaggtggcacgctggaaatgaatggtgccacatcagggcagggcagattaacgctgaataatacccgtatggatgtttatgatcagaatggaacgcttcgcgtaagaataggacaattatga

SEQ ID NO: 140893 - DNA, 618 bp, Enterobacter cloacae
atgtcatatggtatgcagattttgcagtcggacggaactctatggctaagccctgaggtaacaccgatgaatcttattgataagggtgtcatggctggaattaatggcgaggtatttcagacgcgcatcccatcaggcgtaccggctatcttctttgtaagaatgcagaatgaattgtacgcatcattcagccagattgaccaaaacggatacaactcactcaggattgatgttaatgcaggtgtggggagtatccatatttatgcttttgctgcgatggtggttgctcctccagcatttgggatcgcgatgtatgacgcttcaggtaaaatgatttatcacggaaatatgaggccacttgagtgctatcaggttgcaagtcagggaacaaacacccgtattgatgttggatatcttgccgccgtgtgtcctgtgcagatgtcagtatattcagttgttaactcatcggttggtggatggaatatattcgtatcttcatcatcagcaagtggaagcattgtttccacgccaagccgacaagttgcaaacacatctggtccggcagggttcatatggagcaattcaatgttggtcattaatgcatcaaaatatgattaa

SEQ ID NO: 140894 - DNA, 330 bp, Enterobacter cloacae
atgagcaacatcgacaaacagactgactcagtaagtcgaatcattgctgacttaaagcttaaacatgggtctggcgatacttgcgcaccgattatgcgctggcatgaacttctggcgctgctggatgagttggaagccgcagagaagaggattgctgaactggaggcggtgaagtgcaaattgagcgattcgaaattgctctcactggcgaaggatgtcgttgagaacctggttgatacgggcggttcggatccagagtatacccagcaatacgttgactggacattaaaacgcatccgcgccgcagccggtaaaggagaggcatcatga

SEQ ID NO: 140895 - DNA, 258 bp, Enterobacter cloacae
atgagcattctggacattctaaataccggcctcgctctgatggggtggctgttcatcatgttcaaaactggacagtggtttatctcagttgcgctaaagcagtgggacaagcgcagaaagctatctcgtcgacaaaaagcagtaaacgaattttacgatgcgtttgacctgtccagcatcgaaccaggaacgacagttcgcctggcaaccaaaggcgatctgacaatcatgatgtttcgccaggaggccgcccaatga

SEQ ID NO: 140896 - DNA, 324 bp, Enterobacter cloacae
atgaaacctgaattaacgccgcgtcagaatgaagtttatgaagctatcaaggttcacattgaaaaagttggctttccaccaacgttgatagagcttgctgaacttattggttgctcatcgcagaacgcagctgctgagcatgtgaaggcgctaaagaaaaaaggttacctctccattgctcctggcgctgccaggggcattaccgtcgtcaaaacagaattggatgctgatccggtagcgatcattaaaggcctgctatccggtggagacatggccagagataacgctgttgagtggctgaaaaaacagggagtgagtttatga

SEQ ID NO: 140897 - DNA, 390 bp, Enterobacter cloacae
atgaaactggtgctgccattccctccgagcgtaaacacctactggagagccccgaacaaggggcctttaaaaggtcgtcatctgatcagtgtcaaaggcagggcatatcaaagcgctgcctgcgtggctatcgtcgagcagttgcgcttccttccaaaaccgtcaaccgcacctgctgctgtcgaaattatgctgtacccacctgacgaacgccgccgcgatatcgataactacaacaaggctctgtttgacgcgcttactcacgctggcatctgggaggatgacagtcaggtgcagcgaatgctggtggagtggggccctaaagtacctggtggacgagtagagatatcgatcaagaaacatgaacctctggcgggtgcagccgcctga

SEQ ID NO: 140898 - DNA, 423 bp, Enterobacter cloacae
gtggaaattagcgcattcgtaccggctggctctgttgagctggcccaccagcaagctctgacatgggtatgcgatgcgtatctgttttatctggtcagcctgcaccgccgcccggtttatcgccaccagtacggtgatatttcgcttaatcagccagcattacaggaattcatcgattcgtatctggaaaacaaaggctgggatatggaaaaacgccgggcccattacatcaacattctggaccttatcaaatatatgcatcgcagcaattcggacttcatcgactggggaacggtgccatcactaacacctcgcgggctgcgctggatgaatgcctgtttttcaagactgggagaaatggttaatgcctgtggtggttgggattacgttgaaacattggcagacaggaaggtgaacggatga

SEQ ID NO: 140899 - DNA, 408 bp, Enterobacter cloacae
atgcagaaagttgactacatcgtgacatttatgggggattacccctgcggtggccgccatccgcttacagtaaaaacaaactcctttgatgtgtcaggtgctatttgtgctgcaactgaatctatcgttgatgaccgtatagaggcaaccaacttggtgctgatctccgttgtccctgattcgtatcctccagccacagacaatatgaacagcgacggattgctcaagccctgtcccttctgcggcaacccaaacgtgagcctggtcgaaaccctgcctgaagatggtgacgaaaatatgtacctcgttaactgtggctgttgcaacgcttcccagttgcctgacagcaaacagcgagccatccatgactggaaccagcgtgacatggagagcagcagtggaaattag

SEQ ID NO: 140900 - DNA, 798 bp, Enterobacter cloacae
atggcaatgaaaactgaattagcaccagtagcggctcgcgacttgcagatcatcgagtatcgcggtcaacgcgtagtgaccactgagcagctggcggccggatatggtgcgaccgagaagatgatcagtaataactattctcgtaacgaatcccgcttcgttgaaggtaaacactacttcaaggttgagggtgaagagctgcgggggttgaagaacagaccctctttaagtgggttagttggaaagaatgcccgctctctgattttgtggacggaacgtggagcggctaaccacgcaaagatgctggaaaccgatcaggcgtggaattacttcaacgatcttactgagttttatttcagctatagggaggcaacttatctgcctgccccaactgagctttcaaagctcgaaatcctcaaaatggcaatagagtccgaagaggggcgactggcagaaaaagaacgcgcagatcatgccgaaagaaccaaagcccagattagccgcaaacgcgaagcctcagctctcggaaagctcagcgccgcaacacgacgctgccgagatctggaagaacaactcggtgaaagcgaaaaacacgcaaccattaccaaagtagaaaaggcaacaggtcgcaaaggtgaatttaaattcgccccactgcgtcgctggtgccgagataaaggcattgaagccaagaacgttcctgacgaacgctacggtagcgtgaagtcatggcctgcgggtgcatggctggctgtttatgggatcgaactcaaatcactcttcggggagaaaaaataa

SEQ ID NO: 140901 - DNA, 504 bp, Enterobacter cloacae
atggcagaaaataacgacagcatcaagcggcttgtcgccaggctgaaagatatccacgaaaggacaggtatgaatttccctgcatggatgatggatgaaaatcgcagcggagaccacgagcttagtgctgccgagcagcatgaatgggctgaaatcatctgtgagtccatgcgcggaactgtcgccctcctctacctgattgaatgcgaaaagcgctgggggctgcgtgagggtgagtatgtgttcagaagtgaagagagagtcttaggccttacaagagcgctgattgagaacgtactaatcaagtacgtggaagaagaccttctcctgcacaagccaacagagcgctatatggccgtgttccagttctactgggcaaatgagcagcgcgttcaagcaggtgaagcgtcatggttcaacgaattcctggatgggatttttttagatgtcgcgcgccggttgcgtgccggtgaaaagcctccagtaaaaccaattttgcattaa

SEQ ID NO: 140902 - DNA, 225 bp, Enterobacter cloacae
atgggcgtatttaaaagacatgatattcagtgtgtgaatatcaaagctgagcaactggcgggcctatctcaaacattatttgaacatcgagacaatctcgaccactttcaacttaaaacgatttgcgctcttgtttatgacattgcttctgacattcataactggacagaaaaagaagaggaaattgttatgagcttagaggaggaggcgcgccgcaatggataa

SEQ ID NO: 140903 - DNA, 348 bp, Enterobacter cloacae
gtgaatgaagataatatctacgccttgctttctaccctggcagagggaagggtatacccctatgttgcgccattaggtagtgacgggaaaccgtctgtctctccaccctggattatcttttccatcgtcgatgatgtttccgctgacgtgctgtgtggccaggcagagagcagggtttccgttcaggtcgatgtgtattccacttcgatcgctgaatcacgatccctgagagatttggcgctcgcttcgcttgagccgttaaatcctacagaggtggtaaaaatccccgggtacgagccagattatcggctctaccgtgccaccctggattttaaagttaccccctga

SEQ ID NO: 140904 - DNA, 3504 bp, Enterobacter cloacae
atggcaaccttacgcgaattaataatcaaaatttccgccaattctcaatctttccagacggaaatttcccgcgcctcacgaatggggcaggattattaccgcaccatgcagaatggcggtcggcaggccgccgctgctgccagagagagcgaaagggcgctctctgatttgaccgccggatttgcatctgctggaagggctgccgccgcagctacggcagcctttgcaacgggtaaaattgtgcagattgctgatgaatggaactccgtaaacgctcgtctcaaacaggcatcatcttctgctgatgattttgccgcttcacagcgtcagttaatggaaatcagccaaagaaccggcacggcattttcagataacgcaaaccttttttcccgcgcagcagcctcaatgcgcgagtacggctatagctctgacgaagttctgaaaattacagaagctgtctctaccggcctaaaactttctggggctaacactcaggaggcgagttctgttatcactcagttcagccaggcgctcgcacaaggcgttcttcgcggtgaagaatttaatgccgttaacgaagccggtgatcgggtaatccgcgctctggctgcgggaatgggtgtagcccgcaaagacctgaagagcatggctgaccagggacagcttacgattgataaggttgtcccagcattaatgagccagttaggagcgttgcagggcgaatttgccagcatgccacaaacggtttccgggtcacttcaaaaagtaactaactcattcatggcctgggttggcggtgtaaaccaggctaccggtgctactgatgcgttgtctggcggattggataatgttgcccagacgcttgattcttttacctcatcagcagtgagcggcacactgaatgacgttgctgacaacatgtccacaataacaacagtggctggggcgctagttggcgtggggcttgcacgctatctaagcggagttgtaaccagcgccacgagtgcaacaggtgcgctaatttcagccgctaagtcagaggttgcacttgctgttgcgcaggataaagcagctcagtctgctgttgcagcttcaagggcagaagtttatcgagcccagcaagctgttcagcgatcgcgaagcgcagatgttcaggccgcccagcaagagaaaattgcggcggcagaggcaaaagttacagcagctcaagccaggctgaataccgctcttgcaagtggcaccgccacagaaaaagtcagggccagaactgcgcttgagcgtgcgcaggcaggtctggtggctgcaaaaaatgccgacgctcaggctattgctgaaagacgactggcttctgcggaggcggccagagacaggaatctggcaaatcgcgtctccacccagcgaaatctcaacaatgtaacatcagttggtactcgcctgatgagtggtgcgcttggcctgattggcggcgtgccgggtctggtgatgctgggagcaggagcctggtatgcgatgtatcagaatcaggagcaggcccgtcgttcggcgcaggaatacgccaccacgattgatgaagtcagtaaaaagtcgaaggcaatgtctttgcctgaagcttcagacaatgctgagaagacgcgcgcagcattgaatgagcagaacaggctgatagatgaacaaaagagcaagatcgaaaatctgaaagagcagatagctggttatcagtcagtgatcagtaatcccggtccaacgaccagcggtggtttcatgattaaccaccttacatctttggataccgtgacccgtggactggctacagccactgaacagttatctgttgagcaggaaagacttgctcagatgcaggagaaatctgcatctatccaacaggttcttgaaggtcttgagcatcggcgtgtgacgttaattcgggaggaggcggcaaatcagaaccgggcttatcaatcacttctgttgatgaatgggcagcacgatgaacttaatcgattgctcggtctgggtaaccaactccttatggcccggcaagggctggctaacgtcccgctcagactccctcaggccgacctcgacaaaaaacaaaccgatgccctcgaaaagagccgccgggatctggagttgtcacgcctgaagggtgaagcaaaagagcgcctgagactgagttatgcagccgatgacctggggttaaccagtgatccgcaattccagacaggccgtcaggagttgattaataacggtcttgctgaatggcggaataatgaggccaacaaacctaaggcgaagggcggtaaaaccgaaggcgagaaaaccgaggatgtgtataagcgccttatcaagcagcaaaaagagcagattgccctgcaaggccagaatactgaactggcgaaggttaaataccaggtcagccaaggcgaacttgcttctctgacagaagcccagaaaaagacggtattgcagaatgctgcgctgattgaccaggttaaattacgtgagcaactgcgaaattacgaagccaaccttgctgacagtaacgcaagcgcccgcgcagccaatgaagcgcaactgctgggctacgggcagggaaccaggttccgtgaaagacttcaggagcagttcaatctgcgtaaggagtttgagcagaagaataccgatcttctccgccagcgtcaggctggtgaaatcgacgagacgttctatcagcatgggctggcacttaataagcgctacctcgaagagcgcctgcgcgaccaggagggatattacgcagcttctgatgcgcagcgtgacgactggatgacgggactgtctgagggttatgcgaactgggtggacgaagctactgattattcttccatggccgctgacggcatgaagcaggccatgggtggcgcggtcaccacgatcaccgacatgctcaatggcaacgttgacagctggaaggactggggcgtgagcgtactgaagattatccagaacgttctggtgaacatggctgttgctaatggcgtcagctcaattggatcactgttcagttttggtgcctcgtcagccgcaaccgccagcagcggtaccgctattcagaatgctggcgcgaactttacctttaatgcgaagggtaatgtttacgactctccgtccctgagcgcttacagcaatggcgttttccagacgcctcagctgtttgcttttgccaaaggcgcaggggtttttgccgaggctggtccggaagccattatgccgcttacgcgcgccgctgatggttctctcggcgttcgtgcggtcggaggtggcggaggtcagtccgtatcgtcggcgccacaggtttatatcaccatcgatggtaacggcaacactcaaactcaggcctcgccaggccttgagcaatttggtgccgaggtcggggaatttgttgatcgtcgttataagcagaatgtgatgcgtgacattcgtcccggcggcgacatctggaacgcaatgaaaggaacccgataa

SEQ ID NO: 140905 - DNA, 171 bp, Enterobacter cloacae
atggcactctatggaaagattcgctttgctggcgtgtatcgcctggcaaggttcaccagccggatcggcatcactgatacccctatcaaaaccgatacccctatcaactctgacaggagtacccctatcaactttgatacctctacccctatcaagtctgatacccgataa

SEQ ID NO: 140906 - DNA, 186 bp, Enterobacter cloacae
atgaaatacttcgatattgatactactgtgctatctctcattaaaggggaagtgacacgccaccagattaaatcactacgtaactctaatcgtaagcagggctattcagaacgcgccgagtttttcacggaagtgctacgccgcttcgatttaatcagaagcgcaacaaaagaaactaacgaataa

SEQ ID NO: 140907 - DNA, 168 bp, Enterobacter cloacae
atgagcgacattaaaaacgcgaagaaacaaccacgcacttgcctacacattcctgatgaaactttccaagccttatttaaagaggcaagaagcaggagaatgactgttacagactatatccttgacgttctgaataaagaggcaaccaatcttaacaagggcaagtga

SEQ ID NO: 140908 - DNA, 624 bp, Enterobacter cloacae
atgacaaaacagattacgccatttctgatggtagattatgaactacttgaaatcacaaccgtagaagttaacggcgaaacaaaagaagtaaaactccaccacaagattgtatattcctacctcaagagcctatccggtacgttcaaacaagtgacaccttctttaactgggatcggtaaacggctcggcctcggtacagatcaaacagtacgccgccacattaaagaccttgtttcttttggatggctacatgtgaaagagcgtccagggtgtacaagtatcttcaccgttctaccgtatgcaccagaaacgaaaccagaagccttagaagaagcgccactgccgacaatgaccaaagtcatagaggaagctgtgatcgtgcctgagagcgtccctgaaagcgttacagcggataaagcatcgcctcgcatccgtacttctgacgcagtgaaacaactgtttgaaaatctgtcacaacgacgagaggacgagagcttttattcttggtcatcaagagtgcttcaacgaatcggaatagatcattcaatgggaatagaacaactgtttcaggaaactcacccatatgaatacaaccagattgaacaatcaacgataccattttaa

SEQ ID NO: 140909 - DNA, 384 bp, Enterobacter cloacae
atgagtacaagacaaagaaacaacttagtgcgtattgagaaagcagtacgcgccagcaaacgtaaatacagccgtcagttgaaagaacatgcaactgaatccatccctggggagtggatcaccgaaataatagaataccctgcaacggtgccaaccggatcagagtttgaactattgcaggatgttttagcctcttcggataacgtcttctataaaccacgccgccgccgtgaataccgtgttgattcatcgaaccttaagaagtggcagttatacgcagaaaactatattgactggcgggaatatatccgcactaacgggctatcccaccacacacaagactttgacattctctttgacgataaggaaatcacacatgactaa

SEQ ID NO: 140910 - DNA, 345 bp, Enterobacter cloacae
atgactaatacatacagcaccattgaaactatgattctgaattttgaagatgattggcatctgccaacattgtctttagtgaatcaggcgcatgtatcaggaacgccctccgcgctcttggaagcggtgcaacacactgaacaggcaatcaccgcccttgaacatctgcaaacgtctgtagctcgtttggtgcagcgtgacggcagtacgatcacaccagaagaagcctggcgtgtagctaatgaccttgaagagctggcttgcagcctccagtggatcaccgctgaactgggagagcttagcctcgacattgccaaggtttatggcatgattcagcgtgaataa

SEQ ID NO: 140911 - DNA, 240 bp, Enterobacter cloacae
atgtttctaaactatgatcgtgtaatcaagcataaaggcgattctattactttgtctgtttctctcatgaaacaagctgctgatattttcggtgtgagtattgaagagattcaaaaactaacagagcaatggtggcctgtgtcccagattactaaatcaaactcctctaaagatgacattcaaaatgtaaggtcatcgaaagggttacaagaacgattaaaactattaaaaggaaaataa

SEQ ID NO: 140912 - DNA, 1326 bp, Enterobacter cloacae
atgcttgatctgaatgttagcaccctgaaaaatacggtcaccttcgttgtggacaagcaaagtattgcagaggccaaggccgcagcggataaccttaaacgccatttttcaaagattaaagatccgaaaattcggtttcaggctcagaagcagcgcagacagaaagcccgtcaacaagccgatgatgcacgttttaatgataaacctcgtgatacaaaggaaatgaaagcccagcgagcagcagagaagcagaaagcgagagatgaaagggccaacctgagagcgcagcagcagattcagaaacgccaggaaaccgctgagcttaaacttcgtcatgcagggctgcaaatctctgggattaaaggtaaatacgggcttgatgctaagcaacagtatgaggccttgcatttcatccagaagcaaacagaagcttttgctcaaggtaacatcacaagccagcgaatgaacgcctctattcgtgagcgtgtaaccctattacgcagagaagccgcacaacaagcgaaggtgacacaggcacagcgtacacagtatgcagcgacagcggagaagctcagatctcctaaagcaacccattctccaatgatgggtggcatgttagggagtgcagtattagccgctggttcgatgggggttggtcaacgcattattgataaaggtaatgaaaacctcgaactggtgagaatgagtgaacgtgttagaaccaatccgaatgtaatcaaagctatggtggcatgggggcaacaaaacggtgttgactctgctaacgtggataaggccacagacaatatgaaggatgtgcgtgaacgtttagctaatactgttacaaacgcatctttagatcctaaaagtggtaaatggagaggtggtgatgatggtgttaacgctattatgaatcagtttggatggaataaagctgacattagcaaataccaggataaccctattgattttattcagtctactgttaacgaggggcagcgtagagggatgagccaggcgcagatcggtaatctgatcgagagtttaggtgatgacctgatgcactacaccgatatgttcatgaataacggcgaacagtttacaagcactcttaagaaacttgtcgaaagtggtcaaactcttaacgatgagcaaataaggcaaactcttgcatacggtgacctgagtgtagcgatgggtaatctcattaatggagtagataatcagttatttacaggctttatgaaaggcttcgctgatagtggtgatgagcttgtgaaaaatacacaggcaatcaatcagagtgcagggctattaggtgagtag

SEQ ID NO: 140913 - DNA, 366 bp, Enterobacter cloacae
atgacctacagaacaatgcaattagacgtgtctacatgggatttaacgctggatggcagtggcaacattgcgatcgctgacgagtcatattccgttgctcaggatgttgccagcgcatgccttgtcttctctggtgagtgctattacgacaccacactcggaattccgtggaaaacagatgtcctcggcaagcgtccgacgccgagctttatccagcagaagttgcaaaccgaggcgctcaaattaccgattgttgaccaggctctggcgaacgtcttctttgataaaaacacccgcagtatgcgcggaactatccgtgtgaccgacattaatggaaacacagtgtcaacaacgggtaaaaagtga

SEQ ID NO: 140914 - DNA, 711 bp, Enterobacter cloacae
gtggctgactatttatttacgccaaccagtgcgcaaactagtgatgcggaaaacctctcatacgtatttaaaaagctcctttcaggggctttttttattgagcttgttgaggtgacggcgattcgaggaactgctccaaatctggtggtggatgttattccgctggtcaccaggacggacccgtcaggcgccactatccagaactcgaaaatcttcaatgttccggtgttcagacttcagcgcggcgctagtgcagtcatcatgaatcctgtgccgggcgatatcggcatgatcgccatctgcgaccgtgacaactcaatagccagagcaaatcgcaagcaatctgtacctggaagcaaaaggacgcacagcaaatcggatgcgctttatctcggcggattccttaacacccagccatcacagttcattgagtttgcagacggtgcaataaacatcactacgccgaacccggtaaacataacctgttcgtcagcgaacatcacagcgcctgatggagtgaatgtcaccacaccgacaatgcacgttaccggaaatattaccgcaggcggaaacatcaccgacaacaacggcacacaaagcgcttcactcaaaaccctgcgtgacaactatgaccagcacaaacatcaggtaccgggtgttcaaactggtatctctactgtcacatcaaacaccacggataaaccagcatga

SEQ ID NO: 140915 - DNA, 864 bp, Enterobacter cloacae
ttgtacagtaagcgatcccttcgatttgagtttgtgaatgagacctctacattcgacgacgcgggtaacaaacaaatatctatcagcgaagccaaagcgacggtatcacttcagtcatcgggtaatctcttcggcacgcaggtaaacgtaagcatattcgggcttggccttgagatgctggctgcattgtcttcaaaagcgatgggattgttcggcactgatacagagcgtatcagcatgaagattttcgtggagaacacagcgatttttgccgggtacatgacatcctctatcgccaatatgaacaccgcaccgaacactgcactgatgattaccgccacggctaacgctgacctgcagaacaaaaccgcgtcacctttttcattcaatggctctactccggttacaagtgttatcaacgccatctgcaaggcggcagggtacacgccttacattgtggggctggaagggaaagtaatttcaaatccccactatgaggggagcgtatttgaccagttacgggcagtctgcgacgacctgaatatagccatgtctgtcgccccaccgtcgatatcgttctggccgcaggaaagcacaaaggacgatgtgaagcccctaatctcaccagagtacgggctaattggatatccggtcttctcaaatggcggcgtgatgttccagacgcagttctcaacgcttctgacaacaggtcgagacatagagctgcagacaactcttcctcacgccagtggcgtttataagctcacaagcgtaacgcatgagctgtcatcgtggatggaagacggtccctggcattcggtgtgcatagcaaacagaaaattagaagaggcgtccagtggctga

SEQ ID NO: 140916 - DNA, 306 bp, Enterobacter cloacae
atgagaacaattccacttgagccgcagaagtcacagtctgtctctgtggatttggcagggcagcgatgcgtcatacgactgatccagcgtgaaagcttcatgtatatggaccttaccgttaatggcaaccccatcatgcagggtgttccgtgcctgtacggaaacaagatggtccgttattcgtatctcgggtttcagggcgatctggttttcctcgacaacgtgggccagctagacccggcttatgatgggcttggtggcaggttcattctttactacatagaggagagtgagcttgtacagtaa

SEQ ID NO: 140917 - DNA, 816 bp, Enterobacter cloacae
atgagcatcatcgacctcaataccgcagacatatttaatgcgatcggcggtggttctccactgtctattatcgacagcgtcctacaccctcaatatgtcattagagatagcaccacaggagctgtagcgcttgagttcagcggcatggcatcaattcagccaagtggcagggctcagataacgaatgcaccggttgagggtggaaaatatcagtccatcaacaaagtgaaagaaccgtctgttgtcaggtgcgaaatcatcgttaccgggctgaccgggttctcgggcggcattccaaatatcttcgacctgacatttaccagccagagtagcgtgcttgaaaccatcaagacgatgctgtctacggccaatacttacgacattgagacaccgaaagagacgcttgagagctatgacctggtagatcattcatacgaggttaattcacagcgcggcgtgagcatgctgaccatttacctgtatttccaggaagtcatgcagcagatggaagtggtcttgtccggcgctcagtctgaaacaaaaccgacgaatgattcggttagtcagggcgtgacaggtatgggcgcgtcaactaaagacgctggctctacaccatcaacggtagacgagcttgggaaatcctggtcatcactgaaaacatcagtgtcaggcatagccaaaacagcgtcaaacgccatctctacaagcttccagagcgctcttgataccgtttcgaagccgatacttgacgtgactaacagcgccactcagaaggcggctgagcttgccaaagaaattaacgagaacatcacatga

SEQ ID NO: 140918 - DNA, 180 bp, Enterobacter cloacae
atgagaagcaatttgctttatctgtttatctacacgctgacattcacgatcgttgcccagcctgtagacaagttaatgacaataagccctggctatgcgctgctgttgctaactctgtgggttgccgtatcgtcaggcattgttcacataattcacttctggcccaccaaagtacgttaa

SEQ ID NO: 140919 - DNA, 1833 bp, Enterobacter cloacae
atgattatcaatgagttggcctataaggtcacaattaaggccgatgagttcctgaacggcaagaagaaggttgaagagggcgttaaggagcttcaggacacagttgataaaagctttgacgacattgatgaaacctcaaagcagacgggtaaggttatcgtcaagactggcgatgacattcagcgttctacgcggaaaactgggcgggtaatctcagatgccacgtttgatgttaagaagttcggcacgtcagcagccacctcatttcgtggggcatatgctgcagctgccggtttccttgggattggtgctgggctgtatggcatcaagcagctgttcacctccacatcaaacgaaatcgtccgggctagcaaccaggctaaattcttcggaactgacgtcaataagatgttcggacttcgtcgcggcttccaacaggctgggttgaacggtgacgctttcattggtgcgtccggtagcgctcgcatggcactggctaacatcgcagacccaacagtatttggcggtttaaccggtgcagcgcagaacctgatggtgctgggcgctcgaacagggctgaacatcaacaaccttggcgacccaagcaaagctctgggtgagttcacccgctacgggaagagtcactcacaagagaacctgatgcaggtcatggcagccgctggtttcgacccgacagatgcagccaagattaaatcaggcgagctgaagtcacttgtcgactcagagacgaagaagtcaaatataaccgcccagcaggtaaaagagcaggaggctttagtggcaacgctcggtcagctagactctgagtttgaccggctgagacaggaccttgcgattgcttttgctcctgaagttatccgcgccatgaaagactttggcgactggatacgcgaacaccatggcgacatcattgggttcttccgtgacgcgggcgattccattaagaagctcacagactcagtgggtggagctacagcgctgctgcttctcctggctgcaggacttagaacaaacccgttagtcatgggagccattgcagctgcagcggcgagccacggcattgaccaggcgcgtgatgaggcaagcaggcaagggaaggatattggctcttatctttatgacaaagtgcatgaagataaaaagccattcatgacatgggattctgttaagtcgttctttggttttggtgagccagagcagtacggacaatcagcgagggtgtctggagcatccggaggaatggacgacctgcttcacggcataatgatgactgagtcaggcggaaacccgctagcttataacgtatccggtgctaccggcgcgtttcagttcatgcctggaactgcaagagacctcggtttacgtgtcgattctcaggtagacgaaagattagacccaagcaaatctcgcgcagccgcgtccgtttacatgcgccagcttctcaagcggtacaacggcaatgtggataatgctcttcgcgcctataactggggcatgggtaacgtagataagtggatcgccaatggcagtgacatttctcagcttcccaaagaaaccagagaatacaccggcaaggtgtatggcaacatgggcaacgccagaaactactacgccacacaaggcaggattgcagacaacaggccgtatgaactggcatctggcggaggacaatcgcagattaccaacagcacccatatcaacacagtgaacgttaacagcaatcctcagactgtagattctctcactcagagcattaaccagcaggcgaaaagagcaacaacgaactcatcgtttgcttctgctgtgaattga

SEQ ID NO: 140920 - DNA, 204 bp, Enterobacter cloacae
atggaagaggagtctcttccggccaaactggtctcgcctgtaaacgtatcttcagcgattaacgcaattatctgctccggcaaagcctcttatctggaccttcaggagaagctttccgtagcagatatgtacaacctgctagaaatcatatccgttgaaaacttcaaccaacgcgtctggcataagcatcaggagcaacgatga

SEQ ID NO: 140921 - DNA, 411 bp, Enterobacter cloacae
atggctcgcaaagaaattccttttatcgtcgaagaagaaggtcgcgacaaaggcaaagagtttatcatcacagaaatgtcggcatgggatgccgacactctggcgcaggatatcttccgcgcgatgggtgattccaattacagccagattcctgcggatgtgatcgcaatgggatgcgcagggctggctactgtcggcctgagcgttatctctgcttcatctccagatgttgcacgtcaattgcgcgatcgcctgatgtctacggttgatattgtcatcacccatgaaggcacaagacagcaacgtaaggttaaaggcgaactggattttgaagaggtttccactatccgcactctgctggataaagtcttcaaggttaacttcgattttttaacgatcgccggagagtaa

SEQ ID NO: 140922 - DNA, 435 bp, Enterobacter cloacae
atgccaattgatattacaagtgctaattccaagctgcgcatcgtcgtgccatcttactaccctggcggttttgatgtagacgattacgcagccgacaacatgtttgaaaccggcgcgcttcagaacaaagaagacatgatgtcagcagacggtaaataccatgctggcttcatcttcaacccgacagagttcaccatcaacctgatggctacgtcgaatgccagtagcttactggatgactggattgcagcagagcgaacggcaatctctgcgtttgcctgtaacgccaccctgacggtaccagccttaggggctaagtggaacttcgtgaatggcgtcctctacacctggactcctacacctcctggccgtcgcgtacttcagccacgtcctgcagtattccactttgaaacggtaacccggagcgcaatctga

SEQ ID NO: 140923 - DNA, 1491 bp, Enterobacter cloacae
atgagcactatcccattatctgtagatttcaatatcacgccaaacgtcgttacacctgccggttctgcggttgatgctaacggcctgatgctgactgacaatgaactggtgcctgtgggctcagtcgtctcttacttctctgccgctgatgtgtcagctcttatgggaagcacatcaaaagaattccttgctgctcagcagtatttcaacggctacgaaaactcatccgttatcccgggtgaattgctgatgtaccgcgtaatcaccgctgatgtggctggttacctgctgtctggcaacctgaaaggtgttgccctggcgacactgaaggcaattcctgcaggtacgattaccctcacggttgatggcgtatcaactaccagctcgtctatcgacctttccacagctaccagcttcagcgatatcgcatccaagctgcagacaggtatcggcgcgagcaaggtggaggttgagtggctccctattgccaatcgcttcatcattcggtcagtgactaccggcgcagctagtcaggtgtcctatgcttctcctggcgcactggcgaccggcctgcttctgacgcaagcaacagctgcgacagtttctccgggctccggtgctgtcaccctgactgacacgatgaataacatcatcaacaccaatcagaactggattctgtttaactccctggttgagttaacggatgaccagaaaacggaactgtgcgcgtgggcaaatggcagcaaaaaccgcttcggctatgtggtgcatgacactaccgctgcaggcactatcgctaacaacgctaactgcttcgtgcagaaggttgtcgtggctaacgggtatgagaacatcttcccggtgtacgggtcctatctgtacagcgttacggcgctggcgtatgcagcttctgtagacttcgcacgcacgaatgggcgcgtgtcgttcaagttccgaggcttctcaggtcttgcacctaatgtaagcgatctggcaacggctcaggcactcaagtcaaacggctataacttctacggctcatacagccttaataagacgatggctcagtatgcgtctgatggtgctatctcaggcaaattcgtctggctggacagcttcattgatcaggtatggattaacgcaaacctcgtcggagcttatgccaacctgttcaccaataaccagtcctatccgttcaaccagaacggctatggagcgattcaggcggccacaatcgatgtagcaaaccaggctctgacatttggagcaattcagaaaggcgtggtgctagaccaggcgcagattcgcatcgtgaataacaccgtgggcaaagatatctctgcgaccctttattctgaagggtggtatctgtttattcctactcagaccggtgcggctcgccttgagcgtgacctgaaaggagcaatcttctactacgtagacggtcagctaatccaatctatcaacatgtcttcaaccgctattctgtaa

SEQ ID NO: 140924 - DNA, 516 bp, Enterobacter cloacae
atgaatgacttcaccgtagacaatgtaatcgacgctctggcgaattacatcgaacccatagccggtatctgccagcaggcacaggctaacagggtgccgatgccaaaaggccagttctgcatcctgacccccttgcgattcacgcggctatccacgacgagagatatcaagcaagacacaggctctccgtcgacaagcgctatgggatataccgaggttcgccaggcagatatccaggttgatatctatggtcagggtgcaggggatcgggcaatcgccttagaaaccacattcgccagtagttacggctacgacaccatcaaagctatcgatgccagactggcgcctctttattcatctccggcaattcaggctcccatgattgatgcggaaagccagtggcaggagcgttacacgctaactctttccctgcaagcgcacatcaccgtgtcgttcccgcaggattatttcgataaagcagaaatttcaactgaacaggtggatgaccgcccatga

SEQ ID NO: 140925 - DNA, 372 bp, Enterobacter cloacae
ttgaaccttcgacagatagccaataacgcgatcaccagcattaaccccaacatccaggcagtcctcaagaaatacgcaggcgaaactataggtcccggacgcaagccaactccctcatatcttccagaccagagcgtcaccattcagcttcagcccatcagtcgcggcgatatgcagcacgtcgacggtctgaatattcaggggcttgcgaaggtgatttatgtgaacgggaattatttcagcgtccagcgtgagttagagcagggcggcgatattttcgtgattggcagcgagcaatggcttgttgttgagcctctcgaactatggccagactggtcgcgcctcgtcgtggtattgcaggtgaccacatga

SEQ ID NO: 140926 - DNA, 351 bp, Enterobacter cloacae
atgatacccttaccgtcaggcactcgtatctggctggttgccggggtcaccgatatgcgtaagtccttcaatggtctgggcgaactggtccagcatgttcttgatgacaatccgttctccggccacctgtttatcttccgtggtcgtaaaggtgacaccgtgaggatcctctgggctgatgctgacggtctgtgtctgtttaccaaacgtctggaagagggacagttcgtctggcctgctgtacgcgacggcaaaatcgccatcacccgctcacaactcgccatgctcctcgataagctggactggcggaaacctaaaactgcacgccttaactcactgacgatgttgtaa

SEQ ID NO: 140927 - DNA, 1557 bp, Enterobacter cloacae; identical to SEQ ID NO: 117739

SEQ ID NO: 140928 - DNA, 2898 bp, Enterobacter cloacae; identical to SEQ ID NO: 7675

SEQ ID NO: 140929 - DNA, 1014 bp, Enterobacter cloacae
gtgaatgacaatcagatttctgttcactggtcagatctaccgaaagatgagctaacccgtttctgccaggatgtcgatgccggcactcagggtaatttcctcattgcaccggtcaaaaaactgacccgccgcaaacgcggtgagcattccacaaaagccaaatgtgagaacccggcctggtatcgcccggagcattataaaaagctctccggacagctcggtcatgcctacaatcgcctggtgaaaaaagacaaagaaaccgggcaggtcagcctgcgcatgcatgtttctcgtcaccctctctatgtcgccggccgccgtaaggcgggacgtaaatatggcttccgtccggaacgtcagcgcctgctcgatgcgctctggccagtgctcatcagcttctgtgatgccggcaagcataccgtcggcatgtgtatctcccgtcttgcaaaagaactcagtgcaaaggacgcaaaaggcaatgtcattcctgaaacggaggtgacggtgtcacgcctttcacggcttattgaggaacaggtacggtttggcgttctgggcctcgcagaagaacgcgcctgggatcgtgaatcccgcacctggttgccaacgtatgtctatataacccccgtgggattccagatgctgggcgtcgatatggacaagctgtttaaagagcaggagaagaagctccgtcagagcgccgagcgtgagcagctgatccgggaaggagtgatgagcgaacatgatgatgttcaggcccactctgcgcggaaatgctggtctggccgtaagcgtcgggaggcactcgtttaccgccgcaataaaggcgcggagcgtaaacgtgccaacaatctgattaagctgccggcagatgaacgactccatgcaatgtctgaatggatttaccgcaccctcccgcctgacgaagcgtactggtgcacatctgagcgcctgaaggctctggccatccagcatctttaccagctggatctggcgctttctcccccggactag

SEQ ID NO: 140930 - DNA, 2223 bp, Enterobacter cloacae
atgattcagacggataatatactcatcagcttaatgaatagaaaaacgtacaataatgtaaagatatttataattgccctgacactttgtctgattgcggtacctgtctcccgttatctctctccacgcgcaattgttaatggtcatgacgtttatttagcatggctgccgctcagcgtgatgctggcggtaattctgctatttgggcgcagggctattcttcccattttgttaggttttactgtcactaatttattctatattaatttagcgccgctacaatattcagttttgctgttctgtcagacctttgcgttgttcgcggcctgcggtctgctacgcctcatgctgggcaagcgctggcgccactccatccctaacaagcacatcgggctacgtatattctggctcggttttattgtgccatttggtattaagctgtcgatgtatatggcaggctatttgtttgattttccggtgactatatcaacctatttcggcgaagggacggtaatttataatgttgtggatattcaaagcctgatatgcgcggggctgatttttaccatgatgttctattacccattaagaatgataattaatcctcgttatgccgtcaccttctggcggcgaagcgtgaagcccgtgttttatcacaagaatccattatatatttttgtctggctgatgcttttaggcgccattctcatcattttatgtggtccttttgaatcaccggtcattgcgggctatttgatgccgctgatttttattctttttaccctggcaataagccgcctgacctatgcgttgatttctctgctgtgggccacctcagcgctgctgctgttgacctacaactacaatttccttaacggggtcgaatcgggccattcactctcctttatcctctccgtgctgatctctttcgctatctgtttgctttacatgtcgcgcatttaccagcgcagcgagtggctgaagcggggctggcagggcagggcgcttaccgatccccttaccggtttacccaatattcgtgcgctggaagattatcttgagattcacccggatgccaaagtgtgcattctgcgtatggataacctggagtttttgagccgccactacgggattatcatgcgggtccactgcaaacgtacgatcgccacgtcgctacagccacttttgcagaaagatgagacgctcttccagcttccgggaagcgaactggtgctggtattactggggccgggaaccgccgagcgtctccagcatatggtcgatcggctgaacagccgtaagattttctggaacaacaccgggctggatattgaatttggcgcatcgtggggaatggtcgaaaacggcgaaaagctgcatcacacgctgggacagctgagctggctggcagagcaggcctgcggagagcaaaacgttctcgcgctcacgaatagccttgaggcggcatcaggacaaacgacagagcgtgtcctgatgctggcgcggattaagcatgcccttgaggcggggcagttccatttatacgcgcaaccgatccagaaggcggacgggagcgggtattacgaaatcctggcgcgtatggagagcgagggcgagatcttcacccctgaccgctttattccgctgattgcccagttcaacctcagccatcggtttgatatgtgcattatggagaaattactgctgtggctgcgcgatcaccctgcaacacaggctggcgcccgtttctccgtcaatctgatgccgctcacgctgatgcaaaaagaggtggcgaccgagatttgcgcgctgtttgaacggtacggcgtggcatctcaggccgtcgtgattgagatcaccgaagagcaggcattctccaattcaggctcgagtatcaacaatattcagcagctgcgggattacggtttccgaattgccatagatgattttggtactggctacgccaactacgagcgtctcagacgcctgcaggcggacatcattaaaattgacggctgctttgtgaaagatatttgtacagacgacatggatgcaatgatcgtccagtcgatgtgtaatctggcgaaggcgaaatcgctgtgcgtcgtcgcggaatacgtcgaaacgccggcccagcgggagatgctgcttcgctttggtgtggattacctgcagggatacctgataggcaaacccaaaccgctggaagaattgcgggcataa

SEQ ID NO: 140931 - DNA, 270 bp, Enterobacter cloacae
atggcaaccgcaaaagagtcgaatgcaggagcaatgcctgagttaactgattttgctatcaattactgcgcgctcactgagcatgttctgttacacgcaaaattcacagacactatggcttctgtcccgtcatggccgtctgtgcaattccctgatcaaacgatctgtttatcccgtaggcaagctgaaaatctcctgcgtgaactaaagaaagccgtcgattacatagatgctggaattgagcatccttccattaaattcatcgactaa

SEQ ID NO: 140932 - DNA, 723 bp, Enterobacter cloacae
atgagagcacagggtacctttctcagcatgacggacagttggctgcaacgccttttgacctggactcccggacagacggatatgattaaaaccgtcgctctggtactgatggtgattgatcataccggtcttctactggcaggaaacaatgaagtcatgagactgctgggccgcggttgctttccgctgttcgggcttgtctggggaatgaacctggcccggcacgctgtcattcgccagtcacaactgaaccaactctggtgctgggcgctgatagctcaggggtcatttattctggtggggtatccctggtatatggggaatatcctctttacgttcgccgttaccggacaggcgatgcgctggtttagcctgagaagccgcaacgatatgctgctggcgctcgcgatagtggtggcctggttaccgctctccactgacagctatggtctggccggagtattcatgctgatcaacagttaccggctttgtcgtgccacagagccggtggaaagaacaggctatgctttactctgggcggtcatggttttgcttatgaatatccaggatgccgggcaggccgtggcggggttggcaattgcacttctggtcgtgggagtctgctcggatatcgggaagcaggttaagcgattctggccagcgcatttttttgtcctgttttacactattcaccttgcggtgctcggtattctggtcgggtga

SEQ ID NO: 140933 - DNA, 585 bp, Enterobacter cloacae; identical to SEQ ID NO: 99309

SEQ ID NO: 140934 - DNA, 789 bp, Enterobacter cloacae
atgaagcttaaaactgttttagcagctccgcttattaccgccatgttatttaattccttaccttcatttgcgagcgacacgagttctgcatttactcccgagcaggaaaagcggataggcgaaatagccgcagattatatgcgtgctcatccggaaattcttatccagatgagtgagtcattacagcaggaacaacaggaaaaacagacccgggaattgaaatcggccgctatcgcacaacaggcccggataatggcggataagcgtatcccctcctggggagcagaaggcggatctgtcatggtggtcgagttctttgattatcagtgtatctggtgcagtcggctggcgcctgagctggagaaggtcatgaaggccaacacgaacgtgcgctacttcttcatggagtggccggtgtttggcagccgctggccagaatctttactggcagcgaaaaccggattgcaggtctggaaagaaaaaggcgaggaggcttacctcaaatatcacaatggcatttatagctccggacttaatgaaggaaaactaacccaggatgctatcgggaaatattcagaaaatatgaagttcagtaaaaacacgatcgatgaaattaattccacgctgaccgatatcaatgatattgccaccaccattggtttgaccgggactccgggtattgtcatcatgcccgttaagggggcaacagaagataatacgacggttttcgctggaatgactgaggctgaaaatatccagcaggcgattaataaagcgcaggggaaataa

SEQ ID NO: 140935 - DNA, 537 bp, Enterobacter cloacae
atgaaacgttcaacagtgtctggtctcctggcggtctgtttaatagtttcaggtggtgcagtcgctcagccaacggtacaggcaggattttcacccgagggttctgcgctgcagctggtgctgaacactatcgataccgcacaggaaagtattcgtctgatggggtacagctttacatcgccggaggtcacccgggcgttgattcaggcaaaacagcgtggggtagatgtgaaggctgttcttgactggaaagcgaacagtacaaaaggcagtgctggtgtggctgcaatgaatctgctggtgaatgccggcatcccggtacgtaccgtcagccagttcaaaatcatgcatgacaaagtcatcatcactgacggccgtaacgtcgaaacaggctcgttcaacttcagccgggcggcggcgcgcagtaactccgaaaatgctctggtcatccgggattatcctgttctggcaaatacctacctgcagcactggcaaactcgttgggagatgggaaaagactggagttcttcgtattaa

SEQ ID NO: 140936 - DNA, 1230 bp, Enterobacter cloacae
atgacgacattaaatactgcagtacccgatgtaaccattacagagaacggcctgtcagtgcctgatgtggcggatattctttctggtcgcctgacagatatgaccacggcactaggcggtggggcaagtcagtctctaagctcaccgcaaggccagattgcacagtcagacacagaaataatcgctcaggaatacgacaaacttctctgcctgtttaaccaggtcaacccagattacgcaaccgggcgattccaggatgggatagggcgcatctattttatggatcgcatctctgctcaggggacagtaactacaggaacctgtattgggcaggctggaacagtaattcctgcgggtagtaccgccatcactacagatggttatatctatcaggccatagataacataactattccctcaggtggttcggttgatggcgcgttcgttaacacaaccaccggacctattccttgcgctgctggctcactaaatcaaatctatcgcgctgttccgggatgggatgcgatcacaaatgcaaaccctggtgttgttggtgttgatgtagagtcgcgcattgcgttcgagacgcgcaggcaacaatcagttgccagaaacagccgtaaccaggatgcatcagttttatcggcgctgctcgcaactagcggggttctggatgcttatgtctggtcaaaccgtacagcagcaacagttaacaaaggaacgacaaactaccctgttcttgctcactccatttttatatcggtatatggaggtgcagacgcagatgtagcccaagcgatattcggcacgtataacccaggagcgaaccttaacggaacaacgcattacacagtttatgataatgttaactaccttccaccatatccctcatatgacatgcaatggctgaaggcatctccgacaagagtctatttcaagattcagattgatgcttcattaaatccgccaagcgatataaccacacaggtaaaaaacatggttattactgtgttcaatggcgaatatgacggaattggaaaggccaggattggctcaacaataaacgccggtaaatattacgcaccaataatctcaatcaatcctgacacggttggtgtgctgttacttcaggtttcattaaacggaaccacattcactccgtctgtgacgatgggtatcgaccaggtgccaactatacaggcatcggatatcaccgtaacactggtttaa

SEQ ID NO: 140937 - DNA, 639 bp, Enterobacter cloacae
atgtggaaggacactatccttacgcaatactcagccagccaaaagttactctcaataattgacacatttgatcaagccataagtctcgacgattttacagatgagtttattgataaagtctgggacctaaccacatgcgaaacatatggactggatgtatgggggaaaatcgtcggcataagtagatatgtaactgcgccaatagagagcacatcttttggcttcggagaagctaacgattcagatccggattatcctactccatttaatgatgcacctttttttggtggagcacaggaaacaacaaatgtcaggctggaagatgatgcatacaggactttaattctgtgcaaagcattcacaaacattagcattgccaccattccagaaataaacagatttctcaaaatgcttttttatcaacgaggaatggcatattgcgtcaattatcgagatatgacgatggggatcacctttgagtttgaattagccccttatgaagaatcaatcctgacaaattacgaagtaactccagttccaagtggagttcttgtaaatatcagacaggtggtcagcccttacttcggatttgcatcagatgcatacccattcaatgacggaattttctacagagaataa

SEQ ID NO: 140938 - DNA, 789 bp, Enterobacter cloacae
atgaaccgtactgattcaccagcaaaacaaccaaaaccgttcggtgtaaacggcccgagggagccactcctgtctacgactccagccggggacaatacagcttcctatgacgccggatttccgccaattactatgacattaaagtctgcaggtggattgcctccaaaggggcaagacatgaaccagatactatacgagctctctgcgttatgtaggtggtccagtgctggcgccataaacacctatgattccgcatttgcgtcctccataggcgggtatccatctggctcatatgtgttgggtaatgacttaaaaactgtctatcgatgcaccacagatggaaatacagcaaatccaaactcagttacaacaggatgggcaaaggtggcgcaggatatagctgacattctcgcccttggcaccgcatcgactagaaatgtagggatagggactaaccaaatccctgacatgtccttttttggcggaaccagttctagtagcggatatcaatatttcccaaatgggaacttgattcagtggggtactatcggccttaactcttcaccctcaggaactactattggagtattccctatagcatttccctcaactggctaccagatagtcgtaacacatgacaacccactcgatggtacgcttgcgtatggagccgcaagcattattagcccgacacaatttagagtgaacgcatgcgcaattaacacgagcacatttaccctgaatccaggctatgcaatgacacttcgctggtttgctatcggaaaataa

SEQ ID NO: 140939 - DNA, 435 bp, Enterobacter cloacae
gtggagaccacgcgccgctcctgtgaaaagtttcgtgcgcatccgacgaccatcgtgaactttgttgaaggctcccggtttacggaagagaagcgccagcaaactcgctctccgtatcagcatctgttgccgccaaaggcagcggggattgcgatggcgcttaacgtgctgggagcacagttcgataaacttcttaacgtcacgctctgctatccggaaaacgataagacgccgttcttcgatatgctcagcggcaaactgacgcgtattgtcgtgcacgtcgacctggttccgattgacgctgaactgcacggtgattacgtaaacgataagaacttcaaacgtcgtttccagcagtggcttaatacgctctggaaagagaaagacgaacagatagacaagataaaatcttcatacaaaaacgccggtcagtga

SEQ ID NO: 140940 - DNA, 1188 bp, Enterobacter cloacae
atgattcattcatatggttttaagaactatttcggatttaaagaaggcgctaatgtgtctttcttacttagtaatcgtgtaccacaggacgtttctcgtggtcgtaatgcagcaaccatattaggggttaagggggcaaacggtgcagggaaaactaatttattaaaagcactaacattcatttccacattttgtacgaagtcttttaatacaaaagatactgacactattgatgcagatccttattttgataatactgatccatctgagttttacatagaatttcttagtggaagtaatatttatacttacgagttgggtgtaacctctgaagtagttaaatatgaaaggttatatcgtaaatcttataattttgatgacaccgagaagaaatcaagaaaggttttggtatttgaaagaattggtaatgaagtaataaaaagaattactgaagttgcttctattgatgtcatatcgctcaaaagcaatgcatctttaataagtagcgcctaccattataaatttcaggaaccactgaatatattgactgatgttttctttttcttctatgtctttacttccaatgtcgggtacactgggttaaatgacatttcatcaagtattgaaagcattcataatgtctcagagttttatcacaagaatgataaggcttttaattttgtaaaagatattattataaatagtgaccttgggatctgcgatattgagattattgaaggagtgaatgattcagggaagaaatattatttcccaatgttttctcataaagtaaaagataaaaaatatagccttacaatttatgatcaatcaagcggcactagatctctgtatgtgaaattacatttatactggcgcacattagctttggggagcgtattaattctcgatgaatttgatttgaattgtcatccatttatgctgcctaagttattggatttattcgattctcccgagataaatactaaaaatgctcaatttattttcacttcacatataactgaagtgcttgaaaaattgagtaaatatagaacgtatttagttaataaggaagagaacgaatgttactgttaccggttggatgaaataggcggagatattctacggcatggacgagcgattactccattatataatgaaggaaaaattggtggggtgccgaatttatga

SEQ ID NO: 140941 - DNA, 501 bp, Enterobacter cloacae
atgagtgctaaagaatttggcaataacaggaaaacgacttttcttgctaaattacccaccattagcttagagactggtgagatagttgaaaaatgcaaattcaatttttcctatttcgatagttcccaacctcatggccaagattttgtcgattggcaacttcacggccttacaaaattaatggataagctaaaaaattactcaggctcgtcgttagaatactggcggcatcaaagagctggtgctggaagcctaaaaatatttgaaatttatggtaaatttccaagtaaaagtgagtttaaacatcccaaacatgtaccgcatgacgtttcctgggcacgttttcggttagaaaatttggttcgacttataggttttgtggtaccgaaagattttaaatgtgctgacgcgtcaaagctcaaggcaccttttgatagcaatacattttatgttgtctttttggacgagactcataaattctatatttctgaagatccttga

SEQ ID NO: 140942 - DNA, 228 bp, Enterobacter cloacae
gtgagcaaatcagaattacttcaaaagttagcctcgcttgctacagagtgtcacacactggcctgtgaaatggatcttggcgatgaacgcactgagatgttcgagatatacaacgtgctgagaagtcttggacgcaacggatatgcaagccagataagcaaagctactaacccgcttctgtgggctgttgacgataacgacgatgattgggatgaggattatgagtga

SEQ ID NO: 140943 - DNA, 516 bp, Enterobacter cloacae
atgatcgctagcggaatagttcaaaaactgaatgcgcaaatgaatcaggagttttatacctcaaatttgtatcttcagctcagccagaggtgcagcgagaatagccttaatggcaccgcactatttttgcgtcatcaggcgcaaaatacggtgacgcaaatgatgcgcatgtacgaatacatcaaacagagcggcgccacgccggtgttacaggagcaacacgcccggtgcggtgaattttccacgctggaagatctgtttgagcagacggtaagcgattaccagaagcgcattaatgcgctgacctctttgacggaagacgcccaggcagcaaacgataagtcagcgattaacttcctgaagcgatacagaaaagaggaaatcgtggacgggacgctgttgcaaatcattctggatgaagtccgcagcgctaaaaaagcgggcatcaacatgcagcaaaccgaccactatctggttggcgtgatcgatcgctatcaggggtttgagggccaatga

SEQ ID NO: 140944 - DNA, 498 bp, Enterobacter cloacae
atgtctggaccaccgaaaaccccgacccatctacgtttggtgaggggtaacccatcaaaacgcccgattaatgaaaacgaacctaagccagctgcaggggtacccccaacgccgaagcatttcgacaagcaggggaaatactggttcaggcgtatggctgaagagctcgatgcgcttggcgtcatgtcgcagttggacgcgagagcacttgagcttctggttgaggtttacaccgagtaccggcatcactgcgatacgctggagagagaaggttacacctacgccgtttatagcgacgaagagccagacgaaggcaaagagcgagagattcgcatgatcaaggctcacccggccgccatcatgaaagctgatgcctggaaacgtctgcgcgccatgctcggtgagttcggcatgacgccagcaagccgctctaaagtgaatgcaaaaggtcctgatgcggttgacccgctggccgagtttatgaaagcgagggattaa

SEQ ID NO: 140945 - DNA, 240 bp, Enterobacter cloacae
atgccagtccatcagctcaataggctggcctgccagagcgccttttacgtgaggaacaaaattatagaaattcagaatgtgctgcgcgcgtggctcactgaagaaaataccgcgctcttcgccgtgtgccagatcgtcaagaaaacgctggcaggcaaggcgcacatactcacaggcaataatttctcccgccaccaccctctcggcgtagcggatgccttctgcaaccttagccattaa

SEQ ID NO: 140946 - DNA, 405 bp, Enterobacter cloacae
atgtccgcagaaccgatatctgcaacggtaacggcaggcgtggccgccggcaccaccggaatcaccttcgcgacgatgtttccagaagcgacacccgctgtaatgctttgctctctagctggggcggctctttacgtcttgagcagcgaggaccacaagctctggaagcaaatactgtttgcgcttatctcatttatcggtggggtttactgcgccggaacagcatctgaaatcatcgctgcgcttatcaatgcggcattaagtcacctttctccgccagttgccgtgaaagtatctccagccattggtgcgctggcggcctcaacggtttctgtcaccgtcctgcttcgcgttctcaagcgctcgaagacaggagacttacccggattgaagggggaagaatga

SEQ ID NO: 140947 - DNA, 519 bp, Enterobacter cloacae
atgcctaaaaaaagacccattgaggaaagattctgggaaaaggttgataagcgtggtgacgatgagtgctggatttggctcggcgcaaccattcaacctggtggcggaagacatatcaaacctcagatatacgggaaaatagcggggccgagaacgccagcaggtcgtgttttttggtcttctcatcggctttcatggtttctgaagcatggtgatattccgcctggcatgctcgtggaccataagtgtcataacactctatgcgttaatccttcccacctcagactcgtaactccaaagcaaaatagcgaaaaccgagagggacccgctatcacacggaattcatctgggaagcgcggggtaagatggaatcctcaggttggcaaatggcatgcgtactacagccacaacagaaaggcgcactgcgtaggcttcttcgataatcttgaggaggctgctgaagccgcacgacgagcccgtaataaggtgtttacccataatgatgctgacagatattaa

SEQ ID NO: 140948 - DNA, 588 bp, Enterobacter cloacae
gtggctgaaaacataaagtttgtggtggtcggtcatcacgccagacggcagcaggctgaggcgttggcctcggctataggcgcacatttgctgattgatgacggtaaccacggcgcgaactggaatcaccgacgcgcgcttgagtgggcagcagagcaaacatgcagggtggtagtgttggaagacgacgcactgccggtacatggattcaccgaaaaggtaactgactggttggctcgcttccctgacgacatgctgagcttttatctcggtaccgggcgcccaccgcagtatcagatgcaaatcgccgaacggttcatagtggctgacaagatacaggccaactacattacgctgccgcggctaatacacggcgtgtgctacagcgtgccaccgcagcatatcaatcgtgtactgcatcaatggaacagcagcaagcctgctgattatgcggtaggtgatgcctatggcggcgctgtggtttatccgtgttactcgctggtggatcatgctgacggcgaaccggttgagcgtcaccctgactcagcgccacgaacagaacgccgccgggcgtggaggttagcctga

SEQ ID NO: 140949 - DNA, 240 bp, Enterobacter cloacae
atgagtggatatagcgtttcagaacagtttgaacggattgatgacgttttacgcaaaaattacgcgctgacagaactgcttgctcagacattcagcgcatttgttgttggctcaaacaacaaagaagttattgcaaactttattaaatcaacttctgttagtgacccgtcgatggttgaggctcacactcatgcaaaagaagctttactgaagattcttgactccgtaaaaacaaactaa

SEQ ID NO: 140950 - DNA, 456 bp, Enterobacter cloacae
atgacaattaaatttagtgttaataaacaagcgttttatgatgaaaatacagatgttatacccgatgatgcagtagttattacccatgagcagcacgtatcactgattaatggtatgaacgatggtgagagacgtgtttacatcggtacagatggggagttaacactgtcagacagcaagccatctcaatggcatacctgggacagtgatacaaatgagtggttcatttctgcggatgcgcaaattaaattagccgataacgaaaaatcccgcttaacccagggggcaaacgattatataaacagtaagcagtggccgggaaaagctgctatgggaaggctgaaggataccgaaaaagcccagtacaatttgtggctggattatcttgatgagctggaggcggtagatacatcaacagctccagatatcatctggcctgaggcacctgcgacataa

SEQ ID NO: 140951 - DNA, 366 bp, Enterobacter cloacae
atgattgatgttttaggtccagagaagcgcagacggcgaagtgttcaggaaaaaatcgccattgttcagcagagttttgagcccggaatgaccgtgtcgctggtcgcccgtcagcatggcgttgctgccagtcagctgttcctgtggcgtaagcagtatcaggaaggcagccttacagccgttgccgcaggagaacaggttgtgcccgcgtcggagctggcatctgcgatgaagcaaattaaagagctgcagcgcctgttgggcaagaaaaccatggaaaacgagctgctaaaagaagccgttgaatatggccgacaaaaaaagtggatagcgcacgtgcccttgttgccggaggatggcgaataa

SEQ ID NO: 140952 - DNA, 498 bp, Enterobacter cloacae; identical to SEQ ID NO: 140944

SEQ ID NO: 140953 - DNA, 291 bp, Enterobacter cloacae
atgtcatttaagcctttcgaccgctgttttcgccctatggcagggcttgcagaggctttcgaggttggacaggtcatcggtccccccatttgctttggcagtgatgtggtccaccgtctcagcgggtgtataccttccatttcgcaggcattcctgacaaaggtgtttgtctctgtcgagaacgattgggcgcagcctgtcccacttgctgccataacctcgctgatgcctgctctgtcctcgctgatgctgctgccagccttcattaaggtgtttgagacaatagcctga

SEQ ID NO: 140954 - DNA, 969 bp, Enterobacter cloacae; identical to SEQ ID NO: 128918

SEQ ID NO: 140955 - DNA, 336 bp, Enterobacter cloacae
gtgatcagcttctcgcggtctactgatgtcccgatttacgggcatatcacactgaaagccttcaccggttacacgtcacaaattggtgtacagattcagcaggccgtcgcggattacatcaacgggctgaccatcggcgacgatgtgctgctgagcaggatatattctccggcgaacctcggcgtagtgagtggcggcaatgcgcgctactacgacatacaggagctgctgattggcaaatcagccggtagcgtcgcggcggcaaacatcatcatcgcctacaacgaatccgcgtcgtgtaaacccgaaaacattgttctaacggtgacgtcatga

SEQ ID NO: 140956 - DNA, 705 bp, Enterobacter cloacae
atgaacccattcaaaggccggcattttcagcgtgacatcattctgtgggccgtacgctggtactgcaaatacggcatcagttaccgtgagctgcaggagatgctggctgaacgcggagtgaatgtcgatcactccacgatttaccgctgggttcagcgttatgcgcctgaaatggaaaaacggctgggctggtactggcgtaacccttccgatctttgcccgtggcacatggatgaaacctacgtgaaggtcaatggccgctgggcgtatctgtaccgggccgtcgacagccggggccgcactgtcgatttttatctctcctcccgtcgtaacagcaaagctgcataccggtttctgggtaaaatcctcaacaacgtgaagaagtggcagatcccgcgattcatcaacacggataaagcgcccgcctatggtcgcgcgcttgctctgctcaaacgcgaaggccggtgcccgtctgacgttgaacaccgacagattaagtaccggaacaacgtgattgaatgcgatcatggcaaactgaaacggataatcgacgccacgctgagatttaaatccatgaagacggcttacgccaccatcaaaggtattgaggtgatgcgtgcactacgcaaaggccaggcctcagcattttattatggtgatcccctgggcgaaatgcgcctggtaagcagagtttttgaaatgtaa

SEQ ID NO: 140957 - DNA, 228 bp, Enterobacter cloacae
atgttaacagtaaaagtaatgtcgcctggtggcggcgaagagattcacgacggtttgagcgtagggttcaatccaaaacagcaaagcattgcagtatctggtatggaccagaatatcttcctcaaagagggagaggttgcctacgtgatgaaccagaacgggaagacggtatctcgttacgagcatatttaccgtcaggaagtgctgcataacgacgtggaatcgtag

SEQ ID NO: 140958 - DNA, 561 bp, Enterobacter cloacae
atgatgtctgtctgggaagggctgattactgaactggatgctgaaatcagtgatttcgattttgacgggttttcccggctgtgcgctatcataaacggtttttatgattcgccttactatacgtcgatgctggaagcccgtaaaagagggacagcaaaaagcataccggattaccgggccgcgtattactacaatattgttgccggggaaattcgggcgcttttcgcgacacttggccccgggatgcagggctggttctcggtacataaaaataagcgctggagatctgattttattggcgttgatcacataaagctgaacacctggcattttgagctgacgttaaaagtcatgaatgtgatacaggccatgtcggggatgagacacagcgaagtgcttggcgtgatgcacggttcactgatttatgatggtgatatcctgggacttcgttcggtgttgcataagttcgccccggaaggtggaagtcacgaagactgggttgtttgtcgctatgtggaaaagccttttcagcatttacgcagaattgtcaacaacgggtaa

SEQ ID NO: 140959 - DNA, 435 bp, Enterobacter cloacae
atggggctttacaggagttcatcacatgtatattggcgttgcaaataccacatagtttggacgccaaaatatcgattcaggatcctcaaagataagctgggcaaggaactttacaggacaatctacatcctctgcggaataaaaggttgtgaagttctggagttaaatgttcaaccagatcatgtacatctggtggttatcgtgccgcctaaaatttccatatcaacgttgatggggcatcttaaaggtcgcagtgccatcagactctacaatcgttttccacatatcaggaagaagttatggggaaaccatttttggtcacgcggctactttgtcgatacggtaggggtaaacgaagagatcatcagacgatatgtgcggcatcaggagaaaacggaacaaacgcacgaacagcagatggaattgctagagtag

SEQ ID NO: 140960 - DNA, 237 bp, Enterobacter cloacae
atgtttgccacgaccgggagtctgctgtggtaccagggcatgaagataaacgcgaatatgaatattctccgcgagcagaaagagagtctggagaagctgaacgcgaagacatggggcgtgcgttatcacgaggacagcaacggacgttttctggtgttgccgaaggggatgaaagccgaaacgaactggacgaaggacaacggcaaactgaacgcagtgagactggtgcaggagtga

SEQ ID NO: 140961 - DNA, 240 bp, Enterobacter cloacae
atgccagtccatcagctcaataggctggcctgccagcgcgcctttgacgtgaggcacaaaattatagaaattcagaatgtgctgtgcgcgcggctcactgaagaaaataccgcgctcttcgccgtgcgccagatcgtcaagaaatcgctgacaggcaaggcgcacatactcacaggcaataatttcccccgccaccaccctctcggcgtagcggatgccttctgcaaccttagccattaa

SEQ ID NO: 140962 - DNA, 264 bp, Enterobacter cloacae
atggttaagttgaccaaaaaagaacaggcatggatcgatgaattgcaagaggtgcttgaccgttgcccatcaccgaaaaaaatcggtttttacaccatcggcgatccaaatattcacctgtatgacctgcgcaaatacaaagaagttgaagaggcattagacatggacaaagcgtccgactggtctccggcgtgccgtgttgcaggggcgcacattgaagggacgatcgatttcccatcgcccgttgaaagcaccgcaggatga

SEQ ID NO: 140963 - DNA, 258 bp, Enterobacter cloacae
atgggaaatgaggcagtagtacaattagtgatgtggataggggtgattatgatcgtccctgtttgctatcgcttttgctatgctgcttcatcaatgttatggcgccgtcttttccctacacgaattttcgagttccaatttaatgatgagtctacaggactcaaaaaatcagtgacagtaaagctacctcgtagaaacagtgagttgctcgttaacttaattgatgaagccataagggaagagtcgaaaagaaaatga

SEQ ID NO: 140964 - DNA, 873 bp, Enterobacter cloacae
gtgcaggaagatacttcatttaaaattttttatgatgctaatgataatgagcttgcacagcataaaattgatgcaaaaacgttaagcatttctattggtgcgatggcagaactgattagtgcggcagacaagcgtctacatgacgggcatgagacagttaagctaatggtgacaaatccagctgaggctgggtcattgggcattgcttatacaattatggagcttgttccttcggctatcaacgtagctaaggtcattggattaactgggatggcaggtgcggtcattggtgctcctgcactcgccctagtaaggcagttagggacaaaaaaagtaattgctattactaaaagagtcggcacaaatgaatctgttcttgagctcgatggtgaagaaatcgtatgcaatgatgcggttgctaagcttgtcactgatccagtaattcgcgatgcgctagttaatgtcgttcgagctcctcttgatgggaaagaggcaccggtttttaagatcgttgatagcagtggtgaagagatcttgcgtcttgaaggagagcagactgaggagataaagcctcttccgcgcggtacgctacttgagaaagaaatttccactgaagaagttaatgttcgttttgttcaagttaacttcgacggtacttccggatggagaatggtgcatgttgacgaagaaagcgctgttcacgttgaggatcaagtctttataagtcaagttcagactggccaaattagttttacaaaagaagatttgttcgttgtggaccttgaaacaactaagacatacactgcacgcaacgtaactaagcgttatgctatcaaaaaggtcaaaaacaaaaggcctgctgagaggaactga

SEQ ID NO: 140965 - DNA, 1458 bp, Enterobacter cloacae
atgaaagtcatcattgatggcgtaagttattacccatgtgtaggggaaagttatcctattggtatagcaatcactacgcatgatcgagccgacattctgaagagctcacttgaacagcacatgaagcatctgcctgccggagcgctggtgattgtagttgacgacggctctaaacctgccgcagtagtgcctgacggcgtgcagctgcttcgccatgaaacatcactcggcattgtcgcttcgaagaacgccagcctgtcagccctgatggatgccggatgtgagcatctcttcctgtgggacgatgacgcctggcccatcgctgataactggcacttgccttacatcgaatcacccgagccgcacctggcttatcagtttctcgatctggcagggacgaataagctgaaggatatggcggtcctgtaccgggatgataagcacatcgcttacaccggtcagcgcggcgtgatgctgtattaccaccgcagcgctatcgagaaggttggcggtttcgatcgggtatacggtcgcggcatgtacgaacacagcgacctcgcccttcgcatccataatgctggcctgacgacatgggcttacggtgatgtggtcggttcagaaaaacagatccattcactcgatgagcatgaagccgtagagcgttcggtaccgcgtcccgaccgacaggcgctggtggaacgtaacgtgaagatccacaacgaacggcgtgatgccgggtttactggttacgttgaataccgccagcagcgcgacgtggttatcacaacgctgctcaccagtcagcctgacccgcagcgcggcacgagaatggtggcctcgcctgacatgctgagcaaatgggcggcctcgcttcgccagtgtgggcgtatagcgctggtggatgaattactgacagccccggcagatgttgagctgtatctcgtacctgacgtgaagatgaatgtgtacttccgtcgctggctgcacatctggcagcacctgcgagaacaccctgaataccggttcgtctggtgtaccgatggtaccgatgtcgaaatgcttcgcgcgccgtgggaagaaatggaagccggaaaggtgtatgtcggttcagaaccaaagacctacgccgatacctgggcaaagcagaaccatccggagcgcatctatcaggagttcattgaagcgcaccgaaacgatgtaatgcttaacgctgggctgctgggtggtacccgcgctgatgtaatggcacttgctcacggcataatccgtctttactaccggatcgagagctatcgtttctggaagaaagaacaggctggcgccgcggtgggggacatgctggcgttcggtattgtcgctcattcattcgcaggaaaggtgattaccggacctcaggtgcacaccgtttttaaaactgatgggatcggaaaagataatgcctggtggaaacataaatag

SEQ ID NO: 140966 - DNA, 525 bp, Enterobacter cloacae
atggataagaccaaaaaatatgatcgggctttacaacttgaaatattaaatgcattgattgacagtgcacccaacgccttgaatgacgaaaaagaacaggaacttattcgtaaatttgatgactatgaccactttgttgcatgcatgctttacttggaaatgcatggtttggtgggctccccttttattaagagccagtcattaggtgagggaaatcgataccacttcaatcaacattcctgttttattacagaaaaaggaattgacttcctgcttgatgacggcggattgagcgcaattctcaaagtgcaaacagttcggttacataacgatactatcgtggcccttgaggacataatccgcgttgcaaatatgcctgaagatcagaagaagggactgatttcaaaacttcgagagcttccggcagacgccataaaacatttgaccctacagctactgactcagggggttctgaatctgccgaacgcacttcgactaattcaaacaaccctccagcatcactga

SEQ ID NO: 140967 - DNA, 315 bp, Enterobacter cloacae
atgctgaggaggtacgctataacaaacgccgtgtatcagccgcggcagtgtgatgtagtcagcctgagtcttatcagcattaatcagccgttcggctatctgcatctggtactgcggcgggcggccagtaccgagataaaggctcagcatgtcgtcagggaagcgggtcagccagtcgaccaccagctctgcaaaccaaggaacgggcatcgcatcgtcttccagcacaaccacccggcaaggttgctcagcagcccattcaagcgcgtgtcggtgattccagttcgcgccgtggttaccgtcatcaatcagtag

SEQ ID NO: 140968 - DNA, 357 bp, Enterobacter cloacae
atgccatcacaaataccaagggcatgccgcaagcgtggctgcccaggaacaaccacagaccgctccggctattgccccaaacaccttaacgaaggctggcaacagcatcagcgagggcaaagcaggcatcagcgtggctacggcagccagtgggacagattgcgtcctatcgttctggacagggataaacacctttgccaggaatgcctgaggaatggaagatacacacccgctgagacggtcgatcacatcaagccgaaagctcacggcggtactgacgatctctctaatctggaatcaatttgccgcggctgccataaagccaagacagcacgcgaacgcctgaacagaaattaa

SEQ ID NO: 140969 - DNA, 1305 bp, Enterobacter cloacae
atgaaaaaaaacaaacggccaggcagggttaaaagtgctctgcttaactggcttggtgtgcctatcagcctgactaccggcacgttctgggaggaatggtttggtaccagcagcagcggaaaggtggtaacggccgataaagccatccagctatcggctgtgtgggcatgcgtaagactgttaagcgagtctatttcaacccttccgctgaaaatatacgttcgacagcctgacggttcgcgtaaagcggcaaccgatcatccggcctattcgatactgtgccgccgacccaattcagaaatgacaccatcacgctttatgttgatggtggtcgccagtatttgcctgcgcgggaacgccttcattgagaagaaattcatcgcaaaccgcctggtttcgctggtgcctttgctgccgcagaacatggtggttaaacgtctcgtgaccggggcgctggaatacaaatacactgaaaacggtaacgagcgcgtcattcccgtcaaaaacatcatgcacattcgcgggttcggtcttgacggcgtttgcggcatgatgccgatgaaaacaggccgggatgtgatcggttctgcaatggcggttgaggagtctgctgcgaagatatttgaacaggggcttcagagttcaggttttctctccgctgagaatgcgctgtctgacgaacaacgtgaaagacttcgcagctacatggctgcatttaccggttcaaaaaacgccgggaaaatcatggtgcttgaaggcggattgaagtaccagggcgtcaccatgaatcccgaagacgcccagatgctggaaagccgctctttcagtattgaggaaatctgccgctggtttcgcgttccgcctttcatggtcggtcacaccacgaagcaaagcagctgggcatccagtctggagggcatgaacctccagttcctgacacataccctgcgacccctgttggtgaacatagaacaggaaataggaaggtgcctgctggacagcgatgatgaggtgttcgcggagttctctgtagaaggactgctgcgcgccgacagcgcgggccgtgctgcgtactataccagcgcgctccagaatgggtggatgtcccgcaatgacgtgcgccgtcttgagaatatgccaccgattgaagggggtgacatttacaccgttcagctcaacctgacgcaactgaaaaatctcgaaagcagcaatcctgctgtgcaggctctggccctgagagaactgcataaccacatattccctgacatttcctttgaacaatctccgctgaaacaggccgcttag

SEQ ID NO: 140970 - DNA, 1212 bp, Enterobacter cloacae
atgtctgaagtaaacgaaattctgaaaaaagtcactgccagcattgaagaggcaaccggcaaattcaacgcgaaagcagaagacgcactcaaagaggcgcagaagtcaggcaggctgtcagaagaaacaaaagctgccgttgataaaatggcttctgagttcaacgcgctgcgtgaagctgaaaaaaccctgaaggccgcaatgggcgaactggagcaacatgttgcccagatgccgctggcaaacgcaaaacaggttatcgagtccgttggccaccaggtgatctccgctgaagccctgaaaacctttgcttccagcgtggaaggcggtaagcgcatcagcatcccggtcaaggccgccctgacttcggtggatgtgcctgatggtgtcgtggagccacagcgcctgccgggtattgatacggcaccgaagcagcgcctgttcatccgcgatctgattgctccaggccgtacgtcctcctcagctattttctgggtgcagcagacaggctttaccaataacgcgaaagtggttcctgaaaatacgcagaaaccatacagcgaaattgagttcacgccgaaaatcactggcgtcagcaccatcgcccacctgttcaaagcctcaaagcagatcctggatgacttcgcacagttgcagtccaccgttgatgccgaaatgcgctacggactgaagtatgcagaagagcaggaaattctcttcggtgatggtaccggcgttcatttgcacggcatcgttcctcaggcgtcagctttcaatccggcgttcactgtcgaacagcagagcgggattgacgatctgcgtctggcaatgttgcaggcacagctggcacgcttcccggcgtctggtcatgttcttcacttcattgactgggcgcggatcgagctgaccaaagacagcctgggtcgttacattctggcgaaccctgcggcgctgactggtccgactctgtggggcctgccggttgttgcaacggaagcggcagccttccagggtaaattcctgaccggtgcatttaacgctggcgcgcaaatcttcgatcgcgaagatgcgaacgtggttatctccacggagaacgccgacgacttcgagaagaacatgatcaccatccgttgcgaagaacgtcttgcgctggctgtgaaacgccctgaggcgttcgtgtacggttcattcagcaccggcgcgggtagctga

SEQ ID NO: 140971 - DNA, 948 bp, Enterobacter cloacae
atgaaatgtcttaacgcgatgctgctgctctgtttgctcgcggcggcaaatatggctcgtgccggtacctgcaccaccatcaccccgcagctttcaaccctgtccgtggggacgatcaacgtgcagcgcgatgcgcctgtcggcacggtggtattttctggcgcggcgtcagccacaggctcctatcttaccgggtgtactaatccgctgatgctgggattcagcctgcgctacaacggcgccacgttgagcagctacggcaaccatgtttacaaaacgaacgtcagcgggatagggatacgcttttcttccaacggctattttgaaaacccgagcaatacgttctcgtacaatgcgcagacctcctatgtggactggtacggcgggaggattgagctggtggtgacggggccggtctcatcgggggcattaacccccgggacgatcggtgtcgtgacgcttcagggaagcgatggcctctaccgtgacggtctgaccacgcagctcacctccggcaccatcaatgcgctggcgtgcacggtgaatacggcccagctgacgtttccgataggggatattcccgcctcggcgttcggctccacggtgggcaccacgccgatgggggcacagaacacgcaaaacctgggcttaacctgcgccgccggaaccaatattacggtctcgctcagtggaatacagaatccggacagcgccaataccagcgtgatggccttaaccgggcagggaaatgccggcactgcgaaaggggtgggggtgcagcttatctataacggtgcaccgctggtgatgaacagccgactattcttgcggcagtctgccggggggcaagagacgttgccattaacggcccggtattaccagacgttaacccgcgtggagtcaggttcagcgaatgcctccgccacccttaatttgacctaccagtag

SEQ ID NO: 140972 - DNA, 138 bp, Enterobacter cloacae
atgttaaatattctgattcaggaaacggatctgttttttcaggctgggctacagagctttttcgacgatttttttaagcataactttcatcgctccatcacatttcagctggcgctgaccaatgaaaacgtcagctag

SEQ ID NO: 140973 - DNA, 243 bp, Enterobacter cloacae
atgattctgcctgatttcagaaaggaaagactgtttggtcccaggtttaacgattatctgtatgtgatgggggttaaaaagtacggtaacttcgccggcgggcttgacctgcacagcgtcagtgaggagaaccagctgattttatcaggagaattctccatcttacggtcagtgtactttttaacatgcaggctgatgccgcccgtggaagacagccctgctcgtgctcaaaaggtggcatag

SEQ ID NO: 140974 - DNA, 1032 bp, Enterobacter cloacae
atgataaataacatccgaataaatctctggggatcgattgaggaaatttgtaaagaacaacttttgaaggctgggttcaaattacctaagaacacccatcatgattatcttgaactattgatgaatatgaataaaagaataattgagccgcgcaaacgtagagttcatttccatagttcattgagaataccttctgaaaatgcaaaaggtttttttttgcttgttaataatatgaaactcggattaaacataaaccgttatcaaagtcatcaattagaacgaactgacttccacgacggttttttgaatgactttggcttacaccattttcatttgggagaatccacccaaggcacaggaagacacaagaaatatatagtgcgaactaagaatgaagtatttgccaaagtggaaacagacgatatatatattttgggcatttttggtcataacaaaggtaagaagaattttatttttacagatgaatctttattacagcttttgtacgatgaatggccacacttgctgaaaccctatatattaaatagggtgaccggtacaaagtacactgctgaagaacgttataacctacggaataatcgtgccaatgtatttattacacttaatgatggtaaggtaataatgtcaccgggtggaggatatatgagtaacgggcttagtgccgacgtttacagagaaatcgtccatttacatcacaaacttccatatttgaaggaagttttattttctactcaagaaaatggttatccaccagatgctttttttgaagtcataacttttgggcataatgaacttagtttattctctgatagatattgcttctatacaaaagtagttttcataggtgataaaacaaaaactttatctttagcacctgggttcggtcctttgtacggtcatggtttcatcccttttcctaaatcaatcatttacgaggcaatatgtaccgcaacaattgattattctgggaaggctttcctatatcccttcccgtctatttacataaggtga

SEQ ID NO: 140975 - DNA, 453 bp, Enterobacter cloacae
atggctacgatcccaaccctcgctaaccctcaatccattgatagtattgcctgccaacttctcgatctgccgatatcctcaacgcttgatctcttcgaactgacagattgctgctgcgcttttgttaatgtactgctggaaacccaagacaaagcagagcgcttagcgctgtgtggccgtctggcttttactctcgatgagctaaaaaacagatgcgatgaagatttaccgcctcatctggtagagcgactgagtaccgcgataactgcacagtcctgtgttccggattgctggcaagatactgagatgctggtaggatatgctcaggcacttaatcaggccttgttgagtcagactctggcaagtgctgtctcgcaagaacttgctggcttattgcatgacctgatttatctcctgtctgactatgtcagagaaccttacctgccgcactga

SEQ ID NO: 140976 - DNA, 909 bp, Enterobacter cloacae
gtgttaaaccagcggatgcagcgcgcgtttgataacgacagcctgccgataccaccgttagccatgtcgctggtgcagcagccggagccgcaaaacaatggcgtctggggccagaccttcagctcctggagccgaaacagcggcgacggtaacgtgggcaagctggacggcaacaccaccggcttcctgctgggggcagatcgcaaactggcggaccataacgtgcgtgtcggcggctacttcggctacagccggggtgattatgacgtcgacagccgtcgctcctcaacggataccgacaactatcaccttggtctgtatgcggcgggtcaacaggatgcgttctcccttcgcggcgcgctgggttacacctggcacaagatcgaaggcgagcgcaatgttgatttcagcggcttctcggatcagctgaagtcagattacgacgcgaactccctgctggcgttcaccgaagcgggctaccgtttcggccagccagacaggaatattgagccgttcgtcaatttatcgtacatccggctgcataccgacagcttcagggaagacggcggtgccgctgcgctgagcgtccgtaacgaaacgatgaacaccttctatacgacactcgggttgcgcggtgtgaccgagttgccgaagcacgttaacctctacggttcgttgggctggcagcacgcctatggcgataagaatacctcttcgcgcatggcgtttgcgggcagcgacgcgttcattactcagggacaggccgtggatgaggatgtgatggtcggtgatatcggcgtgagcgtacagctgtcgcgtgctgcgacgctggatgtgggttaccagggacaatatggtgcggatacccgcgtcaactctgttaacgccaatctgcgctggtcgttctga

SEQ ID NO: 140977 - DNA, 126 bp, Enterobacter cloacae
atgatatgttttttgtatgttattggagccgtgttttgctggtggctattcgggtatttatactgcctatggtttgttgatgatgacgatgaagagaacgaatacgaagagtgtccatatgaataa

SEQ ID NO: 140978 - DNA, 1170 bp, Enterobacter cloacae
atgatatttcgagagcagaaaaaaattaagattgcacatattcaattaatgccaatgttgagtggtgtacaacgtgtatcagttcaggagattgagctactctcacccgaaaaatacgaagtatcaattatctgtaaagggcacggtcctcttgttgatattttaaaagataaggctaagagttattttgttccgacgttgtgtagagagatatctcctttaagagatttaaaatccttattctctctctatcggctattcaaaaaagaaaagtacgatattgtacatacacactcttctaagactggcgtattagggcgtattgctgcaaaattagctggggtaccttgcatagttcatactatacatggtttcgcatttgaaagtacaaaacgccaatctgtacgaatgctgtatcgtatacttgagcgcattggggctaaatgctcttcaaagatcatttgcctgcataatgatgataaaattatctgtgaaaaattgttgaaaattgaacctgggaagatagaggttatttcgaatggagttgatataagaaaattcagtcctgctattaacaaaggaaattataaaaataatattttaggtgttggggctgattcgcttgtttttacaatggtaggccggttgtgggcacaaaaaaatccattatttttcgccgaggctgcgagtaaaataatttcatctgatcttatcccaaatgctaagtttattattgttggtgatggggagttaaaaaaagaattacgtgaaaaatatttatctgataaggtttacgctgaccgtattattcatttaggttggcgcgaagatattgcagaaattcttaaggctagtgacgtctttgtacttccttcattatgggaaggtatgcctttagctattttagaagcacaagctacaggattgccttgtatagtttcaaatattagcggcaacagaagtcttgtaaccgatagtgttgatggatatctgatagagttagatgatgtcaatactttaatagatgcaatttgtaaaataaataacaaagaaattcatgaaaatatgtccattaattgtaggaaaaaaattgttgaaggttttgatattatcaaacgaattaaaaggatcgaagcattatatgccgatggcgtgcaattaaataattag

SEQ ID NO: 140979 - DNA, 1110 bp, Enterobacter cloacae
atgctgaagaatattaatttattagtcacctttgtttttacgatcatgataataaccccatttgttaatggggcattaacatctcgttttgattttaatctgaatatctttttccctttgttttttctcatggctgtatttcggtcattcttaattaggaaacagctaaatattaagaatgtcattatttgggtaatattagcggggttactttgcttcaccacagcggtgagtatatcattaagcccacctaagaatgaggttattgatatacaaatattgtcaattatatgtggtgttttgtgtgctcttcctcttttagatgctgggttggtggaagaaataactaagcaagcgccaaagctttttattataagttgttcgatagctcttgcaatttcattgggaagtcttgagttagtggaaattggtattcaaaactcaacccgaagtatctacttctcaagtccaataagtattgcaataatagccggcattgcggttatttcgattttacacgcgagaataaattttccatttaaaatactatttgtttttttaatgttgtttgcaatgtatataatgtcttctcgtggtcctattatagccttacttttttgtgtcatgctatacattttcaaaaaatatcctctttggataaaaataactatttcaacattgtttgttgtagttataccactaattttgaatattagaggcacagtttctgaaagtaattcagagagagaaatgatcctgaatgctgctgcggaattatttgcaaatgatccatttggtgggtacctggggcggtttaatactgaaacgggattgatctatacgcataacctgtttattgactttgcaattgatcttggtattttgcaagctttgtggttattatttatagtaacttcaattttgcttggtttctttagagttagaaataataaaggtgagttgttcgtaatatatttatttctatacttgcttttttgtatgtttttttctctgcctgcaattgaaatgttgaagatatttattccgcttgcgtttgcagcgttggcgaaattgtctggtattacagcaaataatagagtgagggtttaa

SEQ ID NO: 140980 - DNA, 1107 bp, Enterobacter cloacae
atgagaatttcttatgttctgccgctagaaatgaattcctattcaggtgtattacagaaagtccgtcagcaagtatctgaatgggaaaaacaaggtcatcaggttacttgtttttatatatcaagtaaacctcttgggcgctccattgaccttaacagcaatgaaacacttatacatttgaattttctacgcaggtataatttcccacgtattcttgctcgctcaattggcttggtttttcttaagagaatacttaaatattctaaaccagatgttttatattacaggtacgtgctttggtttccaggaatatcaacatttcttaaaggatataatactatcattgagatgaattctcatgatattaatgaatttgaatcaaagggtttcttctttaaagttttatataaaaaacttagaaagttagtattgaagtctaccagcgctacaatcagtgttagtgagaatattcgggattctatggaaggctatgtagataaaaattacctggttccgaacggttttagttttgataactcctttccaaaaaaactaaagaaccgaccaaataaaattgtttttatttcgactccagggcaatattggcaaggattggatataattgtttctttaatgtcaagattaacaaattatacgctggatgttgtagggtggacaaaaaatgactttgctaaaaaataccctgatgtaattattggaaccaatattatttttcacggttataaattaaaagatgattttaataaaataatgagagactgtggttatgcctttaatgcttttgctatgcatcgaaaagggatgactcataattcggcactcaaaacagcagagtatcttaataataatttagctattatcagtggatatattgaaactgggttaaatactgatgctattttgtcagttgaatcttataatagtgttcattcttatattcataagattgaagattttcttgaaagatggaagactaaagatatcaatctggataaaatcatagaacagataggtattgagcaaacagaaagaaaacgattagaagtcttcaataagagtttggaatctcatgctgaagaatattaa

SEQ ID NO: 140981 - DNA, 1143 bp, Enterobacter cloacae
atgtcagttaatgaatatgattacgttatattatatgatcgaatttacagttatgaaggcgataagattactattggcggcatacaaacatatttaatcgagctggctttattaattcaagggatgggaaggacggttattattctacagcgaggctttagtaactttcggcaagaatatcgcggtattgaatttatttcttataatcaaaaaatcggttctttagtatcgttccgtgcattagcttctgaagcaagtaaattcgtgaagtccaaaggtattgttatatgggggaatgatcaaacttctgttaaaatcccggatattaaaactatatcgatccagcatggcataacatttgatattgaaggaattgagagtaaaattaaaaggaaattaataaatactcctttttattctttgtatcgctgtgcgcagcgtttgaatgcaatcaggaaatttgagcagtccgattaccacgtttgtgtagattataattttgttaactggtaccggacatatcggaataataagcaactttcaaaaaccagagttataactaatttttctcctgtatttgaccaacaacctgagaagaataatgcgagactctctgtcgtttttgcacgacgttttgttgaaagacgtggtgtccatctttttagaactgttgttaaacggatcaactcggaaagaaaagatattgatttttatatagctggcgagggtccatataaacaacagctcgagttggatttcggcgagtgtgataatgtctatttttcgacctttagacctgaagattcactcgatttccataaaaacaaagatatagcgatagtctgttcaattggttcggaaggaacatcactatccttacttgaaggtatggccgctggttgtgcagttgtatcgacaaacgttggtgggttaacaaatattgtcatagaccagcataatggattattatgtgaaccaaacgccgactccttgtatggggcattaatttccctgattgacgatgaaataaaaagaaagaagcttgctttaaatgcatataatacagtcattgactcatttaatatcacgaagtggcgacgtgaatggtcagatatgctgttgtttgtcgagaataaatcatga

SEQ ID NO: 140982 - DNA, 1131 bp, Enterobacter cloacae
atgatgaaaagaaaaattttggtcgtttttggtactagacctgaggcgataaaaatggctcctctggtacatgggcttgattgtgtaaatgaatttgaggtaaaagtttgtgtgactgcacagcacagagatatgcttgatcaagtaattgagctttttgatattgtgcctaactatgatttgaatatcatgaaagaaaggcaaacattaaatgatataacaactacaattttgaaaggaatggaacccatacttgatgattttgctccagatttagtttttgtccatggtgatacatccacgacctttgctgtatctttggcatgttactataaaaaaattaaagttggtcatatagaggcggggttaagaactggagatatatattcaccatggcctgaagaagcaaatagaaaacttacagcggtattaactaattaccatttctctccgactgaaagtgcaaaagaaaacctcctgaaagaaaattatcaaccagagagtatctttgttactggtaatacagttattgatgcattattatatattaaaaataaaataaacaattctgacgaattgcttaatacattaaaaaatgaatttccatatattaataatagttcccaattaattctcgttactgcacaccgccgagagaattttggtcagggattcttaaatatttgtgaagctctccgagaaatcgctctggccaatccttcctcgcaaattgtttttcctgtgcataaaaaccccaatgtaagagatattgtatatgcaaaattagcaaatattgataatgtttatttgattgaaccgctacagtatttatcatttgtatacctcatgtctcagtcctatttgattttgacggattccggagggatccaggaagaagcaccgtccctcggtaaacctgttcttgttatgcgtgaaactaccgaaagacctgaggcagtctctgccggcactgtaaaaatggttggtactaataaaaagcttattgttgaatccgtacaacagttattgattgataccgatatgtataaaaaaatgagtcagtcgataaatccctatggagacggaaattcagttgaaaatattgttagaatcgtacggggaatgctgtaa

SEQ ID NO: 140983 - DNA, 1437 bp, Enterobacter cloacae
atgtctatttatgacaacacgaaatgggttgcattatctcaggtttttaaaattttaatgcagttaacaagtttaaccgttttaaccagactcgtatcgccccatgactatggaataatggcacttgccactattttaatcaatttcataacaatactgcgcgacttaggtacttcttcagcactcatacaaaaaaaacaagtaaatcagctagtcaaatcgagtgtgttttggcttaatactattctcggtctatttttattcgttattatatacacaagttcaggtgaaattgcttctttttttaatgaaccagaactagaaaatgtcttgaaaataatctctatcacttttccaatagtttgcactgctgcaagtcatcaggctctacttgaaagggaaagtaaatttaaactgattgctagcatagaaatagtgagttcattttcaggcttgattgttgctctatttatggccttcaatggattcggtgtctatagtttagtcttgcaggtgatgatttattcattggtatcatcttgtcttttttggaaatatcattgctggaagccttcatttgcaataaatttgaaagagttaaggggcgtttttaaattcagtcttaatcttaccgtattcaacatagttagttttttctcaagaaatatagatagtactcttattggtaaatttttctcatcgtatatactcggtgcttatagtcttgcttatagaattatgctgtttcctctccagaatgtaactttagtcgctactcgtgccctctatcctgttttaagtaaacatcaggacgatgaagttgaaattaggaaaatatttatccaaaccgtacaggtcatttcatccctaactttgccgatagtatgtataattgtaatgctaagtcatgagttaataatatatttattcggaagtcagtgggcgttaacagccactatattaatatggcttgcaccatcaggttttgtacaatctataatcaacagcatcggatgtttttttgcggctaagggtcgaacagatattataatgaaattaagtattgcatcatgtttagtaattgttttttttgtcttgctaggtgttcagtttaatatcttaataatgactcagttttacttcttagcaaatattataaatggtatttgtatgatgtcatttgcactaacactgctaaaatgcccgttatcaaagttaatgcttgcttttagtgctcctgttataagctcattttcgatagtacttacgataacacttatcaacattatgctgaatgaaaacacaggcttattttattttatacttaaaatatttgttggatgtactgcatatttgataacatatagactattttttaggtctgcccttcaaaatattttaccaggtaagttacgtaaaattttattacttagctaa

SEQ ID NO: 140984 - DNA, 1392 bp, Enterobacter cloacae
atgaatagttatgaatcgacctctggtattcgtgatttaaaagtcatgggggccagaacacaattagggagtggttgggcgagtgcgacccataagcttgtagcccttgataaagagaccctacagccagtcagcgttgactggtggtatgaagatgaatccgcaccgcgctttactggacctgttttcaccgatacccgcccaaatgtacgcttgctggcaaattctgatgtttatcggctgggtgatgttattaatatcagcaattttggtggttcaggttctgcgttagctgccatcaaaaatgacggtactgttgtagcgtgggggatgctagaaaatggtggtacatcacccgtcagtgatcgtaatcatgatgtcaggtcaatttttggtggtatggattcttccgctgccgtaaacgccaatggtcaggtgtttacctggtctgttgatgatattaatcctctgccagctgacgttgcggccctgaatgatatagtggatattaacgtggcccaatactgggatggcaacggaaattatacctatctggcgttgcgagctaataaccaggtcatgcagtggacggatggaatatcacataacgattttccagaagatattgctgagacgaaggatttcatcgctatccagaccacagaatatgccttcgcgggaattaccaaaaatggccatgttatcacttggggggacacatcatatgggggagagattcctgtacatttgaaagaaatgcatgatgtaagcactctttacagtaacgtgggtgcatttgtagcgctcaggtcgtcaggcagtatttttgcttggggcagtatggaatatggtgctgacattccggataacattgctagcctgacggatattgtttccgtataccgtacaagttcaacttttattgccttaagacaaaatggcagtgtggttttttgggggaaaaacagaaatttgaccgaactgccagcagaaattgcaagtctaagaaatatcattgatgtgcaagcagctgttaatggcagttatgcttttttaacttcagagggtaaggtgtactgttgggggcatgttgctcaaaaaatgcccgaggatttgtcagatgtcgtctccctgacatctgcctggaatgcttttgcggcgcttcgtcgtgacggtagcgttgttgcctggggatatgaagatgagggcggagacacaacccccgtcacaaacgaactttatgatattcgcgcaatatattcttgtggatatcgtttttgcgccttgcgcaacgatgatcgtctcttagaatggggcgaagagtccagaacggatataacaaagatgccagcagatttgcaggggaatgttacctatagctttgttaaatga

SEQ ID NO: 140985 - DNA, 1365 bp, Enterobacter cloacae
atggctaagtataaggcgtatccggagtataaggattctggagttgagtggttgggggttattcctaagggctggactatcagtaaagtaaagtatctagccccatttcaggttggttggaccccgccaactaagaatgatgccaatttcattggtgataatctgtgggtcaatatttctgacttaaaagataaatttatttcttctacagcaaaatgtatctctgataaagctgcaaaagaagcatcaatggatatcactcctaggggttctctgctgtatagttttaaactatcggttggcgcagtttcatttgcaggatgtgatctttatacaaatgaagctatcgcatcatttttggaccaagctcaactgcctctatcatatttgtactatgcactcccgatatttattattgaaaatgcatcaactaatatctatggtgcaaagatattaaaccaagagcttataaaaaactcatttttacttgcaccttcacatagtgaagcaaagaaagttgctcaatttttggatcacgaaaccgcaaaaatcgataacctgatcgagaagcaacagcaactgattgaactgctgaaagaaaaacgtcaggcagcgattagccatgctgtcaccaaagggttaaaccctgatgtgccgatgaaagattctggtgttgagtggttgggggaagtgccggaacactgggctatcaaaccattaagatatttaggtgaatgtcaaaatggaataaacattggagcagaagcatttggttctgggtttccatttgttagctacggtgatgcctataaaaatagagttttacctgataatggcagtggattggtgcagtcgactgctgaggatagaagaaaatattcacttttacgaggtgatgtactctttactcgaacgtcagaaacaattgaagagattggttttgcatctgcttgtgttaaaagcatagaaaatgcttgttttgccggttttttgattagatttcgtcctaaatcctctgagctatgtattgaatattcaaagtattatttttcaaaccaattacttagaatctttttcactaaggaaatgaatttgattaccagagcatcacttagccaagatttattaaagacgatgccagtagttatccctccagtggacgaacagataaaaatttccgaattattagataatatctccgagaaatttgatcagcttcaattacttggtgaggagcaaataaaatatctccaagaacgccgcaccgcccttatctccgccgccgttaccggaaaaatcgacgtccgcgactgggttgccccggatacgcagggtgttgaggagccacaggaggccacggcatga

SEQ ID NO: 140986 - DNA, 1119 bp, Enterobacter cloacae
atgactgaaaaattcaccgcaattttgttagatacaagtatctacgatcagtacggattaaagcttgagaaaggactgctgggtaagctttcccagttcagccgaaccccaacaacgtttttgataccggatgtaatttacaatgaagttaaaaatcatcttgaaagaaaaatcaggacttcacgtggctcccttgagaaagctttcgaagaggctggcgatcatctcttttttgatggaagcgaacttaatgacgcaaaaaggacattgattgaaggcagagaagttgaaggattaggaaagagtagattagacagatttgttggcgttacagatgcggagattttgactactggggattacgtttcggtacctgaactacttgaacgatatttctcttcacaagctcctttcgcagatacaggtaagaaaaaaaatgagtttcctgatgcgatcacattaatggccgtccaagcttgggctgaagagaatggtgaaaatgttcttgccgtagcaagagatgacgattggcagagattttgtgctgatgctgagaatttgcattatgaacctgacttatcaaaggccttagcacacttcaatgaagaaaccgcaccttatgaactaattgataacttacaaaaagcacttgctgaaggacaggctggtaaattcttgcatgatgttgctgtacaccttgagtcaacctttgacggttttgcaccagaacaagaggcagattcatatttgtactgggaggctgatgggtgctcaggtggatttgaagattttgagtttacagataaccacttcactgtcattgacaaggatgaaaactgggttgttatagaagcatttgcagaaatttcactttacgcagatggtgatttctccctatcagtttacgattcattcgataaggatcatgtctacatggggtcaatcaccaagcgtgccgaggaaacatatacatccagaatactaataacaatctccggagacttgtcaggttctatagatgatttgaccgttgaagatgtggaagtgatagagcgtccaacgtcgatggattttggggagctggaattagcatatgaacctgacgagcaggatctgtaa

SEQ ID NO: 140987 - DNA, 735 bp, Enterobacter cloacae
atgattgagtatcatgaagttgtaagtattcacgaatatctgaccaagcactatgaattctctgaagaccccatatcgcctcccggagtcaaaagcgttgagctacttgagtcagcagttgcaaggccatttatgaccgtgaatggcaaagatgcatatccggaggtaatggataaagctgctgctctttttcatgggataatttctaatcacacatttcataacggcaataagcgtgtagcgctgttggttacaatgtgtttcatggacaagggtggttactggctagataagtgttctgacatagatctctacgaattcacacggaaaacggccgcgcatgaaatatgcaaagacagaaaagatgaatttaaaacaattaaggcctttcttaaaacaaattcacgtaaacgaaaatacgaagagcagcaactcagcttccatagtctttatcagcatcttacgaatgccggcttttcaatagaagatgacggtgatttctacgccatcatgaaaaatggtaagcgcgttacgaagattttaaaaaaaggggcttctggtaaagaaccttacgatcctccttatattcgttcattgcgtcgtaaacttcttctcactcccacaaatgggtgggatagcatgagattttatcaggtatccactggtttaactgaaaatataggtgaactcgtgaagttacgtggcaaagttttagattggttagcaaaaatttaa

SEQ ID NO: 140988 - DNA, 882 bp, Enterobacter cloacae
atggataaaactgattacatcctacgttcacttacgaaaacctcaaaaaaacgatgggaacattatgcagtaactcgcatttatcatcttttaaatgatcccgacattgaatttgtctgccagcaatgtgtcagaaaagaaaatggaaaaatctatttggcagatttatttttcccacaactggaactttatcttgaaattgatgaagggcatcacaacagtgagcaatcacaaatagatgatgcgaaacgtcgtatggatattactgaagctacaggatttttagagaaaagaattcccgccagcgaaataagtcttgaaattttcgatcgttatatcaatgaatttattgagttgatacgcaatcgtaaaaatagaatgattaaagataaaaaattcaaagaatgggattatgataataaatatacagctcgtccacatcttaaggcaggaaggatatctgtaggtccagatgccgtcttcagataccaccgggatgctttgaactgtttcggttacaacaaaggacatcatcagtctggcggttggagcattccttctcacataagtgaagcaatgggtctatcaggaaaatgcatggtttggtttccaaaactatatggaaattcagattggggaaatgaattgactgatgatggtaacaaaatcatagagcggaatataaaagatgatgagggatacacagaacgctgggataaacgaattgttatggcacattctcgtgatgagttgaacaggacactgtaccgatttcttggggtgtttgaagctatccctggtcaccatactggcaacatactagagtttcatcgtgtaagtacatcggtcaatgtataccctcctaatgatgctgccccatga

SEQ ID NO: 140989 - DNA, 147 bp, Enterobacter cloacae
atgagcctgcaaaaaacctggggtaactttcatctgagcgcgatgggggggttttactctccgcgcttctcgtcgggtgcgatgacagcgtcgcgcaaaatgccgcgccgcaagcgcccgttgtcagcgctgctgacgtggtggtga

SEQ ID NO: 140990 - DNA, 3642 bp, Enterobacter cloacae
atgtcaaataatagtaaaatcatacctctacttaaaaatatagcttctcgattgtgggaaggccatgccgctgtgttggttggagccggtttcagccgcaacgcgcagccattaagtggtgcatctaggccattccctatgtggaatgatctaggcgatatattttatgaaaaagtctactgtgataaaaatattaataaatattcaaatgttttgaagttaggtgatgaagttcaagcggcttttggtcgagcaactttagataagttaattttagagaatgtacctgacaaggagtacgaaccttctaaattacattcgtcacttttatccttaccctgggttgatgttttcacaacaaactatgactcattattggaaagggcgagtgtttttgttgattctaggaaatatgattttgtattcaacaaaaatgatctaataaatgcagaaagacctagaatcataaaacttcatgggagtttcccatctgaacgcccatttattataactgaagaagattataggcgatatcctatagataactctcctttcgtaaatacagttcagcaatcgttaattgaaaatactttgtgtctcattgggttctctggagatgatcctaacttcttaaactggattggttggattagagataatttaggagctgaaaattccccaaaaatattcatgatcggattattttccttcaatgaagcacaacgaaagcttttagaaaaaagaaatattgttattgttgatttaagtttgcttgatggttttgagggagatcattatgccgcacatgaacgctttatcgattttataattcaatgtaaaggttctgacaaccaatttgattggccaacaaattattataacaacgttattaaccacaatgattcggaagaaacaatcaagaataaattatccggttgtgtttcagcttgggcacaagctagaacggattacccgcaatggctaatagcgcctgaagataatagaagaaagctatgggatgacactcttaattggcttcaaatatgttctaaagaaaatgtttgggaggaatatcttgatttaaatttttcctttgaactattgtggcgaattgatagatgcttattcccgattttcgatgatgtcgcaaactttttctttagaatagttgataaatataaaccttatttatttaccaagataaaatcagtaactcatgaggaaaaagatatcaatgctaaattaccttatataattatagggcttttgaaatattgtaggcaggaatcactagatagtaaatggaatgagttaagtattattatacatgctcatctcaaaaaactaacaccagaaacccgcgctgagtatgaatacgagaatatacttcaatcatactatcttttgaattttgatgaagcccgagcgaaaataaacaactgggaagcaaataaacagttaccatatcatgaagttaaacgagcaggattgttagctgagtttggcatgcttgaagaagctattacaatccttgaggaatcactttctatcattagacgtaatagcctgatgtcctctaaaaacaatgactactcaagtgcttctcaggaagcatatgttatttttatactcagaatgtttaagcgttcttggtctttcactgggaataaggaggatttatcaaaaaaatatcgttctcgcttagcttatctatcccagtatcgttgtgatcctgataatgaatttaaatatctggagattagacttgagtcaggtttagaaaattatcgctcaaaaacaaattctgattttgatctcggtcgtagaacaaaaacaactcactttggcactggtaatgctgacatcccagctcttagtgctttcaattttttactgttagctgagaacataggattaccgttccacatccctgaaatgaccattttaggaaaaacagcagtaaatgcagcaaagaatatctataagcattgcccacaatggtcaatatttactgtgctgcgtgtatttaatgagaagaactttgaaactatattaaatagaaataatctatcaataatgggaagggctaatgcagaacttcaattcgataaatatcttttaaagtatgaaagcatagcagcaaaacaattaaatgataaattatttaattctttagatattgaagtttccatgctaaaaatgatacctgaaatcctttctcgattagtcacgaaaacttctttcaataagaaagagaagataatatctttgttatgtacattatataattcaaaggaattttcaggttatgattatacaaaaaatcttttaatacgaacaatcaataatctgagtaccgaccaaaaactacaattaattcctacatttgtggaatttccgtccaagccaattaacgaacacttaaggcgctatccaaatcataatttcataaatccattcgggttaataattagcattgctaattcaaagaaaacaaataacattgaaaataagaaaataccatctatcaaaattgcaagaaatatagtcgaaataaataacaatgacgaacaggccaggcgcatttcgtcaactaaactaattactctatataaactttgcttattgaataaaaccgatgaaaaaaaactcaccaaagcattatggtctaaacaagatgagtatgggttccccaaggattcaggatattatagctttttctttattgatgatttaagaccagaaggagaagatgtccataataaaattatgcatctaatcaaacaattctcattccctagacaaaatggggatggcgtagctttaacaggtggtatttcacattattgcaatgaattagtgggcgcgctttctcatatacccttcgcagaaaatgacatacagacaattatttcacaattaattgattggtatcactccgataagcattggcttgataaaaatgatgaagtgcttgatgagttcctgaaacgttttaaaaatattacaaatatagttaccgtgattctgaaagaacataatcacttactagatgaaggtacaaaaatagagattggctcactactattggatatgcaaagtaaaggagtacctgttggcagagcgcttacaactctgtctctaatcaataacaagcctttgtcagaattattttcaactcttaagggacagttttatcaattgaatgaagaacctgttattgacgcaatagaatcaatgtatattttgttagatcaagatagagatatcaccaaattcctatcactaatcagccaaaaaatatcttggaatcgcggcccatgtgttcaagaaagtttaatcatcgctcttgagataataaagaaaaaaaatattaagatggatgattgctttatcgacgacatactcgttggacttaataacatactaaaatcagataatgaaattggagataataatgaatcattcttggaccatctcgaaaagaaagtaagtgcagctaaacttgcatcatatttatttagtgaatgtatgatgcttggaagagaacttccagttactcttaaagaatggagtgatcattgcacttcttcagatgaattcgaggaaattagaaacgcctggatttataaagctaattaa

SEQ ID NO: 140991 - DNA, 1743 bp, Enterobacter cloacae
atgctcaacgaacgtcagtttgctttactcgatgcgctggagtcgcagcctgcggcactcagcggcctggcccagcataccggcgtttctgcccgcaccatcctgcgtgatatcgactacatcaatttcaccctcagcggcacggcgcggatcagggcgacgggcagtgccctgtaccagcttgagattgccgacagaaaacagtatttccggctgttacagcgccatgataatgatgaccggctgctggcgctgctgctgatccgcccggtgatgtcccgcgcgcagctggcggatgcgctaaaccttcccgatccctggattgctgagcgtctgccgcgcctgcggcagcgctatgcgcgcgcattcccgctcgccagccgtcccggcgccgggtacttcattgatgtcgacccggataagcgcctgatcctgctggctaacctgttcaaaaaggatccgctggcgtttccgctggcggggattgccccggcaaccttatccatgctgcacgcgcactgtcagagcctgacggcgtggccggatattcaggcagattatcgggccagcatggttctggccggatacgccctgcgccagcagcttccggtttacgccgacgtcgccgaatctgacgcgcttcgcgactgctgcgagcggacggggatctggctcagtccgacggtgattaacgtcatcgccagcacgctcaatcggctacagcaacacgccaatggtatcacatcagagtatgtcgccggccagctggcgaggctgtccgccgcagggcagccgcaggtgatcgacgctcagctgaaagatgacctgaccgcccacctgaaacgttgcgtggcgatgccaaactggctgccggaaagccgacccggctccatgaataaccttaaggccgcgtggcctgccgcgtttgatatgagcgtaaaattcatcaaccagttgcgcatggagatcgacatcccgcttatcgacagcgatctgccgggactctatttcgcctgtgcactggagcgacaccacagcgcatggacgcccatctttctgcttgccgatcaaaacgccattgcgaccatcaataaaatggccattgagcgagaggtgatgaactgccgggtcgttgtcgccttcacgcccgatgaacttgtggccctgacagacgaaagccatccggcgctgattgtgaataacagccactttctgctggatgaaggcctacgtaacgtactggttatacgcaacatcattaccgcggcgggtatcgatcagattaaggatttcctggcctcggcgtttattcgccagcaacctgaacgctttttcccgccagagggatctttttactacgcgaaccgcacctgcgagagctgggatgaggtcatcgccgccgttaccgcgcgtctctgtgaaaggcagttaattaccgaagatgaagcgctacgcattagtcagcgcgaacgggagggcgagaatctgatcgtcaaccacgtggcgatcccccactgctggagcgaggccgcggggccatttcgcggatattttattatgctggaacgcacgcttcacgtgaacagcgaacccgtgaagcacgcccttatcgcctgtgccagcgtggaaaatcggcaggagcagaaagtatttagttttctggccggcatgttaagcagtcattcgccgcagcagatcgaccgtgtggacagttacgagacatttattgcgttattgcgctga

SEQ ID NO: 140992 - DNA, 273 bp, Enterobacter cloacae
atggaatttacagaaagactaaatgcgttatctactaaaattaggcagcaaattgaagtaattaatacagaagaagcaaccaaaacggcatttgtaatgccttttattcataatgttttaggttatgacgtatttgatccgtcagaggttacgcctgaatttgtttgtgatatcggtacaaaaaaaggtgaaaaaattgactatgcgataatgaaaaataacgatgtgcaaatactcatcgaatgtaaaaaattggtgagcctttgcatataa

SEQ ID NO: 140993 - DNA, 2145 bp, Enterobacter cloacae
atgaacaatgagattaccagtgctactgacaatgatggcgaacatgtggcgcatgtattttcaaaatgcaaagaaataaacgaccttatcaactcagataaggaggatgaagccaggaatagtttaatccttcttttagattatcataaaaaacataaaatccattatacgcctttagttaatcatctcatcagatgcacagggttgtatccttacattcaggctgaaacagcagattggaatgaacgattaatctatgatttattcaaagttgacgttggtttaaacactccaatcactttacacagagagcaatccttaatattaaaaagattattaaatggtgaaagcttagctgtaagcgcaccaacaagttttgggaaaagcttcattattgatgcttttatatcattaaacaaaccgactaatgttctgattattgtccctacaatatctcttacagacgagacccgaagaaggttgcataaaaaatttgctgctgaatataaaataattacaactgctgacgttagcatttctcaaaagaatatatttatattcccacaagaaagagcaattagctacttagataaaattaatgagttagacttattaatcattgatgaattttataaagcaagtgagaatcatgacaaggaaagagcacctgctttattgaaagcaataatgaagttcacaaaaattgcaaagcaacgatattttttagctccaaacattagcacattgaaaagcaatcctttcacaaaaggaatggaatttttgaaattggatttcagcacagtatttttagaaaaacatgacctatcaaaacaaataaatgaggatcctcaaaaaaaatcctcatttcttttagatatccttgaaaacacagcaggaaaatctttaatttacgctggaacttattctaacatcaataaaatatcagcagcaattctcaacaatcataaaaaaagcgaggttaagttattgaaagaattctctgattggttgagattgaattattctcaaaaatggatgcttgcagatattattgaaaagggaacgggcattcataatggacaactacatcgttcaatcagccaaattcaaataaaactatttgaagaaaataacggattaaaaaacttaatatcaacttcttcaattgtcgagggagttaatacagcagcagaaaacgtaatcatatggcaatcaaaaaatggaaaccgcaatctgaaagacttcatgtataaaaatatcattggcagaagcggaagaatgttcaaacacttcgtaggcaagatatatttactgtctccgccaccaaaagaagaagataacgaattagatcttacaatacccaatgcacttgtcggcgatattgatgagacggagtttaaaaacgacctaactccagaacaaatttctgccatcatagcttataaagaagaaatgcaatcattattaggctttgaaacattcaatagattacaatcagaaggtgcattcaaatctaatgatccatttctaatcagagatattgctgtggatatatcaatgaatcctagcgattggttaagcatttattaccttaattctgaaaaccctgaaagctgggattattttttatataaaataattaaattaaaaccggccggatggggagttgagtataataaatttgtttcttatgttaaaattgcaagttataactggaaattaaccatccctgaaatattaagaaaactctcaaaacacaacattacgataaatgaactctttgaattagaaagaaatcttacattcaaattatcttcattactgaatgatgtaaatgtattgcttaacgagctaatcccaaatagaaacacagacatatctccatttatctataaaacttcaaacgcatttctccctccaattgtttatcaattagaagaatatgggctaccgcgcatgattacaaaaaagattgatgatgctttaaatcttgacttagacaatgaagaactaactttacataccattctggaccaccttaaaactttaaactatgttttcggattatccgggttaatcggtgcaagcatgattgaagaatatataatgaacaacttctttgatggtgtaacgtatagtcaataa

SEQ ID NO: 140994 - DNA, 918 bp, Enterobacter cloacae
atggattttgatattcttatagaccaaagcctatcgacactctttaatgatagcattaatacaatcaataaaaataacaaacttatttctatgataaatgattttgaagacggcaagtggcgccatcaaaaattccaccgatttatatgggataatatattagaaaccgctctatcgaatcaggaaagggaagcatatataggtggccctagcacatctctagctaaagcagcacagaaccttagacttacagatagtgaaaaagatattagcaaaggaagcgagctcgctgagatttttttatatggcattatgaaacaccactttaaagcgctacctgttgtacctaaaatattttataaacagaacactcaagataatgccaagggtgcagacagcgtacatattgttatagaagatgacaacaactttacgttatggttcggtgaagcaaagttttacaatagtattgaagatgaccgattcgattcaataatcacatcagttaacaattccatttcaacagataaaataaagaaagaaaacagtataataacaaacactaaagatctagttagcttggtaaaaaatgatggactaagatctaaaataatgtattccttgtcatctaaaaactcaattgataatattaagccaatactcaatatccctattttcattttacatgaatgccctataacagaaaacgcctcgtctctttcccctgaatataagtcatcaattatagaactccataaagaaagagctaagtctttttttaaaaaacaccaaataaaaataaaaaacatccatgattatgacaagataaagtttcacctaatccttttccctattccaaagaaagaacaaataattaataagtttgttgaaacagttcgttttcacaaggaacagtaa

SEQ ID NO: 140995 - DNA, 807 bp, Enterobacter cloacae
atgatcacagcagactatcaaagccttgagcccggtaataaagtccggcttatcgaagttgatggctctacgttcggcgtggatgatgtactgcgatttcacgcatacaacctcccgcacacagaagaagaaatcgctgccgctggtggcgatgaatcaaagctgaaggcgaaaagtatctggtggcaggaggaggaatatgccgcctggccgtatcaaatagaagggcttgaagcctccacagacggcaacagtgcccagccaacactcacggttgcagatatcgatagcaagattacagcgctgtgccttgcttatgacgatatgctacaggcgaaagtcactatccatgacacttattcgcattatctcgatgcgaagaacttcccagcaggtaacgcaacagctgatccgcaacaggtcagaaaacgagtttttttcattgatggtaaaagcagcgaaattccgggcgaaagtatcgaattcgtactcgatagcccgatgtcgttgcagggtaagatgatccccacgcgccagcttcattccctgtgtacctggtgcatgcgcaataagtaccgaaccggtgacggttgcgattatgccggaaccagatacttcgataacaataataattctgtcgatgatccctcgcttgatgtctgtaacggcacgctcacggcgtgcaaacttcgcttcggagagaatgaagaactgccgtttggtggtttcccgggaactggtcccgaaagggagcaatggggcggttggagtttcggacggcgggaccggggcaacgaatgtcgctga

SEQ ID NO: 140996 - DNA, 432 bp, Enterobacter cloacae
atgaaagtaaaatataaagagggtgacatctttgtcattccgatgagtaatgggaagtatgcgctttgccaggttgtttttgctccaaagcaaaagtttaagcaagcaataggtttctgcattttatcaatacaggatacggaggagtttgaagagaacagttcactgacacctctatcttttgaaaagtttggcaagaagatgaaggttattttcactggcaaccaaaatattagcaaaggtatttggaaaattattggttatgctaatctcacagaagaaaaaaaacagttaaaaatatttaattatgctggtggcttatatgatgtggaggaggaaatcaggcgtttgtctgttgctgaatatcctaattacacaactatgggggttgcaggctttgagcttgtcgacaatgttctgataaatatttga

SEQ ID NO: 140997 - DNA, 267 bp, Enterobacter cloacae
atgcacactgctttttcttccccgccttctgcccctgccgcgccaatgatgccggtttctgatgccgttcaggatcgctttatccgcctgcccgaagtgatgcatctgtgtggcctgtcccggtcgaccatttatgacctcatcagccgggaagccttcccgaaacaaatcagcctgggcggtaaaaacgtggcgtgggcgcagtctgaaatcacggcatggatggcagatcgcattgccgaacgcaaccgggactatgacgcatga

SEQ ID NO: 140998 - DNA, 549 bp, Enterobacter cloacae
atgatgatgaccgttcagcaaacaacccctttttctggcttgcttcctgtcgtcgtttccaggtatagttttcccgctgtcgcaaaatcggcagccgggcgtgagaacccgagttacttcaaggcgacaccagacgcgccatgcgtctttttttgtgtctatgcctatgtgcacctgttgtttacgcatcggttctttagccgttgctgtatccgcgtaatggtggctcaggcggggcagccttcgggctggccggttcccttgaaggccggtttctcacccccgtctgggctaccacccgagcgtgagaactccggtggtagcgataaccgctacttcaaggaggttgcccttatggctacgaccctcaccccgtcacacccgcagtttgtctttgtgtttgccgccgttcgtcgcgcagaccgtaaaccccgtatctgtatgctccgcaccgttgccggtgatgaacacgccgcacgtctttctctcattcgcgattacgtcctatcgtttgctggccgtttgccggttgcggaggtgcgcgcatga

SEQ ID NO: 140999 - DNA, 228 bp, Enterobacter cloacae
atgagacacaccaccattaccgcccgtgacctcgaatgccttgagcacatgcgcaacgtcggccagctcgtcaatgagctgatgcaggtgcaggactgcgcgaccgttcatcgtgaccctgcgcagcattcacagctcacctccgtgatttacctcatgaccgcccagctcgacggcgttgtagagcgctgcaatcagcgctggctgaccggggagggcaacgtatga

SEQ ID NO: 141000 - DNA, 456 bp, Enterobacter cloacae
atgaaaaagccattaccgaccgtattacgcgccgcgctgtatcgccgcgctgtcgcctgtgcatggctgacggtatgcgaacgccagcaccgctacccgcatctcaccctcgacgcgctggaaagtgcgattgccaacgagctcgagggcttctacctgcgccagcacggcgaggaaaaaggccgccagattgcctgtgcactgctggaagatttaatggaagccggaccactcaaagccgcgccgtcgctgtccttcctcgggctggccgtgatggatgaactctgcgcccgtcacatgcacctgttgtgcactgagggagaaaataacgatgaaaatgaacgtaacggaaaccgtaaaacaggcgtgcggccactggccgcgcattcttccagcgctgggtgtgaaggtcatgaaaaaccggcatcaggcctgtccggtgtgcggcggctctga

SEQ ID NO: 141001 - DNA, 321 bp, Enterobacter cloacae
atgaaaaaaccattaccccccgtattacgcaccgcgctgtatcgtcgcgccgtggcatgtgcatggctgacggtatgcgaacatcagcaccgctacccgcacctcaccctcgacgcgctggaaagcgccattgccgacgaactggagggcttctacctgcgccagcacggcgaggaaaaaggccgtctgattgcctgtgcactgctggaagatttaatggaagccggaccactcaaagccgcgccgtcgctgtcctttctcgggctggccgtgatggatgagctttgcgcccgtcatatcactgcaccggtactgcactga

SEQ ID NO: 141002 - DNA, 228 bp, Enterobacter cloacae
atgagacacaccaccattaccgcccgcgacctcgaatgccttgagcacatgcgcaacgtcggccagctcgttggcgacctgatgcaggtgcaggattgcgccaccgttcgtcgtgacccggcgcagcagtcacagctcacttccgtgatttaccttatgaccgcccagctcgacggcgtggtcgaacgctgcaatcagcgctggctgaccggggagggaaacgtatga

SEQ ID NO: 141003 - DNA, 132 bp, Enterobacter cloacae
atggcccgcgcggatcacgcggttcagaccctgctcggccatgaaattttcacgatcggcgtcgttcatttcagcgatatcggattcaaccgcgttccaaaacgctaccactacagaacctttatcgcctga

SEQ ID NO: 141004 - DNA, 312 bp, Enterobacter cloacae
gtgatagagatacttacggtaattacgcgggacgatgctggcattacccataaacatcccgctggtctgcggcagcatttccagataaccgcaaaaatcaaacgtcgggtcagcatcgcgcttgatattgagtgcctcgtcggagttctgctgcaactggagcagcgcgcgcgcggtcatcgggtcgctgaatttctgcataagctggcgcacgataacagccagctcgcgcgcaattttatccctgagctgcgggtcgcgttcctccggggcaatctgctccgggaaatgaataatcacccggcgacgtga

SEQ ID NO: 141005 - DNA, 192 bp, Enterobacter cloacae
atgaacgttgatcgtaaaaaaacactgaatggggcaagtggacggagcgaggcctggtcttcaccgtcattatgttttgcatcattaactatgcttatcaactctaccgcatattttctgcttgaagccgtctgttttcgttgtgaaagctacgaaaaatacaaagcccttacccagacaaaaatatattaa

SEQ ID NO: 141006 - DNA, 987 bp, Enterobacter cloacae
atggaacaacgccgtttttccggcaaaggccactggtatcacgaaacccagtcgaatcattcgcagacggacgttctgccgctggtgcctgaagccgctaacgtcgacgatcgttttttgctcgatttagccctacctgacgacattgccgcaagctgttgtgggtggcttacgccagcccgaaccttgtgccgcctcttattcccgctcgatactcccgtaaaccgtctgcacacgcttagcgcctacgacagactgagcacggcgttgacggtttcccaggcgtgtggcgtccagcggctctgtaaccactacgcggcgctcctcgccccccttccgggccccgactcttcccgggaaagcaatcgacgccttgcagaaatcactcagtatgcccgccagctggcgagctctccggacgtcattgacgataaagcgcaaactcagcttgatgaggtgggactgacaacgtatgacattgtgcttatcaaccagatcatcggctttactggttttcaggcgcgggcggttgcagtgtttcaggcgctgcttggccatccggtacgctggctaccgggacaccacattcagccccatacactaccgctgagctttacccgatggacagccacccagcccgtagtcgaactaaaatatgccagtgcggttcaacttgaggcgctctcacgctggcaggccgaacctgcgctttcagcgctcacgccggttctctgccatgagccgatgctgctgaatctgacgggcgagatactggttaaccacccacaaagcgaagcccagccatctgcatcgctctcagccgcccatacgctgctgcttacgtctcccgatcgttttagcgccgcccagttaacgcctctcacggaggccggtatcccaccgggcaaggcaattaacctgttaacccacggcgcttttaatggctggctggaccgtcttcgcgtggcgcttggcaaagaggaataa

SEQ ID NO: 141007 - DNA, 258 bp, Enterobacter cloacae
atggctacaaaacgtcgtgctgaaacagctcaggaaaatcgcgaaaaattgattcatgcggcgcgaaaggcgtttgctgagaaaggctttgctgcagcgtcgatggatgaactgacggcaagcgtggggttaacgcgcggtgcgctgtatcataatttcagagataagaaagggttactggcggcggtggtcgcgcagatagacagcgaaatggcgggcaacgcgaaagccgttgccgcggccacagacgatgattag

SEQ ID NO: 141008 - DNA, 615 bp, Enterobacter cloacae
atgaagcaaccgtgggagctaaacccagctctaacaatagagcgacttaaacaacttgcatccctaattcgaaatgtcagggatgatgtgattgatttacataatgaagagcttggtgattctgctcgctcaactgggctgagggcctatgaatgttgccgaacgaggataattcgtgctgcaactcaatttgaagagtggccctggcttggcatagtgaaagacgatgggaaatttaccttttctattgattcagtgccagtccgtttgtaccggggaggccctaatcgcccggaagagcgcaggctgataccttgcgtagaagcgctgagtcagatgagtttattgcctgttgaagtaggcaacgctgcttcagttatttggttttttgctgttgaagttgatgatttacgctatgttgagcgtgtaacctttactggctttttagaaggcgtgcaggtttcatgctgggaaattcctttggatgaaagagttcctgctttcagctccattgataccgaattacctgagccagtcaaaactcagaaagcatcaatctctgttaaaaggaaagataaaaaggccgagaatgattactcgaataatggttcgtaa

SEQ ID NO: 141009 - DNA, 1128 bp, Enterobacter cloacae
atggctatagaattttatggcgagcggcttcggctcgctcgtttgttaaaagggtatactctgcaagagcttggtgatgctgtttgcgtgacccggcaaagtatacatcagtacgaaagtgacgtccgggcaccagctgatgacgtgcggaatgcactggcagagtttcttcaggtttccaccgatttcttcgggatacctctttctggtgacgttaagccagagcaatgccattttcgtaaaagacagacaacgcctgcaggtgttaaagagcgggttcaggcatacagtactattcttgagcaactcgttgctgagctgcatgaacacctagatatgcccgagaacggttttaatttgattgataatagtaagattgtagaattaacacctccattgatagaaaagattgctgagggggctcgtattcgttgggggctaacacctgatgcccctatagataatatggttaatgttgttgaaaatcagggagcaattgttacctgttttgatggtgtgtctgaaaaagttgatgctttatctgttaatagaaaattccctataataattcgcaacactgcgaaagaaagtgcctgccgaatgcgttttgacttggctcatgaatgtggtcatttaataatgcatgatggtattgagactggatgtaaaaaaacagagcgagaggctgatgcttttgctagtgctttcttatttcctagaaagtcttttgccagagaatttccgtcctgcttaggtgttggcggaatgattgactggaaaaaagtgtatgctttaaaagctcgatggaaagttagtgctaaagcaattatttatagagcacatttcttgggatttattaacgcccagcaatatagaagcgctaatgtttggttcagtcaaacacgacaaacgaaaaaagaaaaactggacgatcaaattccgttagaagaacctcatgttcttgaggaaagtttaactattttgaaagaacatctgggtatatctttcggcatgttagctgaaaagattaaaatcaaaccagaattattggcagatatatcaggtgttaaatacgtacctgacatagatgatggctatgacgatattgttgttccattcaagttttga

SEQ ID NO: 141010 - DNA, 1404 bp, Enterobacter cloacae
atgatagctgagactttcaatgattctgatgtttctttccaaagaatatccttaagaaacatgacggtatcggacaaagcaataaggcagcgatcttatgaagctccggatttaaagggcactttctctactcatgctgctggaagatcaataccgctattcttgaaattcagacaaggatcaactgtaagaactatttcaggaaccgggcgtttagtcgaatcatctaatagaattaactttgataacttagctctttgggtttacaatcaactttctctaataaaagatggtgggggcgaaaaggattttttagatgcatttgcgaagcagaagaaacttcatgaagtgcttgagcactcaaaaccaaatgcaattttaattgaaagctcatctttatatgaccaactcatcgaagatgatattaaaattagatatgaaaacaaaaaaggaatagaggttgaactaaaaacgaaggaattagagcgattgataaagcatctcgaaagagtttatcccatcgattcagaaggaaaaataacaactaaatttggccgggcatttatcagaataaataataaaactttaaccttcgactcatcattcttgagatcattaaaagtaaatgtatcaggaagtaatgttacgctacaaagttatataattaaaaatggattttatagtataacttttgatgatccccgctatatgtatttcattggaaactgttttcaagatgactcaggcatcgcagaaataaatagtatattagatatgttaagacccgtggaaaatatggattccgtaactagtgaaaaaggtaatttcaggaaaaccagtgtccaattttcgaaagggtcaatgtttaatctagttgagaagatacataaaaatgatgactatgttttttgcgatgatttaggtaatgaatgggctgatcacataacctttaataaaggtgattcatgcatcaatttcattcattcgaagcatggaccggttagtacttccgctagtaacctgcatgatgttgtcggacaagcggtaaaaaacttaggttacatgaattttagtaaaactgattttatgaaaaaattcgaagctaaatttgtagagaaatataattcaactaaaggtgagacaaatataaaaaggaccagaaaaggcaactcaaatggtctggatgaatatatctctaatcttttaaaggattttaaattgcatagaaaatgcattctgagctgttcctttgtatcaaagaatgaaataaaggatgagtttaataaaatatccagaggtgagaaggtgaatgggcacattactcaattgctatggatattgtcatctttttctcatgcagtaaaagaagtaaacgcaatcccaattatctactgctcagagtga

SEQ ID NO: 141011 - DNA, 159 bp, Enterobacter cloacae
atgatgaaaggttacaaatacgttaagaaaaaccaaattgatcccgtaaatataatacgctgcaaaacccttacaataaacaggtttttattcgaacagatttacgtttttcgacggcgatcaatttatagcaaaattaccacttttcggccattctga

SEQ ID NO: 141012 - DNA, 1257 bp, Enterobacter cloacae
atggtgcctaagggatggagcagctggatattaagtgatatttgtagaaagcaaatatcatatgggattgtacagacaggggataatttgcccaacggtataccatgtcttcgagttgtggatctcacacgagatgtcatgcgtctcgaggatatgattaagacatctgaagagacaaataaagcatacagaaaaacaatactggagaaagatgaaatcgtaatggcattgcgaggagagattggcttagcacgtcttattgacgataatcttgtcggcgcaaacattactagaggtttggcaaggatctctcctgaaactaaagttgttcttcccgagttcttactgtgggaacttcggtcccctcaattccgggcggatttaatacggagagtcggtggatcagcattacaagaaatatcgctgacagaattacgcaaggtaagaacattattacccccccttcttgaacagaaaaaaatcgcccaaatcctgtcaatctgggataaggcgatttcggtgacggaaaagctgctcgccaatagtcagcagcagaaaaaagcgcttatgcagcaattgcttaccgggaagaaacgcttgggtctgccggatggcagctatgagtttaggattactcactatggcttgatcccaaaagattggggttatccagccatcaaagaaatatgtactcaggtgagcgagaagaattcagctgctgtagatcacccggtactctcatgctccaagtatgacgggtttgtcgattctctgaaatactttaaaaagaaagtttatagtgatgacttatctggttatcgggtgatccaccgtggttgttttggttttccgtctaaccatatagaagaaggctcgattggcctacagaacctttatgaaattggtatcgttagtccgatttatgtagtttttcgtgcatcacctactagagtagacaactcgtatttgtacgcggtactcaaaacggatcactataagcaaatctttggtgcagcaactaatgcctctgttgaccgcagaggaagcctccgctggaaagaattcaaccagattcatgtgcccctaccaccactaaaagaacaacaaaaaatcgccgctgtcctgtccgtcgccgatgccgaaatctccacgctggagaaaaaactcgcctgcctgagagatgagaaaaaagccctgatgcaacagctactgactggcaaacgtcgtgttaaggtcgatgaggcggttgccgaatga

SEQ ID NO: 141013 - DNA, 1524 bp, Enterobacter cloacae
atgaacgacaaaatcagtcaggacacgatcaacaaagccctgtgggcagcgtgtgatacgttccgtggcaccatcagtgctgatacctataaagactttatccttaccatgctgttcctcaagtacatttcggatgtctggcaggaccactatgacgattacaaaaaacagtacggtgatgcgccggaactgattgaagcgatgatggctaacgagcgttttgtgctgccgaaaagcgccagcttttatgctctttacgagcgtcgccatgagccgggcaacggcgagcgtattgatcaggcactacacgctattgaagaagccaacggcaccaaactgaaagatgccgggaaaagcgtgttccaggatatttcgtttaacactgaccgtctgggtgaagaaaaacagaagaacaccatcctgcgtcagctgctggaagactttgccggtgaagatcttaacctgaagccaagccgtgtaggtacgctggacgttatcggtaatgcctacgaatatctgattaaaaactttgccgccagcggtgggcaaaaagccggggaattctataccccgccggaagtctcggacctgattgctgaactgctcgatccgcagccgggtgatatcatttgtgatcctgcctgtggttcaggttcgttgttaatgaagtgcgggcgtaagattgtctccgggcatgacagccgtaactatgctttgttcggtcaggaagcgattggctccacgtggtcgctggcgaaaatgaacatgttcctgcatggcgaagacaaccacaaaatcgagtggggcgataccattcgtaacccgaagctgctcgataaaaatggcgacctgatgctgtttgatatcgtgaccgcaaacccaccgttcagcctggataagtggggtcatgacgaggccgagaatgataagtttggtcgtttccgtcgcggtgtaccgccgaagactaaaggagattacgcctttatatcacacatgatagaaaccctaaaaccggggactggtcgtatgggcgtggtggtgccacacggtgtgctgttccgtggctccagcgaaggcaaaattaggcagaaactgattgatgaaaatctgctggatgcggtgattggtctaccagagaaattgttctacggtacggggattccggctgcgattctgattttcaaaaagcagaaagtggatgacaaggtgctgtttatcgatgccagccgcgaattcaaggcaggtaaaaaccagaatcagctcagcgaagaaaacattgagaaaatcgtcaagacctaccgtgatggcgataacgtcgagaaatacgcctatctcgccagcctgaaggagattcaggacaacgactataacctcaatatccctcgttatgtcgatacctttgaggaagaggacgagattgatatacgtgccgtacatgccgaacgtgagcaattgaaagtggaactggcgaagctggaaacggagatggcaggttacctgaaggagttgggttatggtgcctaa

SEQ ID NO: 141014 - DNA, 1182 bp, Enterobacter cloacae; identical to SEQ ID NO: 119205

SEQ ID NO: 141015 - DNA, 1200 bp, Enterobacter cloacae; identical to SEQ ID NO: 119204

SEQ ID NO: 141016 - DNA, 543 bp, Enterobacter cloacae
atgacacttccccgagacgtccatgcgtcccgtcagggccagcatgactacttgtgtggcatctacagcctgattaacaccctcagttatctttatgacggcagagttcggcgagaaaaattgatgtaccacctacttagcagctataaacgacgatgggatttatttgatctactgacgcttggcttggatgaagagcaaatggaccacctgattggtgatgtcctgttgaaagggcattacgcccaacattatcctctcaatattcatacccctttccgttaccgctcccgacgtacccgacagattctctgcgacatcaacgactggctggcaccatcggaaaatcaggcgcagcgcgtggtgattctgggcaccacctggcactggtctgtggttattcgcacggattccacccggctgttcttgtttgacagcttggggatacatagtcagcgcagggacaccttctccattcagccagagctgaaacggcatacgctgctggcggatgcaatttactttgttgaacgtgaattctga

SEQ ID NO: 141017 - DNA, 381 bp, Enterobacter cloacae
atgagtaatgaacagatgactgggcccagtgatatcggtgcaatagaaagtggagagtggctaacagcagagcagtttgccggaatggaagggatgccgggcacagcgaaaggggcacggctacgtctggaaaaactcacagctctgcacccggaaatccgccgcaaacgcacgagtgggaagggatttctgtaccatatcagtgcggcagggatggcgctgaaaagtgagagggatgcgacagatgcctcagcagacgagcagcttaacctgtggatacaactgtttcgcacaatgaaaccggcctccagggataaacttttacagcaggctctgactcaggttgcgagggacctggctgaaggagacgttaaccagtaa

SEQ ID NO: 141018 - DNA, 174 bp, Enterobacter cloacae; identical to SEQ ID NO: 23167

SEQ ID NO: 141019 - DNA, 495 bp, Enterobacter cloacae
atgaaaaaaacattgatggtctcactaccgagtatcctactgcttacattatcagcagaagccaaagtgttaccgatccagtcatacaacgtcttaacggagcagttcagtcttttgaacacttgcagagctgagggatatattgtcgatacagcagtacttaagcgacttgataaactcatcaaacgctttgaataccaggatgcctccggtaccacaacccgcatcaccccggcaatggagcaggaatatcacaatcgagcggatatggacgtactgaatgcacgaatgcttggtcagcaggatcaggcctccattgtatgcaataaagtgcttaaagatttcactgaccggttcgatgagcttgaggaaaagatctcagccacgaactcgccgcaaaccgaatcccctgctttagcacccgcccctaccgagccggaagaccgcccgatgaaatgggaaaacagcccggttcagggtattccaattcagtga

SEQ ID NO: 141020 - DNA, 324 bp, Enterobacter cloacae; identical to SEQ ID NO: 23165

SEQ ID NO: 141021 - DNA, 765 bp, Enterobacter cloacae
atgattagtatttgcgaatatacgtcattggattgggtatatatttggatgagatattttattatctcatttatcacatattcaatatttgcatacatcattaagagaatattatacccgttcagaaaagagttttcttatcctcctattgcaagatggcagaatggacatgaaagcacattttttatcagtcctgattactggtgggcatttcgcttcaaatcccgactaaaggcaaacgttacgggtgaaaaagtgaaggaagagttaaaagattatgtggatataaacaataaggttaacttttgtattagtgttattatcatggtgcttaattttcttgtttatgaatatgctcatgattacttttattcaaaagcgttaatgtgtatagcttttattcgatttatttctagaagttatgagatcacatatgcttttgtttgtgacatatttcagcagcatgaatccgttacggggttaaacaaacatgaacgtattcggttagctctatttagctatttagagatatttttttattcagcggcggcatatatgctattaccgcaaataaattctgtatatgatgccgttacaatgtcgttgagtgttggcacgctaacgaatgtggggtatgcatttaatttttgtgggcaaaatacacctttcattacaaacattgtgtttgttcaggtttttgctacattgagtcttgtagtactaagtcttgcagtatatctttctaggaaggatggtgacacgtaa

SEQ ID NO: 141022 - DNA, 498 bp, Enterobacter cloacae
atgaggaacccgcaggtaaaaaagcgtgaggctgccaatatcaggaaaaaaattcagcgtgatacgttggttaaaaaatttggtaggttaatggaaatttatatccataaagatatggagaaatgtcttgaggaaattatcaggggaggagggtttcccgctttagatgttgatatgttgaaaacaactgaaggacgttgttttgttatagcagaattgattggcttcacttatttgcaacaatgttctaccgtcaaaaataagaatgaaaaaataattcgtgaaattcatcaaaaggtatgcaaagagagagttaaaaaagataaaacagtcaaggccgttgcgttggaattgaataataatagcgttttttcaataggtaaaaaagacggtgatattataatagatgacggggagtggactgatgccaaggttaaaaaaatgagtgaattttcaacggtagctaagattattattaatctggataaaaatacatga

SEQ ID NO: 141023 - DNA, 198 bp, Enterobacter cloacae
atgaacgaactcaaattgatcaaacgtcaggccgtactggagcgctgcgccgtcagccgggcaacgctctaccgaatggttgcagcaggcacattcccgcgtccggtatcactaacgggagggcgtgcggtggcatggttgcaacacgacgttgaggcgtggattgcctccagggtacccacagggcagcgaaagtag

SEQ ID NO: 141024 - DNA, 1062 bp, Enterobacter cloacae
atgaataatatcgacaatgggaagaagtcattaaaaattggggtaagcagagatggacatccattaaaaatgcgtgtggatgcgatcactattgtaaccatggcagaaaacaagaatgagagaatacttattaaacgttgggttgagagtattttcgaagatccaactccctattttttaaggcctgcgacaatatcgaagaatgggaaaaaactctatcaaaagggggttgttatatactctggagataccatgctgctgagatttgaatataaaccagaaagaagcaatattggcaatataagaatggagtttcgccctcaacatttggatgaaaagggcatggacagccttattctttggatggctgaaagtggcctcagtgagtttattttcaaactcttaaaaagagcgtgggttacacgcttagacgtagctctagatctatataagtgtacccttgaggactatttttttgggatgaaacgctgccatacagggaaaatgaaccttggcacggaaactaggggattgacgctgggaacagtaaactctcatattcagatgtctatttatgagaaaattgatctgtcttgtgctgaaacatcctttaaaacagtaaaaaccgagggtaaaaacactctcagtgtgggtcagttcgcagatttcctgcgtattgaggccagaattcgtcccaaaagtaaacctcgctcgaagcagggcaaaaatgcgctgcttctggctgatataggtaaagtagagaacccgtatgaagatctacagatctaccaaaaaggtctggacaaagcactgtgtctcactgagagtcgcttcaaatatgaaaaggggcataatctggtgaaaaataaacatgacttcttgaagtctgttaatctcaggaaaatgccgaagcgtcttgaaaatgtgttcagaatgtatgaatacgatcttttgaataagtctgaaatatggtgtgcctggcccagttgcgtagctaaactcggcctgttaagcaacgcgccgttgtgggtcaacagcaacagaatacgtaggtttggttaa

SEQ ID NO: 141025 - DNA, 1269 bp, Enterobacter cloacae
atggcaaagctaacggacattcagatcaaagcatgggtgagggctggggaacgatttaatggtcgatctgatggcaatggcttgtatctatgctttcctaaaaactacgctatcccattctggcgtttccgctatcggtttgtcgggaaacagagggcaatggttattggaacctactctgaattttcactcgctaaagcgcgagaaacggcgaaagagctttccgcgcgtgttgccttaggctatgacgttgcaggagaaaagcaggaacgtaaggccgaggctatcaaaaagattgaagagcaaaaaaatgcgttgaaggtttcagatctggcccacgagtacttcgaacgccagatcttagggaactggaaacatccagatatcctgcgccgtcgtatcgacaaagacatcaatcctagtattgggcatcttaaaatcgaagatgttcgtccccgccatattgatgatatgttgcagaagatcatcgcacgaaacgcccctacagtggctaatgatgtcctccgctggacccgccgcattttcaactatggtatcaaacgccatatgctggagagtaaccccacaacagcgtttgagatcgctgatgctggaggtaaggagaaatcccgtgaacgctggctgagcagagaagaattgattaaattctttcaggccatgcgggtgactcaaggattttcccggcaaaacgagctgactatgaaaattctgcttgcactctgctgtaggaaaatggaactctgcgctgctcagtgggctgaatttgatttaaataactcagtctggcatttacctgccgaacgggtaaaaaacggtgatgctatcgatatccccttacccgcgataaccgttgaatggttgaaggaactacaccagatgtccctcaatagccagtgggtgctacctgcgcgtaaaatgcaacacagaatgatccctcatatacaggaaagtacactgcccgtagcactggcaaaagtgcgcagcaaccttcctgatataccaaatttcaccatccatgatttccgacgtacagggcgctcacacttagcagctttaggcgttgaccctgttgttgcagaacgttgtttaaaccaccgaatcaagggtgtagaaggcatctataaccgttatgaatattttcaagaacgtaaagcagccttagagcagtgggcagcattactggtctcactggaacgcggtgaggattacaatgtgatgccgataaaaaacaacaaaaaaatcagttag

SEQ ID NO: 141026 - DNA, 168 bp, Enterobacter cloacae
atgaatgagaatgaaataaccgaactggcgcgtcagatccgccttgagacgctgaaatccctgacgcagctgggttttggtcactacggcggcagcatgtcagtcgttgaaacgctggccattctgtacggcgcggtgatgaaaatagacccggccgatccggactag

SEQ ID NO: 141027 - DNA, 1020 bp, Enterobacter cloacae
atgtcattaacccgaaaacggcgcagtaccggaaaagtaacgctcgcggatgtcgcgcagcttgccggcgtaggcacgatgactgtttcccgtgccctccgcacgcccgaacaggtttccgataaactgcgtgaaaaaattgaagccgcggtgcaggagctgggttacatgcccaatcttgccgccagcgcactggcatcggcatcgtcatggacgattgcgatggtagtacccaatctttccgaagctggctgttccgagatgttcgccgggctacagcaggtgctccagccagccggatatcagattatgctggcggaatctcagcatcgtcttgaacaggaagagaaactgcttgaaacgctgctggcctcgaacatcgccgcggcgatactgctcagcgtcgagcactccgataccgtgcgacactggctaaaaaacgcctctatcccggtgatggaaatgggtgcaatgcgtgccgatcctattgatatgaatatcgggattgataacgtcgccgccatgtatgaacttaccgaaatggtgattcagcgcggctaccagaatatcggcctgctgtgcgctaaccaggagcagtggatttttcagcagcatttgcagggctggtacaaggcgatgctgcgccaccacctggcgccaaacagagtgattaatgccgccatgccgccgaacttctccaccggtgcggcacaattgccggagtttctgctggcgtggccggagctggatgcgctggtgtgcgtatcagatgaactggcctgcggcgcgctgtatgagtgccagcgtcggcgcatcaaggtgccggacgatttagcggtcgtgggctttggcgacagcgacgtcagccgcgtctgtcagccgccgctaacgacgatggcagtaccgcatcgcaagattgggattgaagccgggaaagcgttactggaacgtctgaatgacggagactggcgcgaccataaacccatcgcgtccagcctgtgtctgcgggaaagctgttaa

SEQ ID NO: 141028 - DNA, 291 bp, Enterobacter cloacae
atgttacggtacagtctcttaaccgccgggcttatgctcggcgcctccgcctttgccgccccggcaggcgaccttcccttaatgccctggcctgcgaaggttgaacgtccgaccacgcagggtgcgctggtgcttaacaatcaactcaccgtgagcgtcatcggcgacgatctgggggatgcggtcaaccgcctgcgccagcgcatcgccctgcaaactggctggacgctacagccgcaggccgaaaaacctgataagccaccatccgtatttccatcgctgaaaaggtga

SEQ ID NO: 141029 - DNA, 468 bp, Enterobacter cloacae
atgggcgtaaaaattttcatcagctactcgcacaaagacgagttacacaaagattcactagaagaccacctttcaactttgaaaacaaatggtcaaatcgatacttggaatgataggaagctagttcctggagaaaactgggcaaatgagatttctgataatctcaaagaagcagagattattttgttccttatgtcagctagttttttagcatctgattattgccaaaatatagaggcgaaaacagcaattgaaaaacataaaagaggcgaggcagtactaattcccgtaattgttcggccttctgactggactcacagcccttttggaacatttcaggcactcccgaaagatgcattgccggttactaaatgggatgatcaagatgaagcgtggcttaatgtaattcaaggcattcgcaaatctattgatgctcttaatgactcaaaaaaaaagtcccagccctag

SEQ ID NO: 141030 - DNA, 450 bp, Enterobacter cloacae
atgagtgaatttaaaccttttgaagacaggctcaatggtcttattgctgccctgtcaccggcagcgcgccggaagctggccggggagatagcgaagcaattgcgcgcggcgcaacagcaacgaattaaacagcaaaaagccccggatggttcaccctacaagacgcgaaagcgccagccgctcagggcaaagaccgggcgaatcaaaagagcgatgtttcagaagctccgcacgagccgctacatgaaagccagtggccgtgaaaacagtgcggtggtggaatttaccggcaaggtgcagcgcatcgcgcgtgtccatcagtacggcctcagagaccggccaagagcttacgctgaggacgtgaaatatcctcaacgtcaattgttagggttgagtgacattaacataaaagaaattgagctcttggttgttaagcatatttcaaattga

SEQ ID NO: 141031 - DNA, 768 bp, Enterobacter cloacae
atggtcaattgggaaaatgtacctaatcacgatgcctataaaaacctcttgctaggaaacggctttagcatcggcattagccgtaatttcaattactggaatcttttagaggaggcgaaatccagagcccaggatggaaggaatgagatttaccctgatacatttagactttttgagcgcttacagaccactaactttgaagaaatattaaaagtttatcaccatgcctaccttgttcataactataatataccagcaattgaaacagcttacaggaaactacaggaaggtttgttttcaaccatcagagacattcacgtacagaaaaatgataccccaaccggattggttttcgaagaactccgtaaattcagaaaggtatttacaaccaactacgacttaattccttattggagtttttttgataacgacctcggagcacttaaggattttttttggggtgccgaccacaaaaccacgtttgacaaaaacgacattgaagttttcgcagggaattacactcaacttttttatttgcacggtgctttacacctagaggttacagaaagtggtaaagtccaaaagaggagtctgcagggtacattgaacgaggagataagaatgttatcaacctcattcagcgcaagaaatgggctttacccactttttatcacagaagggaaaagcgaacaaaaaattagaaagataggctctaatgattacctgtcattttgctacaatcaattaaaaaaattgacggcaaattaa

SEQ ID NO: 141032 - DNA, 351 bp, Enterobacter cloacae
atgacggtgcgttatctgggaatgaacagccagaccggcctcagtatctctgaggtcgagcatatcaggcaaagcgtgcgcgacattctggtcacgccgataggctcgcgcgtcatgcgccgtgaatacggctcgctcctgtcagcgctgattgaccagccgcagaccccggcgctgcgcctgcagattatggccgcgtgttattccgcgatccagaaatgggagccgcgcgtcagcctgacgagcattacctttgagcggtcggaggatgacggcggcctgtatgtcgacatcaccggcacgcgcgcggccaacggccagcccttttccctcaccattccactgagttaa

SEQ ID NO: 141033 - DNA, 531 bp, Enterobacter cloacae
atgagtagtacccgcctgttgccggtgggctcctcgccgcttgaggtggcggcggcgcgcgcctgcgctgaaatcgaaaacacccccgttcccctgcgccgtctccggagccctgacgactgcccggcaagcctgctgccgtggctggcgtgggcgttttccgttgaccgatgggatgagagctggccggagaccacaaaacgggaagtgatccgcgcggcgtggtttatccatgcgcacaagggaacgattggcgcagtgcggcgcgtggtggagccgctcggctatctgataaacgtgtctgaatggtgggagacaaacgacccgcccggcacgtttcgcctcgatatcggcgtgttagagacgggcatcaccgaggaaatgtactacgaaatggagcggcttattgccgatgcaaagccagccagccgccatttaatcggcctcaatattattcaggacatccccggctacctctacaccggcgctctgtcctatgacggcgacatcatcacggtttaccccggataa

SEQ ID NO: 141034 - DNA, 2388 bp, Enterobacter cloacae
atgacagtgaaatacaaaacggtcatcaccaaagccggtgcaattaaactggctgcagcgacccttcctgacgggaaaaaggtgaatctgacggcgatggccgtgggtgacggtggcggcacgctgccggtgcctgacccgaaccaggcaaaactcgtaaaagaggtctggcgtcatgcgctgaataaaatcagccaggacaaaaagaataaaaattacgtcgtggcggagctgcttattccaccggagaccggcggtttctggatgcgcgagctcgggctctatgatgacaccggcacgctgattgcggtcggcaatatggccgaaagctacaagccagcgctggcggaggggtcaggccgcgcgcagaccgtgcgcatggttatcttggtgagcgacatcgagtcagtcgagctgacgattgactcctcaacggtgatggcaacgcaggactacgtcgacgacaagattgcggagcatgagcagtcccgccgtcatcctgacgccacgctcaccgcaaagggctttactcagctcagcagcgcgaccgacagcgcgtctgagagcgtcgcagcgaccccgaaagcggtcaaggcggcgtatgaccttgctgacgggaaatatacggctcaggacgcgaccacggcgaaaaagggtatcgtccagctcagcagcgcgaccgatagcgcgtctgagaacgtcgccgcgacgccgaaagcggttaaggcggcgtatgacattgccaaaggtaaatacacggctcaggacgccagcacggcgcaaaagggtatcgtccagctcagcagtgcgaccgacagcacgtctgaggttctggccgcaacgccgaaagcggttaaggctgctaatgacaacgctaacgggcgcgtaccatccgggcgcaggattaatggtcatgcgctgactgatgattttaatatcagcgcgcaggatattttcaacgggcaggccgcggcaattggcaatgccgccgacctgaacgcctacaccacggcgggactgtattaccagccagcaaacgcgcaggctcaaaccggcaggaactatccagaagctaacgccggttcgctggaagtctataagcatgccggtatcacgcagatttaccggatttataacagttcccgctcgtacattcgcacgctttacagcgggacgtggtcagcctggacgaagcagtatgatgcagctaataaaccttccccggctgatattaatgccgtaaacaaaggcggcgatacaatgagcgggccgcttaagattcgttctgccgatgcgttgcgcatctacaatgcggaatacggcatgatttttcgtcgctcagaaactaatttttaccttatcccgaccgcaaaagaccagggcgaaaatggcggtataagtggactacgcccgctttatatcgacctcaccaacggcagagtgacgctgggtaacggagcagtcattaacggcggtcttgggctgggcgtggtcagcggccttggagagaactctattgccctgggggataatgacaccggcttcaaacagaacggagatggtgttctggatgtttatgccaacagcaagcaggtaatgcgattcctgaacagtggtataacgagttatatgctcttcaacatgaatgcaggcgcatcagtgagcagcactcttacctttaaaaacggtagcggtatcatatcagagaaaactggtgccaacccccgaagcggccgaatttattggggcggtgatgcgagtcgcggcaacaggatagaatttgcagatgatgctggctggaaggcctacattgagcgccatccctcgaatggtgtgcagttagtagtaaatggtcgaatcaatggaagtattatttattccagcggtgaggtacaggcgggaggaggtaaggcacgccttgctgctgacggaaatatctatggtgagaaatggggcaatcagtggcttgatgtatatctgagaaacacctaccagcctaaaggcagttacaccccggcaggacaggcatataccaaagctgaaagcgatggtcgttactacaccaaagcgcaaagtgatgcgggatacaatgccaaaaacaccgcttctctttctgctaccggagggtggcagcaggacaattcgaccggtctgattatacagatgggaacagtaacccgaacgggctacaacacagccgtcaattttcctaaggcgttccctaatttctgcatgggcgtcctgcttacgctcagcgatgcaggcacaggtaacctttccgactcatcaagcaacatcagatcgttaagccacagtaaaactggttttaattatggtgcgaacggcaatcctgaaaaaacagcattctgggtcgcatttggtaaatag

SEQ ID NO: 141035 - DNA, 1014 bp, Enterobacter cloacae
atgtttaaaaacttaataaaagaacttgaaagaatgaatgagatgtctgtttctgtcggaatcgaaactgatgaaaacggttatatagataagcagtgtcctaaccaaaactgtgagttcattttcaaagtcaataaagacgattgggttaacatttttaaagacgaatctgtttggtgtccgctttgtagacacgaagcaccttccgaccaatggtttacattgcaacaaattgaacacgcacaatccgaagcgttagttgttgttgaaggtaaaattcataattctcttcgcgatggcgctaaacagtttaaccaacaccaacgaaaaaacagcttcatctcaatgtcaatgaaggtgtcaggaagcccgaaaaggactttcactatcccagctaaagctgccgatttaatgcaacttgagatccagtgtgaagcatgtaattcacggtttgctgttattggcagtgcctatttttgtcccgcttgcgggcacaattctgtaacacgaacattccgagattctttacgtaagattaatgcaaaaaaaaatagtattgatgttgttaaacgcgcagtaattgaatcaagtgggaaagatgcagctgaacttatgtgcagatcacttatcgagacctgcgttaccgatggagttgttgcttttcaaaaatattgcgaaggcatgtatgagcagtttgcaaagcctccctacaatgcgtttcaacgtttagcgcaatccaatgaactatggaaaaacgtgtttcagaaaggttttgaaacctggttatccttaaatgagataaaatgtcttaacattctttaccaaaaacgccatttactcgcacatagcgaagggatcgtcgacgcaaaatacatacaaaaatcaaatgatgaaacctataaagaagggcaacgagtaattgtctcaccgagagatattgattttttggtgtattgcttggaaaaattagctgatggtatagagtttgaatgccataaattaaaacaagcttaa

SEQ ID NO: 141036 - DNA, 219 bp, Enterobacter cloacae; identical to SEQ ID NO: 118985

SEQ ID NO: 141037 - DNA, 414 bp, Enterobacter cloacae
atgagtttcgccagtcaatctacacagcagatatttccatttccggcggacattgcctacgaaaaactgattgaggcaattccagaggtcggaatgtctataaagcaaaaagacgatgttttgcgcagagtttccgttagtgctggtatctcacttttttcatggggtgaaaatgtatctatcgtagttaatgccgatggggataagtcgtgtactgttggtatcgactcttcacttaagcttggagtgaacgtcactggggcgcataggcaccagaagaattttgataaaatcatctacgcgcttagcaacaagctgaaggaatggcaaagacggcaaccattggaactcggaccagaaaaaactgatgaagaatacttggaagaggaaagaagaaaagctggcctgctctaa

SEQ ID NO: 141038 - DNA, 300 bp, Enterobacter cloacae
atggcgaactcgaaaagcttttccctgctgaataaccgccgcgaaagcggtttttttatgccccgctccggcggggctaataaggtgcataacatgatcccagaagatatgaagcaaccattgccgcacacgcagtttgctgagatttcatcgttgagcgtcaccgatgagatcagtttggcaatatccagtaccaccgaactggttaaagactcgtcgagcgtggaacgactgattctcctgaagcatcttcgcgcgctttgcgatctgcaactcaataaattatcagggctggaatag

SEQ ID NO: 141039 - DNA, 1104 bp, Enterobacter cloacae
atgtacttcactaaagaaacgcttgccacgaatagccgcctgcgccttcactggaactctctgtgggcgcagcgcaacatctgggataccgcgcataacatcatggttaaccagtaccgtggcgcgatggatgcagaaactctggcggccaatgcgctggccggtgatggccttggtcgtgagttctgggctgaaattgaccgcgaaatcgtccagtctcgcgatcaggtgatcggcatggaaattgtcaacgacctgatggctgtacaaaccgttctgccgatcggcaagactgccaaactttacaacacgattggcgatattgctgatgatgtctctgttagtcttgacggtcaggcaccgtattctttcgatcacactgattacggtagcgatggcgacccggttccgatttataccgctggcttcggtgttaactggcgtcttgcggcaggactgaacaccgtcggtattgatctggtgcttgattctcagacggctaaaacccgtaagttccataaacgccgcgtgactggttatctggatggtaatccgacaattcaggttcagaactacccggcacagggacttcgcaaccaccgcaacaccgctaaaatcaaccttggctctggcgcaggtggcgctaacatcgacctgaccactgcaaccccggcacaggcgctggccttctttggcccgaccggtgcatttggtgtgactgcccgcgccaaccaggttacggcctatgacgttttgtggctgtctcctgaaatcatggcgaacctctccaagccatacactattgaggtgggtgacggtacaaacgcgatcatcagcggttctgtgctggatgctattcgcaagtttattccggtgaaagacatccgccagacttatgcgctgagcggtaacgagttcctggcttatgagcgccgcaaagatgtgatctccccgctggttggcatggccgttggtgttgttccgttgccgcgccctatgcctcagagcaactacaacttccagatcatgtctgctgaaggtttgcagattaaacgtgacgacgaaggtcgctctggcgtgctgtacggcgcgaatctggcataa

SEQ ID NO: 141040 - DNA, 459 bp, Enterobacter cloacae
atggcacgttatcgtcgcattaatatcgacggtcagtctctgtacaagaccgaaacccgcaaagtagccgccgcgtcattgccaggcactttcgttaccatcaacggtgacgatgagtttgcagtagccgcagcaacggttgggcgcctgtatgttctcgaccctgccttcagcgaaggtctgggtattactgactccattcctgctggtcactccacatctggtaactacgtggaagaaggccgcgaactggcaatcctgtgtcctgcgggcacttacgccaaagacaccccgatcaagttgggcgcaaatggtcagggggcgattgccgactctgacaccgacaccgttctcggctacagccaggacgatgcaactatcgcagccggcgctaccgactttatccgcgtgcgcttccgcgtaggcactgtagccccggcaactggcggcggcgagtaa

SEQ ID NO: 141041 - DNA, 1266 bp, Enterobacter cloacae
atgccatctcaaattcaggtaaacaccaaagtaaacagccagtctattcgtcgggagacatataacgggcgagagcatgtggtgatcccaagttacacgcttcccgccaacgtgattatgaacagggagttctatccagaagcagagatagccgctaactatcagagcatggaggggacgatcgcgccgctaggtcatcccacggttgatggtcatcatgtttctgcattctcacctgaagggctgtgtacgggcttcatcggtgcgtggaatcgaaatgtgagcctgaaaggaaaccgtgtttattcagaaaagtgggtggatgttgagcgcgcgatggaatcacctggcggtcagcgccttatggggcgcattgctgcactggagaacggtgaatcatcagagcctatctggtcgagtgttgctgtctatcgtgagcagatccccgcccctgaagaactcaaaaagcagggtgctgattgggtagtaaagattcactcaattgatcatgacgcaatccttctcgacgaaccaccggcagccgggcctgaaaaaggcgtcggactgatggtgaatgccgatcaggcaatatctctacaaccaaactctggagcattgatcggtgaatcttatcgcgagcgcgagagccgacttgaccgggctgtaagagagaaatttgcatccggtccagaggaatatgcctgggtagcggattttaccgacacacaagtggtgatcgtccgcaatggtggcaaggccgaggtgtacggatattccagcgacggcggaaaaattaaattcgacgattcaggaacggcagttgcccgtcaagagtcctgggtaaccatcgccgcaaacaaattcaaagctctattcacaccgcaggaacagcctgcaacaaaccacaaaacggagggcgacatgcctttaaccaaagaagatacagaactgcttcgcaaaatcgttggtgaggccatcgccgctaataacgacgtgaccattaagcctctgagtgaaagcattgcagctatccagacgaaccagcagcaactttctgaagccctgactgccaactcccgcgcagaagaaaaaaccaagcgcgaagcggtagctgcaaagcatggcgaaatcgtcgctaatgccctttccggggatgcgcttgacgcaatgtacaagtcgcttggcgaagctgctccgctgggcaccaacaatgcgcagcagcagaaagaaaccggtgcgccgaaccctgacgaatacttcaaataa

SEQ ID NO: 141042 - DNA, 276 bp, Enterobacter cloacae
atggctaagttttacccgcgaatctcaacttttcttactggctgctgggcgttcatcgcatccctttcgttcgaccacttcagtgtaagccgtgcgctgtgcactcttcgtcgtgttgtacagagcgtagtctctgctaccgctaaccacgccgcgcctgaaaaggctgaatggcggatcgttgagcgaatgtgcagtgaaagcatgcgagagaaaatcaacatttttggtcgccaacctcgcaatactggtgcactgtgcagcccattgctatga

SEQ ID NO: 141043 - DNA, 282 bp, Enterobacter cloacae
atggaagattacttggtttttggtttgggtcatgaaggggatatcaagcacgatgaagcgggtcttgataaaataagcgtggtaacaaaagctgtaatgcgttctaccaattccaatgaaccagtggtctacccaatgactcagttcaaagaatttaatgttgtcagacagcaagcgtatgatggtgaattctacaacatagcatttgatgttttaccatctcgcgatcgtgtcgatgctgcaatccggaaatttcacccaaagaaatcatccacggtttag

SEQ ID NO: 141044 - DNA, 249 bp, Enterobacter cloacae
atgcacgaactatttgtgctggttttgagcacctgtgccagcctcagcaatatgtcaggttgttctttggaagtggtgaacttgaacaccgaaaaagaaccggtgaatgtcttttacagcaggaaagactgtgaagagagcatgaagggaatcatgctaaatcatgccatataccatgaaatatcaggaagagagccatttatggctaaatgcgaacaaatatttatctcacaaagtttaatgaaatag

SEQ ID NO: 141045 - DNA, 1374 bp, Enterobacter cloacae
atgcaaaaaaacgtttctgatggcctgcccttaccacagcggtacggggcaattgccactattgtcatcggcatttcgatggctgtccttgacggtgcgattgccaatgtggctcttcctaccattgccaaagaccttaatgcttctccggcaagctccatctggattgtgaacgcgtaccagatagcgattgtgatttcccttttgtcactctctttcctgggcgatatgtttggttatcgccgggtttatcagtgcgggctggtggtctttactctcacctcgctcttctgtgccctttccgattcactgcacacccttacgcttgcgcgtatcgcacagggttttggcggtgcggcgctaatgagcgtgaacacggccctgatacggcttatctatcctcatcgccatctggggcgcggcatgggcattaactcctttattgtggccgtgtcgtccgccgccgggccgacgattgccgccgccattctgtccgttgcctcgtggcagtggctgtttgccattaacgtgccgctgggcattgtggcgatcttcttcgccctgcgctatcttccggaaaatggtccgaaaaacaccatgccacgttttgacctgcccagcgctgtgatgaacgcgctgacctttggcctgctgattactgcgctgagcggatttgcgcagggacagtctttgtcgctcattgccgcagaaatcgttgccctgcttatcatcggctttttctttgtacgacgccagctggcgctgcccgtgccgttactgccggtcgatttgctgcgtattccgctgttttcgctatcaatttgtacctccatttgctcgttctgcgcccagatgctggcgctggttgcgctgccattctttttgcagagcgtgcttggccgttcggaagtggaaacaggcttgctgctcacaccctggcctttggcaaccatggtgatggccccgctggccgggtaccttattgagcgcgttcatgccggactgctgggggctatcgggctgatcgtcatggcagcaggactgtttgcgctgtcgctcctgccctcctcgccgggggatctggatattatctggcgcatgatcctgtgcggggcaggtttcggtctgttccagtcacctaacaaccacacaattatcacctctgccccacgtcatcgcagcggtggtgccagcgggatgctgggtacggcaagactgttagggcaaagcaccggggccgcaatggtggcgttgatgtttaaccttgccgggcaaaatgcgacacacgttgcgctgattaccgcagggacactggcgaccctcgcggctatcattagcggccttcgtgtgacccagccaaaggcgcaggcataa

SEQ ID NO: 141046 - DNA, 201 bp, Enterobacter cloacae
atgttgaaaaatgaaccgtctttcgcatccctgttggttaaaccaagcccggccatgcactgcggtcacggctggattatcgggcaggatggcaaacgctggcacccgagtcgctcacaagccgatttactggctggtttatcttcccaaaaaaagaggggctcatggctcttgaatctttgccgcaaactgcaccgctga

SEQ ID NO: 141047 - DNA, 1770 bp, Enterobacter cloacae
atgaccatttcaactgacctttcactgttaaatgacccacgacgacaggcgcgcctgttgtactggcaggggtttgccgtgccgcaaatctgcgaaatgttgcagctcaagcgcccgaccgtgcagagctggaaacagcgtgatggatgggaagaaaccgcaccgattaaccgcgtggaatcgacgctggaggcgcggcttatccagctttacgcaaagcccgccatgacaccgcatgattttaaagtcgctgattttctgtcgcgccagatggagcgcctcgcgcgcgtgaaccgctacggccagaccggaaacgaggtggatttaaatcccagtattgcgaaccgcaacaaaggggatcgcaaaaagccgaaacgtaatttcttcagtgatgaagcgattgaaaaactggaagagattttcttcgaccagtcctttgactatcagctcaactggcataaggcaggcatcgcgcaccgcattcgccacatcctcaaatcgcgccagattggcgcaacgttctactttgcgcgcgaggcactcctgcgcgccctcaaaaccgggcaaaaccagatatttctgtcggccagtaaaacgcaggcttacgtgttccgaaaatacatcatcgcctttgcgcgtctggtcgacgtcgacctgtcaggcgaccctattgtcatcggcaataacggcgctgagctgatttttctcgggacaaattccaacactgcgcagagccacaacggcgacctgtacgttgatgaaattttctggatacccaatttccagaagctgcgcaaagtggcctcgggcatggcctcgcagtcacacctgcgcaccacctatttttctaccccgtccacgctggcgcatggcgcgtatccgttctggtcaggcgagctgtttaaccgtggccgcagtagccgcgacgaacgtgtcgacatcgatatcagtcacaaggcgcttgccggtggcgtactttgcccggacggccagtggcgacagattgtcaccattgaagacgcgctcgccggtggctgcaccctgtttaacctcgaccagctcaaacaggaaaacagcgcggatgacttccgtaacctgtttatgtgcgagtttgtcgacgataaggcgtctgtattcccgttcgaggagctgcagcgttgcatggtcgatgcgatggaagaatgggaggactttgagccattcgccgaccgtccgtttaactggcgtccggtctggattggctacgacccgtcacacaccggcgacagcgcaggctgtgcggtgctggctccgccactggttgccggtggcaagttccgcatccttgagcgtcaccagtggaaaggcatggattttgccgcgcaggccgaggccatccgtgcgctgaccgagaaatacaccgtcgactatatcggcatcgatgcgaccggcatcggccagggtgtttaccagctcgtgcgttcattcttcccggcggcgcgcgccatccgctacacgccggaaatgaaaaccgcaatggtgctcaaggcgaaagacaccattcgccgtgggtgcctggaatatgacgccggtgctaccgacatcactcagtcatttatggctatccgcaaaaccatgaccagcagcggccgcagtgccacctatgaagccagccgcagtgaagaggccagccacgcagatatcgcgtgggcaaccatgcacgccctgttaaacgagccgctttccgccggtagcggtatgcaatcagcctcaattctggatattaactaa

SEQ ID NO: 141048 - DNA, 297 bp, Enterobacter cloacae
atgacggaaggtgaaaaaggtgtcctgtcactgtttgtgatcggcgtgatgattgttgtcgggaaagtgcttgcgggaggtgagcccgtcacaccgaggctgtttatcgggcgaatgctgctcgggggttttgtctcgatggtggcaggtgtggtgcttgtgcagtttccgaatatgccgctgacggcagtgtgtggactgggttccatgctgggtatcgccggttatcaggcggtcgaaatcgccattcagcgccgcatgaaatcacctaaggggggagatgatgccagtcattaa

SEQ ID NO: 141049 - DNA, 291 bp, Enterobacter cloacae
atgaaaatgaagactttcgccgctggtataacgctgttttgcctgagcctgtgcgcgggctgcaccggcgagccgcctgtgcagacgccagtgattgtttacaacggttgcccgaaagtcagtctctgcccgatgccgggcagtgatccacaaatgaacggcgatttgagcgccgacattcgccatcttgagcgcgcactggagagctgcgcactccaggtcaacgtggttaaacaatgccaggatgatttagatgctgaaaccagacagtctgcgcaacgcgctctatga

SEQ ID NO: 141050 - DNA, 324 bp, Enterobacter cloacae; identical to SEQ ID NO: 119293

SEQ ID NO: 141051 - DNA, 300 bp, Enterobacter cloacae
atgatatcgacaaatttaaaatatgcccaggctgaaactcgtctggccagacggctcgcaggattaattaagtctccggggatcagttggttctttgaatcgcacccagagttcgaatggcttgatttcagtgcgcgtgaagcatgggaatgctggattagaaaagaactaacaaaagaggagtttgaattatatgaagaactctatggcctcaagttttccgaaatggatgcactcagggagtcgatcttaatagatacgaatcgcatttcacagcccggtaacgtagacggttattaa

SEQ ID NO: 141052 - DNA, 267 bp, Enterobacter cloacae
atgccgcagactggaaatgcagaaacttcctcatcgaaagagaaacgtcagtaccgtaaaggtaatccgatgtctcctgttcaaaggcagaaagcgcatgtcgcgaagctgaaagagacccataaagaaatgcgtgtttatgtggagaagtctcttaaagcagagcttgaattgttgtgtgcgactaaaggtgtgacacagtcagaaatgattgagaagctgattcatgatgcggtttcagagtgccgaaacaaggtcacggactaa

SEQ ID NO: 141053 - DNA, 237 bp, Enterobacter cloacae
atggcatgttttgagtgcagcagcagtgcaatggttatcaaccagctcgttccctggataactgtcggcatttttgtggccagcgtggcgctgtttcgtcagctcctgaaacgcgatcggcgtgcgtggacgtcactggttgctgttgtggttctgatggaagaactaagcctgagcctctggctgctgattaatgacgtacagatactctccccgcactttatggacggtatgtaa

SEQ ID NO: 141054 - DNA, 309 bp, Enterobacter cloacae
atgattgtgcctgttaccgcagagcgtgatgagcaggggtactggtcgcatccggcgtatgtccgcagcggctgcgaaaccgcggtggagttcagctactggctgaggacccacgggctgcagtgctttgtgatgaccatgcgcgatgaggctcctgaggtttttgctgccggatttaccgatgaagcgccggacgcacggggctggatacccgaaccgccggatgatgacggctggtttctgggctcagtccatgataccgacgacgggcctgtctgctactggttccgtcataccagaacgacctga

SEQ ID NO: 141055 - DNA, 543 bp, Enterobacter cloacae
atgcgaatttataaatataccgggctggcatttgtctgctgcctgatttacctgtttgcttatctggcaataaataactttcagtcggagggggccagcctgaaaacatgtgcgttgatatcaatgccgttatttatctggatggtttatcagcgcgttactgcgatgagtgaaaaaacgcgtgcccgtgaaagcgatgaggtcatctgcatgagaatgatggagcagatacatcattacgaagagatggagcgcgtggccggtggtgggcggctcatgaaaggtattcttgagtgtcgtgaggtggcacgggcgataaggtgcccggagttcgaagacgcatccctgacgctgagccggctggcgtacatcgagcacctgctgagtgccctggcgccgggactgtgccggagaatgtcggaaggtgagcgccagagatggatgcagatgctcgacggaccggtgccaggtgaagacgctgcaggtgaatgccacaccgaaacgcccgtcagtcagtccgtgccgggggaggtcagaggatga

SEQ ID NO: 141056 - DNA, 609 bp, Enterobacter cloacae
atgaatgccagtgtggtgttatttatcatttcgttgctggtactgattttcctgctttcccgcgtgctgaagcagaaacggccgcaggcaccgcttatcaggcggctgagagaggctggcgtcagggtgggcgatacagagcaactgatggcgggcggcgtgttctgggagcggcaggcgcagctgatgaccgaccgtgaggtacactttatgcaggggctgttccggtcggtggacatgaggcggtggtatctgtgcccgcaggtcagggtggctgatatcgtgcagataacgccgcgcgtcaggggccggagccggacgtggtggaagcttttccatatggcggcccagtggcactgcgacgtggttatcgttgatcgcaggacgtttcgcgttgtggctgccgtggagctggacgatgcgtcccacctgaagaaaagccgctgccggcgtgacatcctgctggatgaggttatgcgccaggcgggcatgccgctgctgcgaagccgtgatgcccgggagctgcagaggatgatacgggactttctgacggtgcttgaggctgagtccggggtgtcagatgccatcactcaacaaaaagcgggttaa

SEQ ID NO: 141057 - DNA, 321 bp, Enterobacter cloacae
atgtcagttgaaattaaatgctccggtgtgaatgaagaagcaagggatataattaaagggacggtgaagcaactggttggggacggtcgcattcattcgcgggatgacattatccggcatctctgtggtgcgaactttgatatcacagacgtgactgaagagagtattacgatttgcgcacctgatgaacccgccaataccctcatcctgagcggctggctgttctctgaacggttcgggctggaccgggatagacccctctcgggtgatggcgggcagttatccgagggcgtgcgaagcgaagggagcgtgggttcatga

SEQ ID NO: 141058 - DNA, 273 bp, Enterobacter cloacae
atgtataccgtagtcattgcttcagtgatattaaatatattattgatatttgccgtcattaaactttaccgtagagtcaggattgactatgaaccctctttcctgccaacaattttttaccacatgattaaatacataaggcatcatggttcatggaatgaaatggagttcatgcgtgacgagttacgccgtgtattaaatgagatagatattatcagacatgatgcaggtaatgtccggctgcggaaaacaaagcctgttcgtgatgcctga

SEQ ID NO: 141059 - DNA, 486 bp, Enterobacter cloacae
atgaaagaactgacgcggatactttgggtcttcctcatacaatatatttcctgccggcttgccgggtgggaaacatctgttacattccttactcttgcgttgctaataatttggcagggtatatttgcaagggtgaattatcttatccgtcaacagaaaaacaagcttggcaggaaagatgttacgccggtaatgtacatggttctttcagttcccgccctctttttccctctactgtctgtgctgatattttgcagtctctcgatttacagagtatgtactatcgggtgcgtcacagttggagatagtcctttcaaagagaaatttgtttttgatcaccaatttcagtgtgaaccatttccgtacgagtctgaatcaaagactgaaattacagtagggttgcctatgtgtggttctctcgaggctgcgggtaacgtttatggggtgtggcattcatctagcctccgtaatagtacggatagttag

SEQ ID NO: 141060 - DNA, 2862 bp, Enterobacter cloacae
atgcaggcgatttacgttatcgcgggcggcgactggctgagccagacgctgaacgccattgtggcctttatgaacacggacaactgggtcattatccgccggatcgtgaccgcgctgtctgtgctcgtcgtggccatcacctggatacgccgtcacaacgtgatggatatgctgggctggataggtaccatcgtcctgatgtcccttctggtgagcgtgcgcacgccggtacagattattgacaacagcgatctgacgaaggtttatcaggttgacaacgtgcccgtcgggctggcgttgccggcgtcactgacgaccactatcggacacgcgatggtacagggctacgagatggtctttgcgcagcccgacagcgtgacctacagcaagaccgggatgctgttcggcgcgaatctggtcgcgcgcagcaccgactttttgtcaaaaaatcctgaaatcaccacgctttttgcggactatgtgcagaactgcgtgatgggcgacattttcctcaacgggaagtacaccctggacgagctgatgaacagcaccgatccctacaccattatcttttctaaacccagtccgctgcgtcaggtacagaactataagaagtttacgaccagcggtaataacggacaaacggagataaaggcgtttttatcctgcgaagaagccgcagtgatcctcaaacagaagctgggccttgatacccagaccggagggaaaagctggagctactacgcacgctggctgtttggcggacgtccgaatcccgacctgctcctgagccagatgctcggcgaaagctataactatttttataactccgggcagagcgcctcgcaaattatccgccagaacgtgacgatgaatgccctgcgcgacggtatcatgggctatgcggcccgcaacggcgatacctcgagcctgctcaacatcgccaccacgtcctcaatggagaagcagcggctcgcgcacgcaacggtcgggcaggtggccctgcgctcgttgcccatgtcccagacgctgatagtcggtctgattatcgggatattccccctgatggtgctgggcgggatgtttaacgccgtcacccttaacgtgctgaaggggtacgtgctggccatcatgtgggtgcagagctggccgctgctttacgccatcctcaacagctgcatgaccttctatgcgaaagccaacggctcgccggtggtgctctctgagctgtcgcaggtgcaacttaaatactcggatctggccaccacggcgggctatctgtcgatgcttatcccgccactggcatgggggatgctgaaaggtctgggctccagcttctcgaatctctacagccacctagcgtcctcggccatcagtccggcggcaacggcggcggcagggtcaatcgacgggaactactcctacgccaacatgcagaccgagaacgtgagcggcaacagctggaataccaacagttcgactatgtttggccagatgagtcaccaacttgccaacggagcaacgtccacacagatgcgcgacggcagtaccgtgactgactctactcaggcagcgagtaaaacaccggtgaatatcaactttgctcgccagatagcaacagcccagcaagaaatggctcgcgaggcccagacgcagtcccagagcgcgctacatggctttaatagcagtatttccagcgcttggaatacactgagtcagtttggttctaatcgtgggagtagtgattcaatgacccagggggcagacagcacgatgagtgcgcaggactctatgatggccagcaagatgcgtagcgctgtagagagctatgcgaaagggcataacatcagcaaggagcaggcgactcaggagttgggtcaacgcagtattcgcgcctcaactggtctttatggtgatgccagtgcacatggtggtatagggattaaggctttcggtacaggtggtggtgttagtttcagggcaggcgctaaagccggcgtagactttgatgatgtagactctcatcaggctagcagcggcacgcgctccagccaggatgctcgtcatgatcttgatgcaaaatccaccaaagactttaaggaggccagcgattactttaccagccgtaagctgaatgattcaggcagccacactgataataatgcggcctctcgcgctgaccaactatccgtagcacttaattcagccaaacaaagctatgaccagtacactacaagccaagctaggagccatgaatacgctgagatggcatcccgcaccgaaacgatgagcggtcaggttaacgaagatctcaaccagcagtttgcacaatatgttcgcaagcaggcaccgcatgatgctgatactttacttacggatacaggttcgcctgagatagcagcaaaacgaagagagctggcctggtcatttgtacaaagtcaggtgcagccagggttggacaacgcatattctgatgcgaaagatgggcttggtcaaaacatgtctactgtatcttcgggcggcggcagccaagacgttttgtccgactacgctagccataagggggcaattgagaatgcaaccacagatgcaggtatcaaaggtgatgtaaaaggttctgttaatggtatgttgaatgaaacacggggtaatatagcaggaatacaaggcgaaattgagggggcatcaaagacagtagatactcagtattcagaactgaaaaacgatcacaggtcccaagctcaaagtcaaaatactgtattcaatagagagaaagcatcacaaaacgctattccgggagctgacagttctgaagaacttctggaaaaagcaaagaaactggagaataatcgaaataaataa

SEQ ID NO: 141061 - DNA, 189 bp, Enterobacter cloacae
atgaaaattaaaggatttattgcccgtcttatcatcagcctgatcgttgcgttcccggtactttactggtgcaggaacatcatgaatgaaaccagcacttcagatgtgcttttcatggtcattctggctatctgcattctcatctcgcttgtgattgcgtggctggtatatccgctttttaagcgataa

SEQ ID NO: 141062 - DNA, 1878 bp, Enterobacter cloacae
atgaaaagagcaatactgatgccggtgctggccattgccaccacgatggcgggcgtaaatgcatttgccgatgctgacgcgcagtacagagcgggggctgattttgcccgtcaggtacaggggcagggtgagagcagcctgaaaaactttaacccctcagcgtctatccccaactataccgcctcacccggtgagaaaaagtactatggcggcgtgacggcgaccggtgatggtgcgctgaaagcggacggtaccacgggctggactactaatgaggccacaaaggccgtcaccgactcgtttgttaacaacccgaaggagcccatttcacccgacgcgccgtttattaaggccagccaggatgtccagtcccgcgccgataccatcatcggcaaaacggggcagacgcagtgcgaagcgcagaacatcagccgcagcgagttcaccaactatacctgtgagcgcgacctgctggttgagcaggcctgtacgcgcacggccagcattaccggccactacgaaaacaccacggtgacgcgcacttacacggtgcccaacagcgagttcagctacacgtatgacggtaacaaaaccgttaatttccgcttccgtgcccccgcaaccggtaccgtgctgagcgcgtcggttgccgtccacttcaatgacagaaatatgctctacgacttctcgtggtgggggttaaacgtcagttcggtgaaaggccgcgataacggatggacgctgcccggtgccgcgggagctgcgctgaccgccggacagtactctccacagggggcaatgctcaacaaaaactgcctgagcggcaggcagtcgcgctgccaggagtatgcccgcaagacgctgtcctggatgcagggcggctcagaggcctggatgaccgccaccctgaccatgcaggtgacggacaaaaaatgggtgccggacgtggtctggaacgaatcctgcccgttcagcaagagcgagggtacgctcaaaaagaccgaatgtattgagccggggagcacaaaaacggtggtggttgacggcgtgtcatacccggtcacgcaggcatgctggaagtacaaagacacctatatgacccaggctgctgacaatggcacctgcaaaacctacatgaacaatccggcctgtacgcttgcctcacgcacctgcgccttcacggcagaagacggcagcggctgcctgcatgaatacgcgacgtactcctgtgaaacacgtacttccggccaggtgatgatatgtggcggcgacaccttctgtctcgatggtgactgtgagcgggcgcagaacggtaaaaacaacgattttgcacctgtcgtttcggcactcgccgcgctggccgctgcgggcaaggacgtggctgccattaacagcgctaacgtgcgcgcctttaccggcagcgcgaagttctgcaagaagtttgcggcaggcttcagcaactgctgtaaggacggcggctggggccaggacgtggggcttgccagctgcagcagcgaggagaaagcgctgggcaaggccaaagaaaataagctcactgtcagtattggagagttctgttcaaaaaaagtgctcggcgtctgtctcgagaagaagcgcggctactgtcagtttgactcaaaacttgcccagattgtgcagcagcaggggcgtaacggtcagcttcacatcggctttggcaaggccagcagcccggactgtcgcggcatcacccagaccgagctgcagcaaattaattttgaagcgctcgacttctcgaactttttcgacgatctgcagaagaacaagaaaatcccggataacgacaccctgacgaagcgcgtccgcgaggaaatcgccgcgcagctgaagaacaaatag

SEQ ID NO: 141063 - DNA, 375 bp, Enterobacter cloacae
atgaggagatatagcagctctccagcattgggaaataccgtcaggctcaaactcgattctgtgacagagagtttattgcgttctgctacgtcgagaagtggcagaagccgcggattcgaggttttttttagggtcagagatcacctcaatagattccctatgttcagggttatggataatccagacttttctaagagtttttttgtgaccgtcaggtttgatgaggaaactaacttaaaactgatcaatgcaaaaaaccgaagtggatggtgtaagacttatgaagtacgggaaaggcttcatgaccatctgatcaagttccccgacttttacaatgctgaaatggtggaggtgatacctaataatttcgactga

SEQ ID NO: 141064 - DNA, 705 bp, Enterobacter cloacae
atgagtgcgcgcgatcttatgcgttcttctgattccagtcaatcacaacaagaagcaacaagattcaaaatttttgataattctgaaattcctatctgtatcagaaattcttctggtgtctttgtatattcaaatcacaatttttcgaatgttataaaaggctgtgaatatgactctgcctactggtttgaaaaacttcctcttgagttgaaatgtgcacttctcgaaaaagaggtcgatgcattagctaatcctgatatggcaataataaagagctttgttatagagggttatttttactggtgtgttctgtttcaggtggtttgtattaattctgaatcgtatatattgtggcattttataaaggatgtggtttttagtcaggccaatagcagatatcttaatcatgttatgaatgatgtttgcgaaattaaaaatcctgctttagtccttgagcctggtgtttaccaaagcttttgtcttttcttcagcggttttacgcatgaatttatatctcgattgctaagtgtaacatcgggtgcttcaaagaaaagaatttccaaagcttattctattatggaaatagacaataaagatgacatgattctatatctcaagactcactcgttcttacctagtgttcacagatatgcattcgaattaattaattctaagtgcaatctacttcgtaaggcgaaattatga

SEQ ID NO: 141065 - DNA, 396 bp, Enterobacter cloacae
ttggcaaagatacaagcatatgtaagcgacgacgtggtaaataaaataaattctatcgtcgaacagcgccgggcagaaggtgccaggaaagaagatgtcagcagttcaagcgttatatcgatgctagtcgaactaggcttgcgtgtctatgaggcgcaaatggagcgcaaggagtcgccgtttaaccagatgcttttcaataaaactattcttgaagccgtacttaaaacacagtttatctccagtaagcttctcgcaatggagtccatgagcccgcacattgcaggaaatgataaatttgagttccgggggatggttcagaatatacgagatgatgttaaagagatcgtggaaaccttttttccagagtcaggtgaagaaaccgataatgattaa

SEQ ID NO: 141066 - DNA, 2010 bp, Enterobacter cloacae
atgtcagttaccgatgttaaagcaaaagcacccaaaaaagcgagcaccaaaaaaatcacgaaggcgcaggaagttgccctgaaaaccgcccttgaggccgctgcggttgagtacgttccgcttgccgatctcgtcaaatcaccgctgaacgtgcgcaccatcccgtattccgtggacagcgtgcgcggtctggccgactccatcgaggcgctcggactgctgcagaacctgattgttcacaccctcgcggacggcaaatccggcgtggcggcaggtggccgccgactgactgccctgcagttgctcgcacaggaagaccgccttgcggccgatcataccgtcatggtgaagcgcgtctcagacgacattgccgctctggcctcggttgccgagaacgaacagcgcgccgccatgcatcccgccgagcaaatctcagggtttcgcacgctggcagagcagggcaaaacccccgcgcagatcggcgacgcgctcggcttcggctcccgccacgtgcagcgcatgctgaagctggctaatctcgccccctccctcatgcaaaagctcgcgcaggacgaactgaccgttgagcagtgtcaggcgctctgtctcgaggatgaccacacccgtcaggtcgacgtgtacgagagcgtgaaggccagctggtcgaacgcacctgcacacctgattaaacgcgccattaccgacaccgagatgcgcaccgataacgctaagttccggttcatcggtcgcgaagcctacgaggcagcaggtgggtatctgcgtgaagatctgttcagccaggatgacggcgacggtacggctgacagcgtgctggttgagcgtctggtgcaggagaagctcgagcgcatcgcgcaggacattcagcagcgcgagggctggacgtggagccgcggacgcgcagcccgcatctggtaccacggcgaagacgggaaagagttcgttcagcccgacgaacccgatgcggtttacacccccgaacagcagcagcgtcttgacgaactgcacgcgcagtggaacggctacgattcccgctgtgacgaaactgacgcgctggaagctgagattgaatccatcgaacaggccgcagaagtcagcgcgtggactgacgacatgaagtcgggcgcgggggtgatggtcagcctgtacgaagggcaggtatacgtgcagcgcggtgtgcgcctgaaagcggatatgccggaagaaaccgaaaccagcagcgtaacggtgccgttcacctcgcgtcagaccgatgccgcagaggggatcagcgtcccgctgctcacgaaaatgacctccgagcgcacgctggcagtacaggcggcactgatgcagcagcccgaaaaggcggtggcgctgatggtctggcgcatgtgtacctgcgtcttctcgggctgtctgaccacgacgcatccgttccgtatcagcctgaccgtgtcccacggcagcctgacggagaacgccccgtccggtcaggatggcgcagcgtttaacatcctgatgaccgaacgggcaaggctgaaagccctgctgccggaagggtgggagaaggacttcaccaccttctttgcccttgacggcggggtgctgatgtcgctgatggccttctgcacggcctgttccgtggacggggtacagacccgcgatatggggcacacctcacgcagtaccctcgatacggtcgaggcggcaatcgggttccacctgcgcgactggtggcagccgacgaaggagaactacttcggtagcctgaaacatccgcagattgtggcctccctgaaagaggcggggctgacgggcgcggcgggtgacgcggagaagatgaagaagggcgatgcagcagcgcatgcggagcactttatgcagcacacccgctgggttcctgcctggctgaaaggaccggagccagcggctgaatccggtgctgacgacgctgtttcagataccgacagcactgacaacgataccaccaacacggcacacgccgcctga

SEQ ID NO: 141067 - DNA, 876 bp, Enterobacter cloacae
atgacacagaccaccacacgggcactcagcgcagatgttcagacgcacggcgatgcgggcgacatcatcccgtccgtacccgtcgggcgcattgtggcgcagcgcaacagcggcgtgacggcgtttctggagggggttgccctgatacgcgaagcgcagaccacgctggcggaggcttccgggcgaagctggtttgccgggttatcgcagatcgtcgaaagcagcctttgcagcgaccgcagcgaacagcggaatgccgccattcgccggcgtatctgccgcattgccgaccgggatatctggacgcggctgatgaatgaaacgggcatgttcacgctgatgagcgaggcgcagcgcaaacagtgggatacgcagctgtacagcgacgactgccccgaaatatccctggacaatgtgatcgccacgttccgggcgctgaatgccagtaaaggggcgacgtttgagcagggcgttatcgacgtgttccgcaatctgtcatgggactacaaaaccaacactccttgcctgctgggaaaacgcatcatcattgatggcgtcctggacaaccatcgcgggctgtatttttccgtgcgcacgtatgcgcagagccggatcaacgatcttgcccgcccgttctggattctggacgggaagaacgtaccggattttcgcgtgtcggagggggccgggctgagtgagtttatcagtcggggcggggcgaacagcgtgggtgaagtgtttacctgcgaatacttcacgattcgggcatacaaaaaaggctccgcgcatatcacgtttacgcgacctgacctggtggaaaaggtgaacgacattatcgcccggcactatccgggggcgctgccgccaaaagtctga

SEQ ID NO: 141068 - DNA, 231 bp, Enterobacter cloacae
atgtcagtaactattgtttcaccttccgcagaggctgtaaagccccgccgccacacgcgcatcccccgcgcggagatttctgcgccggatatcgatcctgccctgaaggctttcgggcggcatatcgcccgcagcctgcgcaaggggcgcggcgttcacatccccgcgatgaaaaatgctgccttcgggcaggtgctccgcacgctggaactgacgcgcgcatttaactga

SEQ ID NO: 141069 - DNA, 228 bp, Enterobacter cloacae
atgcagactcaggcaatgcggacgtatcagattgcgtttaccggacgggatgagaagggcgttttgccgatgtttacccgcgtacaggccgccacggggaaaggggcggtcagagcgtttatcgagcgctacagccccgtcagcggctggcttttaggcgatcccgaagacattaccgacaagctgaataaggaggcaaaagaagcagatagcgtgtcgcagaaatga

SEQ ID NO: 141070 - DNA, 399 bp, Enterobacter cloacae
atgatgtacggaaccgtcagtgaaatctgcattgcgctgctgaaaacgcacgaaaacaacgaaaaaatcgccgttatcacctggacggaggaggacgtgcgcgaggccggcgcggaatataaccccaccatcacagaaacggcgcgagtgcttcaggctatcggggaggccgactgcgacatcatgtatcgctacggcatcggtcaggactttgtttcgggggaactgcgtcagattgccgcagagcgcgcgccgcgtcagatagccattcctgaaaacgaacttcgcttactgctgccgctgatagaaaggggaatgagccacgtcgatgacttatcgggtgaggcttctgccgcagtggaaacgctgcaactggtgctcggctcaccctctgcgtaa

SEQ ID NO: 141071 - DNA, 432 bp, Enterobacter cloacae
atgttacgcacgcacacctgccagaccgtttcccccgtcgcccgcgaggcgcgtttttccttcctgcccgtcctgtttggcgcggactacctgaccgccgaagcctgcatttacgcctatgccggtaaatacattcgtgactatgacggcggcgagtggacgtttaacaccctcccgcagggggcgggctatcttgcccctgatgaagaccgcgtaacggtatttaaccctgataacggctttgagggggaaatgtcgggcgacgcggcggggattgtcgtcaccgcgctggtacttaatcaccggagctggatgcacgaccaccacgacgagcgggacgcctgccgccactacatccgccgctatgagcagctcatgagcattgtggccacccaccgcgaaagccgcgccatttatcgcgcccttgactga

SEQ ID NO: 141072 - DNA, 762 bp, Enterobacter cloacae
atgagaaatgacaccctgaacgcgctgatactgcgccacggcgaccggatgctacaggatgcgggctggccgccctgcgtggatatgatgcccgtcgcgcccgaacagatgcccggctggcttgtcgcctgcggctcgctcgatgccgcgcaaatcctgacgctggtcacgcatctttgccagccgctgacgtatggccgggcggcgctgctgaccgccagcgcccggcggctggcgggaacccctgcccggttgcacctgtaccccgcgaaacgcgatacacccccggagcgcctggccgatgccatgacgattcacctgccgtttgcgcaggaatggctgaccgcggcggaatgtgacgacctgctggccttcctcagaggcagcattgatgcgatttgcaatatcgtccgggaggacgcccgccgcctggccgccgcgctcaaaccctccgccacgccgcggctgatggacaggcgattcggcgactggcgcattctcgccgacgagtacgaccacgaaaactggctcgatgaggacgacgcggaacaggtggatgccgtccttgacgcggtactggtgcgcggggcgcggttctgcccggtgctgctcaccgtggttaacgagcgggaagaagatattaaggccgctggcgttatcacagacgtgctgcggttccccggcgaccccgcacgccgctggcttgaccgccgcgtcctgcgtgaggtcatgagcgaggcccgggcgatgcccgcgcagtaa

SEQ ID NO: 141073 - DNA, 411 bp, Enterobacter cloacae
atgctgtacggaacccgtaaagagctgaacaaaaagctgaaacgtatgtttggcaacgaggagcgcattgccctgctggtctggacgaagcaggacgttatggcgcaggtggaaaatatgacggaggccgaagccgacgccgtgcttgagcttatcgggcgcgcggggacgggagaacataccgaagacggcgtgtcgttccgcaccgttcaggcgctgtatgccgggattggcacgaacaccccgcgcgtgagcgtccccgccgatacgctggcgcgtgtcacggatattgccgcaagggctatcagcggggaagacgcacaggcgtggccccttgtgcgacagcactacccgagcgttgccgacgctcagaaagatattgcctggctggaaaacgaaatcgccgcttaa

SEQ ID NO: 141074 - DNA, 222 bp, Enterobacter cloacae
atgaactacgacggacacgaagggctgcggcgcgatatcgccggactggcgaacagcatgtgcgacctgaaaaccaccctgaacgtgctggaagaacggtatcactggcagcatgacgggctgccggagcgtctggctggcgtaagcctgcgccgtatccgcgccctgatggacgaggctttcaatatcgccctgttgcttgacgaatcctttaaagactga

SEQ ID NO: 141075 - DNA, 702 bp, Enterobacter cloacae
atgtccagattcattctcggggactgtactgacgtgatgcgcggatttcccgaccgcgccgttgaccttattgtgaccgatccgccgtacctcgtcggctttaaggaccgctcaggccgccagattgccggcgacgtcaccgatgaatggctggagccagccacccttgagatgtaccgcgtgctcaaaaaagacgccctgatggtcagcttctacggctggaaccgcgtggaccgctttatggccgcatggaaagcggcgggattctacgctgtcggccagattgtttttaccaaaacctatgcttccaaccgccgcagcgcgaaggggcgtcgcggatttgtggattaccgccatgagggggcctacgtgctcgccaaggggcggccgacgccgcctgaaaaaccgctgccggacgtgctgcccttcccgtacacgggcaatccgctgcatccgacccagaagccggtggaggcgctacagccgctgattgagtcattcagcgccccgggggcgattgtcctcgacccgtttgccggaagcggctcaacctgcgtcgccgcataccgcgccggacgccgctatatcggcatcgaaatgctggagcagtaccaccgggccggcaccgaacggctggccgcgatgcgccgcgccgtgaacaccccggcggcgaacgaagagtggatgccggaggccgcctga

SEQ ID NO: 141076 - DNA, 417 bp, Enterobacter cloacae
atgactgataaccgcaagtgctcgttttatatctacccggagcgcaatgcggctgaccgggtagccgacagttttctggaaaagctgcctcaaaaagagcgcggccgtgcgatgcgcgccatgatgctctgtggtgctgcgctaatgaaacaggacgaacgcctgccgttcctgatctctgaattcctgacagaaagcacctcaatgaatgatattcagcggataatcagcagtacgctgccgcagcaggacatgaacgatatgacgcgcctgcttgaagcgtttctgcaggcatctggcggtggcaacaatacggtgggcaaccccgttgcgccccccgagccgggaacgcatgaggataagaatctggaagaaacccggaagaacgtccagcagatgttcccggacgatgattaa

SEQ ID NO: 141077 - DNA, 978 bp, Enterobacter cloacae
atgtcaggcagaaaaggaaagggcgggaagtcaccggttccccatgacgggctgtttaaaaccttcctgacccacacggataccgcccgggattttctggccctgcatctgcccgcagagctgctgcagttgtgcgacctgaccaccctgcagctggaatcaggctcctttattgaggaaaacctgcgaacctattttgccgacgtgctgtactccctgaagaccaccgagggtgagggatacatttatacgctcattgagcaccagagcagtcccgacaggcatatggcgttcagactcatgcggtactccattgccgccatgcagaaacacctggatgccggtcatgagcagctgccgctggttattccgctgctgttttcccacggtcgtggcagcccctggccctacacgctgaactggacggagctgtttgccagcccggaaacagcgcgaaaactgtataccggtgattttcccctcatcgatgttggcgccatcgatgacgatgaaatcatgaaacaccgccggatggccctgctggaactgatgctcaagcacgcacaaacccgcgacctggccgagctgaccgaacatctggtcaccctgctgattgcgggttacactaccgatgagcagctggtcacgttgatgaactggatgctgcagacgggagacacggccagacccgaggcattcctgcaggaactggcccgccggtcaccgcaacacgaggagattttaatgactattgcacaacgcctggaacagaaggcccgcgaagaagggcgcatggagggcatccagcttggcgagcagcgcggcatccagcttggcgaacagcgcggcatcgagaaaggtgagcgcgaagcgaccctgaaaattgcccgcacgatgctgcagagcggcatcgaccgcaatacagtgatggccatgacaggtctgactgaagaagatttgcagcgcattacccactga

SEQ ID NO: 141078 - DNA, 1089 bp, Enterobacter cloacae
atgctcagccagcttaacctacgttttcacaaaaaactgatcggggccctcaaagcgagggcaggggcagaaaatgtttcagtcaacgccctggccgaacgcttcctcgatgacggcctgaaaacggccgccgccagcgacgggtactttcagctcatcgccgatccggagaccacggtccggcagctgtaccggcatatcattctcggccagaccttcggcaccgctccggtctcacgggatgaactgcgcttcatgttgaaccatgccagagatgcttttctgcacggaaaggacaggctggccacgcttccggccctgggcacgctgctcgacattacccgcgatctgctggcctggcaggttgagaacggccggccgttggacggcccttacctgaaagggatcttccgactcgccggtgaaaactggaccgaagaatttgaccggttccgggcggagctgcgtccggtcgtggaccagatgtatgccgaatatctcctgcgcccgctggagagtgactgctttgaactggccgacgtgcctgacagccagctggcggagatattcaccctgccgcggctgaaagccgttttccccctggttctgcgcgggctggagtggagtacagagcaggcccgtgctctggctcaggagctgcgtccggcgatcccggccgtcacgcaaaccactgaagccggctcgctgcgcctcgatatccgcattgagggtcaggctcccggtgcgcgcccgggtgcctggtatgagacaccacgactgcatctgctgatcaccggccaggactttgtggtgccgtacggctgggaagtgttctccgaactgctaggcctgttcacgctgtatgcccggaacccggaggctcttgcacacggtcatcagggcgggcgcgtgatgttctcgccgcccggacacgtcacgaaggagggattttttggtatcgacggcctgcggatttttatgccggcagaggcctttgaagcgctggtccgggagctcagcatgcgatgcgctgaaggcgcgctggcggaggccctgaccggtctgcgctgcctgtacggagatctgtaa

SEQ ID NO: 141079 - DNA, 2226 bp, Enterobacter cloacae
atgagaatcctgagacagatgtggaaccagaaagggcttgatgcggcagttgaagatgtacctgaggatcgatacggtttcagtaatatcgcagaaaatatatcccgatccattctttcccttccacaggacgcttcaaatattgtcggaatagaaggggcatggggatcgggtaaaacgagcctcctgaatctgatactgaaaaaccttaccctgaacaaagatagtcacacgcatgtgctgcatatttccccctggctgagtggcggcactccggttgaagcgctctttcttcctgttgccacggttatccagcaggaaatggaaaaacgccatcctccgaagggtttcaaaaaactctggcgtaaatatctgctgtcgccggaagcgcagaaagtgattgagtatgctcaggatacttcctcgcgtgtccttccgctggttcagtatatcggacagttttccagcattattaactggatagcaggcggaataaaggtattttcagacagccgtctggctgttgatcagaaaaccacgacaaagcttcggactgaaattgcagagcaactggtcagtctggatctgaagtttattgttgtcatggatgatctggaccgactggagccatcccaggtggcagaagtgttcaggcttgtacgtgcagtagccgatctgccccgctttacccatattctctgttatgacagacagattatcactcatgccgttgagcatgcgctgaatatcgaagatggcagccgttacctgcagaaaatcattcagctcagttttaaaataccccggcctgaagcctttgacctacgcaatgaatttcgccagcgagctgagcagctgtatcagcaaattaataatcagccgccagactctggaatggtaagggatctcgccgcggtaactgatacatatggtgccgcactttcgacgccacgtgaaatccatcaggccattaattccctggtttttctgtatccgggaatgcgggattttgtgtatttccctgatttgtgtctgctccagcttatccgggtgacaaacccggccctgtatgactggacagagcattacctgacagaacggtccgtgattgaagccggccagggcatgctttctgaccgagaaaaggcagacttccgggaggagcttatcaggtgtatgaagacgttcagggcatccaatgcagactcgtttctgacgcttgcaggctggctccccggtatcagcggacataatgatgaatatctgaatctctttgagcccgtcagtgaggattttcgtcatatccagacgacagataaacgactcagcagcctgacgcactggcgatattattttgccttctcatcaccacagaatgttctgccacctgaattctttagacagctttttgagcaggcaggcgtaccggaaaaacagcagcagctttctgaattgctgctctcaaaaatcaacagtgtgggtagtctgtcaggaacctggttcgaacatatactgagcagactgactcctggcttgattagagaacgcaatttcgaagagtgcgcagggctggttcattttttcttcgatcataccgatgaggtgagcactcgcttccggatccgtaatccatggttttccctgcgtgaaacgggtattaatgaggttgtacggcatctgctgaagcatatgcaggatattgatgagaccagaacggtcacgctgatggaaaagctgatcgttacgggtgcttcgccgttctggacagccgattttatgcgggatcttatctgggaacacggacttgctcaaaatgcagtaccttcgccttcagacgctcttttcagtcgcgatattacggaacggttgcgtgacaggtttgctgaacgtatgaatcagccagaacttcagcaacaacttctcctgcgcaagtctattctcgggtatctctacgcatggagagacatgagctcagtcgaaaccgttaaacgatggatcagagaagtgacttcaactgatgaaggccttgttgatctgttgatacggttacagacaagcgtcttcagttctaacaaaggggcatatcgccgcattgcacgagatcaagtcagtccgttcttcgatgactggcctgcagttgaggaaaagctgaagggtatgctttccggcaacgaactgacgccggagcaggaagcgctcaagactgcgctggaaaatgatgactga

SEQ ID NO: 141080 - DNA, 900 bp, Enterobacter cloacae
atggcgattgatatctttcagtcacttaaaaattgcgtattcgatcttcagcgcgctgacgttcagaactaccagcagcctcttaaacaattggcccggctgttgaactcagagaatctgcagtcagttaatgcacatctgacccgcaatgttgaacttgatgcctttctggccaggagtgaagaaactgaatccagcatggctggttccgctgttctacagtggcctgatgagcccgctgatattttgggcctgaagttgctgctgatcgagaaaatggcagccgataacaatttttcctttaatttctgtcatacatttttctatgatcgaaatattattgaatccattcgaaaattcacttcatcattagttgtcccgttcgtgcgcgattaccagttgtatgtggaaaaccaacacgatcccaaacctgcagtgtttcgtccggtttcccgaaaaatttttattgttcatggccatgataatgatgcccttcagtctgttgcccgttttatatcccggatagggcttgaggaaatcattctttctgaacgtcctgacggctctagaacaattatagagaaaattgaagcggagtcaggggatgtcagctttgccattgtgctgatgacgcccgacgatagcggcagtgctctggcatctgaaagcactcgtctgcgtgcgcgccagaatgtcctgtatgagctcggatatttcgccgggaagcttggacgtgggaaagtacttgtactcaggaagggagatattgaaatcccttcagatcttgccggggttctctataccgagcttgatgagcatggtggatggaaacgtaagctgctgagtgagctggcgtatgccggtgttccttttgacaaggaaaaagcgttaagtgcctga

SEQ ID NO: 141081 - DNA, 291 bp, Enterobacter cloacae
atgagcgtcaaaatcacaggtttagacaaaatgcagaaacagctaaaagaggttgagagagcaacagaggcattaaacggaagctatgatgtccatttcgatgctaacgatcctgtcagcattgagaacgcgattcaggaagcctattccatggtgcacgaacgcgcttctggttatgcttctaatccgatggtcagcccattaatcgaacacatgaaagaaaatctgcgccaacagattctggacagtgcagaacaacaaagacaggagaacgggcaggatggcgattga

SEQ ID NO: 141082 - DNA, 135 bp, Enterobacter cloacae
atggaaatattcgcgcaggtgttcaggctgttcccgttcaacaagttccggcacgacgggcttgttcatgcgctcctgccaggcaacagcagcagccaccttatcgacggcaactttatcctgctcctcctttga

SEQ ID NO: 141083 - DNA, 474 bp, Enterobacter cloacae; identical to SEQ ID NO: 99300

SEQ ID NO: 141084 - DNA, 162 bp, Enterobacter cloacae
gtgaaactgccgcgaagtaccgttatctggtgcgtactgatagtgtgtctcacactgctgatattcacttacctgacgcgaaaatcgctttgcgaaattcgcctgaaggacggacaacgggaggtcgctgcaattctggcttacgaatccaacggtaagtag

SEQ ID NO: 141085 - DNA, 309 bp, Enterobacter cloacae
atgttcgagttttccggcgtatgtatcagtattagtcatatggaagaaagtgacatcagggtacttcaggtgctctcatctaataaccattcttacgatggttataatgagtggattcacgatacaccgtatggttgtgtaatcagaatgtatgattttaaacggcatattctggcgctaaagagaggtggcgtatcaagactattgcgtaaaaatctcattcggatgaatcaggaaagagggtatcttcttttccatttcgacagtgatgcagattattacccaggtattgaatctgtagatttttga

SEQ ID NO: 141086 - DNA, 546 bp, Enterobacter cloacae
ttgagtcttagcctgggatgggttaacgtatttccggaaattggcctcggagggaaaagcatgaagggaatggcgctggcgatcacacttttattattttcggatattacttctgcttcagactgttttgacatggctggaagggattacaaaattgatcctgatttactacgcgcaatttcctggcaggagtcgcatttcaaaattgacgcgatcggccgcaatcctgtctcaggttatgggtcaggtcttatgcaaattgattcacaacatttcaacgaactgtcgcggtatggaattaaacccgatcaccttctcaccgatgcatgcatgaatatctataccggagcttattatcttgcgcaggcgttcaataagtggggtgtttcatgggtagcagtgggggcttacaatgccgggttcagaaagacaccacgtcaggcagccaggcgctatgagtatgcaaaaaggatccaccgttactactcagcaataaaagcgagtaaacagcaaagggctaatgagcagaaaacagcgatgaactaa

SEQ ID NO: 141087 - DNA, 387 bp, Enterobacter cloacae
atggctagggttcaggcatatcccagtgatgaggtagtcgataaaatcaatgccatagttgaaaagagaagagctgagggtgcgaaggaaaaagatattagtttttccagtgtggccacaatgctccttgaacttggtcttagggtttatgaagcccagatggaacggaaggagtccggatttaatcagaaggagttcaataaagtattgcttgagaatgttatgaaaactcagtttactatttcgaaagtactggcgatggactctcttagcccacatataaatggcgatgatcgttttgatttcaaatcaatggttatgaatatacgagacgatgccagagaggttgtggaaagatttttcccatcacaggatgaggaggaataa

SEQ ID NO: 141088 - DNA, 690 bp, Enterobacter cloacae
atgtgtgcgaaggatcgtagtcaaaatacgtttgtcagtcaaacggattccattcattctttaggtgagatgcttaacatttcatcttccctgtcatttattcgtaatgcccgtggtgagttaattcacaccagcccactttttgacaaggttttcttaacacgtaccgatgttgactcatggttttcctctcttccacttgaaacaggtatggagttggtaaagtcagagattaatgttttatcagaacgttctgcttgcattgttagagatgttcgcatcgatggctacgtatgggatgtttttatagaaagcctatcagttaataatgagttctacagtaaatgggtctttgtcagggaaacctacgatgttggatttatttctaacccttttgctgacgtggggagaaaaattgaaaagtatatctctagtttgtcttcaagaaaggatgataaatggaaaatactcaatttgtatgccataggtttaacacattcaaaaatttctgctatcactggcgtatcagaaaaaacatcaagaaatgttgtgagtgattttaataaagaatttgctttcgatagcagggataaccttatactctcgttattttattctgtaagttattacaggctggcaatgaatatcatggatatattaaagccttgtgttaatgatttgttaaagtga

SEQ ID NO: 141089 - DNA, 369 bp, Enterobacter cloacae
atgaatactgtattaactgtgcagggtagctctgtagctgttgaaaacaaaaagtctgttctttcgcgcatctttaataaaaagaatgtgctgaaagctgctaaaggaattttgccgcttgccgttctggctgctgtattcccacaagcagcactggccactactaccggtacggatttaatgaagaccggtgatggcactgtaaaagcaacttttggttcaggttccagtgtcgtgaaatgggtgattctggctgaggttattgtcggcggcatcatgtacatgatgaccaaaaacgttaagttcctggccggttttgccatcctgtcggtattcgttaccgtcggcatgtctgttgctggatattaa

SEQ ID NO: 141090 - DNA, 369 bp, Enterobacter cloacae
atgactacagcattatccattcagagtgctgaaatgagtaagggtgttaagccttctctgcgtacccgtctcttcagcaaggccaaaatgctgaaggcggcaaaagccgttctccctgttgctgttcttgcggcagctttccctgaagtagcgatggccaccaccaccggtaccgatctgatgaagtcaggtgacggtacggttaaagccacatttggtaaagggtcaagtgtcgtcaagtgggtgttcctggcggaagttatcgttggcggcatcatgtacatgatgaccaaaaacgttaagttcctggctggcttcgccattctgtcggtttttgtcaccgtcggaatgtcggtcgctggttactaa

SEQ ID NO: 141091 - DNA, 567 bp, Enterobacter cloacae
atggaacacggcgctcgtctcagtaccacccgtgtcattggtctggggtttatctgtctcggtaccgtcacagtactgagcctggccaccaatgttattcagggcatcaataactaccgcctgcaaaatgagcaaaaggttgcggtgacgcccatgttatataacgcccctttcgcggtatcacagaaccagtctgatgcatcctatctggaacagatgggcctgagttttgtttcattgcgcctgaatgtcacccctgaaaccgtggatgctcaacacgaacagctgctgaagtatgtgtatccggcatcgcagaacaacctgaaaattcagcttgctgaggatgcaaaacggattaaggacaataacgttaattccagtttttactggacgtttgtccgtgcctacccggtagaaaaccgtgttgaaattcgaggggagctgaagacctggattggggattccaggccttattcagaaattaaacattatgttattcagtttaaccgtttagatgggatcagctggctgacacgttttggagaggtgactgatgaaaatcgttaa

SEQ ID NO: 141092 - DNA, 741 bp, Enterobacter cloacae
atgaaaatcgttaaacccctgtgtgtatccgcctgtctgagcctttgtctgatgacaccggcaatgtctgccacggtaagcggaacgcttgcacccacagtggtaccactgacaaatggtggtcaggcaaacatcgcggtcagcaacacggatcctaatctgtttatggttccgggcgatcgcatcaccgccattaacagtctggatggcggtctgacgaaccaggagcagacagacagtggcggagccatcctggcaaccgtcagtaaaaaaccattcactttcattgttgagacagaacgcggactgaatttctcaattcgtgccgttccgcgcgcgggggcaggccggactattcagctggtctccgaactggccggtactcccggcccggcgaagtcctgggaagagtcttcaccgtatgaaagcctcctggtatcactaaatcgtgccgttcgtcagggtggaatgcctgaagggtaccagcccgttcctgtcacgtcggaaaccttaaccgttccagcagggctgagtgcaaaggcagaaaaagtgtggacagggcatcacctgaaagtggttcgttatgccgtggataacgtgtcgctttctccacgtatggtcaaagaaagtgatttctggcagccaggtacgcgcgccatcatgatcagcgggacagcgggtcccctgttgagtggcggacgcctgcaggtctgggtcaccacagcagagggagatcgctga

SEQ ID NO: 141093 - DNA, 1413 bp, Enterobacter cloacae
atggccaacattaataagctggtcaagaacaaacagtttatgtggctgggtgtcatcgccgtatctgctgtcgccattatcggtggcggtatgtatctctctgatctcgaggttggttccgatgatgccgcccagacgcagaacgaacccgcgccggacatgacgggggtagtggacagtcgtttcgataccaaagttcagcaacatgcgacaactgaaatgcaggcgacagcagctgatctgacaaagcgttttgatgcacttcagaacgaagtgaacctgttgaataaaggtcgcggtgaagatcagaagcgtattgagcaactcactacggaaaaccaggcaatgcaggaccagttaaacaagctgggtgtgaagccgaccacgaccagtggtgagcctgttccgaaaccaccgatccctgcaccgggaccggagggtgagccgcaaccggcgaatttcccgccgcaacctgcaggtgctgttccaccacccacgtcattctatccgggtaacgggactacaccggcgccacaggtcagttatcaacctgtaccggcccctaaccagatccaacgacgtacattcagttatgacaaaggtaagaaggcaaaaacactgccgtacattccttcaggtagttttgcgaaaagcattctgattgaaggtgcggatgcgaatgcctctgtcaccggtaatgaatctacggttccgatgcaggtccgtctggtcggccgtgtggaaatgcctaacagcaaaacttatgacctgactggctgttttgttggcctcgaagcatatggtgacgtttcaagtgagcgcgcgattgtccgtacccgaaatatcagctgcatcaaaggtgataagactatcgatcagccaatttcaggccacgtttcctttatggggaaaaacggtgtgaaaggtgaagtcgtgatgcgtaacggaaaaatcctcggctgggcgtggggagctggttttgttgatggtattggtcaagggatggaacgtgcggcacaaccttctgttggaattggtgcgacggcatccgttggagccggtgatgtgctcaaaatgggcgttggaggaggtgcatctaaagcagcgcagacactgagtgagtattacatcaaacgtgcagaacagtatcaccctgtcattccaattggtgccggtaatgaggtgaccgttgtgttccaggatggattccagttgaaaacgattgaagaactggatgcagagaaaaacggtaagcagcaggaacaaaatcaggaacagcagccgcaacaacctcagcaggcaggtgcatccctgaacggcttcagtactgaccagatgctgaaacaactcgggaaattagatccccaccagttttcacctggtgccatgtcagaggggaacaacaatggctag

SEQ ID NO: 141094 - DNA, 237 bp, Enterobacter cloacae
atggctaggcagaaaatggagaaaagtaatccgctcccggaaacgtctggtcataccgttcctgtcggagatacgggggccggcaaaacaaccattatgtcgaaaatggtatttgccttgtcagatacaaaccaactggagaaagtttatggtgccatgagttcggaagagagagacagatttactcaggaaattaaagctaacaccctattcaggatgaacctgaaaaagagctaa

SEQ ID NO: 141095 - DNA, 570 bp, Enterobacter cloacae
atgaaggaattaattctgttaattcctctgggcagcgcattgcttttaaccggatgcgcaggaacggagactgattttcaatgtaacgcaacaacatcggatacctgtatgacgatggaacaggccaatgaaaaagctaaggcgaaagaggaacgcagtgaggcaaagccggttgcggccgggttgcctcgactggctgacggtaatttcagaacgacgtcagtaaattcatacccgttgccgccacaacctgatttagtacaggcgaaagccccagcggctgtagtagtaaataaaagtaccccgtcattattaaatgtcagggggtcggtaaataagcctgggtatatacaacccgttacaccccaggttatgcgtccggtgacagtatcaacatttacatcacctcaaactgtaccgggccagtatccgagaccattaagaaaaggtgagcagacaacatcattatggatcgctccctatgtggattccgatgatgtatatcatcaaccaacgacagtgttatttgtggtgaccccatcaacctggggacaacctcgtcttaattaa

SEQ ID NO: 141096 - DNA, 414 bp, Enterobacter cloacae; identical to SEQ ID NO: 99307

SEQ ID NO: 141097 - DNA, 399 bp, Enterobacter cloacae
atgcatgcttacataaacggtatggatgtgtggtggattttagtcattgatctggtgatgttaattgcagggatcatcggggtgttcttagcacttattcttcccgaacattatcaattcaggggcaagctttttctgacaggcgcgttcactgcgattattggcattgcaatctgtttcgttatggtgaggttaacctatagtgccagcgagatcgatgctggccggcactggaaaacagagtgctcacttattgaagccaatgtgcagaccggttttttgaatgacgccgtcaacaaattaaggtgtgagggagttattgttaatgttccggtgtatgcctatgaggcctacactgaacagtggcagttattacaaaagaaaaaaggtggggaataa

SEQ ID NO: 141098 - DNA, 387 bp, Enterobacter cloacae
atgactttcctgaaaagatacggctttctaatttatcctctaatgtactggtctgtttatctcactttgaggtatctgctaactaaatctccagatcaaagtacagaggagtttcataccactttgcgtcgtgagctggtttttattatatgtagccttggtgtgtattatttcttgtgtgtgtcggtaacgagttattatgaggttcttcgtctcggtatcttatcaacactgattattcatagtgcattgctcattatcacgcttctggtatcactctggaacggaaagattgttatgggtgaggtgatatttgcacagttgatggcggcaagaataattcttttctttatgccgtttactttattttattatcgggaaagataa

SEQ ID NO: 141099 - DNA, 2640 bp, Enterobacter cloacae
gtgagtctgaaccctattgagtcggtagccaaagcagttaatacattactcacagcgctgaagctacctgatgaatctgcaaaagcaaatgatgttctggccagtatggatttccctcaattcagtcgcgttctgccatataaggattacgacagtgaaacagggttgtttattaaccagaagacagtcggttttattctggaagccaggcctctaccaggcgccaatgaacatattgtaggttcgcttgagaacctgctgagaacgaaattaccgcgtaatgttccggtcaccattaatctggtttccagcaagctggttggcgatgatatcgaatatggcctccgtgagttcagctggagtggtcctcaggcagaaaagtttaacgccattacgcgagcctattatgtgcgtgcagcagagaagcattttgcgctgccaccgggaatggatttaccgctgacgctcagaaactaccgtgtatttatctcctgcagcatgccgcgtaagaaaaattcgaatgcgcaaatcatcgagcttcagaaccaggtcaagataatccgggcctcactgcttggcgcgcaaataccgactaaggcactggatgagaagggccttgtggaaatggtcagtgaactgattaatccaaatccaggtgagatgtaccggaggcctaaaaagctggatccttaccaggagctgaattaccagtgtgttgatgacagctttgatatggaagtgatggcgaatcatctcaacattggcctgctggacaaaaatggggtggaacgtcatacccgggtgctcaactatcatcttgcacgcgacccggaaattgcgtttttgtggaccagtgcagacaactacgccaacctgctgaacccggaattgtctatttcctgtccctttgtcattacgcttaccctgatggtggaagaccaggttaaatcacagaacgaagcgaacctgaagtttctcgacctggagaaaaagagcaaaacgtcatacgcgaagtatttcccctcagttgagaaagaagttaaggagtggggggatattcgccagcgactgtcttccaattcctcttcactggtgtcctattttttcaacgttacggcgtataccgaagacgatccggaagcggcactggccactgaacaggaaatactgaacagtttccgtaaggggggctttgaactcatcgccgctcgctatcagcagatgcgtaatttcctgtcgattctgccttttaaggcgggagaggggatatttaaggaactgcaggcggcgggggtagttcgccgtgctgaaagctttaatgtggcaaacctgatgccggttgtggccgacagtccactggctccttccggtctgctggcgcctacatatcgtaaccagctggcttttatcgatctcttctacaccggcatgaataacaccaactttaacatggcggtatgcggtacttccggtgcggggaaaacaggcctgatacagccgcttatccgtagcgtcattgatgccggtggttattcctgggtattcgatatgggggatggttacaaatcactgtgcgaaaacatggggggtgtgtatctcgatggcgatacgctgaaatttaacccgtttgcgaacgtgctcgatgacaataacttcgatgcatctgcagagcgtatccgtgaccagctttccgtcatggccagtcccaatgggaatcttgatgaagtccatgaaggcctgctgcttcaggcggtcaaagcggcctggctgaccaagcataacaaagcccgaattgacgatgtggtggatttcctgcaggaagccaaagacagcgaaacctatgcagactcaccgacgatccgcagccgtctggacgaaatgattattctgctcgaccagtacacggtgaacgggatttacggcagctacttcaactctgatgaaccgtcactcaatgatgatgcccgtatggttgtgctggagctgggggggctggagtcccggccatctctgctggttgctgtgatgttctcgttgattatttatatcgagaaccgcatgtaccagacaccccgtaacctgaaaaaactgaacgtcattgacgaaggctggcgcctgctggacttcaaaaatgagaaggtcggcacctttatcgagaagggctaccgtaccgcacgccgtcacctgggttcgtatatcactattacacagaacattgtcgattttgactcagatacggcttccagtgctgcacgtgccgcctgggggaactcctcatacaaaatcatccttaaacagtctgccaaagagtttgccaagtacaaccagctttaccccgaccagttcacgcagctgcagcgcgacatgattaaccgttttggttcggctaaagaccagtggttctcctccttcatgctgtcggtggaggcgcattcatcgtggcaccggttgtttgtcgatccactcagccgcgccatgtattcatccagtggtgctgactttgagtacatcacacaacgaaaacgcgccggggtgagtattcacgatgccgtgtacgaactggcctgccgtaacttcccggatgaaatggcagacctggaggcccgggtggccatgaataatacaaggagtgctgcctga

SEQ ID NO: 141100 - DNA, 378 bp, Enterobacter cloacae
atggaaaaaaatatcagaaatcgtctgtttacccgacgtgcccttatcactggcgggctgatggttgccattcttgccgccaatgccgtggtgacccggatcatgatagcgcacagcacacctcgtgttgtcgcgtttgatatgaagaaaacgctcgataacttcatggacagtgtcagccgtaagcaactgacggaaagccagtctaaggcactgtcggatcgttttaacgatgcgctggaaaaaagtctggatgactggcagcagaaaaaccatgtgctgattcttgtttctcctgccgtggttaatggggcgcctgacgtcacgctgagtattcagcgtgatattgcgaagcggatgcagggaggcagggaatga

SEQ ID NO: 141101 - DNA, 630 bp, Enterobacter cloacae
atgaaaatgatccgcggggcgctctttgctgtatgtcttgtctccccgcttacccgggcagctgatctgggtacatggggcgacctgtggcccatacaggaacaggatatgttatcgctgataacccagcgccttgaagcgctggagaagtccgggcgatgggggcaggagatggaggcctttaaggagcgggtgaagaccaacagccagcgcccggctcccgtcgaggggataaagaaagcggataaatatgagcagcgctggtttgatcccagcatcaaattaactgaagacctgaaggatcagaacggtgtgctgttcgcccggaaagggcaggtgcttaatccgcttaaaaccgttccttttatgcagacgctttacttcattgacggtgatgatccggaccagttggcctggatgaaacgccaggtacctgagacgttaatcagcaagattatcctcgttaaaggcagcgtcccggatacatcggcggcgctcgacagccggatttattttgaccagaacggcgtgctgagccagcgctttggactgacggcagtacccgcgcggatcaccccggccccctcgggagaacgactgaacatcgaatactttccacccacgcgataa

SEQ ID NO: 141102 - DNA, 993 bp, Enterobacter cloacae
gtgaaacgtattttgtttttcatggtggcctgcctgctatggagccacagtatgaatgccgctgccgacccgtcgtgtgaaggacgatttgtaaatcccattacagatgtctgctggcgttgcattttccccttatcgctggggagtgtgcaggtggggaaaggagatcagccggacacgcctaatcccggcagcccgatacagtattgcccggccccacccccaatctttgtacgcattggtctggctatcggttactgggaaccgatggccatgaccgacgtcagccgatcacctggctgcatggtgaatctggggggattcagtatcaatctcggtaaaacagggatggggacggccaaaaaggacgacaaacaggtcaacggggcgttctatcacgtgcactggtacaaatacccactgacgtactggctgaacatcatcacatcagcaggttgcctggaaggcggagatatggacatcgcctatctctctgagattgacccgacctgggtggacagcagtctgaccacgatcctgaatccggaagccgtactgtttgccaacccgatcgctcagggggcctgtgcggccgatgccattgccagtgctttccacttaccacttgacccgttgttctggtgtgccggctcgcagggctccatgtatcccttcagtggatgggccagtaacgaatccagcccgctgcaatcctcggttctgctcagtgagcgtatggcctacaagcttcaccgacagggccagattatggaaacggtcggcgccgataccgcagtctgttacgaatatccgtcgccgattatccctaaagagcgctggcgctatcagatggtgaatatgtatccggacagcgggcagtgccatcccctcgggcgcagtgtgatgcgctgggaggccggtcgcaacccgcctaatacccggaagaattttggttacctcatgtggcgcaaacgtaactgtgttttcctctga

SEQ ID NO: 141103 - DNA, 627 bp, Enterobacter cloacae
gtgacacaactgaatatttttatcctcacgcttttactcaccggtaccgctgtggcagctggcagtccggggagcccgacaacggctgaccgggagtggctgaagcaccaggaagacttcagcgagcagttacgccagcacccggacaagcagctgcagcaggaactggaagcgcagattaaccgtaaccccctggcgaaagccgatcgccagtacatcgataatctggccagccagcaaagggcgtcagcacagggaaaaccctctgaaggtgcgctgtacttcgtgtcgttttctgtgccggaggaaggtctgaaacgcatgctgcatgaaacccgccagtatggcattccggccacgttgcgcggactggtcaataacgacatgaaggcaaccaccgatgcggtgatgcggctggttaaggatggagttacagacggcgtccagatcgacccgacgctttactcacaatacaacattcgcagcgtgcccgccctcgtggtgcgctgcaaagcagggtttgatgtggttcggggcaatatccggctgaaacaggcgctggaaaaggtggcggagaaaggggactgtgcggatatcgcccgtcatatgctgggaggtaaccaatga

SEQ ID NO: 141104 - DNA, 1893 bp, Enterobacter cloacae
atgagaacacttccggccattctctttgttcatgccctggttctggggacgtttatctggtttgcaggaccagcctgcgcggacagtaacacggattacagggcaggttctgactttgcaaaacaggtacaggggggcggtcttgatgccctgaaaaacttcaacggcgagcagaatctgccggggtatacgaaagatcccgagcaaaagaaatactacggtggcgtgacagccggtggcgacagctcactgaaaaatgactctgcttcccagtgggccgggagtgaagtcggacaaagtattaccgagtcatttaccaaccgtcctccggacagcatctctccggacgccccgtttatccagaacgccaaagatattgaatcacgatccgacactatcatcggcaataccggacaggagtgtaaggcggaaatcgttaaccggagtgaatttaaaaactacacctgtgaacgtgacctgcaggttgagcagtactgtacacgaacagccacgataaccggacactatgaggaaaccacggttatcaaaacgtataccgtgccgaataaccagttcagctacagctatgacggtaacaaaagtgtgatgctgacattccgcgctccggccacgggaacggtcctgagtgcatcagcagcgctgcattttaatgacaaaaatatgtactaccgcatgacctggtggggagtaaatgaagactccgttgccaagagggacaacagctggtcccttcctggggcgactggcgcctatctgaccgagggcggctcttctccgcagggcgtcatcctcaacaagaactgccttagcggtaagcagagtcgttgccgggaatatgcccgcaagacacaaaactggttacagggcggttcagaggcctggatgagtgtcacgctgaccatgcgtgtgacggaaaaaaaatgggttccggacgtgaaatgggtcgagttctgtccattcagtaaagacgaaggcaagcagaccacgacggaatgcattgagccaggcggaaaccggacggttaaccaggatggtaatgtttaccaggtctaccaggcctgctggaaataccgtgatacgtatattacccaaccttctgattacggttcatgccagacactgatggacaaccataattgtacgctggcatcccggcaatgcgcattcacttctgatgacggaacctgtcttcatgaatatgccacgtactcctgcgaaaccagaaccaccggtaaacagatgatttgtggcggggacgtgttctgtctcgatggtgaatgcgataaagcggccagcggcaaaaacaatgattttggtcaggcagtggcggagctcgccgccctggcggcggcagggaaggacgttgcggcactgaacggggtggatgtcagggcgttcaccgggaaagcgaaatactgtaaaaaatttgcagcaggcttcagtaactgctgcaaagacagcggctggggccaggatgtggggctggcgcgctgcagcagtgacgaaaaagccctcgctaaagccaagaaagataagctgaccgtcagtgtgggggaattctgctctaaaaaggtgctgggtgtttgcctggagaaaaaaagaagctactgccagttcgactcaaaactggcgcagattgttcagcaacagggccggaatggccagctgcatatcagttttggtggcgccagcagtccgaattgccgcggtatcacggttgatgaactccagcgtattaatttcgactcactcgatttcactaatttcatggaagacctgatgaagaatcaaaaaattccggataacgatgcgctcaccaataaaaccaaagagcgtataaaagaaattatgagtcagcaatcctcgaaataa

SEQ ID NO: 141105 - DNA, 261 bp, Enterobacter cloacae
atgaaagttatattctcttcaggctgtgttacggatttcctgattagattatgcctcactgttattgtctcatcaccggtaattatatggtcatgggatacggtaaaacaaaccacgggcagtgatattatcactgctgtgtttttcatcactatcctcggtgggttctggtttcttctgtacggctttttatcttcactgatagacctgctgaaacccgctggcgaaaacagaacaaaaagaaaagagaggggggaatga

SEQ ID NO: 141106 - DNA, 333 bp, Enterobacter cloacae
atgaaagaggaaaaccctaaatggccggttatcgcgatcgttgctgtgtttatcttatttatgacgggtatgatgtgttacggactcatccgggataagcgagaggtactttttcatattaccaatcagttttatggtgttaattgtgaaaaaagttcaggtatcgcctgggtaataaaaaatgactatcgtcaggatttaacgtttcatgattatgcggtgttctgcaatgacactggtttttcagggaagcaaattaacacaggtcacgaaattcagataaataaaggcgttatctataacgctttgtccggtaataaacatcagaaataa

SEQ ID NO: 141107 - DNA, 750 bp, Enterobacter cloacae
atgaaaatgaaacggctcgtactgctgcccgttgtgctgggttgcgccgttatgtctgcctgggggaaggatgcgggatggcagtggtataacgaaccactgaaaacaaccgacccggatccacagccgaacccgcagccaccccagcaaatggatattctgcagaagcaggcagctctgcagcaggcaacgaaaaaagcattagccgaagccattatgtatccatcggtaccggcttttgtgaaatatttccgcctccagaattactggacgcagcaggcaggcttattttcgatgagcgccaagaaagcgtttcttgaacatccggagctcgattacaacctacagttcagccactacaacggcacggttaaaaaccagctcgcggccgattacgcggaacagcgtaaagccatatcggccattgctcagcatttcggtgtgatgttcttttaccgcggccgggagccaattgacgggcaactggttcaggtgctgagtaacttccgtgagacctacgggttgagtgttatctccgtctctgttgatggcgtggttaacccgttactaccggactcacgcgtggaccagggacaggcagaacggctcggcgtgaagtattttccggccatgatgctggttgacccgaaaagcggacaggttaaaccgctcagttacggcttcatcagccaggacgatctggcgaagcagtttctctatgtttccaacgactttaaacccaatttttaa

SEQ ID NO: 141108 - DNA, 234 bp, Enterobacter cloacae
atgcgtaaatttcgcatgccagatctggatatcacgggaacatgggtggtggccgtcggcgtgtttttccatctcattgcccgtctggtgcgtaaacaaccggagatggctgttgagatgggagaaggactgggtatagccatgatgattttcggtggttaccgcatcattaatgccctgattgcgcaggctgagaaagaggaaaaggaccgtgaaaatcatcctgaacattaa

SEQ ID NO: 141109 - DNA, 579 bp, Enterobacter cloacae
gtgaaaatcatcctgaacattaatcaccgcgcgcggccggtaatgcttttcttcgtcctgctgctgtcaacatttgctcaggccggcacgcttgatgaggtgaaatcgttgtacaacccgaaaggtctgaccggagagtcggcagatcaggcgccagtggtaaccgccacaccaccccggaccggagcggctcctgtctggtaccgcctcagtaacggtcgtcaggtgaatctggcggagtggaaggtggtgctgtttatgcaggggcactgtccgtactgtcatcaatttgatccggtactcaaaacgctgtcaacgcagcatgggttttcggtctttccttacacgctggatggtcagggcgatcaggcattcccggaggcgctacccgctccacctgaagtgatgaagacctttttccctaacattccggtcgccacgccaaccacgtttcttgtcaacgtgaacacgctcgatgctttcccgatattgcagggcgcaacggatgctcagggctttatggcccggctcgataccttatttcagatgatggagacaccgaaaaatggacaaggttaa

SEQ ID NO: 141110 - DNA, 2850 bp, Enterobacter cloacae
atgcaggaagtgtatgttatcgccgggggcgactggtaccggcatgtactgaacgccgttgcggcgtttatgcagaccgaaaactggaaaattatcgagagaatgtgtatcggtttttccgttttgatcgtggcagggagctggattaaaaaacacagcgtgatggatatgctgggatgggtattctcgctgacactggtatcgatgctcgttttaataaaaaccccagtacaggtcatcgattactctgaaccctcatcggtgtatcaggtggataatgtgccgattggccttgcgattccggcatcccttacgacgcgcatcgggaacgcgtttgtacagagctatgaaatggtgatgacactgccggacagttcggtctacagcaaaacgggcatgctctttggcagcaacctggtggcgaaaagtaccgattttatgtcgcagaatccggagattgtcacgctgttctccgattacgttcagaactgcgttattggcgatatgctgctgaatcacaaatattcgttcgaagacctgatgcattcaacagatccctatacgctgattttttctaaccccagcccgttaagaggcatatttgacaaaaacaaccagtttaaaacctgtcttgaagcgtcagtcgatctgaagtcagcgctggcgctggatacccagacgggtggaaaaacctggaactattatgtccgccagatttttggtggccgtccgaacccggatgtgctgatgtccagtttactgggcgacagttaccagacgttctatcacaacagccagtctgccagccagattatccgtcagaatgtcaccatcaatgccctgagaagtgggatacagagttatgcagcccgcagtgcagattcggcgagcctgatcaatattgccaccacatcatcactggaaaaacagcgtctggcgcaggcatcaatggggcagcaggcactgagaacgttgccgatgatgcagaccgttattctcgggatgatgattggcatgttcccgattattgtgatggcggccatgttcaacatgctgaccatgcaggtgctgaaggggtatgttgtcgccctgatgtggctgcagtgttggccgattttatacgccatcctgaacagtgccatggcgttctatgctgccaaaaatgccacgccggtggtgttatctgaaatgtcacaggtacagttgcgtgactctgatattgccacgaccgcaggttacatctcgctgatgattcctggcctggcctggatgatgataaaaagcgtgggggcaggtttctcaaatatctacagccattttgcttcctctggcctcagtgccacctctcaggcggcttccggtgttgtagacgggaattactcttacgccaatatgcagactgataatgtcagcgggaacagctggaatactaacagcaccactgcatttggccagatgacccggcagctctctaacggtggtatgggaacccagacacgggatggttcaatggtctgggataccagtggcgccatgtcgaaactgccggtagatatcaacgtcggacgtcaaattgccagcgcacagcagcagatggccagagaatcagaagtacaggctgaaagcgccctgcatggttataaccagagcgtaacgagcgcctggaataccctgaagcagttcggtaccaatatggggaccagttcctcaatgacgacgggggcagacagtactgaatcctctcaggatacgatggccagaagcaaaatgtggaatgctgttgttgctaatgctaaagcaaataacatcagcaatgaggagtcgttccaacaattaatggatgattcgactaaaagttctcaagctgcggatattcatgcatctggtaagtggagctcaggagatcaactattcggtaaattaggcaagtggggaactgggctatctgcggaagcgggtgtaaaagggagtgccgggtggacccatagctcgggcgatactgataatgtcagttcttcagggcgggagtcacatgacagtagacacgatactagcagtcaggcagccaaagacttcagagaagcttctgattactttactagccacaaaactacaacttctggaaatgttactgataataatgcatcttcccgtgttgaccagtttgcagcatcgttgtccagcgcgaaaaacagctatgaccagtatacaaccagtaagacccgcagtcatgaatatagtgaaatggcttcacgtactgagagcatgagcggacagatgaacgaaaacctaactcaacagtttgctaattttgtccagagacaggcgccgcagaatgcagaggctattctgacggataccagttcacctgaaattgccgcacaacgagaggccctggccagagactttgtaaaatctcaggtagagccgaaaattgatggggcataccaggaagccagaggaacggtcggaaataatatgggcggtgtttcaaccagtggaggcagagaagacgttgcttctgactatggtcagcattccggaagtattgacaatatgaccgcacatgcaggcattaaacaggatgttggtaagagcgtgggtacgttggtttcggagaacagacaggctcaccaaaatactcggcaggaaataatcaaccaagaaaatgacgttaaaaaacagcatgcagatctggaaaacaaccataaaacagagggaaataacttccataatacatataatgagaagaagggaaaggtaagtaatatgccgggagcagcctcttccaaagagcttgaggaaagggctactaaacttcaaaaggattatcttgatgggaagaaatga

SEQ ID NO: 141111 - DNA, 531 bp, Enterobacter cloacae; identical to SEQ ID NO: 99308

SEQ ID NO: 141112 - DNA, 732 bp, Enterobacter cloacae
atgaaaagaaataattctatggctattattgtcataagttcagtgttggtgttgtctggttgtggtgcgatgggtactgcaattaaaaaacgaaacctcgatgtcaaaactcaaatgagtgagactatctggttagaaccctctaataatcacacggtatttctgcaaataaaaaatacttcagataaagatatgagcggactgcaggctaagattgccagcgcagtgacagcaaaaggttaccaggtggtgactaatccggatactgctgggtactggatacaggctaatgtactgaaagcagataagatggatttgcgagagtcacaggggtggttaagtaagggatatgaaggggctgcgacagctgctgctctgggtgctggtataacagcttataactcaaattcagcaggggctacattaggagtagggctggcagctggactggttggaatggcggcagacgcgatggtggaagatgttaactatacgatggttactgatgtccagatcgcagaaagaacctcgacaaaggttcagacagataacgttgccgtattgcgccaggggacgtccggagcgaaggtacagaccagttcagaaacaggtaatcagcataaataccagacccgtattgtctcgaatgccaataaagttaatctaaaattcccggaagctcagccagttcttgaagaccaacttgcgaaatctatttctaatattctgtaa

SEQ ID NO: 141113 - DNA, 2208 bp, Enterobacter cloacae
atgagttttaacgccaaagatatgacacagggcggtcaaatagcgagcatgcgttttcgtatgtttggtcagattgccaatattattctatatgtactgttcctctttttttgggtgctttgcgggctgatattaatgtatcgcctgagttggcaaacctttgttaacggtgccgtatactggtggtgtacaacgcttggaccgatgagagatatcatccggtctcagcccgtatataccattaattattatggacaacagttgcagtatacgtcggagcaaatactcaaggataaatacactatctggtgtggggagcagttgtggaccgggtttgtctttgccggaacagtttccctgattatttgtattgttgctttctttgtcgccagctgggtattaggtcatcaggggaaacaacaaagtgaagatgaagtgacgggaggccgtcagctatcagaaaagccaaaagaagtagccagaaagatgaagcgggatggtatggcctctgatattaaaatcggtgacctgcctattttactaaactccgaaattcagaatttctgtcttcatggtactgttggttccggtaaatcagaagttatccgacgactgttaaattatgtccgtgcccgtggggatatggccatcatctacgaccgctcctgtgagttcgtcaaaagttattacgacccgtctattgataaaattctcaacccgctggattcgcgctgtgcagcctgggatttgtggaaagagtgcctgacgctgccggatttcgacaacgtctctaataccctgattccgatgggaaccaaagaggacccgttctggcagggttccggtcgcaccatctttgccgaaggtgcctacctgatgcgtgaggacaaggaccgcagctatgagaagctggttgatacgatgctctccatcaagatcgacaagctgcgcgcctatctgcagaatacgccagcggcaaacctggtggaagagaagattgagaaaaccgccatcagtatccgtgcggtgctgaccaactacgttaaggccattcgctacctgcagggcattgagaagaacggcgagccgttcaccatccgggactggatgcgcagtgtccgtgaggaccagcccaacggctggctgtttatctcctccaacgctgacacccacgcttccctgaagccggttatctcgatgtggctgtcgattgccattcgcggtctgctggcaatgggggaaaaccgtaaccgtcgtgtctggatttttgcagacgaattaccgacattgcataagttaccggacctggtggagatcctcccggaagcccgaaaattcggtggctgctatgtattcgggattcagtcctacgcccagctggaagatatctatggcgtgaaacccgcagcaaccttgttcgacgtgatgaatactcgcgcattcttccgctcgcccagtaaaggtattgctgaatttgctgctggcgaaataggtgagaaagagatcaagaaggcaagtgagaactactcctacggtgctgacccggtacgtgatggggtatccaccggtaaggagcagaaacgggaaacgattgtcagctattccgatatccagaccctgccggatttatcctgttacgtcacgctgcccgggccatatccggcagttaaactggcactgaaatataaaccccgccccaaaattgccgaaggctttattccacgccagctcaatcaggctattgatgacaagctggctgcggtgcttgctgcgcgtgaagctgaagggcagagcgcccggattttgtttatgccagatccggttgaaactgtgccggttgagaagaccgacgaaaagcctgcgtcaccggtagcggccgtacccacccctcaggaggataaggcaaaagttccgccggttactgccagtaacacgttccacaaacctgcaagtgcagcggcagccgccgcaagcgcatcggtgacccaggctggcggtgttgaacaggaacttcatgaaaaacctgaagaacaacttccattacccccgggcgtgaataaagacggggaaattgaggatatgaatgcctgggatgagtggcagtccagttctgatgttttgagggatatgcatcgtcgtgaagaggtcaacatcaaccatagtcatcatgttgatcgtgatgatatcaatctggggagtaacttctga

SEQ ID NO: 141114 - DNA, 5148 bp, Enterobacter cloacae
atgatgtcaattggttcagtgaaatccgcgggtaaagccggagattattacaccaaagaagataattattacgttatcggcagcatggatgaacgctggcaggggaaaggtgctgaggcgctgggccttgaaggaaaaaccgtggataaggccctgtttaccgaactgttgaaagggaagctgccggatggcagcgacctgagccggatccaggacggtatgaataaacaccgccctggttatgacctgaccttttccgcgccaaaaagtgtatccgtcatggctatgctgggtggtgacaaacgccttatcgaggcgcataaccaggcggtcactgaagctattcgtcaggttgaaaccctcgcagctaccagggtgatggtggacggaaaatctgaaacagtgctgaccggcaacctgattgtggcgaaatttaaccacgataccaaccgcaaccaggagcctcagattcatactcatgcggtggtgataaatgctacacagaatggcgataaatggcagtcgctgggtaccgatacggtaggaaaaaccggttttatcgaaaacgtgtatgccaaccagattgcgttcggaaaaatataccgtgaagtgctgaaacccctggttgaggggctggggtatgaaacagaggtggtcggcaagcacggtatgtgggagatgaaagacgttcccgttgagcctttctcgacgcgtacccaggaaatcaatgccgctgccggtcccgatgcatcactgaaatctcgggatgtggccactctcgatacccgcaaagcgaaggaaactctcgacccggcacagaaggtgacggagtggctttccactctgaaagagaccgggtttaaccttaaggaatatcgtgaggctgccgatcagcgggcgaaaacacaacgggaagttccttctccggaagcgccagctggaccaaatgttgacgatatagttacgcaggctatttccgggttaagcgatcgtaaagttcagtttacctatacggagttgctggccagaacggtcagccagatggaggcccgcccgggtgtcatcgagacggcaagagccggtattgaagccgccattgggagggaacaacttatcccgcttgaccgggaaaaagggattttcacctccgggatacatgttctcgatgaattatccgtcagagccctgagccaggaagtattacgccagaaccacgtcagtatggtcccggaaaaggcaaccgcgcgtcagacgtcgttcagtgatgcggttaccgttctggctcaggatcgccctgcaatcgggattgtatcgggtcaaggtggggctgcagggcaacgcgaacgagtgactgaaatggccatgatggcacgtgagcagggacgggatgtccatatcatcgcggcagataaccgttccctggagtttctgctgaaagaagaaaaacttgcaggcgaaatcatcactggtaaaagcgctctgcaggacggtactgcctttgttccaggagggacgttgataatcgaccaggctgaaaaactcagcctgaaagaaaccatcaatctgctcgatggcgccatgcgtaataatgttcagatcctgatgtcagacagtggaaaacgaagcggtaccggcagcgcgctgaccgtcatgaaagagagtggtgtgacggcgtataaatggcagggtggaaagcagactacagcatcggttatcagcgagccggacaggaatcaacgctttaccagaatggccagtgactttgttgccagcgtccgggatggtcaggaaagcgtggttcagatacgcggtccccgggagcaggggatcctgacagggctaatccgtgaaaatctcagaaatgaaggcctgataggcagtcatgaggaaaccattacggcgctgacgccggtctggctggacagtaaaaaccggggtatccgcgataattatcgtgagggaatggtgatggagcgctgggatccggaaaaacgcatccatgaccggtttattatcgatcgcgtgaccgctgtcagtaataccctgaccctgaaagatgaaaagggagaatcactgaatctcaaagtctccgccgttgataatacctggacgctgtttcgtcctcagcagttgcctgtggcggaaggagaacggctggccattctggggaaaattccggaaacccggctgaaggggggcgatacggttcaggtgctgaaagcggagaatggtgtcctgaccgtacagcaccccggtcagaagaccacccagaagctggccgccggcaatacgccctttacagggatcaaggtcggtcacggctgggtggaaaacccgggcaggtcagtcagtgaaaccgcaacggtgttcgcctcattgtcacagcgtgaactggacaatgccaccctcaatgccctggcgcagagcggcagccaggttcgactgtactctgcgcagaatgagcaaaaaacggttgagaaactcgggcgccatacagcgttcagtgtggtaaccgaacagctgaaaacccgtgcgggcgagcaggatatcagcgcagcaattgctcaccagaaaagccagctgcatacaccggctgaacaggcaatccatctggcggttccgtcgctggaaagcgataagctcacgtttacccggcctcagttacttgtcgccgctcatgagttttctgacggtaccgttccgttctctgatatcgagaaaactataggagaacagattaaatcaggcgatctgctgcacgttcctgtcgctgccggtcatggcaacgatctgctgatttcccggcagacctgggatgcagagaaaagtttgctcacgatggtgcttgagggtaagaacgccgttacgccgttaatggcgaaagtaccaggttcgctgatggaagggctgacatcgggacaacgaaatgccacccgtatgatcctggaaacccgggacaggttcactctggttcagggttatgccggcgtgggtaaaaccacgcagttccgggcggtgatgtcggcggtgaatttgttgccggaagactcccgtccgaaggtaatcggcctcggaccaacacaccgtgcggtgggagaaatgcagagcgccggtgtggaggcacagaccacagcctctttcctgcatgatacacagcttctgatgcgaagcggccagactccggatttcagcaacacacttttcctggtggatgagagttcgatgctggggctatccgatacggcaaaggccatgagtctgatcgcggccggtggtggccgtgcggtttccagcggtgatactgatcagctgcagtctattgcccccggtcagcctttccggcttatgcagaagcgcagtgcggccgatgtggccatcatgcaggagatcgtgcgacaggtgcctgaactccgcccggcggtgtacagccttattgaccgggatatacacagtgcactttccaccattgaaagagtcgaacccgcccaggttccccgaaaggagaacgcatgggtacctgaaagctcagtcatggaattcacgccagaacaggagaaagcgattcagaaagccatcggtgaaggcgaagttcttcctgatatctcgcccgtcagtctctatgacgccatcgtaagggactataccggacgcacggaaagtgctcaggcacaaacgttgattattacccacctgaatgatgaccgccgggtgctgaaccgtatgatccatgatgaaaaaatgcggaacggtgagctcggggaagacagtgtcacgctgccagttctggtgaccagtaatatccgggatggcgaactacgtaaggtttcgacctgggaagcacataaaggtgccatcgcattagtggataaccagtatcaccagatagtgggcgtcagtaaagcagaccagctgattacgcttcgtagtgacgaaggtaccgaacgcctgatttcaccgcgagaggcttctgcagaaggtgtcacgttataccgccaggagagtattaccgtttcgcccggcgacagaatgcgcttcagtaaaagtgataccgaacgtggctacgtggcgaatagtgtgtggcgggtagaaagcatatctggtgacagtgtcacgctgaatgacggaaaaagtacccgaacggtaacgcccgctgcggataaagctgaagcgcatgttgatctggcttatgccatcaccacacacggtgcgcagggggcaagcgagcccttttcaattgaactggaaggtgtgactggcgccagggagcggatggtcagcttcgaatcagcgtatgtagcgctctcccgtatgaaacagcatacgcaggtatataccgatgaccggaaaggatggacggatgcggtaagccgttctcaggagaaagccagcgcgcatgatgttctggagcctcttaatgatcgcgctgttaaaagcgcagagcagctgtttggtcgcgccattcccctgacggagagtccggccggacgtgcagcactgcaacaatcaggtattgcccgcgggcagtccacagggaaatttatctccccggggaaaaagtatccgttaccgcatgtcgcgttacctgcatttgaccgtaatggaaaatccgccgggatatggctgagcccactgacggataaggatgggcgattgcaggctatcggtggggaagggcgggttatggggaatgaagaggcccgttttgtcgccctgcagggaagcaggaatggggaaagcctgctcgccgggaacatgggagagggcgtcagaattgcccgggataatccggacagtggcgtggtggttcgccttgccggcgacgaccgtccatggaaccctggcgccatcaccggcggcagggtctggggcgatatagacgccgtggttacgggggggagcggtgcaaatattccgctaccacctgacctgcttgctcaaaaaacggcagaagaactgcaacgcaagcagattgaaaagcaggcacaggaaacggctcgtgaactgaccggtgaaaagcgtaaacaggacgaagtgggtgagcagatcaaggacattatcacggatgtggttcgcggtctggaacgacagaaggggcagcatgaacgattccagcttccggatgaaccagaaggggtcggttccggctga

SEQ ID NO: 141115 - DNA, 297 bp, Enterobacter cloacae; identical to SEQ ID NO: 119001

SEQ ID NO: 141116 - DNA, 786 bp, Enterobacter cloacae
atggctggcaccgttagcgcaggaacaatcgtttacgaagtggatatggacaccgccgggatccttcagggacgccgggatattgatgccgcgttgaatgggcttaacggtagcatgggtcgtcttgaggcgggattaaaccgcactgagcgatccctgtcttcgattgaaggcactatgtccagcttaactggcgtcgcgaaagcgctcatagcagctctttctgtccagcaggttggcgcatatgcccaggcatggcaggacctgagtaataaactggcaaacgcagtcagggattccgtaccgccgtttgaaacactggctgatgtcacagagcgtgttttcgacatctcgcaaaagacccgctctggtcttgatgccaccgccacgctatatgcacgactggagcgctcaacgaggagctacggcgtaagtgtagaggacatcaccaggctgacaaccattattaaccaaggttttgtggtgtcaggggcaacagccgaggaggcgagcaacgcaatcattcagcttgctcaggggctggcgtccggcgctttaagaggtgatgaatttaactctgtgaacgagcagggtaaccggctcatgattgctcttgctgactctctgaatgtcagcattggtgctctcagaaacatggctgcagagggtaagttaaccactgatgtgatcgtgaatggattgctctcccagggcgataaaattggacaggagttcgctaaaactactgcaacgatcagccagtctgaatcgccacggataatctag

SEQ ID NO: 141117 - DNA, 327 bp, Enterobacter cloacae; identical to SEQ ID NO: 101462

SEQ ID NO: 141118 - DNA, 219 bp, Enterobacter cloacae; identical to SEQ ID NO: 101461

SEQ ID NO: 141119 - DNA, 246 bp, Enterobacter cloacae; identical to SEQ ID NO: 101460

SEQ ID NO: 141120 - DNA, 777 bp, Enterobacter cloacae; identical to SEQ ID NO: 99313

SEQ ID NO: 141121 - DNA, 249 bp, Enterobacter cloacae; identical to SEQ ID NO: 99314

SEQ ID NO: 141122 - DNA, 987 bp, Enterobacter cloacae; identical to SEQ ID NO: 99315

SEQ ID NO: 141123 - DNA, 219 bp, Enterobacter cloacae
atgaagcagcgcatcactgtcaccatagacagcgacagttatcagttactgaaatccgcagacgtcaatatctccgccctggtgaacagggccatgcagaatgaggcccgtcgtctgcgttccgaacgctggcaggctgaaaatcaggaagggatggccgaggttgcccgatttattgagatgaacggttcattcgccgacgaaaacagggactggtga

SEQ ID NO: 141124 - DNA, 306 bp, Enterobacter cloacae
atgcagtttaaggtttatgcctataaaagagagagccgctatcgtctgttcgtggatgtgcagagtgacatcatcgatacccccgggcgacggatggtgatcccgctggccagcgcccggctgctgtcggataaggtttcccgtgaactctatccggtggtgcacatcggggacgaaagctaccgcctgatgaccacggacatggccagcgtcacttcctccgtcaccggggaggaagtggccgatctcagccaccgggaaaatgacatcaaaaatgcgataaacctgatgttctggggaatttga

SEQ ID NO: 141125 - DNA, 435 bp, Enterobacter cloacae; identical to SEQ ID NO: 99317

SEQ ID NO: 141126 - DNA, 837 bp, Enterobacter cloacae
atggaaacaaaatttctttctgatggccgtaaggtcgttgtcgttggtgcgctgaataatcaggaaacgatcgtccaggaagtttttgtcacgcagcagggtgatgaaatccctggtggcgagcgttttgtggtgaagagcctacatgaccagccagttgaaacatggtcgtctcgtgaaaaagcaaaacaagaaaaagcccttgctgatgcgaagttgaaaattgagaagatcaactcggaaattagcaacctacagaacacattaagcttctggagagaaatggttaagcaggtcaaagcgttctcagatcatatcaatgatgctgaccttgaccatttcgcagatgtaatgaccgggcaggttaaatttgccattcgacgtgattacggtgttccgtccattgaaagatttgaagattttatgtcttcaattgataactactatggacgtaaaaactttgaaggtatcaagtgcttatctcttttaggtagcactaatggagatatcgcattacgagtaaatcgctattcagatggcagtggtggaagcgatacagttgagttctacaagaccattgaagaagccaggcagtgtgttaagcgaattgccatggaaaaactcaatggtaacggcctgagcattgatgatgtcaaaaagtgccgcaagatgggtattgttttcagcatggatgagttacaaaaaatcaaagaacgcctcttctctgcatcggaaaagaatctcgcccactaccaagagaacttcgataagcaagttgctcagataaatgatggcaagctggctatagaaaaaatgcttaacgaagcaatcaactag

SEQ ID NO: 141127 - DNA, 192 bp, Enterobacter cloacae
atgatgagtgggcgaaagcctggaaacccgcagcaaaatcgcttcgagaagattatgcaaagcttcatcctgctccctcttcggatatcagccaggaataatcggtttaaggttgagatgtatattaagttattttgcagcagcctgttttataactataaaaatctgcccctgcaaaatatggtaaaataa

SEQ ID NO: 141128 - DNA, 1014 bp, Enterobacter cloacae
gtgaatgacaatcagatttctgttcactggtcagatctaccgaaagatgagctaacccgtttctgccaggatgtcgatgccggcactcagggtaatttcctcattgcaccggtcaaaaaattgacccgccgcaaacgcggtgagcattccacaaaagccaaatgtgagaacccggcctggtatcgcccggagcattataaaaagctctccggacagctcggtcatgcctacaatcgcctggtgaaaaaagacaaagaaaccgggcaggtcagcctgcgcatgcatgtttctcgtcaccctctctatgtcgccagccgccgtaaggcgggacgtaaatatggcttccgtccggaacgtcagcgcctgctcgatgcgctctggccagtgctcatcagcttctgtgatgccggcaagcataccgtcggcatgtgtatctcccgtcttgcaaaagaactcagtgcaaaggacgcaaaaggcaatgtcattcctgaaacggaggtgacggtgtcacgcctttcacggcttattgaggaacaggtacggtttggcgttctgggcctcgcagaagaacgcgcctgggatcgtgaatcccgcacctggttgccaacgtatgtctatataacccccgtgggattccagatgctgggcgtcgatatggacaagctgtttaaagagcaggagaagaagctccgtcagagcgccgagcgtgagcagctgatccgggaaggggtgatgagcgaacatgatgatgttcaggcccactctgcgcggaaatgctggtctggccgtaagcgtcaggaggcactcgtttaccgccgcaaaaaaggcgcggagcgtaaacgtgccaacaatctgattaagctgccggcagatgaacgactccatgcaatgtctgaatggatttatcgcaccctgccgcctgatgaagcgtactggtgcacatctgagcgcctgaaggcgctggccatccagcatctttaccagctggatctggcgctttctccaccggactag

SEQ ID NO: 141129 - DNA, 1656 bp, Enterobacter cloacae
atgaatattatgaactataggctgggaacccgcatgggggcagggtttgccctgttactgctgctgctcgtacttgtcagcattattgcggtcgcagcgctttctgatttgcgtaaaagatcaaatctcatcgtcgaaaaatattatccgacaacggtgctggccaatgacctcatcgatggagccaataaggattaccttttgtctttccgtgccgttgctgcacatcacgagagcgatcgcaaaaaatatatcgaagctctcagtacccagacagcggtgaatgcctcataccttgaggaactaaaaaaacgtgttgcgggtgatgtgcaagccgagaaaatggttgatgatatgtctgatgctgccaggttagtaacggcatcaaggcaacatgtattttccattcagacatcagagggagatgatgcagcagaaaatatgctgaatacggaaactatcccggcgacagaagtctttattaacgagattaccgatatcatcgattacgccaatgatctgatgaagaatggagagaacgaagcagaaagcacgtaccgttcatccctctggatgactggtatcatccttgtcgtaagcatactgttggggggaataactgccagaattctgacccgcagtgtcgtcaggccagtgcaggaagccctgactggtattgaagcttcaggccgcggagacatgaccacattattcagggataattatcataccgatgagaccggcaggcttctgactggcctgaaaattactatcatcagcatcagtcgtatgctgagtcaggtacgggacagtgccatgtcggtttccaccgcctcttcacagattgcagcaggtaatcaggacttgtcttcccgtacagaagaacaggccagcgctctggctgaaacggcctcagccctggagcaactgactgccacagtagcgaacactgccgaaaacgctcaacacgtgcagcaactggttactgaaggtggtgacatcatgaagcgcaataacgaagtgatggacgctaccacccgtcagatggacggtatctacaaagcatcacagaagatgtcagagattatcacggtcattgagtccattgccttccagactaatatcctggcattgaacgctgccgttgaagctgcacgtgccggtgaatcaggtcgtggatttgctgttgttgctggcgaggtgcgcggtctggcgcagaagagtgccacagcggcaaaagatatcaagtcactgatcgaagagtcggtttcacagacggaagcaggtcgtgaactcatctccactgccagcaccgtgattcaggaaatgacaaagaacgcacaaaatgtggatatgctcatcaacgaaatcacccgggcgacaacggaacaacgcgacggcattcgtcagattaacgtagccgtcacacaactggatacaaccacacaacaaaatgcggccctggtggaagaatctgcaagtgcagcgcagtccatggctgaacaggcatccatgctgacagagctggtcaatactttccgtttgcgtgaagagcagccgccaacagctgttccagtccccgcataccgggcatcagtcacgccagacagtacagtctctgatggcaaatcagccgataactgggaaacgttctaa

SEQ ID NO: 141130 - DNA, 1209 bp, Enterobacter cloacae; identical to SEQ ID NO: 99306

SEQ ID NO: 141131 - DNA, 615 bp, Enterobacter cloacae; identical to SEQ ID NO: 134513

SEQ ID NO: 141132 - DNA, 258 bp, Enterobacter cloacae
atgcggatgggaaatgtcccgctggtgccttattaccgaccgggcgataaacgcatcgcacaggatctggcggaactggcagcagacaatcaggcttttttactggcaaatcatggcccagtggtttgcggtgaaagcctgcaagaagccgccaacaatatggaagagctggaggaaacggcaaagctgatttttattctcggtgaccgcccgatccgttatctgaccgcaggtgaaattgcggaattaaggagttaa

SEQ ID NO: 141133 - DNA, 375 bp, Enterobacter cloacae
gtgtcacaggtcacccgcgcagctgcaggcgcgctgcgggctgcagacagcgaaaccagcgcgcttattgctgacacggtcatccgcaaccgcaatgatcgtcagtatctgcagcgtgtgatcaacgatgccggtaaaatcgacgaggttcggaacaaaataacagaggcgatcacttccctgggggcgcgtgtcaccagtgagctgacggtcttcaggagcgttaaccgggtattcctggtcgggggaggggcatccctcattgaagaggctatccgtcaggcctggcctctggctcctgaccgtatcgaggttataggcgatccgcagatggcgctggccagggagattgccctttacaataaagaggactaa

SEQ ID NO: 141134 - DNA, 246 bp, Enterobacter cloacae
atgaccgcggaatccgcgaagaaaatgaacgaattaaaaagactgtttgatattgccccagagaatattcacagcatggttcgttttggcaacgttcgcgatgaaattatcaagctgagcaaggaggggaaatacgatgcgattgtcatcgggtcgaaaaacccgagcatcaccacccatctgctgggatcgaatgcggaatccattctgcgctacgccacgattccggtgttagtcgttcgctaa

SEQ ID NO: 141135 - DNA, 705 bp, Enterobacter cloacae
atgtcgcttacagaagaatttattcattaccacgccgagggaaagatctttacgggcgtactggttcgtgattcccggaacgcacctcttcccggcgttcttctcgcccctaatatgatgggtgtcgcatcgtcgagtattgaacacgcgcgtaccattgcaaaaaaaggctacgttgtactcgttgccgatctttatggatgcctgcctgactcggcagaggattcagctaaccgtatgaactcattaaaggactcgccagccgaacgcctgattcttaacgcagcgctggcacgactggcgcagctccagtgcgtgaatgaggataagcttgctgctgtaggattctgttatggtggacattgcgtactcgaactggcacgcagcggtgcgcctctggccgtcacggcatgctttcacgggacgcttgatacccgcacccctgctgagaaaggggatatcaggggcaaggtcgctgtgttaaatggggccgatgatccgtttgtttccgcagagcagataaaagcttttgccggtgaaatggcgtcctgcggatgtgactttcagctgacgaactatgccggtgcggttcactcatttacctatcctaaggccgatgttccgggcaaaacgcattacaatgcggctgtcagcaatcatgctttcagtgttgtatttacgctgttgaaagaggcgctgggctga

SEQ ID NO: 141136 - DNA, 1338 bp, Enterobacter cloacae
atgacgatattgcgaaagcctatgttacgccgatttacaacagcactggcattaatttcattcgccataaatacggcttatgccaatagtcaccaggcagggattgccgcagtggcaaagacgaccttaaaagaaagtattctttttgctatcgatcgcgatccctcaattagtcagcaggccgcgcaattaggtattggtcaggcgcaaatagatgaagcgcgtagcggctggatgccacaaatcgcgttgaacgggagcacgggtcatagccagaccaccgattccagcggatcgctgaagaattctgcggcctgggggattagcctgacccagctgctgtacgatttcgggaaaaccaataacagcatcagccagtcttccgcccagcgcgatagttaccgctaccagctgatgagtacgctctctgatgtggcggagaaaacggcactcagctacgtggaagttaaacgctattccgatctgctccaggcggcaaaggacaacgttcaggcgcttaaaaatgttgagcaactggcaaaactgcgtgcggatgcaggggtgagctccacttccgatgaactgcagacccgcacgcgtattgctggcatgcaggcaacggtcgcgcagtataacgccgccttaaacagcgcccgcgcaaggcttgcggtcttaaccgggatgcaggctgatgcttattcgcccgtgcctgcgaacctcgccgttgagcctgattcgcttaaccgcattgattattccttgatacccacggtgttagcggcgcagaaccgggagcgttcggcccagtacggcgtggaaacggcgaagtcccagcactggccgaccttaagcctgaagggggggcgtacccgttatgagtcggacaaccgttcttactgggacgaccagatccagctcaatattgatgcaccgctatatcagggcggcgcggtctccgcacgtgtgcgtcaggcagaaggcgcacgggctatggcctcttctatggttgatcaggcgcgcttcgatgttctgcaaaaagcctccgttgcgcaggctgactggaccggtgcacggggaagaatggaagccggtaagctgcagctggaaaatgcactgcgtgcccgtgatgtttataaaaatgaatacaccctgagcaagcggagcattaatgatttgcttagcgttgagcaggatgtctggcaggccacgtcggcaaaaataatcgctgagtatgatgggtggagttcggcaattaattatgcttccgcggttgataatttaatgtcgcttattggaatagagaaaaacgctgccgcaaaattacccgatttgagttaa

SEQ ID NO: 141137 - DNA, 2040 bp, Enterobacter cloacae
atgtcctcaaatacaattaacacctttaccgagaaagttataaaaaataaaattaaagccccaactcgagctgatttctctttagataaatgggaaaaagaatgggagaaaattgcgtccacagcctcagaaagagacaagacagtctataccacaggcattataattaatagtctccttaatgaggttagagaaaagctggccgcaaattaccagcgcgctcctaaaacttcatatgaaaaactattactttcttatgtagccatttctaacaggactacatctgttgcattaaagttagctatgaactcgcaagtttcaaatgcacaatcaattttactaaagtcgagcatcgcaggaaatgagctaggtctgggtgaaatttttcatggagcagtggatggagtccaattagcaataagagaatgcataagcaacatggagaagggaaataaaatcacaacgtctattcaaccaattgaagaaatgtcattcattcaacaagaacacatgctatcccaactttattggacatacacacatttttggcagtgcataatctggtcaaactatgagttgattgaggttgatcgtgatgcgaagcatttcataattaaacaaccaaacaataaatatgaaactgcatttcttacaagtgcaaatcgaaaagaaagaatcgcgggtcaaagcgtcataacagctcgagaaaaacgcgtacaagccttgttcaaaaacgataactacatagttataagaaaagaaaataaaaaacgcactgcggtaactttaccgatcctcaatgcagacgagggattattgatttcgaatacgctttggagactccgggaaaatgaacttaaatcttatcttcctgaaccatggttaaatgacaattttggacaagatttttgcttaactgaagcattagaagttatgaggtgtttaatgttgatggcttacgatacgagtcacaagtacccagacgacgacagcgcccagaacgtcaacaaattaagagagttttgcccaactgtacaagcaacttcattagaacgtgctttatgtgatgcaacaggaattgaagcacacaaaatatcaaaaattacagaatttcttacatctaaaccatcacccaccaatgatttatggtgccaacccttaatcaaagttagtaataataaatttgcaataattgtgagtgcattaacctctcctgtactacttagaatagtcgaacactgggttgatactttcaaaatagatctaggggaaaaaggatacatttatgaaaaaaaaatcatagagaaatttaacaactctctcaaaggcaatcaacttattctcgactacaacgatgccatatcaaaaagaatgaaaataaatggtagtgaggaagaaattgatttattagcaagaattgatgacatgattattattggcgaagctaagtcaatagtaactacagactctgcaatctcaaaatatcgaacatccgaagttctccagcacgcaggagagcaaattgtcagaaaaacaaaattccttgaagaaaacctcaaggctatatttgaaagactaaactggcagtatgatactaacaaaaaatacaatattgttcaatgtatattgaacagcagtagcatttttgttggccatgaatttgagggaatacctgtaattgacgaaaaaatactttgttcttacttcacctctaacaaaatgaggttaatgactgtcgcctcacaaaacgaattaaaaacgatagcttggtataagctatatgataatattgatgagttaaaatccaattttaaaaaatacatcttcacaccacctcaactcaatgaaaacattgactcttatgaatataatcaaataaaaatcccaatcatcactaacgattctttcaaaatagagaagtcttaccttgtacttaagcaaacaggtccattatctgtaatggacagaaatcatctattcccagtcataaaatctgacgactatgaaacccaagcaaagctagttcaccatactttttag

SEQ ID NO: 141138 - DNA, 405 bp, Enterobacter cloacae
atgaattattatttttcgaaaacaacgctgggtttttattgcgacgaggtgaataaatccactcctgctgatgccgtggaaatcagtgaagaatcatacttttcgctgcgtgaggggcagtccacgggcaaagtgattgctgctgacgaggccggaaaccccattttagtcgacccgccggagcccacgcccgatgcgctcattgcactggctgaagaaacccggactgcactgatggctgaggctaacgccagaatcacgccgctgcaggatgcatacgagctcgggattgacaccggggaagaggctgaattgctcacccgctggaagcgttaccgcgtgatgttaaaccgactcgatatcagcgcggcgccatcaatagaatggcctgaaaaaccagtctga

SEQ ID NO: 141139 - DNA, 531 bp, Enterobacter cloacae
atgaatgatacccgcctgctgccggtgggctcatcaccgcttgaggtggcggcggctcgcgcctgcgctgagattgaaaatacccccgttccgctgcgtcgcctctggagtcctgacgactgcccggcaaatctgctgccgtggctggcgtgggcgttttccgttgaccgctgggatgagaactggccggaggccacaaagcgggatgtgatccgcgcggcgtggtttatccatgcgcacaaaggaacgattggggctgtgcgtcgcgtggtggagccgctcggctacctgattaacgtgtccgagtggtgggaaactaacgacccgcccggcacgtttcgcctcgatatcggtgtgttagagaccggcatcaccgaggaaatgtattacgaaatggaacggctcatcgcggatgccaaaccagccagccgccaccttatcggcctgaccattattcaggacattcccggctatctctacaccggagccctgacctatgacggcgatatcatcacgatttatcccggataa

SEQ ID NO: 141140 - DNA, 1107 bp, Enterobacter cloacae
gtgaacatagacataaactctattatgaatgatgcagtaaaggacatgcctatagctaacattatagtaataggtaaaacgggcgttggaaaaagttctcttataaatagcgtgttcagaggtgagtttgcaaagacaggtgtagggaaacctgtgacagaaaatatcaaagtaatcaaaaaggctggtgtccctctgcagatcattgatactcaagggcttgaggttgcagattatgaaaaaacaaaattgagtattgaatcatatattaatgagcataataatagtgagcagtcagaaaattatgttcatctcgcatggttgtgtataaatgatacaggaaagcggtatgaaaatgctgagttggatatagcgaaatatcttatcagtaagggcgtgccaatcattgttgttctaactaaaactaattctttcaaaaataatgaatttgctgatgaggtgaagaaggcatttaagagttatagccatgcagtttgtttgactcgagctgtgccagaggttatttatgatgaagatgaaacggatgaggtgttaggtacgagaaaggttagaggtattgatgaattaattcaggtatcctatgaggtgattcctgaagcgcaaaaaaaggctttttccaatgccttgtctgtaaaaaataaaaaagcattggaaataaaaaaagaacaagctagcaaggaagtgctcgcagccacggctttagctgcaactgctgccgctacaccagtacccttctcagatgcttttacattagttcctattcaagttgcgatgattgctaaaattagttatacgtttggaatggacgtatctaaaacagccctaacaacaatggttacttcattaattggtgctggaggtgctgtatttgttggtcgaacaattgtaacagggttgcttaagatgattcctggtgtaggaagtgtagttggaggggctatttcagctacaacagcaggagcaataaccaaagttcttggggatgcatatgttttagttctttataatcttgcgactgaatctaaaactggtgagattgattttgaattggcggcaaaaattctgaagtctaaagtatcattttaa

SEQ ID NO: 141141 - DNA, 501 bp, Enterobacter cloacae
atgagtgaatttaagccctttgacgaccggctcaatggtctgattgctgccctgtcaccggcagcgcgccggaagctggccggggagattgcaaaggagctgcgcaagtcgcaacagcaacgcatcaagctgcagaaagccccagacggctcgccgtatcaggcgcgaaagcgtcagcctctcagggctaagaccgggcgcattaaacgggcgatgtttcaaaaactgcgcactagccggtacatgaaagccagcggccgtgaaaacagtgcagtggttgaattcactggcaaagttcagcgcattgcacggattcaccagtatggcctaaaagaccggcctaacccgcacagtcaggatgtgcaatattcggaacgtcaactacttggtttgtgtaatgaagataaccatcttgtggaaaagctcatccttaggagcttgagttcacttcgaggtgctatttacaatggagcagataaaaaaagggtaggtaagtggtga

SEQ ID NO: 141142 - DNA, 924 bp, Enterobacter cloacae
atgagaatttaccttgatcacaatatactagatgctctcagcaagaatcgtatgacattgcaggttccaagcgatacggtttgggtttattcgaatgaaaacttcaatgaaatcaagcgctcgaaaaacatgcgattcttagatgttttggcaaatcttaaggcaagaatgttagagctcgaatttgataagcattttatgcttaccgagagagcattcctttatgaatttcgtgatcctcatgagctttacagtcaatggcttgaacataccaatgaagtacccattgacgatgttgtccagttacaaatgcagttcttagctcgattagcgggggctaataatcacgatgaaatgctattgcatcctgtgagattaagggaatttcttcattctctgttatcaccacttgacctaatatcgagtgatgtcgaagctcgtatagagcaagtggttaaagatattgagatagtcaccacagggcaattgcttgaaatacagaatttagagcactcacgaaccagcattggtattggtagggggagggttggcaacctatcagttgatgataatcctttaaagttaatatggggggttatgcgaaataaatatcccggaatgacaattgaacagttttatggctttgaacctgttgataaacaaggctatgaaaaatggcctcgatatttaggggttgtagggtgtcataccgtacttaatttcttaggatttcatcctgataagggtcttaacagtattaataaaataccggggatattgagcgatgccaatcatacggcaatggctacctattgcgatgcagttatgagtcaagatcaacgattttgtgcaaaagctcgagctatttatcagtatttagagctcgatatagcagtcattgaggcagtaccgaatgttaattga

SEQ ID NO: 141143 - DNA, 1413 bp, Enterobacter cloacae
atgacaaataccgagtttacgcaactttctgccacgccgtgtgagctcgtcccgctgaatgcctcaccgtttgacacgctctggatcgatcgtcctgccgcaccggcggggcagatccgtgaaatgccgtttgcggtaagcggtgaaagcagcgaagacaaacgtcagcgcgttgccgctgtgctggccgcgaacaatgctgattatctggcggttacgctgccggataacattgcctggctgctcaacgtacgcgggtcagatatccccaccagcccggtaccgctctcttttgccctgttgcgtcgcgacggtcacgtggagtggtttgttaacgacactaagctcagcgccctgcccaaagccgtgcgtaacacgctcgctactgcgccacaggacgcctttatcgaacgctgccgagaaattgcggaaggtaaacgggtgatggtcgatgccgattccgcaccggtagccctgcgcttcgccattgaaccacagggggagatcgtctggcagaccgatccgatcaccctgctgaaagccaccaaaaacccggtcgagctggcagggtatcgtgaatgtcatcaccaggacggcgccgcgtgggtcaacttcctggcctggctgagccgtgaagtgccgcgacgtgaagcggctggaaatccgttaaccgagctcgaagtacaggcgcaacagctcgcgttccgtaaacagcagcccggctttatcgagcagagctttgcgaccatttccgcctcttcgagcaacgcggcgatgtgccactatcactccagcgaggccagcaacaaacccatcggccacgatcatttttacctgaatgattctggtggtcagtacactaacggcaccactgacgccacgcgcacgcttgcctggggtcatgttcccccgcagcagcgtatgcattataccgccgtactgagaggcttcctgtcgctgataaccctgcagttcccatccggcacacacgggcatcagctggacgctttcgcgcgacgtccgctgtgggaaatgggactggattacgatcacggcacgggacatggcgtggggcatcagcttcttatccatgaaaacccacaccgcatcgccaaaaaggttaacccctggccactggtggcgggcaatatcatgaccattgaaccggggtattatctgggcggcagccacggtatccgcattgaaaaccaggtggaaattgttgaaagccgcccggggttctgcacgttttcttcgctaacgctgatcccgattgatttaagccaggtggaattgcagctgttgaccgggcaggaaaagcagtggctggatgaatatcaggcgctgtcaccgctggtgaatagtgaagcgcgtccgtggctggttgaggcgacggcgccgattagcatgtaa

SEQ ID NO: 141144 - DNA, 198 bp, Enterobacter cloacae
atgtctgccatggatttatccaaaatgggcactgccagagtggctctgaataccagtgattgtgatcatatagttataagaagtggcctgtcagcgaagttgagtgggccttttataaatacgtggcaacagagcttaatcaggcagtggttgcaactcctaagctcttgtctgctgatgcagccttacgccaattaa

SEQ ID NO: 141145 - DNA, 522 bp, Enterobacter cloacae
atgcgaaacgggatccgttttatcaccgtagcgctctttgcgctttgcacacaggctcaggcggaaaccgcgttgggcgaaattaacattcagctctacggcaatatcgtcgattttacctgcgtggccgaggggaacgacagtgacaaaaccgtgacgctgggcacctggcccacgaagcagctcagcactaccgggagccgcacgcagcccatgccttttacgctgaaactgaccggctgtccgccaggggccgcgtccattacgttttccggtaaagctgacgggagcaacagcgggttgctggcactgaacgacgccagcacggcaagccgcgtcgccgtcgagatcagggatgcggataaatcgcgtctggatctccagcaggccagccagccggtcacggtcgatgcgcaggggaatgcgacactgtcattttatgccaattatattgctactgccgataaccctcagcccggaaaggctgatgctgatgcgaccttcatgattaattataattag

SEQ ID NO: 141146 - DNA, 375 bp, Enterobacter cloacae
gtgaataccaacggcaccttgaaagcgggtaaaacactctctgccctgccaaaagggtacaaaggcaccagttttgctgccgggctggcgttaagcgccgacggtaaacagctgtatgtggctaaccgtttgcataacagcatcgggcactttaccgtaacagcagaaggcacgctgaggcatcaggatgacgtgtggacgcgtggcgactacccgcgcaccctgacgctcgataaacaaggacgctggctgtacgttatgaaccagcgcagcgataacattacccgttttcgcgtggcgcaggatgggaagttgagcttcgagccagactatacgccggtcggcagcccatcccagatggtcatttcaccctaa

SEQ ID NO: 141147 - DNA, 1950 bp, Enterobacter cloacae
atgtctcagcgttataacctctatcgtcgaaccagcggcatttatgttgtccgcattagcgttccccaacgttttcgtcgatacgcaggacagtgtgagattcacacttcaacaggcactcatgatcttcatgaagcaaagcagaagtccgcgctcctgttggcggtctggtatcaggccttacaagagtatgaacaattggattaccgatctttaaatgactctgccccgctgcttgccggagagggcatgatctcgcttgctaactttgctcagtcaatcgagttgcctgtatcgcagttgattcaggcggtgataaatcgcaatttgccagtgttctggttagcgacggggcaggctggcttttatgtggatgattttgacgcagtagaaagggaaccaggagcaaaacgagagctacaacctggtgagaaaaatgatccacccaaagaggtcattattctcaatagtgcgtttgagctgggtatcgagagtttcgtaaatggttatctccgccctttcaatccacagcatactttagattgcctattaaacgctggtgtgtcagaacaagaagctgcatttcgaacgagtggtgataatcagcgtggagggtggtttttcgatgtccccggcgtcgatataactgctgatagcctgttgattagcaaagttcatgcagaaagcctccggcttacttggttagctaagaccactccaccagcggtaagcgttcatcataccgtgcctcttactgctcctgttatcgctaacgaatatgttcaccgtaaattttacaagaataatttatcgtggttatgttctgaatatgtgaagcatcggcggaaaggcaaagtatcagagtcggcaatcaccgatattcgtaactactttgcctttatgattgaagcgatgggtgacattcagttggaaatctttgatcgtgatttccttcgggcttatgagagcaagttgcgcacaatcccggcaaatcgaaatttagtgaaaactaaatatggggtaaagacgctggatgagttaatcgctaaggcggctgaatatggcgataagttgatgacagaggagtctgtcaggaagtatatcaacggcctttatggtgcaatgaagtgggccgttgatgatggtaagttgctgaaatcgccatgcgaaaatttttttccgtctgatgataaagacaagcgagatcaagatcatacggacgtgtttgaaccacatgaaattcaaatgattttttcgctaccgtggtttgtggctggaactgttgaacgcaatgcgcaagggcgattccatcaatattgcccgtttaactattgggcacctttgctgggcttgatgacgggcgcgcgggttaatgaaatctctcagttactgctgggtgatattctggcagaaggcggtgtttattacttgaatcttgaaaacgatagtgaaagtggaaagaaacttaaaaacgccaatgctcgtcgcaagattccgctccattccaagctgattagtctcggttttatcgactacgtgaatgccttaaaagatgccgggtatgtccgtttgtttcctgagcttaagccacataaaacaaaaggttatggtaggccggtttctgcatggttcaatgaatcgctgcttgcagggcgattgaaattagagagaaacagaagcaaatccttccattctttccgccactcagtttcgaccttactcaaggagaagggcgttagctcggaattacgtgcgcagctacttgggcatgtgcgcggcgaaacggaaacagaggtgcgatatagcaaagacctcaaaccgattcatatgattgaagtcgtggagaaaattgatttttcgttgcctgaaatcgcgaaattcaatattcctgacgggttggatgctgtaagagatgcgcttcggagaaaaagaggcaaacaagcagactaa

SEQ ID NO: 141148 - DNA, 333 bp, Enterobacter cloacae
ttgagaaccgtcgaaatactgcaatacaccttacacaaaggcaccggcaccgcttttcatgccatcatgcaggaaatcagtgttcccctacaccgacaccacgagatcgatgttgtttcgtttggtaactcgctgcatgacccggactgctactacctgattcgcgcctttgacagtgctgaaagtatgagtgcggttctcgatgctttttacgcaagcgcagactggcgcaacggccctcgcgaagacatcattggcagcatagaaaccagcattaaaacagtgatgatcctgccatcggaaagcgtggaagggctgcgggtgcaatcgtag

SEQ ID NO: 141149 - DNA, 135 bp, Enterobacter cloacae
atgaagctactactaatcagactgttatccgtaagcagaagcctcgatatgccgttcaaacgcgcggtaagactctctggcgagtttttttatcaggatggcatatttcacggtaaaaaagccgtggtgttatag

SEQ ID NO: 141150 - DNA, 927 bp, Enterobacter cloacae
atgaataacaatcaacaaacagcggattcggccttgaagcaattcagggctaccgccgtcatcgactggctcgacgttgagatacacaccgaatgcccaacacagcaccaacacatccgcagagcgttgagagagataacgaacgttaatcgctggtgggttgaggcactcgacaagcagcccggtgatgttactgacacattccgaattcgctttcatgacgagctggcgaacaattatcagctgctccgcgctgcgctccatgcgttagccagacggttcacgtttgcagccgaaccgactattgccgggatagagatcagttgtgacttctggcacaaacaacagtcagttgaagcaacacgcgccctcacatatcggatgcaaacaagcctgttcgctccgagcaccaatcatcgccaatacaacggcaacaagagcagtaaccaatttcttgataagcccggcaatcgtataaacccggcgtataacctgcggattggcaacgaagatgacgccatttcatggcagtgctatcacaaacgcaccgacaagaagcagccgctgccgcttcgtcagcaatgtgctcgtatagaggtgacattgcagggtgacgcgctacagcaacacggcttcggtcttctctatgggctgcaacacttcccgtttgaaacactcgccagtcttttcacgttccgccgtccgatagctgcggcacagttggcaaaaggggatctgttccgactcatttcaatcaactggatacgctcatacagggatgcaactacagaacgcggcattcactcgttcagcgctgtaggacaacgcgacaagaaaggcagaaagcggacagagagtagtcacctgacagcagacaaagaactgagtaaccgggttagagcagcgttgcggaacctacgcccatga

SEQ ID NO: 141151 - DNA, 483 bp, Enterobacter cloacae
gtgaactctgaaccaaaaattagaacagccaagttaattgaagaaaatcgcacctcgttaaagcttgatgaaagcacttgggccgcaattgacatgctggctgagaaacgaggcactgattggaaaggctgggcaaagatggtgcttaaagcaaatcctgactcaccaaataaggctgctttgctccgagccgcgttagtaaaagaattaatgaccgagcagattcttaccctcgcggaagctgggccagttgaagccaatatcaatcatgaaattatcggaaatggctattggcggttaaatgacgagcaactacagagcgagctagacggcgcaaccatcgtcacacgtgataactcatttgcggcgtttaccttactgactggttacagagacaaaagctacggcgaatcaccattcgtgatcattcagaacgagttacgcggtcagctacacctcatgatcgctccagacgttgattaa

SEQ ID NO: 141152 - DNA, 1707 bp, Enterobacter cloacae
atggatacatttttcccttttaatacctcgccaaaatataaaatagaaagcaataaagaattagctgcactattgggtattactacagctaagttaacttattacgcctattatttaagtgatgatgataagtatcattcattcaaaattcgcaagcgaattaatggggaaagattaattgaagctccaaatagagggcttaaagatatccaaaaaacaatttctcattttctggagagaaactatacacctcgttcttgtgtatttgcgtatgttaaacaaagaggtattgttgaacatgcctcaattcacgttgggcaacgatggctattacgcttggatttaaaggacttcttccattcaataagttcggctcgcgtttcaggagtgttaaggcgcgctccattttgctttgctaaatccccggcaaatactgtagcacgtctttgcacaaaggatgggcgcttaccacaaggctcgccagctagtccagtgattagtaacatcctttgcaagggattagattataaacttaagcaactagcttcttctaacaagtgttactacactcgatatgctgatgatatatttatctctaataatggaagcgtattcccttcggcgatagcaataagaggcgacgatggtaatgtagagcttagtgaagcaataaaaaacattattataaattctggttttgaagtgaatgctggtaaaacgactcttcgtaaaaaatccgagaggcaacttgttaccggggttgtagttaacaaaaaaaccaatataccaaaggagtatataaagtctatccgtgcaggactttatgcatggcaaaagtttggcttggacgttgctgaagaatattggaagaaagaaatagaaaaatctaataaatttgatggtcaaccgccacaaatgagattggtcatacgcggtaaaataatccatgttggtcatgtaaaaggatataccgatgcaacctttctaacacttgttaaaagattacaatcacttgatagcgaatttaaaattgatgagaagaaatttcggcgagagataaccgacgaaattcatatttataccgaaggtgtgacggatacaaaacatttccaagctgcgctgaatgcatttcaaaagcatggtgaattccttgagttgaaaataatattcaaaaactcaagcagacctggaagcgcaagtctgaaaacactgtgtgaaaacctgcgagaaacatcacaaaaacatctaactttatgcatctttgatagagatgaaaaaaatatagtaaatgagatgagtggttctccgggtaattacagagatcacggtaataacgtatttagtctaattatccctattcctgaatttagaaagggaaatgactcaatatgtattgagcatctgtatcaagactcgctactttttacttgtgatagcgagggaagacgtttatattttaaagatgagttcgacaaccttaattgtcacaaaactgatcctaatctcttctgccggattagcaagagttctcttgtgtatgacgataatgtcattaatctttcagagaagaaaaatgtagcattgcctaaaaacaaatttgctgattatgtttgcagcggtcaacaaccatttaataatgtcgattatggcggttttcatgaagttttcaaacaaatacttgaaatagcctctacgtataataagtag

SEQ ID NO: 141153 - DNA, 498 bp, Enterobacter cloacae
atgacgggatcatactttttattaccgatggcaacgggggccgtgcttggttgggtcagttacagtgtagtcgctcacgttatatcgaaacggcaaattaacacgctacgtgctatatcatggggcgttcttgcaactctcacaatgatgcttggcgtaagcgctttttccgctataggagcggaacaaacggtaactgagcaaaacgtccaatgttcaaataacagcccggaatgttatgcgaaagcgcactataaccccgtaagaaagtgcaagcaggtaattgatgaaaaggcagaatttcgccatatatggctagataacacatctcaacagatttttgaaaaatatctttggcacgaccagaccaaacgaacgattcaaatcttcggtcaacaggctaaagcgataaacaatttaggtatattaacgccactacaatacttttgtattttcaacgctaacaccggagaaattatcgctgcgacatttgagtga

SEQ ID NO: 141154 - DNA, 480 bp, Enterobacter cloacae
ttgcacattcagggcatgaaaaaatctttaagaatcctgtttggacaacgagtaaaagagttgcgtatcgctaccggaatgagccaggaagcgtttgctgatctatgcggatttgcgagaagctatctgagtagaattgaacgtggtggctctaatgcgtctcttgatgcgattgaggtgctggctaacgccttgagcgtcgagccgtgggagttgttatcgtcagactcatccaaagataacgatccggatattctggttccgtatgcggccgatggctcgtgctttcatcccggattggcgagcacccgcgatggttcgtttagcgtaggtgataaagccgctcagaagcgttttggctcgttttccgaagcacttgagtatttacgtagcatggaggcggcaaagtggcgtaggcccaatgctagtggcaattggggtattgtgacagcggtgcgttgggacaagctgagaaagtaa

SEQ ID NO: 141155 - DNA, 2268 bp, Enterobacter cloacae
atgattaaaggaattttgaatatcagtgggttgggagtttatgataattatactcagcctgctgggatgcaagaatttggtgttaagaatttaatatatggctggaattactcaggtaagacaactctttcacggctgttcgcacagctcgaaagtaaaacgtcaaaccctgatttgcaagggtgttcatttacacttactactgatggggataggatcacacaggataatttcacacagtcaaatttaatcatccgagtattcaattcggattttattcgagatactttaaattttagtggccagaattttagaccaattcttcttttgggcaaagactctgaaaaggctcaggagaagcttactcactacgaagatttgaccaagcgaactctcgcaagaattattgcgcttaataaagaacaagaagaacttgagtctaatttttcctcagctaaaactactacggctgcaaaaattaaaaagacacttggtcttatagagacatacactgcacgtcatttatcgagtgatatgcaagccgtcataggaaacaatgattctcaacttctagacgaggataaactgcgggatgacttgaagcttgcattgactcctgaaaacgatcgaccgctaacagtaactagaattaatttaaccccatcaatttatcctttgtataaagaagcacgtgaagtgcttgcgacaacaccaagtctcagcaataccatcaaacatttagaagaaaatccccttattgaaaggtgggttgaatctggcttgcattttcattcggataaagaaacatgcgagttttgcggaggatctttagatagcaagagattatcagctctgaaagcgcatttctctaaagacctagcagagcataaaaatagagtcgagcgcctacataataaaattaatgctacattaataaatttagacttgccaaaagaagctgaatttaatgctcaatttcgtagtagataccgtgcttttgttcaaccgttaaccaactctgttggagcatttaacgatgcagttgagatattggctagtgatgttcaagaaaaaatcgactctcctttcaaatcgctcgaaccgcaagcattgccagaaggccttatagatgctatttccaatgccgtcgataatatcaatcaggtgattgaagataataataaactagcagcgaattttgtaacggagaaaaaacgggctgtaggacgtgttaaacttcactttgttcaggagtttataaatgaacaaaataaaactggccgtgatttaaaattaaaatggctgggtgctaagaaagaacgccttgttagatttgaatcaatccttaaacatgagtctgacactcagaaggctataataagtttggctcagttggggcgtgaggaaatcaataagagattatcttccatgcttggtagtgaggctgttcaaattcaagtcgttcaggataatggacaagagcgctttcagttggtccgtaaaaatggcagggtagcaaaaaatcttagcgatggtgaaaaaaccgccattgctttctcttatttcttaacaaaacttaaagagttaactccacaacaattcagtgacgcaattgtctatatcgatgatccgatttctagtttagatgccaaccatatttttcaagtaacggccgcaattcgcgaatttttcttccatcaggttcaggcaaatggaaattttgaatggacaacacagtgtaagcaattatttgtatccactcataattttgaatttctgcatttgcttagagaactaaaaccagatggacctagacaagctcgcatgtatttaattaaaaggataggtgagaactctacgaccttcggcaatatgccttactctcttgctaaatatgcctctgaatatcatttcctgtttggtgtcatccataagtttcacaatgctcccgtcaaaactgatcatgagatacttatgcttttaccaaatgccgttagacgtttcgttgaattgtatacttactctcgacttcccgggatttacaagggcacagtagaccaacgcgctgagatactttttggcgatgaaaaggccaagaggattctaaaggttgtccatttctttagtcatgcaaatagcatagagcgtttagctggcaataatgatttaattttcgatttggagcacgcagttaaagatctttttgacataatttctgttaacgatccgctacattggcaatcgttggttgaatcggtttctccttag

SEQ ID NO: 141156 - DNA, 288 bp, Enterobacter cloacae
atgctatggtttgaaaccagatttaccattttccctacgccactcctttacttcctggactacgccttcggggctgtcttctctatcttctcgtggatagtaaataagatcggaaccatcagggtgctcagtcaatcgtttgaattcgaggatgttttttatatcttcagcttcagtggtggcagtgacatcaaacaattttcttacgaaattaagaaactcgtattctgtataatcacttatcgttctcaatttatgtccctcgatgaatttcaatatgacgtttag

SEQ ID NO: 141157 - DNA, 696 bp, Enterobacter cloacae
atgaaaatgaaatatgcggcaggaagagcattagttgtattaatgatggcttcagtctgtcaggcgaaagaaccgccgacgcaggtggtctaccgttttgataaccatcgttatctggagctgaaaggctgggactgcgaaggtgaactctggtataccgatacgctgcgggggattcattctgaacctgtcagccagttttacagaatatttactaaaaagtttgtacatccctcagagcgatatatcgctattacaggctggggggtcggtggttttcgtgtctcaaaggactacgggaaaacatggcaggttgcacaattttctcccggagaaaacgagccggacggcatgaactcgcctcctcgtgatgacgtgctttccttcactgtcgtgaatgaccaggggtttctgcagacaaagcaccgcctttatatgtcatccaaaccatttgatgatccacgcctggcaccgggtggaccagggattgattatgtagttgaaggcgtaactcacagaattaaaccccaattcccggggccggcgtgggggctggattacatcactaaagaggcgctggagaacgatacggcaaaattccataccaattaccaaaacttgccagataaggtacccgaagttaaaggctacaccggctgggaccatatgcgctgtgatatgggcgcggggcgctaa

SEQ ID NO: 141158 - DNA, 540 bp, Enterobacter cloacae
atgaaaaaagtggcattactgggcttcggcctgatggttgtatctgcggcggctaacgccatcagcttcaacggctcggcgggtcaggactatacccacctgggctttggcctgggaacagagacttccggtctggcgatgaccggtggctggacgcataacgatgacgacggcgatgcggcaagcctcggtctgggtctgaacattcctcttggtccattcctggcgaccgtcggcggtaaaggtatctataccaacccgaacgacggtgacgaagggtatgcggcagcggtgggtggcggcctgcagtggaaaattggcgacagcttcggtctgtttggcgagtattactactctccggactcgctctccagcggtatcgacagctatgaagaagccaacgccggcgcgcgctggaccatcatgcgtccgattaccatcgaggcgggctatcgctacctgaacctggcgggcaaagacggcaaccgcgacaacgcgctggccgacggtccctatgtgggcgtaagcgcaggcttctaa

SEQ ID NO: 141159 - DNA, 2226 bp, Enterobacter cloacae
gtggctcaaatagttcaatgtcatggaagaaatccagatgcaattttggagcttgcaaagtataacgatggaatggatgcagaagattatgctcatcctcgatatatagcagctttattaagaataggagatctactcgatattgatgatggcagattttgtcctactttacttgcaaatattgggaatgtacctgtttcctctaaaaaccatcaagaaaagcatgcatcaataaaacatttattaataaatagcgaagtaattgaaataaaagctgagtgcgaacaatatggggcatatcatgcacaacaaggctggtttaattatatacaaaatgaattcgattatcagaaaagggtttggaatgaaatagttcctgatagtgatttcagggctttgccaaccatcggtatacttgagtgtagaataaaagactatatagctattgatggtaaagttccaaaaataacattaaaccctaaacgtgtttatgaatatattactgggtctcagatatatagcgaaaaatatcctttcgttcgtgagttattacaaaattctattgatgcaacatattataaagtttgggatgagttgatttctaatagcagtttacttcatgatgatgtaaaagatcgagagatttttaaaaaagaattagaaaaatataaaatagaattgttaatagaagagtatgaagttgaggaaggtgtaaaatttaatagtttcattattaaagactttgctcttggtatggatattaatgatataaggaagattctagtcgtaggatcggattcagttgaattaataaaaaaattaaatagaacaatgccagattgggcaaaaccgtctggatacttcggtattggccttcagacagttttcaaattatgtgacgaggttgtaattaaaactaggaaaaaggaaaacccttgctatgaaataaaggttataaataatgccgataatgaattctttgatatctcaataaaagaattggatgatagacgatttgaaggaactgaaattaaatcaatttttaaaagcaaagatggatactttataaattacagaggtcgccggattgacaaccatgacgatccattgcttttagaacaaaaaaacgatttttatcaaaatgtaatgcagatgctaacctctgattttaaaaagtcccatatttcattaataatcaacggaactaaattagaaaggcgagttgatgttgaaaataaaaacggtgatgtttttatgtcagactattctcttggcgcagactttagcataaaaataaacttggaagattatattttcgctaatttaatcttcaaatataaaggcgttgagtttgacacaagctttaatgttaaatgcttagttggtgaattggatattttcaaaaatagtgctgggtattggttaacgatagatcgaaaaaaaggtcgaacagacaggcataaagaaattgaagatattataaatcatatacttaaaactcattcttcaaacttaagagaaaatactaaagatgataacttgtctgatttttatttatattctgtgactgggcagtctattaattatgaatggaaacaatatgaaataaatggggtgaaattagagcaatatataaatggggaaaacgatctttttgtttatgcacacaagtatggttttttatataacacaaaattcaatgacattgacctaaatgttatgcatatactatctggtattttcaaaagagaaccattatctctagctgttgaggaatactatggcgatttgccttttgaagaatctgaaagatatgatgaagatgatggtgttggctttatattcaaatttaaaaatgatggattaaaaacttttacatgtccgtcatcattattaaaaaaagaaattcaattgaatattactgaatcacctacgagaaaattaatcccgtgctataacgaatattacagcgacatatccgtttgcgaaagggatataccattaaatataagtgttggttcgtcattcaatcgttgggttgataaattcatattcacaccaatggcttcttcacctccaaatgagattgatttggaacagcagttatctatacttttaaattattatatgtcattacatatattaagttgtactgaggctagcttcaaggctaaatacaaagagtgttggcttgagttgtactgcacccattttgttggacgatga

SEQ ID NO: 141160 - DNA, 303 bp, Enterobacter cloacae
atgagaatagagcagagattaaagcaacttgcagaagttaatcctaattactcattattatgggcacagtgggaatttgacaaaaaattattatctagggctcttaatacagtatcaagagattttccacattacagtttgcatgatgcgtcacattcatccacaataattacacaaatagagaaagttatctccccaaatatttataaattgaccgcgacagattgttggttgctgttggagtcttgttattggcatgatgccggtatggtgattactaatgaagaaaaaaagagctcttaa

SEQ ID NO: 141161 - DNA, 546 bp, Enterobacter cloacae
gtgttacgtacaagtttaactaagaccacgcgctggctgttgcccctgatggcactctctctgacggggtgcggagtgacgcagagcgtcactgacggtaccaggtcagcgtttaatgccgtgttctataaaaaaattaaagtactgcatctggacttcaccgcacgtgaggcgctgaacaccgactcccgggaaaatcattcgttgtctgaacctgtggtggtccggatttaccagctcaaagaccgcaaaacctttgataagacggtctatcagcaactgcttcaggatgatgccacccttctgaaagaggacctgctggcgagtcgtgatgtcgtggtgaaaccgggcggtgatgcaaacctcgatatgcccatggaagaagcggcacagtttgttgctgtggtggggctgtttcgccatccggatatgaccaacaatacctggaagcaggtaatcaaccgcagcgaactggatccggacaaaccccgcattctggaggctggcgataactctctgacactgcaaccacttaaggacgactaa

SEQ ID NO: 141162 - DNA, 498 bp, Enterobacter cloacae
atgcatttgtgcgcgaaaagcagaccagacggcggcgtctcccagaaaaaaacaccgcgagatcgcctgcggcatatcgcgagaggtcgttttccactgcattaccagcgcgcgaacaagctgctgttcccgttcctgactatcagcagagaaggtacgggcaatacgcaatgttttcccccccgtctcatgacgttcaacggggggccgctgaatacgacgaagcacccgctgccagtccatcgtttccgcacctgccgggccaaggagcaggatgtctttcagcccaatcaggctctgatgttcttcccaccacaggttctgctcatacctgacgttgcgctgccaggctatggcatggtgcgaagagaagcggaaataaagcagtcggcaaagccagagaaaaccgatgaagaccagagcaagccacattactgcaaaagccgcagcgctgcggtttgcctctccggtcagcgctccggcaccgccggcaagtaa

SEQ ID NO: 141163 - DNA, 258 bp, Enterobacter cloacae
atgaaacaggttattcgtgaaggagatactctgaaggagtacggcggtaaggttctgggggggcattatctctgctttggtaaggggatagcgaccaaaggagatgcagttaaatgcaacaagcacggtatgacgactatcgccgagggcagctctctctctgaggccgatggtcagcccattgccctgcatgggcatcgctgcgcgtgtggctgcacgctggtgagttccttccctgattttggtatcgaacagtga

SEQ ID NO: 141164 - DNA, 2454 bp, Enterobacter cloacae
atgtccgaagtaaccacggatctggtctggtacccgcctgaatttcctgtgcaaggacgcctgccttcacaggcggcactggtggggaaaaactgcaggcagcaggaaagtttggagcgtgcttatcgcaatgaactctgtcaggctaaaaacaagctggtagatatgccgtgctgcaaaactttgcatattagtctgttctttgatggcaccggcaataatctgaacaacgatctctacttttctgatcctaaacatccaaccaatatcgctcgtctttttcgtgccacgatcggcaatgggactgttggtggggtgtcttccactgccgggttactcgattccgattctggtctcaaggggagctattataaatattatatccctggcgtcgggacacctttcccagaaataaacgatcttgattattcgtcctcggggctggcctttgccaaaatgggcgaggacagaattaactgggcgttgctgagaataattgacgcattaaagcgttcgttggctgctaagaatgacgatagcagtaaactttcggatagtgcaactcgtgatgcccttgaagcaatggcaacgtcgtgggcctcctttggtttaaccgggagccataatcgttacgaaacgtttaccgatgagctaaaaaagctgaagcctttgctgggtcctgcgttgcagcagcctagccccacgcagccgaaattgttggctatcaagctgtatgtatacggattctcgcgcggggcggccgcagcgcgcgcctttgtcaactggctgagcgagttgttgcccgtaccaacaggcaaagacgaaaagcccgagcaatgcctgatggttgatgagttgaaaattcccgtcagcgtggaatttcttgggctgctggataccgtggcgtccgtgggggttgcgcatgtcgccccggtggcggaagggcatatgtcctgggccgacaacacccaggagttgccaaatgaaaaaacttacggcggattgattaagaactgcgtgcatctggtgtcctcgcacgaacagcgtctttgtttcccgctggactctattcgtcgcgctgacggtcaatatccggcaaacagtaaggaaatagtttatccgggtatgcattcagatattggcggtggctatcctccgggggatcagggaaaagcgaatggggaagatgatagtttgttgttatctcagattgcgcttaatgatttgtattgccgggcatttcatgcaggagcgcctttgaaagttccaggtgaaagtcttcctactgatcttcaaaaggataaatggagggcgttagttttagatgtcttgaccgagtttgatgttgatacatcccttatcaaccgcttcaacgcctggcgagaactcactcttcacctccccccatcaggcaaaaaaataactgacgaacaggctgctcaatatgatccccctcaagcgtctgtcagtctcgaaaaagcccttgaaaatcagatagcctggatcaccgcgtggcgaatcgaccgctatgccaaaggcaccatgcttaatacgccgttttacctgcgggcatcggataaagatggcaacccgggggcgctggaaacgtccaaagctaaacgggacctgaagcagggggcggttgaggcccgacggaaagaaaaaatcgccagccagcctgcagataaaatggatgagttggtgctggaagccgggataaaggactttgacccggatatcgctcaaacccagctgaagcaggcatcggtggagtttggcgaggactatcgacaacagctccgcagcccgaccagcattgggcaactggtgctggcggccatcccgcacaacagcatattcctgcttaatatcgatgacaggccgcgagaatatgccctgatcaaagcctcagccgacacgaaggttgcgacattgttcccgccgctcggggaggcctcaaatgcagacaccccggccgggctggtcagagcgctttttgacgatcagatacatgattcccgcgcgtggtttatgcattacacgctgggaacgcgtgagccctgggggagctacttcctctaccggatgatctacttcggtgataactgcaataaatcgctctctccgttgaccattgccggtgacatcgttggggccgccacggtggtgggtggggtgatcttcagcttcaggcagaaaggcacgtccgcaaaattggctggccttgccgcaacggccggactattcacgctggaatcgcaggcagtggattacctgaccggactggctatcccaatggtcgacaatgctgatgcgttaaaagcctttaccaccgaacccggtgcggtagttgcgcagcagagcgaaacgatcgcagaaaagcgccttgagatggcgaaatcactcattcagtccggatggctggaaaaagcacaatcgctggtgacaacctga

SEQ ID NO: 141165 - DNA, 534 bp, Enterobacter cloacae
atgaagataacaatatcaggcgtattactgggtgttttcttactggccggatgcagtcagccaaaggctgaggcacaaacgcaaagcggtggcgcaggaacaatagaagctatcaaccataccaaatgggcgattaatcatttcagcgtaaacggtcagtcgggcatcgatgctatcgggccttttgacggtggcggaggtggttgctgctacggcgttcctgcagtctggaaacccggaatgacggtacgtatagactgggaaagaggagaggcttcaacagagggtttcccaggttttgctgatagagagaagtacaaagcgtggttaaaaataaagaaggccaataacaaggaacttagcaaaacagtaccactgccagattatacaggacaggagacctgcggtattacggtgcattttttaccctgcgatgacgtaaaggtaacgaccagttgtttcacctacggtagtccgtcctacccgatcaaactaccgctggaaatgaaggagccgaaagtatgtccgaagtaa

SEQ ID NO: 141166 - DNA, 534 bp, Enterobacter cloacae
atgaaaataaccatctgtggcgtattactgggtgtttttttactggccggatgcagtcagccaaaggctgaggcgcaaacgcaaagcggtggtacgggaacaataaaagccatcaaccataccaaatgggccattaatcatttcagcgtaaacggtcagtccggaatagatattatcggcccttttgatggtggcggaggtgggtgctgctatggcgtaccagcagtgtggaaaccgggaatgacggttcgcatagattggcagactggcgctggaacttcggaaggatttcctgggtttgctgatcgagaaaagtataaagcctgggaaaaaaaaatgacttcacagaatcgtgagcatagcaaaacggtagttgtaccagactatacaggccaggaaacctgcggtattacggtgcattttttaccctgtgatgacgtgaaggttaccaccagttgctggtcacccgctaatgccaactatccgatcaaactccccctggaaatgaaggagccaaaagtatgtccgaagtaa

SEQ ID NO: 141167 - DNA, 534 bp, Enterobacter cloacae
atgaagataaccatctgtggcgtattactgggtgtttttttactggccggatgcagtcagccaatggctgaggcgcaaacacaaagcggtggtacgggaacaataaaagcgatcaaccatacaaaatgggccatcaatcatttcagcgtaaacggtcagtccggaatagatattataggaccatttcagggaggcggtggaggatgctgctacggtgtaccttctacatggaaaccaggaatgacagtcagaattgactgggaaaccggtgttggaggaacagaaggttttcctggctatgaccattgggatgaatacttaaaatggcagaaaaaaatggattcatttaaacgccaacacagtaaaaaggtagcagtacccgattatacaggtcaggaaacctgcggtattacggtgcattttttaccctgtgatgatgtgaaggtcacaaccagttgctggtctcccgctaatgcaaattacccgatcaaactccccctggaaatgaaggagccaaaagtatgtccgaaataa

SEQ ID NO: 141168 - DNA, 534 bp, Enterobacter cloacae
atgaagataacaatatcaggcgtattactgggtgttttattcctggccggatgcagtcagccaaaggctgaggcacaaacgcaaagcggtggcgcaggaacaatagaagcgatcaatcataccaaatgggcgattaatcatttcagcgtaaacggtcagtcgggcatcgatgccatcgggccttttgacggcggtggcggtgggtgttgctacggcgttcctgcagtctggaaacccggaatgacggtacgtatagagtgggaaaccggcaagggttcttctgctggttttcctggatttgcagatgaaaaaaagtacctcgcatggaaagctaaaatcgatgcacaaaagaaacagcatagtctgacagtttctgttcccgattatacaggacaggagacctgcggtattacggtgcattttttaccctgtgatgatgtgaaagttacaaccagttgttttacctacggtagcccgtcgtatccaatcaaacttccgctggaaatgaaggagccgaaagtatgtccgaagtaa

SEQ ID NO: 141169 - DNA, 534 bp, Enterobacter cloacae
gtgaagataatcatctgtggggtattactgggtgttttattcctggccggacgcagtcagccgaaggctgaggcacaaacgcaaagcggtggtacaggaacaatagaagcgattaatcataccaagtgggccatcaatcatttcagcgtaaacggtcagtcgggcatagatgctatcgggccttttgatggtagtggaggtggttgctgctacgggacacctacggtctggaagcccggaatgacggtcagaattgactgggaaacaggagtcggcagttcagatgattttcccgggtatgaggatgaaaagaaatttttggaatgggcaaaaaaaataaaggatcagcatcgccaacacagcaaaacagtcccactgccagattatacaggacaggagacctgcggcattacggtgcattttttaccctgcaatgacgtaaaggtaacaaccagttgttttacctacggtagcccgtcgtatccaatcaaactaccgctggaaattaaggagccgaaagtatgtccgaagtaa

SEQ ID NO: 141170 - DNA, 783 bp, Enterobacter cloacae
gtgccgaatgtaaatgatgaagacgtgctgcaaagtacccgacggctttgccaacagattggacacaactacattgatgtcattgttgatcaatgtggtctggattattccgtcatacccgcgctctcggggttttctcctgagattaaatggctgtcgctctataagggcttgccggaggatatttatcccgaagatgctcctctgctggtgcgggttatgtttgacgatctccagcaatggaactggcttcaggcgcttgcaaaagaaatgtcctccacggcgcctttactggttttatgttcttcatggtcattctcccaattgggtaagtggcttacagaaatcgccaatgcccggcaagaaggcagggaaggaatttttcggttctgggatactcgcattttttcttatctttttacggatattctgagcgctgagcagcaggagcaacttaaaagacccgtaatatgctggggatggcaggatcgtgatgggcactcagtatggataacagggcgaggaaatatcccgaagcgtgaggaggttgttaagcaactggatttcagcgatagccagtacgaaaaatttatgtgcttatgtgatgcaaaacgttttgtcgcccaaaaattgctcgcggaaaataccttcatcacaaaagaggctgaactcagggcatgctttgaggggatggttaacgctaccctggcgggcgtattatttgatgatgaacgtgatgcctgggtactcaactatgtgacccagttgggtagtcaaacctga

SEQ ID NO: 141171 - DNA, 996 bp, Enterobacter cloacae
ttgcgtgagcaactgcgaaattacgaagccaaccttgctgacagtaacgccagcgcccgcgcagccaatgaagcgcaactgctgggctacgggcagggaaccaggttccgtgaaagacttcaggagcagttcaatctgcgtaaggagtttgagcagaagaataccgatcttctccgccagcgtcaggctggtgaaatcgacgagacgttctatcagcaggggctggcacttaataagcgctacctagaagagcgcctgcgcgaccaggagggatattacactgcttctgatgcgcagcgtgacgactggatgacgggactgtctgagggttatgcgaactgggtggacgaagctactgactattcttccatggccgctgacggcatgaagcaggctatggggggcgcggtcaccacgatcaccgacatgctcaatggcaacgtagacagctggaaagactggggcgttagtgttctcaaaatcattgaaaatgttgcaatcaacatggccctcgcgaaaggtgttagttccttcggatcgttcttcagctttggtgcatcttccgccgctgccgccagtagcggcaccgcaattcagaatgctggtgcgaacttcacctttaatgcgaagggtaatgtttacgactccccatccctgagcgcatacagcaatggcgtgtttcagacccctcagctgtttgcatttgccaaaggagcgggtgtatttgcagaggctggacctgaagccattatgccgcttacccgtgctgccgatggttcgcttggcgttcgggcgatgggtgtccctcagaatgtcgggggtaacaatgtttatgctccggttaccataaacagccagggtacccaacaacctgcgggtaatcagcaggcgctggcgaaagcataccagcaggccatagaggcgggtgttaaaaaagaaattgatatccagacgcagcctggtggctatttgtggcgtttgattaaaggggtgtag

SEQ ID NO: 141172 - DNA, 369 bp, Enterobacter cloacae
atggaaaataatgcactgactttggttttaaaaaacgattgggtagcatcgtcttctggtaatacctataccggaaaatacacagttggacggtttcacctgacagatgcgttcatcgttgtgtatatgaagctgatacatggaattgaaatacccgatttatgggtcagtagcagtttcactaacataccagataccgatacccgtagggttatgtatatggaaggctgcgatatgttatcgaaagaaacaatgaacgaaattcgtaatacggtgaagtccccaacagacaatatgaaaatacaccgcaatggcaatcatgttaccaaaatagaattcatggaagaacgaaatgaaatcaccctatga

SEQ ID NO: 141173 - DNA, 1488 bp, Enterobacter cloacae
atgaaacaaaacggaaaagcatactcttacataaggttctcatcaaagaagcaagaacaaggtgactccgtaagacgtcaaactgagcttgcagaacagtacgcacacatgcatggcttgattctatcagataagaactttcaagacctcggaatctcagcattcaaagagggaaacaggccttcactgggcgacatgctcgaagcaatcgagaaaggacagattgaacccggttcaaccatcatcatcgagtcgttagatcgtctgagccgcagaggtattgacgtaactcaacagattattaagtcgattctgcaacacaacgtctttatcgcttcactggttgatggtttattacttaatcgtgaatccgtcaatgacctcgtgagtgtcattaggatagctttggctgcggaccttgcccataaagaatctgaaaaaaaatcgcagcgcctgcgtgaaacgaaaagtcagcagcgacaacgagcgctaagcggtgaggttatcaataaaatcctgcctttctggttaaaacggaaagaaggtaaatttgtttttagtgacaaagttgatacggtcaggagaatcattgagttacgacgtgaagggtttggaacaaataaaatcgctaaaatgttaaatgacgaaggccacaaaccattacgttctgctggctggaatcatacaacagttggaaaaacaataaattcggttgcactttacggtgcatatcaaacatcagagacaactaaagatcgcaaagtcattctgcttgatatcatagaggattattatcctgctgttatcagtaaagaagaattcacgctcttgcagtctgatcataaacaaaacaaaccgggatataaatctgaacataatgccttcgccgggatattaaagcacgaatgcggcggctcacttgtcagaaaatttcacatcgcttccggaaaaacatatcaataccatgtttgcgctaatgcaagagatggaaaatgtaacacaaccaagaatttcaaaaatatagaaaaagcactttacaggataatgaaaaaacttaaacttgagaaaaacaccaattttgacagggcattaccgttagaacaagaaacaataaaaaagaggattcaggagctaaatgatatgcttcttactgcggccaagatcccgaaaagtgtaatggaaacgataaataaccttgaagataaactacaagaagttgaagaaaaaataaaacaacaggatcgtatgattatctctgagcgggcgtttgacttgaaactattacaggatatcaaagagcctcaagaactgaatatgatgcttaaacgaatcatcgaaaatatcattgtctataacataggaaaaaagtggagaataaaggttcagtacaaaaacaaacacgttcagagtttcctttgggatggcgaaaacattactttcattaccgatactaaagaaatattagatctcgttaactcctgggggtaa

SEQ ID NO: 141174 - DNA, 888 bp, Enterobacter cloacae
atgattaacttacagcggacgcagatgtttgttgcggtggcagataccggcagtttcactgcggcagctgaggcgatggggctgacaaaagccgtggtcagcttcaatattcgtcagctcgaagccgaactgggcgttaccctgttgctgcgatccacccgccgcctgacgttaaccgacgcgggtactctttttcatcaacgcagcgtcgcgcttctgaaggatgcagaacagttgcaggatgatgtccgcgcgaatcatgccgggctcaccggggagttgcggatcacgaccacgcctgagtatggctcacaggtcgtggtgccgatgctggcaaggttcagccagcagcacccggatcttcgcgtgcgtcatgtttcgtcgtcactgcatgccgaccttatctcagagcgctttgatgtggctatccgactgggaacgcttaccgattcacgctatcacgctgcattgatcgcacacttttcgatcctgcccgttgcgacacccgagtggctcgttactcatccgatcgcatcgctggcgcagcttgcccatgcggactggattatccacgagcgcttaacctcgccgctgcgctggcaggtgaaaaatgccggtggtttgcccgacacgctggagataaaaaaagcgccgcgtctgtttgccgacagtgcgcaggctcttatggcctttgcactcgccggaggtggagtggcattactgccggaatggctggtgcgcgatgcgctggatacgggaaaactggtgccggttttaccggaatataccttcgcgcggcagggcatttacgcggtttatccggatgcccggcacgtgccggcgaaagtacgcacctttattgattttatgcgtgccagcgtgaattaa

SEQ ID NO: 141175 - DNA, 1221 bp, Enterobacter cloacae
atgctccttcgcccagccgccacgctctggccgcccgtcttactgggtagccagtttgttttcaacattggcttttacgccgtcgttcctttcctggcgatattcctgcgcgacgacatgctgctctccggcggactgatcgggctgattctgggcctgcgcaccttctcccagcaggggatgtttatcgttggtggtgccctctcggaccggtttggcgcgaaagtggttatcctcagcggctgtattgttcgtgtttcaggttatctgctgctggccttcggggaatcgctctcgccgattattgtgggcgcatgtctgacgggcatcggcggcgcattattttccccttcgattgaggcattgctggccaaagcgggcacgcacagtgaggcgaaagggacacgaagccgggcggagtggtttgcactgtttgcagtctgcggggaactcggcgcggtactgggcccggttgctggcgccctgttaacgggacttggcttccgccaggtggcgctggcgggtgcaggggtctttattattgcgttagtggtgctctacttctgccttcctgcttctggccgccgttcgcaaacgctgaaaatacagccctggtggacaaccttccgccagcctcgcttcgtcgccttcatcattgcctatagctcatggctgttaagctacaaccagctttatctggcgctgccggtggagatccagcgatctggtggtaacgagaaagatctcggtccgctttttatgctcgcctccgtgctgatcattaccttacagctgccgctggcacgctttgcccgccgcgtgggcgcggtgaggatcctgccggtgggctttttgctgctttctacggcctttgcgagcgtagcgatgtttgcagcgactgaaccgccggagggctggttgcggttgctgccgtcggtcttatttgtcacgttactgacgctgggacaaatgctgctggtcccctcggcaaaagatctcattccgcggttcgccgaggaatcaacgttgggggcgcattatggcgcactcgccaccgccggagggatggcggtactggcgggaaatttgttgtttggcagtctgctggatcgcgcgctggtgccttcggctcaggcaatatacccctggctgctgctggccctcttcccgttgtgcagcgccctggccctgcaggtaatttgccgcccgctgcgaagctga

SEQ ID NO: 141176 - DNA, 480 bp, Enterobacter cloacae
gtggaagatcgcggccaggccgtcattgccgatttcaaaaaacgtgaggctgacctgcgccaggagtttggtaaaaacaaaaaggacctctcctttgttttctggttctcaagctcctctccttcggctgatgcttacgtcggcggtaaaaacagcgcctccggatttattgccaacgtgctgggcgggcacaacgccattacatctgaaaccgaatggccaaccgtgggctgggaaagcattattgccgctaatccggatgtgattgtggtctccagtctggaccgtaaccgctgggcgctggataacgcggaagaaaaaatcaaattcctgaaaaacgatcctgccgtcagccagcttgatgccgtcaaaaaaggccatatcgtggtgatggacggccaggcgatgaacccaacgattcgtacaatttacggtgctgaacaggtgggtgaacagctcagaaaactggggctgaactga

SEQ ID NO: 141177 - DNA, 210 bp, Enterobacter cloacae
atgcagcactcggttgattatctgcgtgaagccatgtcggtgtggctggccgcaggtgaaaaaattaattattccgtgcaggacagcgatattttaacggccatcggattcaggcctgatgcggcttcgcgggatgataatcgccagaaattcaccccggcacagaacctgatttacacccgccgacgtgcagaactggccgcacagtag

SEQ ID NO: 141178 - DNA, 1368 bp, Enterobacter cloacae
atgtttaataattgggagcaatttcgtagttcagttaaaaatactcttactatgattgatcgcatgagtcatgataatagatatcgcgattataaaacaatagtcgaaaattcagaaacttattgtttgctcgacttttcgaaaaataatcaccactctaataaccacaatcagcatgtaattcatgagttaaaagaaatatttgaagaatacgaaaactggtcaccaatttttatttttatcagctatctcatgaaccctgagttcattatatccaagatcattgataaaacatcacctaatgcttattttttaaatcaagcccgcacttgtataattaattactatatacccagtgaatttagtgaacactattccgaacgtttcaaaataaaagacttagatatatctacacttgattcccctcatgagattgaagttattgatcgacaattaagttattacaatgatctgctaccagacataatacctaacgatgtcaggatttcattatatgttttatccgaatataattgcgagatgcttaacgatgttttatctagttcaataaacatcatcaaaacatactgcctttcatcttgcattagcatggaaaaaagaatcaacctagtaaatttatctaatgcaacgcatgtttcaaaaattttgacattctacattttcaacaatacaaaaacaaataagaaaaacattgaaattaacaaccatcatttggttaagttgtttgaaactctttacaaaaaaggagagtttggctattggatgaaatatataaatacatatccgtgtagattccccaacatacaaccatatttaggggaggctttagccctcataaattctccagaggcactggagttataccttgactcaattaaactacataacaatgacctagaccgctcttacactaactccagagaattagtggcgcaatgcttaacaatattcaagaaaagttccacttcggctttacaagcatattgctgggataaggcatttattaaatggagtaaatggaattttggcctaaatacaaatgatttattattttccatttcatcatcagaattagactatcctgtaatacaatactttctaaacaacactactgaaatagagagagaacaatttattgatgatatatgggaaaaactatcatccattgataatatatggcatgattcacaatcacagcaagttagctactattacagatgtgcgtctactctacaattacctttgcatgcaaaattagcaaaagaaaagaacgactcaaaagtaaatctttttttacgatttgaccttgatatttcaaaatataaccagatgctttttggagtttaa

SEQ ID NO: 141179 - DNA, 1011 bp, Enterobacter cloacae
atgtgtataagagacagttgtagtatagcttggcatgaatatgctcacaaaagggatctgataataaattgtcacttaagtgaaaatgataacgtctgcgaaggttactatactaaaattctaaaaagtgatgaatctaatctttcattaccaatagcaaataaacgtgctcatattggtactatctgggatcctgaaaataactttatactagcgagaaccagaccatcagccttcatatctcctaatgcaagaattacaactacagtttccacatttaaagaaagagttttaacgaacaatgggacatctaaagtaattagtgtattaaagccagacaataatacaaataaacctcggtacgaaaaacccattattaactggacggaaaaaaggatttatgaaaatagcagcgccgagttaaaggaaagccgtaattttgttcaatacaattccaaaggaattaataaaacccaatcaaaaagcgaagctcttgaggatttagtttatttaatcaataaatatgggcaacgtgcagtctggttatgggatccttatttaagctttcaagatatattcgacacattattaatgaacaaatactcaaactccattatgaaagcaattagctcattagagttaccaccggattcgaatgaaatatcgtcacgagagttttatgaatcaaaggcacttcagaccataaaagaatataacaaaagctttaatgccttacctttagagacaattaagactttaaatttagagtttagatgtaaaacaggaaacaatggatggagctttcatgatagatttattatcttcccatcaactgattatcattcgaatactttagcttggtctttaggtacatcagtcaactcatttggcacgagtcaccatatattacaaaaagtacaggatgcacaattaatcgctaatgctttctcagagttatgggaatctttatcaggaaatgattgtttagtatggagcaacagcaatgtttaa

SEQ ID NO: 141180 - DNA, 561 bp, Enterobacter cloacae
atggcgattttcggctacgggcgtgtctctaccgctcagcaagatacggagaaccagaggttggagcttgagcaagctggttggatgtttgacttttggtttactgatgttgtcagcggtaaggttccggcgatgcagcgtaaagcattctctgaattgctaggtaaaatccgtgaaggtgaaacactggttgttgcaaaactcgaccgcctcgggcgtgatgcgatcgacgttatgcaaacggtcagggtgttgtctgatagaaatatcaaggtcattgtccaccagcttggcacgactgatctcacctccgcagcgggtaagcttttgttgtcgatgctggcagcagttgcagagatggagcgtgacctgctgattgagcggacccaggcggggctgtcacgagcaaaagccgaaggcaagaaattgggcagaccgtcgaaaatcgcggcagaagcccgtagggcgattgtggcgaaaaagaataacggtgtgagtgtcagtgcgttagcgcgggaatatggtgtatctagggcaacgattaccgctatctttgattaa

SEQ ID NO: 141181 - DNA, 501 bp, Enterobacter cloacae
atgaagcgtagacactggataagcatcgaaacacacaagaagttctttagggctcgcagtgagtttgcggactggacggatagggagtggaaacacccggtttcctgcttttttttgcaggtctggggattcttgatgtttgtttttcttgggctggcctcgctgcttttgggcgttggttcacataaaaatgccttcccggaattatatccgaacgatgaaaagcgcagaccaattcgctttaagtattctttgactttatttgtaagggagaagggatggattttacccgttatgttcgcacttttgtttgtttcagctgttgaaccattcaatccatattttttcacttcaccattgctttactacaccatcaatggcgctgcgttagttgtaggcggattgtgcgggggatttgtttgtatgagactgtttagctggatgagagaacgcaccatttggctatcagaatggcagcgtagataccctgaagacaagtag

SEQ ID NO: 141182 - DNA, 1017 bp, Enterobacter cloacae
atgaagagtcgagaatacaaagctgccgaagcagaccgcaaatcctttaaggtttcagccgggatcgactggctggacataaaagttagtttatccaaacggacccagcatcgctacgttcaggaagaactacttagaatcacagagttaaaactctgggttgaaccttgcggcatatgtatctcaaagttgtcatcatacgcaccccgtcccgataacaacgtcaaaacgtgggtaaaacccatgattagcagcactaacgatacttttcggattcgcttccatgatctactggcaaaaaaccatggcgggatgctggaagcagtgctcgaacaattgcaaaaacgtttcccctttgtgcatgagccgcaaatcgtgggaatcgaagttttctgcgatttctggcataaacaacggtcagtatcagcgacacgagcaatgacctatcggcttcagacaagcctgtttagtaacggaacccgaccaaggcaattcaaccccgcttcgtggaaaaatgtctaccttttccccggaacacgtatcactccgtatcgaaacttcaggacaggtaacaagtgggacaacatctcgtggcaggtctaccacaaacgcactgacaacgctcagaaactacctgtagaagagcaacgcgctcgtgttgaagtcacgttaaaaggtgctgcgctcactcactactctcttcaccgtcttagcgacatgcagcgctttcgatttgaaaccctcactcacctgttcaaatttcgcaaaccaattgaacctgaaatgatggctaacggtgatatgttccggtttaccgctatcaacgcagttcgtaaggtgaacgacgcaacagccgagcgcggattgcattctttcaataacatcggacgtagggataaacgtagctggatgatggtcaacggtgacaagcgcctgcggaaagaaagctctcatctggcagttgttaacgatctacaaaacgccgtcaagggcgctttacgtcgtctccacgtttga

SEQ ID NO: 141183 - DNA, 612 bp, Enterobacter cloacae
gtggaactggagaggatttttaaattttcggttgaggatggaaagtcgctgaacgacgatgaaattattgaagtatataaacttattgaagctaatattgaacacgttcgcttcacacataatgacttttttatttatctttcggaccgctatctggctctatccatcgcaatagatgaaaaggaaagagagaaaataaaaagccgtaaaaaaattgccagaaaatccttggtgattttagttgtgatggttgcaatttatggtagtgccaagatagttaattatataacaaaacccagtgaattggatatacaacagtctcaggcctattcttctttacgtattgacgccattaaccgcaaacaacaggcgttgcagtttttaaaaaatgcaccagatgtagcgaaagaagatctctctttgattatgtctactattactaattctgggattagttttggggattcttttgttctaaaatgtcaagggtatggggaaaaagttgcaataaatacattgacttcatctccgaatttatcgagcgaaacaattaaatcattacagcaagccgttgatgcacagtgcgagctacataatcttgataaactgtaa

SEQ ID NO: 141184 - DNA, 1941 bp, Enterobacter cloacae
atggcgcaacgtggtaatctctatcgacgtcctagcgggatctatgttctgcggataaccgttccggttcggtatcgtgccctgatagggcagcgtgaaatacatgcatctacccgcacaacccacctcgcaaatgctaaggcaatcgccacgcgtttgttggagaagtggtatgcgtctctggaagagttcaagcaagtggataaagagaaaattcggggaaacgccccgttgttggcgggggctggcaaaatcagcttggctctgttttgcgaatcatttgatgtggggcttgaaacggttgttccgcatcttttggcagacaatattccgctttatgcttttgtagatagccagcggggttttctgattgatgattttactgccattgatcgtgaccctgatacgcatggctttgttttaaacgacgttgctcattacggcactgaggctatggttaacggctatatgcagatttacatgccgctacatgccctcaataaattggttaaagggctatcaacggaaataactgcattcagggctaccaacggtaatccccttgctctttggctactggacttgcccggggttacggtagattcaagttctttatttatcaacaatgtgcaagctgaaaagctgcgtagcatgtgggataaagcgtttgcgaaatctgagcctgaattacctcctgttccggctgttgtgccaccaccaccgccccctcctttgatcatctctaacccgttttgcaatccactacacgcgtcaaaaacggtttcagaagtgttggaggagttcattgcgtataagaactcaggggatctcaaacttgccagtgaggaaaaaatccggtcgcgaatatctcattttatcgacgttatgggagacttaacacttgttgagttagatcgtaatgtcgtaaaaaaatacgttaccagaatgcaaagaatgcccagtaacttgtatttaatgcaacgccgatacgctgccgaagatttggatcaacttatcgaaaaagcacttgatgccggtgagtcgctcatgacgaaagatgcgattgggcgtcatatggcctcattaggttcaatgttaaagtgggcctgtaaagaaaattatttaattgccaatccagtggaaaatgttctggcaaagcgtaagaaaactgcaagatctcaggatgaccgttatcagttcgaagatgatgaactggaactcatattctctgcatactggtttaaaactggcgagggtgtgccgaacaaattcgggcgccatattgactttcgaccttatcgctattggttacccctattagcgttatatagcggtgggcgaatgaatgagttatgccaactttatctttctgatatccgtatgagtgaaaatggtgttgcgtatctggacttcaatttagattcaccggataaagttatggacactgaagctgaagcggataaatcgctgaaaacgctcaatgcgttgagacaggttcccattcatccaaggctgattgagcttggctttcttgaatacgttaaagctttgaaagctgatggacaggaacgtgtttttccagagttaaccttcaataaaattaaaggttatcgtggttatgcgtcaaaatggttcaatgaactttattttggcaagaagcttggattagaccgtaatgggaagaaggtttttcactcattccgccataactatgtgaatagcctcgaccgactggagttaagtgaacggatgatcgcccaacttgtcggccatgttcgaggaagcactacagccatgacaacctatcgtaaagacagagctgttgaggagcaattccacgcaatttccgggcttaagcacaatttgcctgagatagctccgtttaatgttgaggcgggactgaaagcaatgaaagacggggttcgaaaacataagcaatga

SEQ ID NO: 141185 - DNA, 411 bp, Enterobacter cloacae
atggacatgccgaaaacgcctgagcacaagcagtggaacggcgatatgaccaacggcgtggcgccgtcgagcaatccgaaaggcactgacgtcaagctctcgccaggttcgtccaccggtcagaccggcatggacatgccgaaaacgcctgagcacaagcagtggaacggcgatatgaccaacggcgtggcgccgtcgagcaatccgaaaggcactgacgtcaagctctcgccaggttcgtccaccggtcagaccggcatggacatgccgaaaacgcctgagcacaagcagtggaacggcgatatgagcgcaacagcacagccgaagcagtggctgccgctaatggcggaaacgccaattaatatctatgcgaaggtgaccattacgttccaggacgaacagctgagttaa

SEQ ID NO: 141186 - DNA, 879 bp, Enterobacter cloacae
gtgaaactgaaaatgcaggatttgaggctgtttaatctcgtgtttgagagcgatcctggctggatacttgatttctctaaccgcaccttgtctgctttttttgatgaagaactaaacattgatattgatgatgaacgttatcaggaagaggggacgtcaaaggccaaacgagttagatgcttgctgaaacaggctgatcgtgagaccgctctgcgggttcttggcgctgtctggcagtataaaacggaatccatgcctgaacaggctgaacaaagccgtaatgactatcttgcactgatttcccgcttagaaaacgctggcaccgatgaagccaaaggcgtaaagcctgtccaggcatggcatggtgttgactggccttcacttatcgctgaaatgaacgagatgaaatctctgccgccacatccacgtggttttcggtttgaagcctggcttgctgaactgttcagtatctttaagctcgctccccgttcgtctttccgaaacacaggcgaacagattgacggaagtttccgactgaatgatgaattttacctgatagaggcaaagtggcatcagaaaagaacgtcggctgccgatctccatgtatttgaaggaaagctcagtaccaaggcaacctggacacgcggtgtttttatcagttggatggggtttacgcctgaaggtctgacggcttttggtaaagggaagcatgttatctgtgtcagtggttatgatctttaccactcactgagtcatggaatccctttgcccggccttctggacgctaaaacccggcacgcagctgaaacgggagagccctatgctgagttcgaccgactatatgcactgaagaacaaacagtttggcacgatgaaataa

SEQ ID NO: 141187 - DNA, 357 bp, Enterobacter cloacae
gtggccgatatcgggcgcaacctggccattaccagtgaacaggacaccgaccgttacgacagcaaacagcaaaacgccagcgcgggcggcagctttaccttcggcaccatgagcggctcggccagcgttaattacagccgcgacagcatgaacagcgactatgcctccgtgaaggagcagaccggcatcttcgcaggctccggcgggttcgacatcgtagaagatagatctggcaatggaaatagatgggagtatattaacaaaccatttatagaagatatcacgctatctaaaaaagaggttgatattattatggctgatgttaaaaaatatgccgaggcttttttaaatgaataa

SEQ ID NO: 141188 - DNA, 249 bp, Enterobacter cloacae
atgaaatatattaatgacaaaatattaaatcttcttaccctatttatcgtatgtgtaatgggaattacatttacatttttatgtatagccctgtcggtagacattttagtttggatacttacgggttcttttgatttaacaaaaatcgagatattaaaaatcattaaaattggctgtgctattggctcttttactggcacgatttttgttattgctaatcttttaaaattaaatgggtttaggggatag

SEQ ID NO: 141189 - DNA, 717 bp, Enterobacter cloacae
gtgtttgttcttgatcaggtcaaccaggaaggtcaggccttttttcgcgcctgcgttatccacgcccacgtctttcacgtcatatttgccgttttcaaacttgaacgcgtaaccgccgtcggcagcaatcagcggccaggtgaagtacggctcttgcaggttgaacatcagagcggatttacctttcgccttcagctctttatccagtttcgggatctcttcccaggttttcggtgggtttggtaccaggtctttgttgtaaatcagagacagggcttccaccgcgatagggtaagcgatcagcttgccgttatagcgaacggcatcccaggtgaacgggaagagtttgtcctggaacgctttgtctggggtgacttcagccagcaggccagactgcgcgtagccgccgaaacggtcatgcgcccagaagatgatgtccgggccgtcgccggttgctgcaacctgcgggaatttctcttcgagtttgtccggatgttctacggtaactttgataccggtgtctttctcgaattttttgcccacttcggccaggccgttatagcctttgtcgccgttaatccagataaccagcttgccttcttcaattttggcgagcgccggtgcggaaaccatcattgctgcaagggcggacaatgcgaaaacgcgtgcgccagtcttgatattcatatctgccatccttttggtgatgtctcgtag

SEQ ID NO: 141190 - DNA, 1050 bp, Enterobacter cloacae
atgaggtttgtgtacatcactttgggtacaccccctattcaaagtttggatattcgcaaaatgccaaaactgactgatatgcagatccgcgcatggattaagagcggggagcgattcgaggggcgggcagacggaaacggtttatacctgcgttaccgtgaagccgacaaaatccctacatggagattccgctataaacttgccgggaagtctcgcgctatgctgattggctcttatgctgaactgtcattagccaaagccagggaatccgccaaagaattatcggcgcgtgtatcgctgggctatgacgttgcgggggagaagcaggaacgcaaaaccgaagcactggcgaagatggaagctgagaagaacgccatgcgcgtttcagagttggcggctgaatactttgagcgtcagatcctgccgcgctggaagcaccccgatatactccgccgccgtatcgacaaagatataaacccctgcattggcagcatgaaggttgaggacgtgaagccgcgccatatcgacgacatgctgaaaggtattgttgaccgtggagcgcctaccatagcaacggacgtactacgctggacgcgccgcatattcgactacggtatcaaacggcacgcgctggagataaacccctgttctgcgtttgaggttgccgacgctggagggaaagaagttgcccgtgaccgctggttaacccgtgaagaactgatcaggctgtttcaggccatgcgtatggcgaagggattcagccgccagaacgagcttaccttcaagctactactgaccttatgcgtgcgtaagatggaattgtgcgctgcccgctgggaagagttcgacctagaccgggcaatctggcacttacccgaagaacgcagcaaaaacggcgatgctatcgacataccgttacccccaccagcagttgcatggctacgggagcttcacacgttctcatgcaatacagcatgggtgctgccagccagaaagatgcaaagccggatgattccccatattcaggaaagggcactgttgcaaagttag

SEQ ID NO: 141191 - DNA, 1785 bp, Enterobacter cloacae
atgtatctgtctaatttaaggatagccaacttccgaaatttcgagacggtagatattcccctggatggtaacattgttttgctgggtgaaaacagagtaggtaagagcaacctgctgttcgctatccgccttgtgattgatccaacattacctgattcagccagacagctaaaattatcagatttctgggatggttgcgatttatccacttcccctcaaattgaaatacatcttgagttcgctgatttcgacagcgacgcttcactctcagcgctgctaaccgattttcgcataccagaaaacccagccttggcgagactcagctacgtctttcgaaagaaggaagatattgcaggagaacccaagtcaagtgaggattgtgaatttatcgtgtttggcggtggtcaggaatcacgcaccatccccagtcgcgttcgtcgccggatagccatcgatatgctagatgccttacgagacgctgaagcgcaactcgcatcatggcgtaactctccgttacgtcctttacttgaagatgcgttcggttcgctaagtcgagtagatctggacagggttgccagcgcccttgaatcagcaacgggtacaatggaggcattcactcctattaagaatcttgaggaatctctgcgtggtggcatccttaatcttgccggtactgctcacgatcttaatgcgcgtcttcgttttgcaccaacagacccgctcagattgatgcgctcactatcaatgttcatcgatgacggaaaaagaggaatcactgaagcaagcctcggctctgctaatgtggcattaatatctcttaaactggctgagtttgcctggcgccgcgccaagaacgaacgaaatttctcacttctctgtattgaagaacctgaagcacacctgcaccctcaacttcaacgggctgtttttgataagctctttaataatgccgataaggcgcagtcactgattgtaacgagccattccccaactctggcaagcattgctccgcttcgttcagttgtacgcctttgtagagatgattgtgggcgtactcacgctttttccctagctaaacttcctgtaacaactgatgaactcgatgatattgagcggtacctcactgcaaccagagcggaattactttttgccaaaggagttatatttgtggaaggtgatgctgaagaggttttaattccgggatttgcagaagccatgggactcaaccttgacgagcttggtatcactgtatgtagtgttgcaggagtgaattttgaaccttacgttaagcttgcaggcagtttgggtattcgcatagctgttataactgattgggatccacttgacggaagcaaacaacctttgggaaaagcacgagccattagtatctgggatgctttctgtgctgtccgtccagaaatgcacaagcttagtgctgaagagaaggcttggtttgtggataaaggttttgaggagtgtagcgacgtatggaaaaaagccggtatatttcttagtccgcaaacatttgaagtttctgtagcaaataccccaatcctgaaagacgcgctacttaatattctcgatgcgcaaggttttggatcacttagatcctccagaattgcctcctggagaaccggtcaggatccagagcctgcgcaactcctcgcgatgatatctgatattggaaaaggtcggctggcggcgaaactcaagaaaaaagcctccggcttagcaccaccggaatacatcgcagcagcgattcagtatgtggtgtccaatgtctga

SEQ ID NO: 141192 - DNA, 1794 bp, Enterobacter cloacae
atgtggtgtccaatgtctgaccggcacgcactgtcaatggcgttaagtgagctctcatcgaataaagagcagtatggcgctgccaccgagcaaggacactgcgttgtcattgccggccccggtagtggtaagacaaaaacgctcacgaccgccatggcgcgagccttgatggatgatattactgatcctcgaggcgttgcctgcattactttcaataatgagtgtgcagctgaacttgaagaacgtctggcttgctttagcattgcctgcagcgaacgaaactttattggtactgtgcacagctttgcattaaaccaagttttaataccctattcgcgctgtatacctggtttgctacctaatgactttcgagtggcgacacgagacgagtgccgtgccgcagttgaggctgcttatctggcaaaatttggcgcaatcggggaccctcatacccggtggaagtttgcagaagaaaagcggcgtcgggacgttaaccgactgttaccatcgtggcggagtaacaacccggagcttgcagatttcatcgaattatatgaagcacatcttaggcgttcaggtcttattgactttgatgatatgccgctaatcgccttccgtatgctcagagagcatgactggatctgtaatggtattcggtctcgctatcccgtcttattcgtagacgaatatcaggatctgggacatgcccttcatgaactagtgttgctgctgtgctttgatgccggaatacggctttttgcggtaggtgatgctgaccaatccatttatggattcaatggtgcaaatccgcgattgttggatagcctcgtttcacgtgcagatgtgaaaacgttccgtcttcgcttcaactatcggtccggcgctaaaatcattagggcatcaatgggagcactgggagaagagcgtaattatcgtgggccagatggaacggcagaaggagaaataggatttcacggagtagaaggtgattatgaaaaacaggcacgttatatcgctcaggatttaatcccctccctgacagcacggggatttaaacctgagcgcatcggagtactttaccgggcagcttggctcggagataaagttgcggatgcgcttaaagccgagggcatcgcactcatgcgtactgacaccaatgcattaataaaacgcaattcacgccttgcccgcttcatcgaggcctgcagccagtgggtaacagggggatggaaagaagcgtcccctgcctttaatttgctgctgggtcaggcactttctttagtctatggccgccgtgcaagccgtactgaagaacaactgctcaccgtacaactcatcacatttttacgaagcggaattgatcaggctgaaactgctcatcaatggcttttgcgattcgacaaagaacttatttccggctggcagataatcacggagaatccccaggttgagtggaatgttgttaaagagctactgaaacgaaccgatcctgcattaaagcaagatatggctctgatcgtatttgccggaaaggaagaaagtaccagacgaattacactgagcactctacatagtgcaaaaggccgagaatttgatgtcgccattatgtttggcgttaacaagtatgattttccgggtaaacgcgaccttgtttcagacaatgcattacgcgaggcacggcggttgttttatgtcggcgttacacgaccacgcaaagagttgcacatggtttatagaaaaggtgaacattccccttggattgcggaactctatcatcgcagccagcagacttag

SEQ ID NO: 141193 - DNA, 723 bp, Enterobacter cloacae
atgatgcaacaatcacaaaccctgttcgaatcgtcgattttatcgacaacaagttttcgtaccgtctaccatgaatacggacgttacaaaaccatcaatgggaactcctttgttcatgatggtcatgaataccggattaacacaagaatcggctctggtgttcgtcatgacatacttatgtcaacaatcaacgaactgaacgcaatcctgaagctctacagtcgagtgttcctgacccgttttgatctccacctccctgagttcacttctgttgaagcaggtaacaaatacatacgcaacctgttcaaacgattacgtgaccgcctggagtctggaaacaacgggttatcagaacctatcattgattttgcttacggttgggtttgcgaacaggaaaaggcttcacaaccccattaccattgctggattgcacttccacatcgttcggtaagatggtttggaacgccagaaagagggatcgctggtattattacggaaatctggatgaaactgacaggtggtaaagcaacgctggtaaacttgtctaaagccactaaagactatccagatcactacgtcattcatcgtgaaaatccttcaacactcgaaggtccggtcttctggctttcttacctggcaaaagaacgcggtaaagcgcaaacagggaagggaacacgcatgtactcaacatcgaaattgagtcgtaaagcactgaattcgtaa

SEQ ID NO: 141194 - DNA, 687 bp, Enterobacter cloacae
atgacgggcttgtctgaaggctatgccaactgggtggatgaagcgacagattactcttccatggcagctgacgggatgaagcaggcgatgggcggggctgttaccaccattactgacatgcttaacggtaacgtagacagctggaaggactggggggtcagtgttctcaaaattgttgaaaatgttgcaatcaacatggctcttgctaacggcgtcagttcaattggttctctcttcagcttcggtgcatcttccgccgctgccgccagtagtggtaccgctattcagaatgctggtgcgaacttcacctttaatgctaaaggtaatgtttacgactccccatccctgagcgcctacagcaacggcgttttccagacgcctcagctttttgcatttgccaaaggtgcaggtgtatttgcggaggctggacctgaagccattatgccgcttacccgtgctgctgatggttcactgggggtgcgggcgatgggtgtccctcagaatgtcgggggtaacaatgtttatgctccggttaccataaacagccagggtacccaacaacctgtgggtaatcagcaggcactggcgaaagcataccagcaggccatagaagcaggtgttaaaaaagaaattgatatccagacgcggcctggcggctatttgtggcgaatgatcaaaggagcatga

SEQ ID NO: 141195 - DNA, 861 bp, Enterobacter cloacae
atgaacattttatcctccggtgaaatgtcgataccggaaaagctggcttcctacaacgagcagcttcagggggggcaggaacatcgtgcaatcagcctgaatattctgccggaagacgcagcaaaagagggggaatccgtagaagaggttcgtcgccgcgctgataccctcaaagcagaactggcggaacagtatggcacggcaggaaaagcgtttattgctcgttttctgtcgcagcagaatgatgatggtagcttgatgtcatacagtgaattatccgagcaaataaaagacacgacaacagtatgttgtcagatgctcgcgaaggaactgcagtcagacggatatgttctttcagatattcagcaccgggctttaaagcgttttgcgctttgtctggcggcaggggggatggcagctgagtgggatattttgccgtttgagccgcaaatgatcaaagattcggtgatgagcgcggttcgccgctggctggatgatggactgaaccagtacaacccggttaaagaagcattaagcgccattcaactggaacttatcaaacgacaggccgcgcattttgtaccgctacaggataaagaggcctatatacccagcaatcactgggggtatacacatcctaaaactcaggatttgatgatttttgcgcctgtatttgacgactggtgcaggcgacataaccgtaaatccgcagaggtagctaagctcctttctgccaaaaattatcttgagccggaaagtaaagggcattacaaaaaacgtgttcagaacagtgatgttgaaggtgttttctaccagataaaacgatcgtttctccactgtaatatttcagccgagttctga

SEQ ID NO: 141196 - DNA, 975 bp, Enterobacter cloacae
atgaacggcgatatattaaccagtctggccgacggtattgatctgtcacttaatcagtttcttgcgaaaaagtcgctgaatgaggcgcgtgtggcacgtattcttgacaaggcaataaacattgaactggatgaagatgatccgtcgcagagtgggtgtgcaacgggacttcctgcgggccactataacgggagcgctggcgctttttttgcccgaggcaaaaaggttgtacaaatcagttccacggtcattattccctgcgccagacgctgttctcaaaacaaacagctcaatatgagcgttgatctgatgaccatcaatcacatcgggcaaaaggtcgttgtatcggtatcgctggacgaactggcaagaaacccggaactggtcattgcggatctggttgccaaaggctttggcgtcacgacgtttgttcattcaagaggttaccttgagaggtttatccatgcgtgcatgaagatggcgctgccaatgtatctggtggcggagtctatggggatggtcgaaggagaagcagcctttttgcatggtgatatgccgcttgccagagggatctccggttttgattaccttgttcctcataaatcggctttttcgggcattcgcccttctggctcgttagccgggtggaagacagtgatcaaagataatgcacacggatggcctcagttgttcgcactcagtagctcgttagcgtcaacactgcttggaatggccgggatggatgtggcgttgtttcatttttatggcggttcaacaacggggaaaacagttgttcttcaggtgggaatgtctgttcatgcccatggcggtgaacctggtagtcatccggatgtagctatcctgcgatggaatacaacagataatgcacttgaactcagtctgagtgagttttcggggctggttgcctgtattgatgaactgggtgcttacaatgaccgaaaattctcatcatag

SEQ ID NO: 141197 - DNA, 1272 bp, Enterobacter cloacae
atgcaacacattgtcaaagtagtatttacaacctttctcttgatttgcagcacccttgcgtatgcacagcgtttaaccgttcccgcatacatggaggacgctgtgtcctgtacaacacaacctataagccagtcccttattcagagcgttcaggctgaatgcattctgaagggcaaaagtcgtgaactgagcgacagcagaactacgggttttaaggcgctggtcagtaaacgaggcaaggtcatgtttgccgcccgtttcagttgtggcgggagtaacgtatatcgccgtctgggtgattatccgacacttaccatcacgcaggcgcggtcagcagcacaaaaactaattgcagatatgcgggcagagtaccagctacgtggtgctaacctgttcgtttcgcataatttgctgttcagtggtctgctggagcgcttcgaacatgatgttctggacgctggtgtaaagcgttctgccgataccgatcgttcaaaaatccgtaactatctgcttccccttcttgggcattttaagattcatgatatcgatgagggcgttatcgggcgttatctcaatggcctgagcaatctgaaaccagccacacgtaatcgtcatctggctctgctgaaagccatttttggttatggtcgcagaatgaagctggtgacgacgttacccactgagtttatccggatgctgccggaaaccacgtcccgtcgcagggcgatgagccatgaggcatttcagcgctggtttaaggcctgtgagcaaaaacaccacaaggaacccgatagtgcagcggtcatgctgctgatgtttctgggcttaaccgggcttcgactgggggaaactcgtcaccttcgtctggaggatgtggaatggtcacgtaaggtcattacgctcagacagaccaagaacggcaggcagcgccatgtcccggtgtgtgataaagcctttgtgctgctgacagaagcgcgtcagttcctgggggatagcggctgggttttccctggaaaaaacacggataatccggttgcagaaccccgccgtctgcaaaaaacactctgtgaaacagcgggtatcccgccttataccatccatgagttacgccactcttttgcgacaatccttgtcgaaagtggcgcggatatccacatggtcaaggaactgctgggccacagtacgattaaagtcactgagatctatgtgcattccagtccggagcgatatcacgctgcagtcaatcaggcaatggacgttgttaattcgtaa

SEQ ID NO: 141198 - DNA, 183 bp, Enterobacter cloacae
atgagtgtgaataaaatcgaactggaaaacctgaaacgtgacctgaaggcaattattgatgcagggataagcccttctcacgcacttgaagcattgaggcttattgagcaacgcaggatcacttccagcctggaatacctgggatcaatcatggaacacgcaccgtggaatattaaaagctaa

SEQ ID NO: 141199 - DNA, 1752 bp, Enterobacter cloacae
atgaaaaacgcgcctaatgtgaaaaccctcccgcgcgacaaaatggaggaggccatcatctttgctggaacgggagcatggaaagccgctcaggattaccagaaaggcaagggcgagcatggagacgatgttccacctgtggttctggatcacacccaactggcggaattgccacacctgcgcattgttgataaaggccgtcggtttgctcgtgtctgtcaggccggacttatcgagcaaaaccaaatcagcatgattgcaaataagctgtgtgaggctggcgttaccaatgctgagtttatcaacgaaaaaggtgagaaagaggactggacgccattaatgaagcgtttggaagacgagcccctaatggtgactacgaggggtagtgctacgccagcgcttaaccagatgggagccagccagcgcggggaggttctgcttgctcattacgatggcaatctggcgatccatgctgattctgacacggttcatcattacaacggcgtggtgtgggttccgctttcggataaagagctacagcgggaaatggcgcaaatttttattgatgccgaagtcgcctattcgcagaacgcgattaaatccgctgtcgatacaatgaagctgggcctcccggtaatgggtaacacagcccgtaacctgattggtttcagcaacggggtttttgatacccggttaggccaatttcgaccgcatgataaaaaggactggcttatcgttgcgagcgaattgccattcagcgaaccagcagaaggtgaaactctggcaacccatgcgcctaacttctggaaatggctccgccgctctgtggcggataatgaccgaaaagcagaccgcgtactgtctgcgctgtttatggtgctggcgaaccggtacgactggcagctgtttcttgaggtaacggggccgggcggaagtggtaaaagtgttatggctgagatctgcacgatgctggcgggcaaggccaacaccgtatcggcgagcatggcggcgctggagaacccaagggaaagggcgctggtagtgggctattcgctgattatcatgccggatatgacccggtacgctggcgacggcgcagggattaaagctatcactggcggggataaggtggctatcgacccaaaacacaaagcgccatattcaacccgtatcccggcggtggtgcttgccgtcaataacaatgccatgtcgttcagcgacagaagcggggggatttccagacggcgggtgattttcaacttctccgaagtggtaccggaaaacgaacgcgatcctatgctggcagagaagattgaaggtgagctggctgtaatcattcgccacctgctcactcgcttttccaggcaggacgaagccaaacagcttttgcatgagcagcagaaatcagaagaagcgctggccatcaaacgtgaaggggattcactggtggacttttgcggctacctgatggcttcggtggtttgtgatggaatgctgattggtaatgccgagatcgtgccattcagcccgcgccgttatctgtatcacgcttatctggcttacatgcgggccaatggtcttagcaagcctgtatcgttaatgcggttcggtacggatatgccaggcgcaatggctgaatatggcaaggagtaccagaagcgcaaaactaaacatggcataagatcgaacgtcaccctgcatgatgattcagaagactggatgccaatgtgtaccgatacaacaaaagaataa

SEQ ID NO: 141200 - DNA, 192 bp, Enterobacter cloacae; identical to SEQ ID NO: 20383

SEQ ID NO: 141201 - DNA, 216 bp, Enterobacter cloacae
atgagacaggttccttttgaagtcctgatgcacgctgaaaatgccctttcagaaagtgagtgcgcaatgtctgtgctgagcatgtggattgacagcattcccgacggtgaagaacaccgtgaggaagcgtgccgtgtcggagcaattatgtctctgctgcacaaatctatcggcgagctggtgaaggcgcgggaggcttacagtgcgaaatcctga

SEQ ID NO: 141202 - DNA, 192 bp, Enterobacter cloacae
atgaaagatcataccacacacccgcaagggcggaataactacatctggcgttttctcgcactgagcgccatcgggcgcaacgtcattcacatcacagctaccactgagcgcgaagcccgtgagcaatcaccggcaggctgcgtgatggtattcgctggccgtctgccagttcgggaggtgcgtcatgcgtga

SEQ ID NO: 141203 - DNA, 204 bp, Enterobacter cloacae
atggctacaggtaataaaaacaataaatcttcgcgtgtaggtatccgttttccgtatgacctgattgaagagattgacgccagcgtagagcgagagaaagcagataacgccggagctaatttctctgcgtgggttctggatgcctgcgggcgcaaactcaaatctgagcagcgcaagaaagccagatcggaacctgaaagctga

SEQ ID NO: 141204 - DNA, 807 bp, Enterobacter cloacae
atggaaaaaataactgccttggctggcagcggccaaactcaacccgaaaccagccagaaagatatttccagcgataattttgctgcccggatccctgtaaccatgagcactattggtgggaaagaaactcagtctgtaagtggtcgtaagctgcatacgtttctggctgtagggcgagactttaccaactggatcaaagggcgcattaagcagtatgggttcgttgaaggggttgattatgtgattgtcgaatatttgacctcgccaaaacgggcgagctcaaaatctcgccagcgtatcgagcatgactacattgtcagcctgaatatggctaaagagctttctatggttgagcgcaacgcgcaaggcaagatggcccgccagtatttcatcgactgtgaagaacgtctgcgccgcgtagcgccagaggaacatgaggcggcgttgttgggctggcgtaaaaatcgtgtagctgcctgcgaagatcataagagtatggccgatgcaatgaagggctacatcgagcgcaccggcgacaggcagcatggctttgcctacagtaatgaatgctcattcctgaatagccttgtgctgggtatgcacccgcgagtgtgggcgaaacaaaaagagattccggtaaagcaggtgcgtgaccatatgaacgccaatcagctggcgcttctggcttatctggaaagccgtgattgtgctctgctggatcttgatacccgtacggcaacccgtaaggcgaaactcaccgaactggcacaacgctggctggttaagcgtgttggaggggctgagtga

SEQ ID NO: 141205 - DNA, 840 bp, Enterobacter cloacae
atgagaattagcaaaaagaacgatttacctaaatggtttgatttgaaaaagtatcatgctttcgaaagaatgtctgatgctgaattgttttttcaattatcagctcgttgggatttatatgtatttagtgctcttgaagaactatccgaaattgaaaaaagcctgaatgaatgtgttatctctgatgcagagctgaaatctgaactggtcagaggggatattgatgatggggttgaatcgtttgggatgctttcaaagtcaagggccgtttcgcctttgtccatctatgaccattatagtttgcatgtcgatgtgaatgcgtatgcgaaagaaaatgagctggatttgaatgccggtctactttctaaattcctttatcatcctagaagtgtgaacgggattttagacagggaaagtgaacattatatgtatatgaaagttgatttgaattggcctgataatttaattatcgctgacattcaaaaacttttaccaatgtggcgagaaagcttgaattataattcacaggctcaatgtttgagttatggctgggatttggcaaaaaagaaacttatcgattattcattgttcccacttattgatatgttgatttgggaaactaaaacagagaataccatcactcactctgttaaggccgtggcggtgtacccagatggcgagtatggggaaaacaatatcacccaaacgatcaagcctaatctggaaaaaatcttcaacttttattctatagaaaaaattcggcgcgaattaaatgacagaggtttactacctaaaaggccagcagattattttcatacgccaactcaggaagacgaataa

SEQ ID NO: 141206 - DNA, 534 bp, Enterobacter cloacae
atggcacttcacagcaaaaagctctcttttacccggccaatcatgctcagcttcgcggggatcctgtgcagttttgcgctgatcgcggtcgtggtctctctttcgcaaagaaaggatttccttgaggattatcacaagattaacagtaacttcacgcataacctggcggttaactataccgaatcaatcctgcgtgaaaacgactatatccttggtcgctctgcgatgtactttgcccgcagcgagatactgaatgagacgctcaacgtcaacccgacgcaagggctgcagatgttgatgcatttgcaaaacctgatgccgaccgtgtcatccatctcgctggccgacacagaggggcattatttacacgcaccagaagcgcctcccacggaaaagagtaaaaacgtcgatccgcggacgcgcccgtggtttgtcgcgcacgcagaagccagtattttcagccattatacccatcattatacggactactttaccgggcatccgacagttacgctttataagccattgatttaa

SEQ ID NO: 141207 - DNA, 543 bp, Enterobacter cloacae
atgtaccagctaaagataaccatccgagacagcaaaccaccaatatggcggcgtgtgctggttccagagcaaatcccctttagtgaacttcacgcggtgatccagttggcttttggctggaatgacgaacatctgtatatgttcgagaaaggtcgtaaaggtgatcccggtagcgagtatcgcgtatggggtgaggatgaaagcatgggtaatgcggcaatcacgccactatgggcagcgctccagaatgatggtgacaagctggtttacacgtatgactttggcgactggtgggattgcgtcattgtgctggagaagcaaacacacgatacgagcaatcagcccattagctgcctgcgtgggaaaggcaccaccccggcggaaaactcaggcggcttgcatggttacaatgaattgctattacaggccagagagtctgataatcctgagcaggccgagatccacaatttcctgatgctggatattgaacgccgggtttacgacctgagccgcatcaacgacagattgcaggctcttaactga

SEQ ID NO: 141208 - DNA, 360 bp, Enterobacter cloacae
atgagaatgaccagccgcaaaaaagagatactcagttactttgagccggatagcctcgattgggtgacgggtgagattggcgctcctccgttcgatgtgtcgggcgtggcgtacctgcttcacggcatggggtcgttcgataagcgccaccagctcgaatccacccggcgaactcttgaaagcatggttgccggggggctactggaacgtgtgacagtgtatgaatcgcggcaggtaaagcgtggcggtgaaactaacgcaacggtcgtgcgctacggtttacccggtcaatgtgccgttgtgcgcgataatggcggcgctgataacgcaatatcaggcgaatatatgcgggtcagttaa

SEQ ID NO: 141209 - DNA, 738 bp, Enterobacter cloacae
atgaaaagaaccgatgaaaagaagtacgagcttcctgaaagattatattatccgattgatattgctgcgcaaaaattacattgctctgcgagagatatttttcattatgcagcgactgaatcgctaagattgtgtttttactgtgatattgtgcccgacgaaaatatagggcgaatggttatgaatgttccttttggttttcatgaggatattggcaatgcaactaatattgttgatgagcattggcgcatttctatttctaacatcattaataaagatggtgattttggtagagggtataacgtcgaaaaggttaagggctttttctatattgggccaattgactgcatagatctggagtttacagatgaagacgactatttctcagtgtcaggtatatctactgagccagatattacatcagaagaagcacttgtagttctctttgaaaaggactttagaatttcaaagagatttctttgcgtaatggctgagcaattggaagacataaagcaggaaccatctttcccgtctatggatgagtctggaaaaacagttgctaaaaaaggcgagttaattaaatgcttattacgtctcattgatgatatgtctgatgtagatttcgataatacccctgtatcaaaaatcgtaaacatcatagaagcaacagcagcgaggaaaggtgttgacctcccggaaacccaccggcagacatggcagaaatatttaggtaggtga

SEQ ID NO: 141210 - DNA, 249 bp, Enterobacter cloacae
ttgaccaccagctataggcctggtatgctgattctgttctttgttttcggtactacactggcggccctgcatggtcgcctttgttttttgtgccatacctcccccttaagctgctttgcagcggctttgctgccactcagaaacttcagagagaagccaacccacagcacggccacccagtttacggcgggctgggaattgaccttctttttccatcatgtagcgggttgtacggcagatgcctgttaa

SEQ ID NO: 141211 - DNA, 312 bp, Enterobacter cloacae
atggctacaggccccaaaaacacgaagtcacaatcattaaccgcccgcatcccacacgatgtcatagagggaatggagtccgtcaaacggaacgacgaaagcaatgcagcgttcatcgtagccgccatgcgcggggagatcgcccgacgccaagcagaaggaaacggggaaaatatccttgtttcttccctcgatacgctagcgcaggtagaaaagattggagtcaaagcctccgaagagatcggacaacttatcagcgttgttcgtgacgaactccagcgcaggaaggccaaggaagccgacaaggagtga

SEQ ID NO: 141212 - DNA, 186 bp, Enterobacter cloacae
atgcgtgaattaaccaataaaagcacgtcaatagcctgtgaactggctgttttgttgatggttgttgaagagtgcgaaattgattccgttgggcgtgaaaaccttatcagtctggccagacgagtatcggatcaacttgcggcgagcatggtggagcagaatgaaacgggagcgctcaatggataa

SEQ ID NO: 141213 - DNA, 255 bp, Enterobacter cloacae
atgagcaaagaaaataagaccttgatcgagcaaattgagtccgaaatcagactttgctttttggggtatttgcatcctgatatgccccgtgaaattgcagagcaggccgcttcagatatggcaactgaggcgattgggagaattatagagcatggcgctagcgtggggctttcagaagtggaatccatgcgccacttgctgttatcaatgaaaagggccggaaatgttgccacactcggaaaaactatccactga

SEQ ID NO: 141214 - DNA, 300 bp, Enterobacter cloacae
atgacaagcaaaagtgatgacgttgtttattcgaaggtactaatccataaaatggtagagcataaaaatatgtttggcataccagacagtaaagcagaattgcagatcatgccgctgagcgattatcgcgaaatggtgaagagagagtctttcttctttgtcgaccacaatggcttcctgcgacatcaattttccggcgaacctattgcagccagcaaagagcaactggatatccttattggggtactgaaggctaagagagagcttcttgatgatgctctggattgtgcgaaagattag

SEQ ID NO: 141215 - DNA, 2262 bp, Enterobacter cloacae
atgaagcctgaacagttaaaaaaaatagagtctttgcaacgtgaagttgatgatttccatccagttttaagagcactttttccaaaattgccaacagtgacccatgttgaatataaacaaggtcctagcgaaaaagggtccgattttgtaataataaaaagagatgatacacttgatgaagaaatatatattggcgttgtctgtaaagtcggaaaaatcacccaatcgaacaatgaggttgaacgtcaaatagaggagtgtaaaattttcccaaggttaatctcatcgggttcaaaacatattcatttgaatgagatttgggttgttacaaactcgaccatatctaataacgctcaagaaaaaattcactacaagtttaaatcaacaaacattaaatttattgatggcgaaaaattatgttctttgatatctaaatattaccctgagttctgggattttgaatcaatcaattacgaacattacttggctgactctttgaacatgatgagttctctacctgaaagctcattctttggtagcattggcataaacaacctaattgatcgctatgtttctaaagaggatagtaaaaaaagaagacatcgccccttgaagctttttagcgtcattaaaaatgaacgtttcgtttttttggaggggaatgttggtgcagggaagagtacattaataaagcagttaattgagaaaataaaagcagaatactcttatgagaaagattataccttaccgatattctgtcaatataaagatttgattgataaaaatctagaggtggaattaattatttctggagtattgtcagagtataaaatacaacatgaaggaaagattctatttatagttgattcagttgatgaagtcaaagagtcaatggaggagagacagtcaaacttccgcaagatagttgaacaaatatcaagaaacgatcaattaagattactagtggcctcaagggttatggactcgctcgaggactatgaaataattgataaaatgttttctagatattctataattccacttacaacatctcaactcattgattttgtggataaaatctgcaacgatataaaaatcactcataagttaaagaatggaattgaaaaaaccccattatttaaatttattccgagaacccctgtaagtgccattcttttggcgagaatactttctgatgagattaaagaactaccatcgaccatgactgagttgtattctaaatacagtgaaattgtactgggtcgatgggatacctcaaaaggtttgctttcccaaaccgaatatgatgttattagtaatgttttaattgagatctctatttatatgatggataatgctctggcatgcatttctgtatcagaagttcaggatatatttctaacatatcttgcaaaaagaaaccttaatgtcgatgaagaaaagttattcaaaagattaatatatcgtagtgaggtcacctgtgtaaataacaggacgaacacctttactttcctccatagatcattcatggagtacttttatgctgaaggcttaaggaagaaaggatttgtagatataaatgataaaatatatgaaatttactgggcaaactgctatttcttttattttggcttgcaaagggacaatgaatatctaattgataaaattaatgatttcaagcctgaagatgataggacaaggtttctaagactgttctacaatggttcattcttccttgcatcgtatctcacgccttataaaaaaataacaaagggtgtgctctcgtcatatgtagacgctggtaaattatatgttgatattctcaagggtaatacagatataccccttaaggaatttacgcctgtagcattattatgtatttttacacgctgcctaagtaataattattgttacgactttttcaaaccagctcttgaggatttattagtagccattgaacaatatgatgagattggtgaacacatagattacgcaaagtttttcatagcagctacattgaatgaacttggggataaaaatgcttttgatgatctcatcgaaaataataatctagacattctcatcaatcttggcatcacacatgtcacagaggattctggaatgattagtgttgcagttgataaatatctcaagaaattcaatcgcaaaagaaagaataaccatgatatgtcagactatatatctcgtctctatgaggaatcgtcatctgaaatgcgtcaatcaatttcaaaaaatcaatag

SEQ ID NO: 141216 - DNA, 303 bp, Enterobacter cloacae
atgaatacatcatcacatgaaagcgagcgcgtcccggtttcacttgaaaccgtctggcgggcgctgaccgccctcggtcatcagcggctctggctccgccctccggatgagcggagcgtgaacacctggctgatcgtcacctgggacggcctgacggtggctgagcgaatcagaaattccggaacgtggtggctggccggggatgcgaatgccatctacaccaatccggaacggatcgtcccggacgggctggaagagctcaccttgctctctgtgcagcggcgaatgaaggacggattctga

SEQ ID NO: 141217 - DNA, 312 bp, Enterobacter cloacae
atgggaagcatgaaagaccagatgatggatattgaatctgaacgatttgataaatggcttgcggaaaattctccggatgttgtacccggctcagaagaatgggaacaggccgctaacctttattactgggaacaggagtatctcgccgatcaggctcagtgggatcatgaacacgggctgtttgtggcttccctgaacaatgttcatcagcgttaccttcacgccaggcaggagttgaaggggggctgtataccctgctcgatacagagcagcctgaactggtgtacaggatgtctttcgtccatgccgtga

SEQ ID NO: 141218 - DNA, 780 bp, Enterobacter cloacae
atggtcgaactgcaacatcaacggctgatggtgcttgccgaacagctccagctggacagtcttatcggcgcagcgccggcgctgtcgcaacaggcggtggatcaggaatggagctacatggacttcctggagcacctgttacatgaggagaaactggcccggcatcagcgtaaacaggcgatgtacacgcggatggcagccttcccggcggtaaagacgttcgaggagtacgacttcaccttcgccaccggcgctcctcagaagcaaatccagtcgctgcgatccctgagcttcatagagcgtaacgaaaacatcgtgttgctggggccatcgggcgtgggaaaaacgcatctggcgatagccatgggctacgaagcagtacgggcgggcatcaaggttcgcttcacaacagcagcggacctgctgctacagctgtccacttcacagcgtcagggccgttacaaaacgactctcaatcgtggtgtcatggccccgaagctgcttatcatcgatgaaataggttatctgccgttcagtcaggaggaagccaagctgttcttccaggtcatcgccaaacgttacgagaagagcgcgatgatcctgacctccaacctgccgttcgggcagtgggttcagacgttcgccggtgatgcagcgctgacatcggcgatgctggaccggatcttacatcactcacacgtcgtgcaaataaaaggggaaagctatcgactgaagcagaaacgaaaggccggggttatagctgaagctaatcctgagtaa

SEQ ID NO: 141219 - DNA, 657 bp, Enterobacter cloacae
atggcggtgatcaatgccaaacgcgtataccgcatcatgcgtcagaatgcgctgctgcttgagcgtaaacaggaaataccgccatcgaagcgggcgcatacagggaaagtggccgttggagaaagtaaccagcggtggtgctctgacggcttcgagttcagctgtgataacggtgaaaaactgcgggtcacgttcgctctggactgttgcgatcgcgaggcactttactgggcggccagtaacggtggatatgacagtgaaaccgtgcaggacgtcatgctgggtgccgtggagcgtcgcttcggtaacagcctgccgacatccccagttgagtggctgacagacaacggttcagcctaccgttcttatcagacgcgtcagttcgccagaatggtaggactggagcctaaacatacggcggtacgtagcccggaaagcaacgggatggcagagagcttcgtgaaaacgatgaagcgcgattacatcagcatcatgccgaaacccgacgggttaacagcggtaaagaaccttgcggaggccttcgaacattacaacgaatggcatccgcatagtgcactggggtatcgttcgccacgggaatatctgcggcggcgaaccagtaatgggttaagtgataaaaagtgtatggaaatatag

SEQ ID NO: 141220 - DNA, 366 bp, Enterobacter cloacae
atgattgatgttttaggtccagagaagcgcagacggcgaagtgttcaggaaaaaatcaccattgttcagcagagttttgagcccggaatgaccgtgtcgctggtcgcccgtcagcatggcgttgctgccagtcagctgttcctgtggcgtaagcagtatcaggaaggcagccttacagccgttgccgcaggagaacaggttgtgcccgcgtcggagctggcatctgcgatgaagcaaattaaagagctgcagcgcctgttgggcaagaaaaccatggaaaacgagctgctaaaagaagccgttgaatatggccgacaaaaaaagtggatagcgcacgtgcccttgttaccggaggatggcgaataa

SEQ ID NO: 141221 - DNA, 462 bp, Enterobacter cloacae
atgacagcacagatatcagcctacgggcgtttagtcgcagacccccagacccgcaccacaacgaacggtacaagcatggcaatgggacggttagcggtggcactgccctgccatgcagcagagggcggagaggttactttctggctgggcgtggtggcattcggcaaacaggccgacgcactggcaggacacgttaaaggcgatttagtcagtgttgccggagcgatgcaggtcaatcagtggacgggcaaggatggcggtacacagcaggggtatcaggtagtagccgacagcgtgatcagtgcgaggacagcaaggccgggcggaaagcgtggcgcgtcagctagcaaaaatgaagtcaacaaaggccataccacgcaacccgcgccgggatgggaaatatataacacccctgatgattttgaccagcgcccgccgtttgatgatgaagatccattctga

SEQ ID NO: 141222 - DNA, 591 bp, Enterobacter cloacae
atgagctatcacgcagaggcaacgccgcacggcgtcaatatcatgacccgcaacgatgccgggatgtatgagcatgtagccattatcacctatgagagcgctgtaagccgtctggatgcgggagagtacgacgatacgcccgatatcggctacgccattcattttgccgttgctgatggcggggcgcgtggctggatcaacttcaccccgcagcatgaagtaaccatgtggcgctggctgattgctgcgacgttcgtttctgagatgaagcgcgaaaacggcacaaccaccatcaaggaggatgacggcaaatcgtcgctggtgacgttttattcaaatggcacggaggggattgtggtttacccgttcgcggaacgtctggcgatggctaacaacatggaaggcgcaatgattgagcgctacggcattgagcagggaacggcgaacgccattgttttttatcaggccatgctggacacggagcgcggcgagttgaccccgttcgggcgtcagacgctggcagagctacacgatggattcattgccgatctgaatgaaaacggctggcctgaaatgccagcggcgcactaa

SEQ ID NO: 141223 - DNA, 222 bp, Enterobacter cloacae
atgagccagttacaactgattgatgccacccgtcagattgaacaggcacaggctgttttatccatgtggctggagagcaccaccaaagacactagccccgaccttccgcgtcttatcggttcaatcctcactttgctgcatggcgtcccggaggcaatggaagaagccgaaagcaagctggctgactatgtgatgcgtgaatatcgggagggcaagtcatga

SEQ ID NO: 141224 - DNA, 435 bp, Enterobacter cloacae
atggaaaagaaaaaccgccccgtacagcaggcggctaactcagatattcgcacgtctgatattacgccgaccaccagcccggtacaagtacctaagcgaaccccaaagaaacaccgcgcccgcgtctatatgctgcgcactggcgtagagggatggacagaaaatgatattctgcgctactgccgtctttcatccgggcgtaattatgcgtctgaactggagcgccagcttgatattcaactggagcgtatcgacgagaaaaacccggatggtatcggcgcacacctgcgctaccgcttttcctgccgtggcgacgttctcaaggtgatccaacttgtgaaccataatgccgccattaatgaacatcacgggctatctcagcaggatattgccgacattctgaacctctacccggacgcatttaacgccgcataa

SEQ ID NO: 141225 - DNA, 219 bp, Enterobacter cloacae; identical to SEQ ID NO: 130971

SEQ ID NO: 141226 - DNA, 1152 bp, Enterobacter cloacae
atgaacgatgtcattcgtgactttttcaaaatggaatcagctggtggtattcttctcgtgattgccgcggcaattgcgatgaccattgctaactcaccgctgggcgaaacttatcaatctgtactgcatacttatgtatttggtatgtcagtttctcactggattaatgacggcctaatggctgttttcttcttactcattggccttgaagttaagcgagagctgcttgaaggtgcgttaaaatcaaaagaaaccgcaattttccctgcgattgcagcggttggcggtatattaactcctgctcttatttacgtagcctttaatgccaacgatcctgaggcgatttctggttgggcaattccagcggcgacagatatcgcttttgctttaggtatcatggcgttattaggtaagcgtgtaccagtaagcctaaaagtgttcttgctggcggttgctatcatcgatgatttaggtgtagttgttattatcgcgctattttacaccggtgacctgtcgaccatggcgttgcttgttggcttcatcatgactggtgtcctattcatgttgaatgcgaaggaagtaacaaaacttacgccatacatgatcgtcggtgcgatcttatggttcgcggtgcttaaatctggtgttcacgcaacattggcaggtgtagtgattggttttgctatcccactaaagggaaagcagggcgaacattctccacttaaacatatggagcacgcgcttcacccatacgtggcatttggtattctgcctctattcgcatttgccaatgcggggatttcgttagaaggcgtatcgatgtcaggtctaacttcaatgctgccactcggtattgctttgggtctactggttggtaagcctctaggtatctttacctttagctgggcagcggtaaaaatgggcgttgctaagttacctgaaggcgttaacttcaagcatatctttgcggtatctgtgttgtgtggtattggctttacaatgtctatcttcatttcctctttagcgttcggaaatgtaagtcctgaatttgatacctatgctcgactcggtatcttaatgggttctacgacagcagcattacttggctatgccttactgcacttttctttgcctaagaaagcgcaagcgtaa

SEQ ID NO: 141227 - DNA, 465 bp, Enterobacter cloacae
atgtaccggcttctgctgctgaacttcgtggattcatttatcgataactgcattctctcctgcgtcgatgaaccggcttacggtggtatcgtgcagtgcgaactgctttttggccttgccgcacacagcggtatctatgtgggtaacggcgatattgttcatcttgatggcgatggaaccgttatcaaaagtaaggctaaaggttttcttgaccggctcgatggctggaactccgctatctcggtgtataccgactgtatggatttgacgcctcagggttgtgcacaggccgctgaacgggcaaaggcggcagtgggtcagcgctatccttatagcctgctcgactttaactgccaccggtttactgcccgctgcgttaccggcgattcgtgccctgatatctggcttgccagacacctcgattcttttcagaaaggggaccgatggcgcgtatggcaacgatga

SEQ ID NO: 141228 - DNA, 240 bp, Enterobacter cloacae
atggcgcgtatggcaacgatgaaagccagccgttgcaggcaacgtgtcaccggacagggagaacggcttatccggctgaccatggcgctgttttacggtcagacaatatctgttcgctacatcatccggcagtttgacgtatctccccggaccgcaagacgggacctcgctcaactggcctttgtgctggaatccgctggccctcacctctggcgactggctccctcgctgaaaccctga

SEQ ID NO: 141229 - DNA, 384 bp, Enterobacter cloacae
atgaaaatttttaaactgttaaccgccacaattttgctttcagccttcagccacagcgcgttcgccgacgagcaggctgacgctcagatgattgccaattcgaccttctgcgcgatgtactccacccgcctgacccagaccagcgacagcggccttcagttaaaaggcgtcaatctcaatgcccgcatcaacggaccggtattcaacagggtacttcaggtgatgaacaaaacctatggcagaacctggctcgaatcaaatgcccgtaacggcagcatgaccgccatgcagctttcgcagtcggagcttctgtataacccggaatatgcccggcagtgcgattcttttgcggataaagtggaaaaggaatggcgcggaaagtaa

SEQ ID NO: 141230 - DNA, 750 bp, Enterobacter cloacae
atggctacctaccgacacgaccccgaccttgagtttctgcgccactgccatcgtgacgatctggatttactggtttctgtgcttatctgcgatccaaaagacggactggcacgcatcacggaaacgctgacctacgatcctcagtataaaaaacacaaacccaaccacccgcgctactgggatgccattgccgccgaggttcagacgtttggggcgaacagctttgccacgctgctccgctggggcaaaggggtgctgtaccgggaaattcttaccgatgcctgcgataaaatgaaggtgaactacaacagcaaatccagtgttgaaaccattgaaatgaatctgctgatgaagatcctggagaaaagccttgagaagatgacacccgctcagctaaagaccgtggcggaagaattgcagacaggctacagcaaccccacgccggagttgctgaccatggcaatccaggcggggataaaaacatccgggtttgcagcctatcagatggcgcttgtggtcacaaatggtgtggcgaaagccctgttaggcagagggctgaccgttgcaggaaatgccatgctgacgcgtaccatgggcgcttttgccggtcccgtgggctgggtgctcagttctctctggctgctgattgatttagccggtcccgcataccgggtgacgctaccatcctgcatttttattgcctacatgcgccagaagcatctttattcacctgagaatactgacgtttag

SEQ ID NO: 141231 - DNA, 714 bp, Enterobacter cloacae
atgacgctgataacacaagaaaatgaacatgacagactggcaacccgcctttccatcatcctgagccgtttgtttcagggtgaaaagctgcatatcgggacgctggcagaagaatttggagtgacgacgcgaacgctgcgacgggatttcaacgtccgtctgacgtaccttgatattgaacagagcaacggcgtgtatcagcttgcctcacattactttcgtcgccgcacggaacgggatatgaagatactggcgaggttgctgcatcttgaccgtctgttacccgcgatggatgccaaactgctgagccttctgcttgacggggagcacccttcaccctaccggattatgctcccggagccgcgccagaaacccacgctctttggtgatttcagcagactgacgctcgccatacttaaccagacccaggtgcgtatcagaaccgacgaaaacgtcagccataccgttcatccctaccgtctgctttgcagcaatgcggagtggtttcttgccggatgtacgtcatcgggcgtgttcgttatttccctgtcccgaatcaggctggttgaggtattaccggatacaacgtttgagatcgataacacactcatttcgctgattgaacagtctgactttatggaagccttaccccacatgaacattattcatcagataatgcattacgggagtaaacagacgaataatcgtaattaa

SEQ ID NO: 141232 - DNA, 312 bp, Enterobacter cloacae
atgattatcgataaagaatacgcacttgtagatgcaacagcaagacttaacactgacctgagggattatgaatatgaaataaacaacaccgccatcataacatttggcaatgacctcattgaggtaatcgtatatcagttcagctttgtcatcagcatcagggcagagggtgaaaaaataaagcacggcctacttgttaacttcggtaaaaatatagcaagacaggtttcatcactttgtgcatccgcaatgcgagtctacccgaatgaaaaacacaaaccgagccgtcagcttttccattgcataaattag

SEQ ID NO: 141233 - DNA, 996 bp, Enterobacter cloacae
atgacactgatgcctgacgatgaacccgagcagctcccgccaccggcggtcattccgcttgatgtggatttcctgccggcgctggttggtactgaaagcccggtcggtcccgcccgggcctacctgctttccctcaattccccccgcagccggcagaccatggcctcgttcctcggtattgttgccggcatgctcggcgccgcgtccctggagtcctgcagctggggcagcctgcgccgtcatcacgttatggccgtgactgagctcctgcgcgacaccggccgggccacggcgaccgtcaatacctatctttcggcactcaagggggtggcgaaggaagcctggatgctgaaactcatggacgtcgagagcttccagcacatccgggcggtgcgtaaccttaggggcagccgcctgccgcgcggccgggccctgccgccggaggagatacgggcgctgtttggtgcctgcgaggccgatgactccagcatcggggtacgcgatgcggcaatgctggccgtcattctcggctgcggcctgcgccggtcagaggcggtagggctggatttgcgtgacgttgtcacagatgagcgggcgctccgggtgctgggtaagggaaacaaggagcggttggcctatatgccggcgggcacctggcagcggctaaggacgtggatcgatgacgtgcggggagaaaaagacgggccgttgttcacccgtatccgccgctttgacaccctgacgaacgaccggctgaccgaccaggcggtgtatcacgtcctgcaggtccgccagcgccaggcgggggttacaaaatgtgccccgcacgatttaaggcgaacttttgccaccgccatgctcgataatggcgaggatctcatcacggtaaaggacgcgatggggcatgccagcgtcaccaccacccagcagtacgatcgccgcggcgaagcgcgcctgcgcacggcccgcgatcgcctgaatctgactgacatttaa

SEQ ID NO: 141234 - DNA, 1521 bp, Enterobacter cloacae
atgtcactgtcagttgtttatacgcgtgcggctctcggggtgaaggcaccgcttatttctgtagaggttcatctgagtaatgggctacccgggctcacgctcgtcgggctacctgaaacgacggttaaagaagcccgggatcgcgttcgcagcgcaataataaatagcggttataccttccccgcgaagaagatcaccatcaacctggctcccgccgatctgcccaaagagggaggacgatatgatttacctatcgcgattgcgcttctcgcagcctctgagcagcttaatacgaccaggctaggctcgtacgagtttgtgggagaactcgcgctcacaggcgcgttaaggggcgttcccggtgcgatatcgggcgcgctggaagctatacgtgcaggacggcaaatcattgtcgcgaatgaaaatgcatcagaagtgagtcttatcgccgagaaggggtgtcttgtcgcagggcatttacaggaagtttgcgcctggctggaagggcgccatgaactgtccgagccggaagagtgtgacaatgttatagccgataccccagaggatctcagcgagattatgggacaggagcaagggaaacgggcgctggagattacggccgcaggtggacacaatcttctgttgattggcccgcctggtacgggtaaaacgatgctggcaagcaggctgagtggcttgctgccaccgctcaataatcatgaagcgctggaaagtgccgccatttatagccttatcagttctacctccttgcaaaaacagtggcgccgtcgcccttttcgttcacctcatcatagcgcttcactgacggcgatggtcggcggtgggtctattcccgggccgggtgaaatctcactggcgcacaatggcattctgtttctcgacgagctgcctgagtttgagcgccgcgtcctggatgccctgagagaacccattgaatctggagagatacacatctcacgcacgcgagccaaaataagctatcccgcgcagtttcagctggtcgctgcgatgaatcccagccctacgggtcattatcagggcaatcataaccgctgtacgccagagcagacgttgcgctatctgggaaagttatccggcccgtttctcgaccgtttcgatttatccctcgaaatcccccttcccccgccgggcctgctcaggcaaaaaggcatcacgggtgaaagctcagcagatgtacgcgagcgggtcattgctgcccagacgcgacaatatgcccgtcagaacaggctgaatgcgcggctggataatgccgggatccggcagttttgttctcttaacatggaggatgcggtttggctggaggaaaccttgacgcgttttggtctttctatacgcgcgtggcagcgtttgctgaaagtggccagaaccattgctgacgtggagggttgtagtgacattcagaggaaacacttgcaggaggcgctgagctaccgcgctatcgatcgtttgctgctccatctgcagaagttgctggcgtaa

SEQ ID NO: 141235 - DNA, 207 bp, Enterobacter cloacae
atggaacgcttcttccgcagtctgaaaacagaatgggtgccagcaaatggttatgcaggcaaggacgaggcccggcagcaaattaatgattacatattgaactactacaacagcgtcagacctcaccattataacggtgggctgacgccggaagagtcagagaaccggtaccatttttactgtaaaactgtggccagtattacttga

SEQ ID NO: 141236 - DNA, 1638 bp, Enterobacter cloacae
atgatcatcatcctgatcatcttttctgtactgtggggcggtgtttcagccttggccctccattccctgcaacaactgaccactgagctgtcactgacggacatccagcaggaaaatggcgatatcatcaatgatgccaacagtctgtattaccgggtcgagaacacgctcgatcgcacacttgatgcgataaggaaaaacgacagcgccgcgatctctgagcaactcgaatctgccgccgccgatataggcaaactccgggctgacctggaaaagttcagaacgggcgatcatggcagtatcgataaagcgacgactgatgttatctacaacagctcatatcagctgcttacccgggcaatcgtccccatgtatgacgcccttaaagccggtcggggtgatgaatatgttcagttgtcaaaccagccctgccgtgagttgcgcagaaacttcactgccgcaattgaacagtacaatactgaaattgataaactgactcgggacgcaaaacagcgaattacctggtgggttgatacatgtcgtaatgtgctgatcgccgcgcttgttatcggtttactcatcgtgttcctgactgaccgttatcttgtccggtaccttgttaaaccgcttgagtgtattcaggctcatctgcagatacttgccgatggcaaactacagacccggataatggatatgggtaaaaactgcgcaggcaaactggtgccgtttatccaggacatgcaggaccactgggtaagaaccgtctccgatatccgcagcagctcatatgaaatctaccgcagcgccggagaaattgccgcaggtaatacagacctgtcttccagaacggaagagcaggcctcggcactggaacagacggccgccagcatggaagaactcagtgccgtcgtgaagcaaaatgcggataatgccagccaggcaagccagctggcccagaccgcctctcaggccgccaataaaggcggggaaattgttggtcatgtcgtcagtaccatgaacaacatcagcgcaagttcacaaaaaatcgtggatataatcgccgtcattaacagcatcgcgttccagaccaacatactggcactgaacgccgccgtggaagccgcacgggccggtgagcagggacggggttttgccgttgtcgccagcgaagtgcgtaatctggctcagcgtagcgcccagtccgccaaagaaattgaggggctgattgccgcctcagcagacagcgtgaagacaggctctgagcaggtagcccttgccggcgaagcaatggcgaagatcgtcagggacgtcaccaacgtgacggatattatgggcgaaatcgcctctgcgtctgccgagcagagcaaagggatcacccaggtgggccaggccgtcgtggaaatggacagcgtaacccagcagaacgccgccctggtcgaacagtcaagtgccgcttccgcctcactggaagagcaggcccgccgcctgactgaaatcgtgagcatttttcagctggccaccgcgaacaagcccccctcagttcagccattacaggcaccggtgcagcagaaaaaggatacgcctgtggcagtgaatacgcatgcaagcgttacctcagataactgggaaaccttctga

SEQ ID NO: 141237 - DNA, 318 bp, Enterobacter cloacae
atgagtgaaataaatccccgtcaggctaaatatgcagacatacatgcgaaactgaccgaccggatgcagtctgtcagggtcatccttgaacagatggaaggacacgagtacgccgcaatcagcacctacatgaataacatggaagcgattgcctgcttttacgaggaggcaggggaaagtctcagtgagccagacttcctgaactacctgaaacaaaacgaccttaacctgtttattgaaattctctctgtgggacgcgccgtttcactgatgaaaaacctgctggtgaatataaggcggcttgtagtggtcaagtaa

SEQ ID NO: 141238 - DNA, 207 bp, Enterobacter cloacae
atggaacgcttcttccgcagtctgaaaacagaatgggtgccagcaaatggttatgcaggcaaggacgaggcccggcagcaaattaatgattacatattgaactactacaacagcgtcagacctcactattataacggtgggctgacgccggaagagtcagagaaccgataccatttttactgtaaaactgtggccagtattacttga

SEQ ID NO: 141239 - DNA, 303 bp, Enterobacter cloacae
gtgacactcatcaaagataaacaccacctgctgctgatagacgggcaggtcagcttcggctttcatcaggttattgagtttctgaatggttgtgacgataattttgttatcgtccttatccaggtttcttctgaggcctgctgtattatccgaaccattgacactgtccggagagaagcgctgatactccttcatggtctggtaatcgaggtctttcctgtcgaccacgaagaagactttatcgataaagtccagctcagtagccagacgtgcggccttaaagctggtcagggtttttcctga

SEQ ID NO: 141240 - DNA, 216 bp, Enterobacter cloacae
gtgcgttttctgacggaagttattcaggatgtactgtgttatttccagaatacgcattggatgcagaaaggcctgctggttttcagccgcgctgagttttttatcgtctgtttccgtttcaagagacttaaactgtgggcggacatcgttatagtccaccttaaacttcagcactttttcatcacgaatcgcatcagtaattacgtaagaatgtaa

SEQ ID NO: 141241 - DNA, 408 bp, Enterobacter cloacae
gtgctctgctttaaaggtttctaccgcttccgggtcactaatatcaaccttctgcagggctttcagcgtggcaaattcatcatagttttgcaggatgttttctgcccgcagatattcaccaaacagtttgacgaaggcttttttctctttttcactgtcgatactggcagggtcagggaagcgctgctccagctccgaaacaacagccataaaacctcgtttagcctcaccggttgccgcatcggtaaagccctgcatgtactcttcgtagcttttttccagcaccacattcttggtgtttttgtcgccaaaaagtgtgatggcatcaatggtcggacgctccaggtccctgaaagtcacgatattgccgaaggttttggttgcatcatagatacggttggtgcgtga

SEQ ID NO: 141242 - DNA, 1239 bp, Enterobacter cloacae
atgagtgggttgaactttctgaacaaattgctggatggagttgatgttgaatggttgtcactgggagagcttggcgatttcatacgtggcaatggactacagaaaaaagatttcgttgaaagtggttttccagcaatacattacggtcagatttatacaaggtatgggttatcagctgataaaacatttacttacgtgcttccagaactagccaataagctgagaaaggctcaaaaaaatgacttattgctagcaacaacatcagaaaacgatgaagatgtagtaaaacctttagcctggcttggcgataacgttgctatttccggagatatgatgttatttcgccacgagcaaaatgttaaatatctcgcctatttcttccagtccgaaatatttcaaacacaaaaaatgaaatatattactggagctaaagtccgacgggtttccagtggcgatttatctaaaattaaaattccaattccctgttcaaacaatccagaaaagtctctgaccatccagtctgaaatcgtccgaattctggatagatttactgctcttacagctgagcttacagctgagcttacagctgagcttaccatgcgaaaaaatcagtacaactactatcgtgaccagttgctttgttttgacgaggccgaagttgagtggaaaacgctagctgatgtagcaatattaagacgcggaagagtcatgtctaaagggtatctcgaacagaatgcaggagactaccccgtttatagttcccaaaccgcaagaaatgggatgattggctcaatagatacttacgactttgatggtgaatttattagttggacaacagatggtgcaaatgctggaacggttttctaccgtacagggaaattctccatcacgaatgtttgtgggctaatcaaaattcatgaaaattatccaattagctataagtatctttactattggctttcaatagaagcccaaaagcatgtctattcaggtatgggtaatcctaagctaatgagccatcaggtcgagaaaattactgtgcctatacccttcccggcatcaccagagaaatcaatgctcgaacaacagcgaatagtcggaattctggacaaattagaggctataacattctcattgactgaaggcttacctcgggaaatcgagctgcgccagaaacagtacgaatactatcgtgacttgctgttcagcttcccgagaccagaaaccgccagcaactga

SEQ ID NO: 141243 - DNA, 924 bp, Enterobacter cloacae
atgcacggtcagactcatgtcaacaaaatctatgaccctgctgcaggctctggctcactgctgcttcaggcgaagaagcactttgataaccatatcattgaagacggtttttatggtcaggagataaatcatacaacctttaacctggcgcgtatgaacatgttcctgcacaacatcaactacgacaaatttgatatcagactgggaaatactctgactgagcctcactttggcgatgaaaaaccgtttgatgctattgtctctaacccgccgtactcggttaagtggattggtagtgacgacccgaccctgattaacgatgagcgttttgctcctgctggcgtactggccccgaaatcaaaagctgactttgcgtttgtgctacatgcgctgaactacctgtctgctaaagggcgcgcagcaatagtttgtttccccggtattttctaccgtggcggtgcagagcagaaaatccgacagtacctggtcgacaataactatgttgaaacggtgatttctctggcaccgaatctgttcttcggcaccaccattgccgttaacattctggtgatgtcaaagcacaaaacagatacccgcgttcagtttattgacgccagcgggttgtttaagaaagaaaccaataacaatatcctgactgatggtcatattgaacagattatgcaggtctttgccagcaaaacagacgttgaccatttggcgaaaactgtacctcaagaaacagttgctgccaataactataacctgtcagtcagcagctacgtcgaagccttgaatactcgcgaaataattgatatttccgaactgaatgccgagctaaaaatcaccgtcggcaaaatcgaacagttacgtaaggatatcgactcaattgtggcaaagattgaaggtgacgaggcgcaatcatga

SEQ ID NO: 141244 - DNA, 1269 bp, Enterobacter cloacae
atgagcgggctgagttatctggaaaaactgctggatggggctgaggttgagtggaggacactagatagtgttggccagtttctgcgaggtaagaggttcgtaaaatcagaccttatttcggaaggtgttccatgcatccactatggagaaatgtacacacattatggaatatcggcagaagaaaccaagtcattccttgacgaaggagtcgctgaaaaattacgtgtcgctaatcatggagacgtaattattgtcgctgcaggcgaaacaattgaggatattggaaacggtactgcatggcttgggaaaaatgatgtggtctttcacgatgcatgtttttcattcaaaagcgaattaaattcaaagtatgtttcttacttcctgagaacgaacttatttaaagagcaaattaaaagaggcgtttcatccggcaaaatttcatcaattaatgcaaaaggtcttggaatggctgagatcccaattccctgccccaacaacccagaaaagtcccttgccatccagtctgaaatcgtgggggttctggataaatttaccgcccttaccgctgagcttaccgctgagcttaccatgcgtaaaaaacagttcaactactatcgcgaccagttgctgagttttgatgagggtgaggttgagtggaagacattgggggcgataggtaaatttacttatggatatgctgccaaagcgcagatttctggtgatgctcgcttcgttagaattacagatataaatacaaatgggaaactatctccttttgaaccgatgttcgttgacatatcagctgaaaatgaaaagtacacattaaaaaagaatgatttacttatggccaggactggcgctacgtttggcaagacaatgattttcgaggaagattatccagcaatctatgctggcttcttaatcaagttaagcctggatagagacatcattgaccccaaatactattggcattttgctcaaagtgattatttttgggagcaagctaataagttagtttcaggtggcgggcaacctcagttcaatgcaaatgcacttaaacaaatcaaagtacctattccttacccaaatgaagcgggaaaatccctttcggagcaggcacgcattgtttctgtcctggataagtttgatattttagccagttcaatcaccgaaggcctgccccgcgaaatcgagctgcgccagaaacagtacgaatactatcgtgatttgctgttcagcttcccgaagcctgaaattgccagttactga

SEQ ID NO: 141245 - DNA, 924 bp, Enterobacter cloacae
atgcacggtcagactcacgtcaacaaaatctatgaccctgctgcaggctcgggctctctgctgctgcaggctaagaaacattttgataaccacataattgaggaaggttttttcggtcaggagattaaccatacgacgttcaacctggcgcgtatgaacatgtttctgcacaacatcaactacgacaaattcgatatcaggttgggcaataccctgactgaaccacactttggcgacgaaaagccgtttgatgcgattgtttcgaacccgccatattcggtgaaatggattggcagtgacgatccgacgctgattaacgatgagcgttttgctccggcaggtgtgctggcaccaaaatcaaaagctgactttgcgtttgtgcttcatgcgcttaactacctgtccgccaaaggccgcgcggcgattgtctgcttcccaggtattttctaccgtggaggtgctgagcaaaaaatccgtcagtatctggtcgataacaactatgttgagacggtgatttcactcgcaccaaacctgttcttcggcaccaccattgcggtgaatattttggtgctgtcaaagcacaaaaccgataccaacgtgcagtttattgatgccagtgagctgtttaaaaaagaaactaataacaacatcctgactgatgaccatatcagacagattatgagtgtgttcgacagcaaagcagatactgaccatctggcaaaaacggttccttatgaaactgtggcgtctaatgactataacctgtcggttagcagctatgtggcagccaaagatacccgcgaaattgtcaatatcactgaactgaatgccgagctgaaaaccaccgtcagcaaaatcgaccagttacgccaggacattgacgcgattgtggcagaaattgaaggcagtgaggtacaggcatga

SEQ ID NO: 141246 - DNA, 561 bp, Enterobacter cloacae
atgaaaacaatcgattttgaaatccgtacctccgaagtgagcgccagcaacaaaaagctggtgggctatgcggtgcgctggaacagtctgtcagaaattatctgggacgagttccgcgagcagtttgcgccgggagcgtttaaagacagcctggcatccggtagcgatgtgcgtgcgctgtacgagcataactataaccagcttctgggccgcactaaatccggcacgctggttctgtccgaagacgataccggactgcgcttcgagctgaccccgcctaatacccaacttggcaacgatgtgctggagctggtggagcgcggggatatctccggcatgagctttggtttccgggcgctgaaagaagcgtgggatatcggccagtctccatacctgcgcactgttaccgctgccgaactgcgggagattaccgttacctctatgcctgcttatcctgagtctggcgtggaaatcgcgcaccgttcgcttttctcccaacatcctgaactgcgccgcgctggcgataaccgtcgccgctgggctgatttagcggggctctga

SEQ ID NO: 141247 - DNA, 420 bp, Enterobacter cloacae
gtgcagaatctcttcctgcaggtaggtgcgcacagccccggtaaacggctcggtaacagtgtatttgtacttatgctggccgatacgctcaggtacaaccgcccccggcgcatacggatgcagggattgcggctggccgtcccggccccactggatcaccgcataggcgttaccgttcagcagacaatggcgcatcatcgtgcgtttaaactggtaaggcgtctggcagtcgttcggctgctcgttcaggagaaaatctaccggatgattgctcagccattcccgcgcctcgcgcccgttatcgttgcgcacacggtagagatagcagggcattgttgccaccgcctcactgataaccgatacggcgttcatgaccgccggcagagattccgcagtacccgcagacacatactcgcctga

SEQ ID NO: 141248 - DNA, 375 bp, Enterobacter cloacae; identical to SEQ ID NO: 103903

SEQ ID NO: 141249 - DNA, 939 bp, Enterobacter cloacae; identical to SEQ ID NO: 103902

SEQ ID NO: 141250 - DNA, 369 bp, Enterobacter cloacae
gtgggcttcgatacgtggaacgccacgcatctgcgcacccagctacagggggcgggcctcgatgtggagccgttcccgcaaacctatctcaaattcagtccggtagcgaaatcctttgaggtgttcgttaaccgcagagtggtgcgccatcgcggcgatccggttctggcctgggcgattggtaacgtggtgatggagtctgatgctaacgccaacattaagcccaacaagaagaagtcctccaacaagatagacccggctgtatctgcgctgatggcgttcggtaccttccaggctgagcacgaggattttgcatttgatatgagtgaaagccacaaacagcgtctcgctaagtttgacggcatctga

SEQ ID NO: 141251 - DNA, 645 bp, Enterobacter cloacae
atggtacttctgaaagggatctttggaagccaggcagatgcgctactcacgagtatcagagaggtaatgaaaaatagtctttcagatattcactttcctcttgaaaagattattgacagatataaaggctcgaataaggacctcagatttgacgacgaatacatcgaaagccttctcaatatcagatatggcgaaggtcgttgccgcgcactattgcatcttctgttccctgaaatgaatccgaccgaggtgtttcatattgatcaccttcacccaagaaatcacttctcaaagaaatatcttgaaagattagattatgttgcgaactcaccagagaacctcagcttttatgaaaacccggaacactgggacaccatacctaatcttcatttactgaatcattctcagaatataagtaaacaggatacttccctgaaacaatggctatctcattcatcaaacaactatacgccatcaatgctgttagtttcagatgaaaatattgagttcagtcgcttcccggatttctacaatgagcgaagaagcgccctgaagcaaagactactgaatcgggtatttcttacaacaaaaatagattcatcaccatccacaatagatacggatgaagaaattttcaccgactga

SEQ ID NO: 141252 - DNA, 513 bp, Enterobacter cloacae
atggccgcaagaaagacgattgaagagagattttggataaaggttgataaaaaaggtgaagaagattgttggtgctggtgtgccgcaacagtgaagggcggtagcggagaaagaaagttaacttatggtgttattggtacagatcgaaatgcctctggtaacccaaaggttcttttagcccaccgggtttcttgggaaatgcataatgggccaataccggaaggtaagtatatagaccatatctgtcacaacaccttatgtgttaaccctcatcacctccgacttgtatcaccaaagcaaaacgcagagaaccaatgtgttgttgattcccgctcaacatctggatatcgcggcgtatcgtggaataaacaaaaaaataaatggcttgcttactgcaatcatgaaggaaagcgttatcacgctgggttccatgaaacagcagagttggcagctgaagctgcacgtcgagtccgcaacgaggtgtttacccataatgatgctgacagatattaa

SEQ ID NO: 141253 - DNA, 591 bp, Enterobacter cloacae
atgatgctgacagatattaagttctgcattgttggccatcacgctaggcggcaacaggctgtagcgttggccatgagtattggcgcccatctcctcctcgatgaagggaatcacggcgcaaactggaatcatcgccgcgcgcttgaatgggcttcatggcaggattgccgggtagtgataatcgaagatgacgcatcacctgttccagattttattgagcaggttagcgaatggcttaaccgcttcccggaatcgctggtgagtttttacctgggcactggccgaccaccacagtatcagatgcaggtagccgaacgtctgattgttgctgacaagacacggtctgacttcatcacgctgccgcgccttatacacggcgtgtgctacagcgtaccgcctcagcatattgaacgagtcctttctcgatgggacagcagtaagccagccgactatgcagtcggggatgcctatggcggcgcggtggtttatccgtgttactcgctggtggatcacgctgacatcccgacggttgagcgtcaccctgacaacgagccgaggacggaacgccgccgtgcatggagactggcatga

SEQ ID NO: 141254 - DNA, 237 bp, Enterobacter cloacae
atgaaagacttcatcattgaataccgcgacggcaagtttgttcaattggtggttgatggcgtggagatgaagcgcatcacgtccattcagttctcccatgcagtgggtgagaacgtgccgacgctgactctttcagggcatgtattagctgaacacgggaaacgagccgggaagctcgaagaggttgagaagcaagaggtgtggcgtgacgaagtgatccgggaattgaacggctga

SEQ ID NO: 141255 - DNA, 348 bp, Enterobacter cloacae
gtgaatgaagatgatatctacgctttgctttctcccctggcagaagggcgggtatatccctacgttgcgccattaggtagtgacgggaaaccgtctgtctctccaccctggattatcttttccatcgtcgatgatgtttccgctgacgtgctgtgtggccaggcagagagcagggtttccattcaggtagatgcttactcaacctccatcaaagaggcgcgcgcgctcgtggaagatgctctagtggcgctacggccactaaacccgacggaggtcgccaggctccccggatacgagccccatcgacgactctaccgcatgaccctcgatttcagggttaccccctga

SEQ ID NO: 141256 - DNA, 312 bp, Enterobacter cloacae
atgtatcagcgaatcgatggtggaaagtggcgtcacgtctgggttgtgagcgatatacacggttgctatcagtggctcttggacgaactgaaacgccgccgttttaatccttatgaggatttgctgatctccgttggggatttgattgatcgtggccctgacagcgttaagtgcctgcaactgatcaatgaaaaatggtttcgcgcagtccgggggaaccatgagcaaatggcaatcgacagcgtggaaaataacgactttgcgctctggttgatgaatggtggaagctggttctcgcagcttgatgattag

SEQ ID NO: 141257 - DNA, 216 bp, Enterobacter cloacae
atgactgtcacggacaccgtactggttttgtttattgttgcccttctggcttacgcgatctatgacgagttcattatgcctcgccgccacggcgagacgctgctgacccttcccctcttacgccgtggacgcattgatgcgtttatcttcgccggtctggtggtcatcctgatttacaataacgtgaccagccatggtgcaatattaaccacatga

SEQ ID NO: 141258 - DNA, 471 bp, Enterobacter cloacae
gtgaacataaacgcaaaaaataaaatactctatttctggggcattatggatgtcatcggcattgtgttttattttgtcggcccataccacttgcttcagtcatggtgggattctaccggtgggaattttggtgttatcatcttcatgctgatagcaggaggggcaaacggtttattgacaggtcttttttacctcgtataccttctgtggccggtttcattactcttttctgcctggttttttttcacaactcaccgatatgccgtccggtttgctctggcgcaggaagtgctacgcctgctcaccatgagttgttcggtgaccttgttcccgatgattattgtcggtctcggactgagtgttatatctcttaatatcacgctgttcattttgtcggaaatagtaaaaatcggctcgctcatatttgtaatgaaaagattgggtatagataaatgggccgtaacaaaatag

SEQ ID NO: 141259 - DNA, 795 bp, Enterobacter cloacae
atggctgaatatattctccaggaagctaccctggcgttaccagatgtatataaagacagaaccatgaatttatttaccctgagcgaaaatggtgccagtgagtttaccttcgttgtttctcgtgccagtgtaaaaaaagatgagagtgtgcatgatgtggcaactcgtctggtgcgtgagttagaaattaccgtaccagattttaacctgacgtcctcgcatatgaccactgttgataatcacgcggctgcggagcttttttatcattttaaaaatgatggtacgaccgtttttcagaagcagaccattattttaatggacgagcatcccgctgggcgaaaaatggtgtgttacatcggtacctgtcctggtgagtttagcgattattatcacgatcaatatcaagcaattatccgcagtatcaagttccataagccagctccgaccgaaaccatagatatgcttgaggccaacacagaggggccattttttgcactcgatagcgagagtaagatactcagcgtgtttaaaaacattcaggagctttacgggcatctttcgcttcagcgggcgaaagagggacactatttactttttgataagcagggggcacctttaagtattgcgcctgtcccgggcagtcagcctcttcgttacgcgctgtggaccctttctgcagaaaaatcccaccacttagtttcacagctttctgtttgccgccaggtctcaggttctgacgaccttaactcaacagatcagatccgcaagtatctgatggcgcagagagccgaatag

SEQ ID NO: 141260 - DNA, 915 bp, Enterobacter cloacae
atgaacaaaaccacatattatttaaaacaccttgagtatctgctcaggaagtgtcggtcttatttaatatcagacattaactttcatctgtcccgtctcaaagcaacccacggcgacacatttgatataaaatcacctgctaccctgaacgaaaaaatttgtcatcgtctggtctatgaccataatgcgcattatacgatgctggcggataaactggctgtgcgggaatatgtcctgtcgagaacgcaacgtctaaaaatcgttccattgattggcgtataccgtcgcgttgagcacatcgacatgacgaaactgccgcataaatttgtgttaaagtgcaaccatgacagtggaagcgcgatcatatgcacaaacaaagctgaatttgaccttaaaaaatcgcaaaacaagcttcggctggcattaaagagaaatctatattacaccacacgggaatggcaatataaaaacatccctcctgttattctgtgcgagaagtatatcgatctctttaatgacgcggacaaaaacacaacacccgagatgttgaggattcattgtttccacggtgtcgcgcagtttatggaagctgatttcaccgatgaaagcggcaatggttttatcaacgtttacgatcgccactggcagttgcagcctttccagatggaatatcccaacactccgcaggacatacccaagcctgcctcttatcaggaagcgctgctggcggcgcaagagctggccctggggattgactattgccgtgtcgatctcatgctcacccgggacgagatctacttcagcgagataacgttaagcccgaaacggggcaaactggctatcacgccgccggaatgggatgccaggttaggtgaaatgtggcaaatgacgcccgtcgcaaacaggctcatttga

SEQ ID NO: 141261 - DNA, 807 bp, Enterobacter cloacae
atgcataatagcgatgcgcagaagacgccccttgttgacgtcgttccgtttgtccgcctgggctgggtagtgttgctggcaggtctgggatctttcttgctctgggcggcactggcgccgctggataaaggtgttgtttccaccggaaccgtggtggtggacggctaccgtaaggccgtacaggcacccacaggcggtgtggtgacaagcatcgccgtcaaagaggggcagacggtacataaaggcgacctgctggtgctgctcagccagcaatcgacgctcgcccaactctccgctgcgcgccagcattatctgacgtcgctcattgctgaaagtcgcctgcagtctgagctggcgggcatgcaaacgctgaccttaccccctgagacagaagacgaagccctgcgggatgcgctcgagcccattgtggttcagcaacgccagcttatgcatgcccggcaggaagcgctgaaaaatgctcaggaaaacgatgctcaggccatcgctgggctggcacgtcagcgcgattcgcttaccagaacctgcgagacgaaagcgcaagggcttgcgttgttaaatcgtcaactcaaagacctgaagccgctgatggaagagggctatttcccccgtaaccgcttcctcgatatccaggtgcaatcggcgtctctggcgggcgaggtgggtgaaacccgcagcaaaatcgtagagttagggaatcagatcgcccagctcaaacgcggcatgcagcagcggttgattgacaaccggaaagatatagaaacgcaaattgaccagcttcgcctgtag

SEQ ID NO: 141262 - DNA, 930 bp, Enterobacter cloacae
atgaaagaaaatgattttaagaccggtgaaaaggtattagtgcttggtgcaggacaattgggcgctgccatgttggattctctggtgccggcagtaacacagcgcgatggagctatctctgttatcgtatcgcccggatcatgggacaacaagggtaaactgcggtctgaaattcatcaaaatctggctgatgcaggggcaacattcctcgctgtcgatgtcgctgaaagttcagctgaaacgttaaaaattcactttagggattttgataccgtgatcaactgcatgggctttgttgctggcgctggcacacagttaaaaattacccgcgcggtgctggaagcaggggtacaacgctattttccctggcagtttggcgtgaactacgatgtagtcggcaaagggagcggccaacccgtatgggatgagcagtatgacgttagggtattattgcgtgaacagaacacaacggaatgggtgatcgtttcgaccggcatgtttaccagctttctcttcgagcctgcatttgatgttgtgaatctagcaaataaaaccatcaatgccctcggcggatgggaaacgcaggttaccgtcacctctcctgcggatatcggcaggctgaccaccgcgatttatttacatcagccgcgcattgctaatgagatcatctttgtcgcaggggaaactacatcctatggaaaactggcggaaaccgttgagcgtgttattcaacaaccctttatcaaaagggtattatccctacccgccctggaggatgcactgcgtttaaatccggatgatcatatgcttcgctatcgtgcggccttcgcgcgtggcgacggtatgtggtggccgatgaataaaacctggaatgcccggaataatattccgacccaggatatcgaatcctggcttaaaacgattatttaa

SEQ ID NO: 141263 - DNA, 906 bp, Enterobacter cloacae
atggataagctggaatcaatgcaggtctatgtttgcgtggtggatgcccatagtttcgccagggcagcagaagtgctgggattgccgcgctcaacggtatcccgggtcattaaggaactggaagcttacctgggaattcaactattacagcgtaccacgcgcaaacttagcgtgaccgcagatggcctgcgttactacgacgaatgcagaaatattctggcggatattgctgcaatggagtcttcatttcctggccgaactgcacagcctaaaggtcgttttaaagtcgggatgccgcagtctctcgcccgacattacattctgccccaactcccggcatttctgcgagagtatcccgaactggagttggtgctctgttccagcgataacgtcgaagatatcattcaggaagggtatgactgtgtgattcgtaccggcaggatcgaggattcaacaaccctggtcgctcgtcctctggcgaatttttcctggatggtggtggcttctccgacctacattgctgcgcatggcaggccgcagcgtttagaggatctgcaacagcatcaggctgtcggctacctgaaccaccgtaccgggcgtaccatcgactggttctttacgcgggatgaagaagattacgcgatacgtatgagagagaccctggtcgttgatgatacggacgcgtacattcaggccgggattcaagggctgggattgattcgcgtggccagttatctggttgcgccctatctgcggagtggggcgctggttgcctgcatggagagcttctcgttcgatttaccactttcactggtttatccgcaaaaccgatatcttccgccttcggtacgcgttttttatgcctggagccgggcggttttacagcaaccggcaaccgatgattaa

SEQ ID NO: 141264 - DNA, 903 bp, Enterobacter cloacae
atgcgagtatttcttaccggagccagcggctttatcggctcccaaattctgacggaattgctgactgccgggcataaggtcaccgggcttgcccgctctgacagcagtgcacaggcgctcaaaaaagcaggggccgatgttcatcacggtacacttgaacggccagattcaatcgtgtccgctgttcagcatgccgatgcggtgatccataccgcgtttgaccatgattttcaccattttgtcgaaaattgtaaaaaagaccaacgcgttatccacgccatcggccaggcgctaaaaggcagcgatcggccatttattatcacctccggtaccggtattggcgatgaaggcgacgcggccctggcccgggaagatcagtttaacgctgcaagcatgaacccgagggttgcgtctgaaattgcgggcaacgccctgatcgctgacggtgtgaatctgcgggtggtacgtctgccgcaggtacacgatacctcccgtcagggactcgtcagcctctacatacaaaacgcgatagaaaaaggtgcagttgcctgtatcggtgagggcaataactgctggtctgcggcacatgtcagcgacgtagcaagattgtaccgactggtgcttgaacagggtgagcgcgcccagcgctatcatgcggttgcagaagaaggcgttcccctccgccatattgcgcatgtgattgcccgtaaatgcgacctgcctttgatatcactttcacctgcagaagctgaagcgcattttggctggtttgctctgtttgcaggcatgaatctacgcgcaacatcagcgtggacgcgccaacagttaaactggcatcccacagggcctaacctgcttgatgatctggagaatatggattacgcctccctgttatcatcctga

SEQ ID NO: 141265 - DNA, 870 bp, Enterobacter cloacae
atgcaaacggcaatgcagtcactgggtgacttcctgcgggcgcggcgtttgcgcctcgatcctaccgcgtttggttttgaagagggcagacggcgcacgacaggtttgcgtcgtgaagaggttgcgcaactcgccaatatcagtcctgtctggtacacctggctggagcagggccgcggcgggtcgccgtcgcgggaagtgcttaaccgcatcgccagcgggctgcgtctgacaccgacggagcgcgaacacctgttcattctggcgttcggccatccacctgagacgcaaatcaccatttcagtcgatattgcgccacgtctgcagcgagtccttgacgcgttcaccgttccggcaattgttaaaaccgtcacctgggatgtagttgcctggaaccgtgcctcggcctgtgtattaactgattacagcaaactgccgcttgcggagcgtaatgttatgcgacgcatgtttaccgatcctgagttacgtcgcgcacagggagactggcaggcgatggcaaaactggtcgttaacgcctttcgcgcggatgtggcacgggcaggtcaatccgtagaaagcaacaatctcgttactgaactttctcaacgcagccctgaatttgacgcctggtggcgcagcaatgatgtcaccagccatgctgaaggggcaaaacgcattaatcatccgcaggccggggcgatagatctcgaattttcgacctttatggtagaggggcgacccgatctgagcatggtcgtttttaatccagtgaatgaagagagccagcgcaaaattgtcgagcaggtaagacaatccatgtctcatggcagtgaatcagactgccataatgctgccgtccacaccgcatag

SEQ ID NO: 141266 - DNA, 564 bp, Enterobacter cloacae
atgagcaagaaaatcctgatgctggtgggcgattacgccgaagattacgaaaccatggtcccttttcaggccttacagatgattggtcatcaggttgacgccgtctgcccggataaagcgaagggtgactatgtcatgaccgctatccatgatttcgacggtgctcagacctatagcgaaaagccgggtcaccgttttatcctcaatgccgatttttccgccgttaacgagcaggactatgacgccctgctgatccctggcggcagagcgcctgaatacctgcggttaaatgatgacgtattgaagctggtgcaggcatttgatgccgcgcacaaaccgattgcggccgtgtgccatggcccacagttgctggccgccgccgggatcttaaaaggacgaacctgtagcgcctacccggcctgtgcgcctgaagtgcgactcagcggcggcgagtatgccgatatcggtatcgatcaggctcacgttgatggtaacctggtcaccgcgccggcctggcctgcgcatccgcagtggctggcgaaatttgcgaagttgttggaataa

SEQ ID NO: 141267 - DNA, 243 bp, Enterobacter cloacae
atgaagctgttacatggggtcgaaatacctgattcatggatcagtagcagcttcactaacatatcagataccgatacccgtaaggttatgtatatggaaggttgcgatatgttatctaaagacatcatgaatgaaatccgtagtgccgtgaagtccccgcctgacaacataaaaatataccgtaatggagagcgtattgttaagatagaagttatggagaaacaaaatgacctcaaaatttaa

SEQ ID NO: 141268 - DNA, 150 bp, Enterobacter cloacae
atgcaaaagagaggggaatactttgcgcaggaacaagatacggcgtggttaattattcattgcctgaataaattttgtaaaactatttattataatgatgctatttgtaaaaggatgcggcctggcagccacatcctttttatgaattaa

SEQ ID NO: 141269 - DNA, 558 bp, Enterobacter cloacae
atgcaaattggttatgtaagggtgtcaacaaatgaccaaaatacggatcttcagcggcaagcgctcgaacgcgcaggatgtgaacaaattttcgaagaaaaaatgagcggaacggtagcaaaccggccagcactaaaaaagcttctcaaggcattaaatgagggggatacgctggtggtctggaagctggatcggcttgggcgcagcatgcgtaatctggtgctgttggtggacgaacttcggcagcgcggtatccactttaagagcctcactgacagcattgatacatccagcccaatggggcgttttatatttcacatcatgtcagcacttgcggaaatggaaagagagttgattgtggaacgaacccgggcgggattggctgcggcaagagaaaaagggcgaataggtgggcgacgcccaaagttgaccgaagagcaatgggctcaggctggcagattgatcgcaaatggagtggatcggaagcaggtggcaattatttatgatgtagcggtatgcactctttataagaagtttccagctgatcaaactacctag

SEQ ID NO: 141270 - DNA, 357 bp, Enterobacter cloacae
atgaaagtaagcataagaagtatccataatcatggggatgcgaaagaggaatacgttgttttagatgtgaatgaagactgcaaattacaatattacatgttgcaagatactacctacacgaataacggtaatatttcttcaaaactgaggcattcttattggttgccttcttatgatgcgaaaaaaggtgatgaaataattattaatactcggtcaggtaaaaatctgataccagttagagaaaaaggtgggaaaaaattcaccttctattgggggttaaattcggcggtttggaatgatgaaggggattgtgctgtcttatttgagataaatacttggaagtcaaagggcgtataa

SEQ ID NO: 141271 - DNA, 3639 bp, Enterobacter cloacae
atgatggatccgatcctcggtgcctggcgcgaatggctggtcaataacgtcaccttctccagtggaaatattccgttttacagcaacctgaacgggaagatgtgtgagcgaaccgatgccgattactggtgccagcaaattcgccagcccgtgcatttcctgcagagtgtgcaaaacgtgctggcgcaaggtgagttcacctttatcgatctgagtgcggatagctcgctgggcaaatttgtgagtgcaaccgaccgtcgtcaccgggtgctggccgcaggcgaccgacgacatgagtacaaatcactgctgacgctgctgggtacgttgtggcagcaagggcacgacatcgactggaacaggctctattgcgcgaccacgcgggagacattacccctgcctgctatccagttctgccgcaaacgttactggttggcgggtaagacgccagcgcagaccccatctgcaaaagaggacgctatgtcacatcaacaccatttagccgctgaaataaaagcgattatcgctggttttcttgaggcggatcccgccacgcttgacgattcactgcccttcctggaaatgggggcagattcgctggttttgctggatgccatcaataccattaaagaccgctacggggttgcgatcccggttcgtgcgctgtttgaagagctcaatacgctggaggcggtgatcgcctttgtggtggagcatgcgcagacagagacggctgcggtgccggtcagtgtcacgcacaccgccagcccgccgccgccccacggggcgatgccagtgcaggccagcaagccggaggcggagcatgttcaggcgctgatcgcccgccagctggagcttatgtcgcaccagctccagctgctgaacggtacgccgggccctgtcctgcagactgcagccacaacaatgtcggttgtcacgccacctgcgccagttgtggctcctaccgcaccggcaaaagccagtgcgcacagcagctggtttaaaaaagagaccaaaaaagtttctctgggcagcgagcgcgatcgtcatctggcgcagctcacccaacagttcgtcgacaaaacgggcggttcgaaacgtaatgcccagcaataccgtgccgtactggcggataaccgggcctctgccggctttcgtttatccaccaaagagatgctttatcccttagtgggagagcgctctgaaggttctcgcatctgggacgtcgatggcaacgaatatatcgattttacgatggggtttggcgccaacctgcttgggcatgctccggcgtgtgtgcagcaggccgttgccgaccagttggcgcaggggatgcagattggccctcaaagtgcattggcaggcgaggtggcaacccttatcagcgagctaacgggacagccgcgcgtggcgttttgtaactccgggtctgaagcggtaatgagcgcggtgcgcctggcgcgcgccgtgacgggaaaaaataaggtcgcactgtttagcggctcgtaccacggtgtatttgacggcattctcggacgtcaacagggtggcaaaactcctgagcgcgctacaccgattgccgcaggtacgccgcaatcgctggtggatgacctgctggtacttgagtacggcagcgaagagagcctggcactgatcgcccgctacgcggctgaactggcggtagtcattgtcgaaccggtgcagagccgttatcccgatcatcagccacgggagtatctgcataccctgcgtgaactcacggcgacccataatattgcgctgatgtttgacgaagtgatcaccggttttcgtctcgcgacgggcggggcgcaagcctattacggcgttcaggcggatatcgcctcttacgggaagatcgttggcggtgggctgccgattggtgtcattgcaggatcccgacgctttatggacagtatcgacggcgggttctggcagtatggcgatgactcctggccacaggcggaactgatcttctttgccgggaccttctccaagcatccgctgaccatggcggcaagcaaagcggtgctggagtacatcaaagcgcacccggcgttgtatgacgatatcaaccaaaaaaccgcacgtcttacacggtcgctcaatacctggttcgccgtgaccggtacgccgattgagatcgtgtcagccgggagtctgttccgttttaaatttaacggcaactacgacatcctgttccaccatctgatgctgcgcggcatctttatctgggaaggacgtaattgttttgtctcggtggcgcattctgacgaggatatcgaccggtttatcacggcagtaaaagagagcgtaaacgccatgcgcgtggatggcttctttggtctggaggggatacgtcctgacacgccgtatgccgcgaccgacagccagcagcgtttcctgcaactggcggcacaggatgaaagcgggctgttggcggggaatattggcggtgttattgagaccgcgcgcgacgtagacagcgatattatgcgcgaagcctggcacctgctgagtgcgcgacatgaggcattgcgtatgcagtttactgatgccggtgaactgcgggtgtcgtcggagactgaagttgatttccgtgagaaaaacgcggtgcctgcgacttatctcgcggattttgccgcacagccttttaacctcgccaccgcaccgctggctcgccttttgctcatccgtcatgagggtaagactacgcttgctattgcggcacatcacacggtggccgacggctggtcgtttatggtgatgctgcgcgagttgctgcatctttacgatgcgctggcggcgggcaaacgtcctgagctgacggcggcggtaagctatctgcaggtgatccgcgcgcagaagagtgtagatgaggcggcactcacacagcgtctggcagccctccctgcgagacggttaacgcctgacgcgcttacggtgctggagccttctctgacgtatcagggacagcgtctgatgcagcgtctgacctatccgggtcttgccggacaactccgcaaagcctccgctgaactgcgggtgacccgtttcgccatgctcaatgcgctctttatcctcacccttgagaaaacgctcggccatggccgggtacctgtcgctgtgccggatgcggggcgcgatttcgaacagagtgacgcgattgtcggacagtgtgtcaggctgctgccgctgtgcatcgacagcgcggcctgtgcgtcgttgcacgagatggccggggcgatacatcacatgattgttgcgcagcgcgacgaagctgcactgccgtctcgctgtttccagggaccgactgcggcactgccgttactggcaacctttaatgtcgagccgcatgctccgctggcaggaatgcgacagtggcaggccagtttgtccctgttaccggtgagcgccgtagaattcccattaatgatcaatatcctggagatgaaagaaggtttgtcggtcgagctggactatcagttgcgctatttcacccaggagcatgcaaatgcgctgcttgaacagttcctgagggcgataaccgtactggcagaacacggacctgacgctgccggagctttattctcttcgtcagaggtgctggcagcttcatga

SEQ ID NO: 141272 - DNA, 516 bp, Enterobacter cloacae
atggaaaaagatatcgatatgatggtaaatgagctttctgcattaatggaagataatggatatagaatccatccgccagttagctcaggttttttgaaatcaatgagtaaggctaattcttcaagcactgatttatcacctgttcttgaaggcataaataatgacattttgatttttttggaaaaccaacctgactatttgtattttttgaaaaaaatggatggctttgagtttgatggagtaatactttatagttttgcgcttcaacttgaagagggtgatgttcctgtcaataatatctttctttataacgataattttaggaataacgacgtatatgttaatgctgatttatctaagcgcgttgtaattggtcaggatagcatttcttttttcacgtatgatcttgaggagaatgtgtatcaaattagagataatgtgggaacggaaaagatatttggttcatttgataacttaagtgattttttaaaggaaatacttgaagcagtcagttaa

SEQ ID NO: 141273 - DNA, 1572 bp, Enterobacter cloacae
atgcttaaaacgctatcgattcgtaccggcttgctctctttactggccgttatgacccttctgctgctgattgtcagcggcattggcatttatgccctcacacagagttcttcgtcacttcagcgcatcaaccaccttcagggtgagcagatggtgcagctcaattctggctatacgctgatccttcgtgcgcgcaacgaggcgggccaggctgtcagaatgatggaaattggtctgctggacgatgccgcgaaatcggtgaaaagcattaatcaggagatcgccctggcgcaaaaaacgctgaaaggcgtgatcgacgcaggcgtggccgatccccagggacagcagttgctggataaggtggcggccagtctggcggcctataaccagcaggggatcaacccaatgctgaaagcgctgaacgaacagagcgcagacagctattacgatctgctggagagtaagctcattccggtagcaaagcagtttgataacgatatgcaggcgttccagatgtggagcgacgcgcgcgggaaagcggaagtcagcgccgtgcagtcgagcaaaacgcgggttctgatcctgatcgttgtcgcggcgctgctgacggcaggcatcattgtgctggcctggctggtgctgcgccacatgctgctcaagccgctctcggcgtcgattgcgcagctggaaaacgtcgccgcgggggatttaacccacacgctgaatgccccggcgagccaggagttcaaccgtctgaacgctgccatcgaaggcatgcgccagtcgctgatgcactcggtgatgcgggtccgcgatgccagctcgcaaattgataccggtagccgcgagctgacggcgggaaacagggatcttgccgaacgcacggagtccaccgcgacctcgctggagcagaccgccgccagcatggaagagatcaccgccacggtgaaactcaacgcggataatgccgagcaggcgcaccagctggcgaaatctgtctcggatactgccgatcacggcagcgaaatggtctgctatgtgattgagaaaatgcgcgatatctccggcagttcggcgcggattgccgacattctgagcgttattgacggtattgccttccagaccaacattctggcgctgaacgcctccgtggaagcggcgcgtgcgggcgaacaggggcgcggttttgccgtcgttgcgggcgaggtacgtaatcttgccagccgcagcgccgatgcggcaaaagagatccgttcacttatcagcgactcgcagacccacgttaatgagggcagcgagctggcgcagcaggcgggcgaaacgatggatgagatcgcaaccgaagtgctgcgcatgaccaaactgatgcgcgaaattgctaccgcgtctcaggaacagagccgcggcattgaacaggtgaatattgcggtaaatcagatggatgaaaccgcgcagcagaatgcggcgctggtacagcaatcctctgccgcgacgcgctcgctggaagagcagtcacgccagctgatggaagccatgtcatcatttaaactgacgacgcagagtgtcgcataa

SEQ ID NO: 141274 - DNA, 165 bp, Enterobacter cloacae
atgccctctatgattgttaacatctatcctctcaacgctcttagtcacatcattaataggcgtagtaggattcgcataatctgttgcttggataaacattatgagtgcttctttattattccgattgttctttgcgttagcgataattgcgggattttcttctaa

SEQ ID NO: 141275 - DNA, 207 bp, Enterobacter cloacae
atggtgatcaacatgaaacgcttaattgtgcttacgctggccctgctgccagccttggcccacgcaggacgcattacgttaacactggctgatgagcaggagacagacaacgcgaaaatctgcatctacagcaacgctaattatacggagacagtaacgataaagccatcacagcaatgccgctacacagccacgtttgtggagtag

SEQ ID NO: 141276 - DNA, 579 bp, Enterobacter cloacae
atgaaaggcattagccaggcgctcaagagtgcagatgaagttaaagcagtggcagcagaactacagcgcaacgccagaagcaacctgttctattgcttgtgggtgtttatgtatgagagcggcttgcgtatctctgacgtgctcaagctcaagtatgaagacgtagaggggcaatctcacctcaaggtgaagcaggagaaaaccgggaacgtggtaaggccaaaagttacagcgtccatgctgtcagtagtggcacaacgcaaggcagagcaagcgaagatgcctgtagctacagattacattttcagtgctgccacattacgcagcaaaggccagccagtgacacgtaacaccgtgtttgctgaatttgggaagttgggaaggagagcgggattctctaatgtgggatgccatacaccacgtaaaagccgtgggcgcgtgatgttcgatgcaggggtggctatagagacaatcgcccatttcctgggacagacagatccgcgctcaacgatgtattacatcgggtatggtcaggacgtgcaggacgatttaacagaggagttctctttagaatggtga

SEQ ID NO: 141277 - DNA, 177 bp, Enterobacter cloacae
atgagcgaaacccaaaagaagaaaccagccggaacattcgtaaaactgcctgatgaagtgtttaccactttatttaaagaggcacgagcgcaaggcgtaacaatgcaggagatgttaattgacgctgcaaccacactttcattatcaatcaagagcggagaacgttctactaaataa

SEQ ID NO: 141278 - DNA, 750 bp, Enterobacter cloacae
atgaccgacattataaacggagacatttacaagtattttggtacagaagaagcattatccgaagcaagtcacataaccaacgttaacacaggtgagcgtgtcgagctatctaacaataccaaagcattatacgctcgtatgcgcaagcgttttcatttttttaccacttcgaacattggcggaaataaagggatctaccatgacaacgtagaagaattagccgcaagtgttggaatctcgaaacgtacagcattgcgttgcctggaagacttgaaacaagtgggtttggtgattgctaatctttcaggacgttccaatcaatggatagtgacggacttaacacctgatgcctttaggcttgaacgtaggacgggaacaacagccgatccagtgtggattgattgcctaaaaaaccctgtgtttggtaacgtcaaagaagatgtagcgcaaggagtgcaggaagaaaaacagcagccagtgccagaagaggccaaagcagatccgaagccggagaagccaaagcaaatacctacgaagaaacccgcctccattccagctaaagaaattaagatagaagccgtcaaccctgtttctatcgggttgtatcgggatgaatgggaaaacccagaaaagaatttacctgtttcacaacatccgaaaatcagatggctacttattaacggatacctggacacagagaagaatccaaaacttaaaacaatctatgaggaaataaaacatctatgttaa

SEQ ID NO: 141279 - DNA, 390 bp, Enterobacter cloacae
atgggacgaaaagaacgcagtaacattgtcagaatcgaaaaagcagtgagagcaacaaaacgtaaatacagccataagctaaaagattattcaagagaatctattcctggcgagatggtaacaacgattatagaacaccctccctctgtaccttgcggtgatgaatacaacgccttgcaagaaatacttagcactacacctggcgtattctggaaacctcgaaaaagaaaagaatacataattgacagtagccagcttaaaccctggcaaataatcggatttgaacgttacgccgattatgtcgggtattcacaaactaacggcctgagtggtcacactgccgatttggattttttatttaatgacgataaagaaaattataatgactaa

SEQ ID NO: 141280 - DNA, 360 bp, Enterobacter cloacae
atgacgataaagaaaattataatgactaacgacacaattcaatctctactccttagtttcgaagataattatcatctcccgctactacaggaagtgaataaaacatacatcacagcaacgcctgagagcctcctgaacgctgtcagacatacagagcaagccatcacagcccttgagcatcttcaaacctctgtagcgcgtttggtggagcgtgacggcagcaccattaccgctgatcaggcgtggcgagcagcaaatagccttgaggagcttgcttgctccctgcaattcatcacgcttgagttgggagagcttgccgttagcattgcagagaaatacgctgcaagtgaaattgaataa

SEQ ID NO: 141281 - DNA, 225 bp, Enterobacter cloacae
atgtttctattaaacaatcgcgaccgaatcctaaaatacaaagatgaagtgattttgtgtaaccctgaaatgatagctaaagtggctgaaatggcaggatgcactgtagaagaaatagagaaggctgtagaccagtatttcccttctgaaaacaccaatccaaataaattaagtattcaggaacggatcgccaataaagtaaaaaaggaatcaaccaaacaatga

SEQ ID NO: 141282 - DNA, 1032 bp, Enterobacter cloacae
atgattattggaaacgagcgtatcgacctttccccattattccagctaaccagcacccgcaattttttactgtcgtcactaaacatttttgatggtgacggagttacatctcataaagtgagtgtgtcccgtctgctggaagataacaccagcctttataaccagccgactgcaaggttctccaacgaacataacgtaacatcccgtcaaagcggtaaagaatacctgattgagcttcctttctttatgagggaagatctcattgtcccagcagacattcagggcaaacgtaagccaggaagcgacattcaagaaacagtgacagacatttacagcgattacatgaataaacacgctgtagcgtttatgcgcactcgcgaaagctatcttgcacgatctctcttctctggtcaggtgtatacgcctaagacagacgatctgttaatcgactttggcgacctgttcggcgtagcgccaatgaacaccacgcttgatctgtctgctacagacagcagcaccctacgtgcgattgatgacatggtgagtcaaattaccgaagcggcacaaagccaggcgtcggcagtggagcgaattattgtttttgctaaaggctcattctatagcgatctgcgtttcagccctgcaatggaagcggctttccgctatgtcagcccactggacgaagggaacgtagtattccagcgtcgtgacctcctgccaggcgtgagcacttttagcattccaggaaccaacgttgatgtaatcaaagtaactgatccgctgttacttgcacaaatgggtgattctgacgctatcgctatcgcgaaattccaagctggatcaggtatttaccagaacatttacggcgcggcttcgtcaacgttcgaactccttaatgcagcacctgcggaagtgtatagttggagcttcgaaagcgagcgcggaaacgcgattaatgtgatctcggaaaattcggcgttgcctgtgaatcacggattgggcttctccgttcacattaaagcctcagaataa

SEQ ID NO: 141283 - DNA, 1863 bp, Enterobacter cloacae
atgtctgatggtggattatcgatcaacgttgcttctattaagacaaccgtttcttttgtggtcgataaacaaagtattgcgcaagcccgtaaagctggcgatgacctgaaaaaatactttgagaaaatcgcagatcctaagattcgttttcaggctcaaaagaaaaacagacagaaagcccgtaaacaagccgatgatgcgaagtttaatagctctcctaagaatacggctgaaatgaaagcgcagcgtacagcagagaagcagaaagcgagagatgaaaaagcacgcttaaaggatcaggcgcagctacagaaacggcaggaaacagccgagctaaaatttcgtcatgcagggctacaagtttcaggaattaaaggtaaatacgggcttgatcctaagtctcagtatgaagcgttacgtttcatacgtcagcaaacagaggaatttgccaaaggcaatctgaccagcgcccgtatgaacgcctctattcgtgagcgtgtaaccctgttacgcagagaagccgcacagcaagcgaaggtgacacaggcacagcgtacccagtatgccgcagcagccactaagctaaaggctcagaagggcgggaatgctcctatcgtcggtggtggagtgttaggaagtcttgcgttaacggctggctccctcggagtggggcagcgaattgttgacaaagggaatgaaaatcttgagcttgtccgtatgtcggaacgcacgaagttgaatccaaatgcagtgaaatcgattgtcacctgggggcagcaacacggcgtacagagcgccagtgttgacaagattacggacggcttcgggaaagatacccgcgagaaaatcagtgaaaccctgatgaacagccaattcgatcagaagtctggtggctataagggcggcaacgccaacattgaagaaatccttaacaagtttggttggaacaagtcgcagctttcacagtacgaagacaacccgctcgattttcttcaagcaactgttaatgaaggccagcgtcgcggattttcagatggagagcttgctcacttgctggaaaacattttcgatgatggggcgcattatgtagacctcttcaagaataatggcgagcagtttatttctaccctgaaaaacctcgtagacagcggtcagacgctgaatgatgagcagatccgccaaacatacgcatacggtgatctctctgtggctatgtcttctttgatgaatggcgttgataacagtctattcaccgggtttatgcacggtttttcttctggaggctctgacctcgtgaacaacaccaaagtgatcacagaatcagccggtttgcttggagagggcttaggcgaccttgctaaacaggtgacgggctttgttggtgagatttccggcgtagtgtctgatcttaacagttcgctacgtcagcgcttccctgattggtttagcgatgctaacaagccagcggcccaggctctctatgatggtgctgtgggtggttctgcgaatgctacagcggattggattcaggataagacgggctttgatacccgctcagtggggccagcgatcatggattggttgggcgttggtggtggtaataccggatcagcggctaatcaatacagtctatctggtgattctctgcgtgatagtgctatgtctcttggtggtggtacgccagcgtacacggtgaatcctacattcaatctaaatcttgaggcatccgtaccgctcactatcgccagcgattcgagcagacttgcggattatgtcgatttcacggctaaagcctcacaagccagcttcatgcaatcgctcacgttgtcagcattaagcggtcaatcttctacagggggatga

SEQ ID NO: 141284 - DNA, 129 bp, Enterobacter cloacae
atggctaaacaaaaagtagttcgtgatgcgatcactggtcagttcgtaaagccgatagaggcacagcgccgtccccacaccacggtaactgaaactgtcaaaattccctctaaaaaagggaaaaagtaa

SEQ ID NO: 141285 - DNA, 468 bp, Enterobacter cloacae
atggaaagtcataactttgaaaggttgaaacagcacattttatctttatcagtctcaacgaattttgaagtcgccagaaccgaatggaaattgcattctattgaggtttcggatgaatttgataattgcccgtgtgggcaggaaataaaagaacactgctacattgaaaatagtagcaatggtaatactacttatgttgggaatgtttgtataaatagatttcttgagatttccaccggaacattattcgatggtttaaaaagaatcaagaaagacattcatgctaatcctaatcaagcattaattgagtatgcgaatcgtaaagggtatctatttgataaagagtttgactttctaatttcaacaatgaaaaaaagaaatctcagcgataaacaaaaggcttggaaagaaaaaataaacaaccgaattttaaatgaaatagttgtcaagaaccgcacggtaagataa

SEQ ID NO: 141286 - DNA, 372 bp, Enterobacter cloacae
gtgacatacggttctgatgacacgactgtttatacagaaaacgattttttccactaccacctgctgacagacagggagattgaaaacgcccctaaagtaacggacgactattattttgaggcgcattcgggcgatggttacgaaccttcaaacagtatcatttttaaaggcgctaccagtgctgcgccgttgcgcgcttatctcgaaacgttagggtatgtgaaggaaaagcgtagcctggaagtgaaggaggcctggtcgaaacccgaacggttaaacgcagattttttctatctgtacttcaatacggctacgggtgacattgaactgaccaaagtgataggtaacgggcatgttatcccatgcccgtag

SEQ ID NO: 141287 - DNA, 1299 bp, Enterobacter cloacae
atgacacccggtcgttactggacgatttttgagcatggttatgtgattagcgataacgatcggagccgcgtcgagcatgcgatcgcactgccggatacgctttttcaatggcttgtacaacgctgtttaagtgataacgcagagtatgacggccggctgcttacccttcgttctgtgggtcgggttcaggcattgcaggtcaaaaactacgtaggcgtaattgcgctgccgggcggtgcgtttattgaagtgttgccgaaaacgggcaatgacaacgcacgagaacagttgatgatgatgctgcgtaccctgaaaaccttccgacatattgcaacgacatccgccagcattcagacctcgcgtatgccactgatggatatttttattcaacaatttatcagcagcgttcagtcgatcctccaacagggtcttaaacgggactaccttcgccagcaggataatcttgcctggatgaaaggcaaattactgatttcagcgcagctaactaaaaacagcgttcggcgcgatcgttttcaggtggaatatgacgaatacagcgtcaatcggcccgaaaaccgcctactgaaaacggctatcgataatgtctcccgcctgacccgcaacgctgaactcgtcagacaacttcagtcgttacgatcaacctttgagaccattccgcccgtggtagatgtcgcgtatgcttttagtcaggttcgcctggacaggcatatgcatcattatgagcaggcactggaatgggcaaaactcatattactgggcgagtctcctcactgtatgcagggtcatgccaatgccatatcgctactctttccaatggaagcggtttttgaatccttcgttgccgcatggatgcggcatcatcatcatcgacattatcggattgatactcaggccaaagcgcacagtctcgctcgctaccacacgaaggatatgttcaggctcaagccagatatctggcttcgcccgcataacgacacgacacattctgcagttatctgcgatacgaaatggaagaagattaagcctcataaacctggctttaatatttcacaacatgatctgtatcagatgcaggcctacggggtgaaatatctcgataaccgtggcgatatgttactcatctatccggaatacgaagattttagtgatgctctccctcatccctttgaacttcataatctggaaggtcaagcgctacgtctgtgggtcgtcccctttgccatcggaaccagcattctgaactcgacactctacctccctaaagcattgaatctttaa

SEQ ID NO: 141288 - DNA, 2061 bp, Enterobacter cloacae
atggttcaggaacataccgacgtactctcatttttcacctctcacacggccaataacgatacttatagccccgagtggggaccgtcttttcgcgcgctccgtcaacaagttcagaatgaacgacccaacttctcagacgagacgctttatgagctttggtacaatcgctccaatggagtcgccagtgtcaagcaaggcggtatgtcgataaatgaatataacggcgcaatagaggagctacgcgagctttctcgccagatgtctaaagaatgtacacgcaccaactatgagcaggtgattggacaactcaaggcgctcaaagaccaaaagatcctgaaaaaagtatactgggctctttgtcatcgtgcgtttgccgttatgtatccagagcatataagcaatatcgtcaacactgacgcatttttccggatctacaactactgtaacaaccgctttgatttgggcctgtctggcgagggcgattggtttgacctcaacatggagcttaaagaggcattaaaccaggcgatcggatctgagattgattccatcacgctaaatatgtcgctctggcatctgtacgcacatttcatccttgagaaaaatgataccctggtgacgcctgacagtacgggtgatgatgaagacgaacaaggctccgaaccccacgatcttcagctccccaaaaaccgcatcctgtatggacctccaggtacaggtaaaacctataaaaccatcgatattgccgtgcgcgcctgcgagccacaggcatatgcccgactggacggaaaagaagagagtgaacgccgacgcgagctaaagaaaatttatgaccgcctgatgggagaaaaccgaatccgctttattacttttcatcagagcttcggctacgaagagtttatcgaaggattgcgggcagaggctaccgatgacggcaacgtacgttacgacatcaagccgggaatttttaaacaaatttgtgatgacgccgcctttggcaacgcaggtgcgctgcggactttggataacgcactcgtacagttacaggagcggctttcggaaggagagagcattacgctccgcacccacaacggcaatccgttccgtgtgacctacaaaagtgaaaccgcttttgggattttcccggagcacagtaaaaaagaggatctgggtcagggctataatgcgtacctcaaggacattcgcgcctggtatcaggataacaatgccaaaatccataacgtttcttatgtacgagggatcctcgcgtatctggtcgaaaagagtgagattccggccacacctgcgcagtcaacaggcggtaaacggcaaaatttcgtgttgattatcgacgaaattaaccgcggcaatatttctaaaattttcggcgagctcatcacgctgattgaaacttctaagcgtgcaggcgaagcagaggaactcagcgtttcacttccctattctggtacatcgtttagcgttcccaataatctctaccttgtcggtacgatgaataccgcagatcgctccctgacggcgcttgataccgctttacgccgccgctttgagttcgttcctatgttacctgacaccagcctactggcaggcacgacgatcaagggaattgagcttgaacgtctgctggaaactcttaacgcaaggatccagtcgttgtatgacaatgaacatacgctggggcacgcctttttcatgccggttatccaggttaaacatgacgaagacgccgccttcgatctgcttaaacgcattatgaaaaacaaaatcctcccgttactggaggagtatttctacaacgactggcaaaaaattcgcctggttcttggagacaaccagaaaaaggacgatagcttacagttcgtttcatcgataaacagtgaagggaacttcctgcggttgttcggtgctgatgcagctgaggatttgcaggaagcagggattagctatcacctttccagcgagtcgaaaccggtatggaatgatccgcttgcgtaccgccagatatacgccccagcagccattcgccaggagagcgaggaatga

SEQ ID NO: 141289 - DNA, 324 bp, Enterobacter cloacae
gtgccggaagaggagatcaaaggcatcgaatccgtcctgacggtggtcaacggcgatatcgtttacgccgcaggtacctttggcccgctggccccgccagccattccggttctgcccgagtggtccccggtggtgaaggtgccgggccactaccgcagcgcgccgccgcaggccacacgcgtgggtatgaacgccgtccaccactgcagcggcccgtgcggggtgcacagccaccagcatgattttgcccgcacgtcagagataccggtgtcggacgataacgcattctggggggcgctgggctgcagctgctttgcattctga

SEQ ID NO: 141290 - DNA, 684 bp, Enterobacter cloacae
atgaactggaacaaactgctgatgctttcattactgctgaccgcctccggatgcagttctcagaaaccccaccctttacagtcaaaacaggccgccagcggggactggtcactgccctatagtgaatgggatttttcgtttatcactccttatgagttaccggcagaagcgcttcatgcccgtgtgatcgatacggatggttacctatatacttttaacacacttgattcaacttctcgcgatcctgactccgtcgataaatggacagacgctacctttggcagtcgcgccattttcaacaaagtcaaagcccctccgcagtacattgtcttctgctgggaatcttatattgaccagcaaacctacgaaaccagcgcggtgttcggaccggaaacctggatgagaatgcaaacgcccgcagatcatacccgtctctcgggcgctcccgtctggtacaacagaatggtatttggcctctcccccggaggcaaagtcaaaatttggttttcagatgttgccggacgccccagcctgcctgtcaaaccgctgaaactgatgacccgctccggcaaggacctgagcctgtgcaaaaactatgtcgttcccggcggtacgtttaacgtcatccagtcaacacaggaatttatcaaaggcaaaacctatccctatggcaactgggattaa

SEQ ID NO: 141291 - DNA, 684 bp, Enterobacter cloacae
atgaaaaaacgcaacgtgctggcgcttgccctgctgcttacggcttcaggctgcagcccacaaaaatctcaccctttacagtcaaaacaggccgccagcggtgactggacgctgccttatgatgaatggacctttaccttcatcacgccaagaaaattaccatctatggtaaatcacgccagagtcatcgacacggatggttatctgtatacgttcaataccctcgatccgacttcatgggaccctgcctctgttgataaatggcctgaaaatgcgcacggtttttacgcgaacttcaataaagttaaaaaacccccgcagtacattgtcttctgctgggaatcctatattgaccagcaaacctacgaaaccagcgccgtcttcggcccggacacctggctgcgcatgaaaacgccggccgatcatatctggagcaatggggatccggtctggtacgacaatatgaccttcggcctgtcacccggcggcaaagtcaaggtctggctcccggatgtcgccggacgccccagcctgcccgtcaaacccttgaagatgtggacccgctccggcaaggacctgaccctgtgcaaggactatgtcgttcccggtggtacgtttaacgtcatcccgtcaacgcaggatttcattaaaggcaaaacttacccttacgggaactgggagtga

SEQ ID NO: 141292 - DNA, 1074 bp, Enterobacter cloacae
atggcacagcgtcctgggataactgtttccccacgtttctacggttttattattttatttatgtgcttaaccatgagcgccttttacgcccatgcgaacattgaatgtcaggtcaacagcggttatacacgatcgattggcaactttactggcgcaaaaccaacactacaagccattgatactgttacttctccaaccaaaatcagtgcgctctactctcttcgcctgacgcctctgttaactagcctgtgcgacacgggagatgatggtgaaaatatctttaccttaacgcagcccgacctacaggttggcaacgttgacggtaaagcattattcaaaaccaatgtaattgggattgcatatgcgttagctttccgcacacgaggaactggagttacggcctattttgctccaggcacaacctggtttttaacgcatcatatgaataatcatgatgaactattgtctaaacaagactgggaggccgcagtggaattttatcaactccccagctttaccggtattccagccaatgtggtatctgtgagtcctgcaggaggtacaattggccaatttactattggggatccaaatgaaagtgccagagatcaccccaaacccatcatcaccatagccaacatggcattcgcaacccctatagaaataccgacctgcacccttacagctcctaaaaccgtagacctgggggattatggtgtatccgatatcgagaacgataaaaccataaacgccgattttggggtgacagggaattgcaccaacacccgtaaagtcaccgtgaagttgaccaccagtaaaacaaccgggactgatggctcattactcgccaacaccgcaccgtcgaacgcggcacaaggcgtgggcgtgttactgaagtggccgaacaacaggcagatagtacctaattcaaccagcagctataccacacaagagagcactacccttgcgatattcagctggttacttacggcccggttagttaagtctggtacagaaaaagtcacctctggcacgttcagcgccatcggcacattgcagttcacctacgagtag

SEQ ID NO: 141293 - DNA, 690 bp, Enterobacter cloacae
atgaaaaaacttcttttagcagcgtctgttgctgtgattatgtcgtctgctgcccatgctgcggaaactgcagtattaaaagtcacaggtgttttaactaactcagcatgtaccccctccctgagtggcggcggtattgtggatttcggtacgacgaatattggtaacatgtctgccacgcagactaaccaacttggcaataaagatctgtcgttctctatcaactgcgttgccccgacaaaagtaggctggagtattatcgacgatcgtgcggattccagacagaatttgattgtcgaaaatactgactggagtggttctggttcggtgtggagcagtaatagccttttcggcgcgggtaaaacctcgaagggtgtaaatctgggggcatattccgttacgatgcaactgagcaacgtcactgcggacggaaataccacggggatgatttcaggtgccaactccaccggaagttattcatggggccagatggtgggcgacagtgcgccggttcgacatgacggcatggtttacacggtagctggtagcgcaggcgtcgatccagtggcctttaccaatgcggtattcccgctgcgcatcgcgctggccgttcaggatacaacatcgctcgccctgaccgatgacaccacaattgacgggcaggcaacaatcagccttgtttatctttaa

SEQ ID NO: 141294 - DNA, 285 bp, Enterobacter cloacae
atgccattagcagccaaactcgccgacataggcacccaacatgacggctatcatgaaaccgttattactgccggctcaccaacggtatcttttgatgggttacccgctgccagattaggagatcccttaacaccccatgccaaacttctccaccccccacatcctcgtaaaatcgccagtggttcacccaccgtatttattgatggtttacctgcagcaagaacaggggatgccatcgactgtggtggcgtcgttattggaagtggaacagtcaatattggctaa

SEQ ID NO: 141295 - DNA, 966 bp, Enterobacter cloacae
atgggtgcagtgctttatgcaggtgaggatcctcaaaaaattcgcagccggttcagtattcaggaatcatactgcgccatcaaaaccaatggcgtcacgggatacagtaaccggcgttctgcatggatagagaatggtgactcgacaggcaccgccacatccagtacgaatgccatgatgcttatggaaaatggtgaaaatgaaatcagtctggagatgggcgcactggggtggttttctgataaacctgccagcacagaagaacgggcgcggtttacaccacaggcagaatgcagtctggatctggttcgctttgtgaaacaggatgagaccattctgtcatcaataaaagtgtcaattaatcagcagggaatacctgaagcacagccggaccatatccatcccgtggtccgaaaagagattcttgcggagcaggcagagcccggatttattgacccggattattttgatgaaacctatttcccgaaagagatgaaaatatatcagtttacacaaaaagttacggtggaagggcttccagaatggagctggaccagagcaaccccgttcaccggcagtgatgggcagctgcagaagctaaaagcagcctataccgaaatggctgaaatcattaacagccggaatcgggaccggcttaaagcgtttgatagtgaggcgctgaaagcgtggtcagtcacaactggcgacagcgaagatgccatcctgctttcactgtatacaaaagaaaaactggagggaggaaaagccagaatacttcccataaaatggggagattatgcagttcgggtaatgaataaggggcgcatggtgcagctatacaataaatctaaaccaacatattccccgcttacctacagtttgatagatgaaaatggggaggaggccatgggctcttatgctcctgtattttcactgattgacggcaaatttatccctgttacgtaa

SEQ ID NO: 141296 - DNA, 939 bp, Enterobacter cloacae
atgacaatttttaatttaaaaaaatgcattcccattatttattttatgataatttccatgataaattttactcaagccaaggagaatgccagagataacatcaagtatcttatttttttcaaaacaaaacgcagtgcttgtatggtcagaataaatggttttcctatttttgataattttactttttcaagtagcacaatagcagcaggtgacaacattacatcatttatcgaaaatggtaaaaatacagttgaagtattgatgggatctattgacccacaaaataaggaaacactttactctgattcagaatgtgaacttacaatcacaaaagacacaattaattccagtcaaaatgtgacgactttcaaactatccgttgatgccaataaaaatatcatagcaacaacatcaacaaattttgatgggttcgaacacgaggggcgcattatcgaagagcagaagaaagaagacgactggctttatttacaaagattttatcgcgacatcgaatttaacggcataaaaaaatggtcttgggtaaattcggacagaacggtaacggaaaaagacatacctgaaattcaaaacttttatcggatactgtggagagcaatgaaagatagaaatataaagacaccaaggcaaatggcagctatttcaagtaatgaaatgggtgaggcagagggcatttcaccagatattgtctttgaatcatatgaccttcctaagaatatccttgacaaggatttaacacctatagatttagaatgggatgaatacaggctcacaacctattgcaatggtcgggtatttagattatctaatggaatttatgaaaactccccattgaggcttaaaaataaagataatgaaattgtatattcttacacaccatacctttccattataaatgggaaaatagttatagttagatga

SEQ ID NO: 141297 - DNA, 951 bp, Enterobacter cloacae
atgataaacttaaaaaaaatgaatcaacatatcgctttcattttatatagcattatctcattggtgttaatatctacatttatcccattaaaggctgaaacaatgaatagtataaaatacctggtatcatttaaaacaaaacgtagtgcatgtatggttagagtcaatgggtttcccatctttgataactttatatattcaagcgggacaattgcagcgggtgacaatattacatcttttattgaaaatggaaaaaatcgtgttgaagtattgatgggttccatagattctcaagataaagacaccctcttctctgattcagaatgtgaattcaccattacaaaagacacgattaattcgagtgaaaacgtgacaacaattaaattatctgtagacaacaaaaaaaatatcatcgcaacctcatcatctaattatgatggaggaaaacatgagggatcgattatcgaggagcaattgccagaagataaaaggttatttttacatcgattttatcgcgatattcagtttaataacattaaaaaatggtcttgggtggatgctgacagaatagtatcggaaatggatttaccagctattcaagatacataccgtaaaatttggcaggcgatgaaagatagaaacattgatgcactgaagaaattggctgacacttccagcaaagaaatgggtgaagctgaaggtatctcaccggatatagttttcgagtcatatgatttaccccaaagcattcttgaccaaaatttaacgccggtacagttagagtgggacaaatataaaatcactacttactgtggtggccgagtatttagattgacgaccggaatctatcagaattctccattaagattaaaaaacaaggaaggtaaaatagtattctcctacgatccttatcttgccaaaataaataataaaataattatcgtaagataa

SEQ ID NO: 141298 - DNA, 1593 bp, Enterobacter cloacae
atgacaagcctgactgctgcttcaccaacttgtaactgcaagaacccggatacttgcatccactcatttaaaatgagtttagataaaaatgtttatgaatataagcaagacgaatttttctcaagcattgatgttatcaatgcaaagggaaaaccggtctctctaaccttatcactaacagggaaaagctgcgtctcccataaccccgaatgtccaaatggtattatttacgatttaaacaaaaaggacacattaaagaaagttgtaaacggaacaacagagtactcagtaacatataacaaggctggagtgagcgatctgtcatctcttaattccattttttttataaataaatacatcctctctcaaaacagcgctttagccttacttcctaaaaacaaataccttttacgcattggccagtgttatggcgatccacttgttgaagaaagcattactttcatggacggtgtaaaagaaatgtttaatcttacaccacataaaagaatatggtgtgccattaatgtctatcccagttatgactggaaaattgatgtaaaaattggcctgacggataaagttactgagtacagcgatgatgaactaaagtctcagcagcgtaaaaagaacagagaagcaggacaagaaaaacgaggtgtcagaggatggactcagcgtccgaggtattcaattacggatgcattggatatcgatgggacgatgtcttataaactcgcttccatgccaagacatgaatttagccagaaattaaagattgattttaaaagaaaagctaaagaattaacgctattacaggatgctaccagagcactggatctcgttggcaaggccctttcaacaaaagaaggagccggtacaaaatataagatactaaatacagatattttatatccaaaactggtcataggtggtagcgccgttctgacagaagataaaggcagccattcagtttatatgaaaggcaaagtatccgttggcttgtcaccgctgattggactcagaatgacgtttgatttgttgcaggcatttgcagcctggtatggtgctgcaaatgtcagtgatgtcatcagacaacagctcgctgcacgtgagaactcagttaaaaatggtgataacggtgcctacctgggattgaagttcgatctgattgcttccggtactattaacctttcacttatttatgaatcaacggcaagcaacgactggaaatggcgagtggatggaaccaatgaggtaaagttagggctttctctggaagcgaatgctcgggctggtgtcaagatatacttttttgagggggcttttgaggtttatgcaaaagcaattgctgaagggttaattgctttcgatttaactgcacagaataatattgagatgatattttatcataatggagttagggctgaggttggtgttggaatttcagtcggcataactaaaggtgaagagaaacagagtactgaggaagaatttcgctactcaacaaaacacactgaaggaaagaaaaaggagtggataattcatgataaacttaaaaaaaatgaatcaacatatcgctttcattttatatag

SEQ ID NO: 141299 - DNA, 810 bp, Enterobacter cloacae
atggaagcgatacggtatgccattattgatggcgctattgaggaagggctgctggattttttgaaaagaataaaccctccgcattgctgcctgtatgctgaaccgatacagccagatttaatcaaactagccccttaccttgtagaagttacttctgaagtcgaggaatggttacaatcgaaagttacgccgtggggtatttttattataacaaaaacgaccatgaatggcttgagacaacatttgagaaaatatttgcaggtattgattccagaacaacctaaacctgttttactccgtttttacgacccaagaaatatctgggattttctttctatcttaactgaatgggagaagtatctttttgtaggtcccgttgataaatttatatccgtatggaatagcgagcttaatgaggaagattttaaaactttaaagacaaaatacccgagtgaaagtattgttcgacaaaagatgatgaaaatatcatctactcagatacaaatgttaaatcatatttacaaacagcgatatattaataacgttattaagttaatccattcatggggtgaatcatctgaaaatatagacagggcaattattgaagatacctttgactggttaaaagaacaaaaaataacggatgatcgtagtattcgtggcctgcttttccttttttacaagcaacgttgtctcgcggttggtgcgataccgcaaaaattcaaagagatactttgtgttgagaacgaagaaggtgttttcaaggcagaaaagcttctgattcaggaactgggtgatgttcctctgtaa

SEQ ID NO: 141300 - DNA, 1959 bp, Enterobacter cloacae
atgtcactgaaaggactacgctttacactcagtatcgacggtcaggaagagaccgcactggccgtggtggatttcaccctttaccagcaatactcccttccctttgtgatggaggtcaacgttgccagcaccctcttcagactgactgctcctgatttcctggaaaaaaatatcgttctgaccatctggcagggcaacacgccacagcgctgtatcagcggcatcgtcactaccgtggctctgggcaacaacgacggctggcagatgcattatcacctgaccatcgccccaccactctggcgctgcggactgcgacagaacttccgcatctttcagcagcaggatattcaggccatttcatccaccctgctcacggaaaacggtgtcaccggatggacgccctggttttatgaaaatcatccgccccgtgaattctgcgtccagtacggcgaatccgacctcgcgtttctgacgcgactctgggctgaggaaggtatcttcttttttgacaaacactccccggacgggccggagcagacgctgaccctgtgcgatgacgtcgccgggctgtactccctgcctgacgccctcccgtttaatccgaataccaccaccgaagtgaccagcgagtgcgtcagcacattccgctatgtagccaccgtcagcccctcttcagtacaaagccaggactacacctttaaggttcccgactggccgggtatctatgcccatgaagctgacaacctgaacggtcagctgtcgcagtacgaaatttttgattatccgggacgtttcaaggacgaacagcatggtcagaatttcacccgctacaaaatggaaggcaggcgcaacggtgccgaaatggctacctgcgtcagtaattcagccagactgtggccgggcacccgctttaccctgacagggcacccgacgcacggccttaaccgggagtggcaggtggtgagcagtacactgacgggcctccagccgcaggcgcagcacggcagccagggagagggaacctcgctcagcaacgattttaccgtgataccagctgaccgcacctggcggccagacctccgggaaaaaccgaaggtggatggcccgcagagcgcggtggtcaccggtccggcgggtgaagaaatcttttgcgatgagcacggccgggtacgggtgaagtttttgtgggaccgttatcacggcggaacggaggacagctcctgctggatacgggtgtctcaggcctgggccggaaccgggttcggtaacctcgccattccccgtgtgggccaggaggtgattgtcgacttccttaacggcgacccggaccagcctatcgtgatgggccgaacctaccatgaagataaccgctctccgggagatctgccgggcacgaaaacgcagatgaccatccgctcgaagacctacaaaggcgacggctttaatgagctgcggtttgacgatgccacggataacgaagaagttttcttacatgcgcagaaaaacatgcaggtgaaagtgctcaacagtaaagacgtacgggttaattatgatcggacggtgagcattggtcatgacgaatcgcttgtggtggccaatgaccggaaagtaactgtcgacgggaaacaggatcataaaacaacaaaagatcatctcagtctggttgagggtaataccggccttgaagtaaaaggcgatctggcgcagaaggttgccggagctctcggcatcagtgtacagggggatattgttttacagagcaacagtaaaattagcctgcgggtaggtggttcgtttgtggcaatacatgcgggtggagtcgatatcagaggtccccgcattaacctcaatggagggggaaaccccggtgacgttattttaccgatgcgcccggtgatactaaaagcagcagcagggagcggctcaatgttcgtgtcacattgtccgaaggaggaataa

SEQ ID NO: 141301 - DNA, 483 bp, Enterobacter cloacae
atgaaaagtgttttattttcaatagtatataaactattggcttttcttttagttatttttttaaatgggtgtgagagaaatgaacaagagcagacttttgcttatttcgatttaaaagttgttctagctaagtcagaacttttgcatcaggaaaaaaatcatcttgaacgagttgcaaagatacttgaaagtacatatgacgaagaagaaaaagataaaacccatgaacaaactaaatacaacaacactcgcgaagttaatcagcgaaagttgcatgatcattttcaatcatgtcgccaatcagcaagatatcaaacaattaaagaaataatgggggttgcaaaaaaaatcactcaggaacgtggactgaaaattcaaaactatggagctataattcttgcatcttctaattatattgatgtgactgttcaagttattgaagcactgaaagaaacttatattaattttgagttatgcgtttga

SEQ ID NO: 141302 - DNA, 627 bp, Enterobacter cloacae
atgaaagtgatgttcattggagccgataatttctgggctgaaggtttaaagtatgttttggaagagtctttcgcagaaccagtaaagcttgttacggttcagaccgatattgactgtaattatgaagttgacattctatatgatagatatgaacttgtgttcattgatttaatgagttatgactctgtgctctaccgtaacttgaattcgttattaaataatatggctagaaaaatcgtgttcattcactctttaaattcatcctgtatcaactttcatgctaattgggtggataaacagataacgatatcaaaagatatagcattaaagaaaatgattgctgagctcatggcaccttgtgcttatgacacaaataagttcaacagtcgaaaccataatcaatcaggctttcgacgtacgcacgacgtaatgaatgcttttgaacttgaagttatcagatctatttcgacaggagagaaagtcaaaagtgtagcaaaaaaaatgaataaaagcgataaaactatatatcaactactttcacgaatgaaattaaggatgggctttaaaagtaagcatgagtttcttttctttctgacaacatttaactcttatgaaagcgaacaataa

SEQ ID NO: 141303 - DNA, 582 bp, Enterobacter cloacae
atgagccggacaacccgtcagttttttaccgtttatatggccattatggcaatgtcagtaatgctactgggaggatgtgatatgaagaaaaaagggaatgatgttgcctatgttgacctggccgctgtgttgtctatgtcaggactggcgcaacaagaaaaggagcgtatggatttggttattggcgcgctgaaaaaggctgaaaccgaggccgggaaactttatgaaaaaatgggcaaagagcaaagagaaaaagcccgccaggccgaccaggttatgctccgtaacctgcttacagaagcaggtcaatctgcaagaaatagcattctgtcagaggcccggaaggcggtggataaggtcagagaacaggatgggttgcgcattgtgatggacggatcgttgatcctttcctcagcagacgataccaatatcactgtacaggtcaccgaagcgctaaaagatgttaaggcagactttggccctctgccatccatctcagtgacaacgcctaagtctgaaacggcaacatcgggcaaagagagtgaggacgcaaaaagtcccaaaaataacatttcaaaataa

SEQ ID NO: 141304 - DNA, 5682 bp, Enterobacter cloacae
atggtcgcctcaggacaagattcgactattctggtggcgactggcctcggtacgtctgccagtaccggcagcctgacccttgacctttcaggtcagggagcaacgggtgtacttgtggaaggcggtgcaaccggagtaattgatagcaaaacctctctccagttgaacaacgccagtgccattgcggctattgctgacggggacgggcatgatctaaacgggaagtttaccagcaacgaaaccagtacaaaacttaattcctcagcaaatctctcctcaaccaaggatcaggtgaccggctatattgcccgcaacggcgccacgcttgagaactccggaaatatcactttcactggcgcaaataccaagggtgtggaggtgctggacggctctgctggaagtaatagtggcagtatcactattcaggatggtagtcagggtctggttgcaagctcaaccaaccagagcactacgataaacaataccggaaacctgacgcttaaaggcggcagcgatgataaccgcacgacaggtattaaagcatccggcaacgccgtcactgtcaatatgaccgctggcaccatcaggcttgaaggccagggggctgtcggggttgaagtgacagatggtgcctctgtgaaccttgcgggtaatgctctgcctatctttgcagatcccacgaccggggtgagcaatcaaatcgccttcctgatctctggtgcgggctctacgcttaatacccggaccacgaccgtgatggatgctaatggaaaaggctcgacgctgttccgggttgaagatggtgcgtcccagcagggagtgcttacctataatgtctccggtgaaaatgcgcgtggcatctgggccaccggcgcaggaacgcttgtgaacgctgcaaacggcagccatctgtccattcagggaaccggtgcacagggtatctatgctgcaggcggtgccagtgcaacgttggcacaaggtgtgaaagcggatcttactggctctggggcagtggtcggtgtcgttgatggaaatgagtacgaccttgcaggaagcgtcacagcaacgaataccggtacgatcctcactaacgaggccgatatccgctccggtcttgctggcgctacggcatttatcacccagaatcagggctcgctggtcaataagggcaatatcgatctgaccaccggtaccgggaacaccggcataaaagtcatcagcggaaaattcgacaaccaggccagtgatattactgtcagcggtgtcgccgtggatgttgaaggggctaactcaaccgtccttagcaccgggggcagcattatcgccactgatggtgatgctgctatccgtctgagccagggggcttcccttgatttagtcggcagcggaatgggcgtagttgaaggtcgtggaacggcgcacggcgttctgcttgacaccggtgcgacggggttgacggtgacgggggcgcagattgacgtgaaggcggctggtgcaaccggtaacggaatcgaaaaccgtgcagagattgccgggattcagctcaataacaccactatcaatgtgcaggacggcaaaggggttcggacctctgctaccctgtcgcaacagaacagcggcacgattaacgtggcaggaagtggaacgggtctcgcttttatggctgcggacggcggcattgcgggcaatgacctggatttatccgattcttctggactgaccatcaacctttacggcagcaacggtaacggaattctggctaacactgcagatggcgcgacggtgaaaagcgctgtcaacgtgaatgtgaccgcagcagacggtggctccgcactggtggtcaataataacgcgaatcgggttgaacagtccggagttctgcgttctgcgtcaacaacctcggcggtggtggatgctgcgaaagtaaacacctttattaacaccggcgacatcattgctgcatcagacacggcgctggcgatggcctttgatgacggtgtcgataccgtcatgcgtaatggttcaggtggcgtaatccagggggttattgcgctgaacaacggtaataacagcctctaccttgatgacgccagtacgctgaccggtaccgccatgctgggagacggtaacaacaccgtcaccctgaccggtacggctcgtgcggacaaggttattgccggaagcggtgagaacatctttacggtgaaagggaatggtgccgtctttaatcttctcgatggtggtgcgggcagtaacgacaccctggtgttcgatgccgccatgcaccgtctggccagtgcgtcaacgcttcagaactttgagcatgtggcgctgaaaaatggctcactcctgaccctcgaagaagctctggttctgaccgacggtgggatcggcgctggtgctgtcgatattgagctcggcagtgagctggccgtgaagccttctgttgcgggtgatttcacctttgatccgacgctcaccgggcaaggcctggtatcggtcagtctcgactcttcgcagtctgattttgctttcacccgtaatacgggaagtgatttcgcaggaaccctgaaactcggaaccagccattaccagctggaagggaataacacgtcgtcgttgacgcaggccactctggttgcagggaacggaagcgtggtcacggtcggcgcaggcgagcagcaactgggcggtctgacctttgacggagggactgttcagtttggggccgtcatgccgggggatatcattgcggacaaccacatcaccacatctgccggtggcacgctggatatcggcggcaagggtaccgttcaggtcacgctgggcgggggcgtcattaaccatgttcctgccagcctcaataaaaaatcgctgatggagcaagatgatgccaccacactggttcagcttgccggggcagatggtgcggtcacaggaacgggtggacagcttaacctggtggatgaagacggcaacgttatcagtgatgtgcaacaactggacatcgttcaggacggcaacaccgttgcgaaggggacctgggattaccagatggttagcagttctgacggtatcaacagcgatgggctttatatcgcttatggtctgaaagaagttgagctcatgggaacgggtgacgatgccctgacgcttgcagttgggcctgatgctcaggggctgcagaccgatctgcgcgtcaaagtgaccggcagtggcgatctggcgattgataccggcagcgcacagaccgtgagtctgtcgaatggcggtaatgattacaccggtaccaccagtgtgaagagtgggacgctgcgcctcgatgctgacaatgcgctggggttgacgtcagctttgaacgtcgccgcaggctccgtgctcgatatgaacggttcatctcagacggttggtgcgcttaatactgaggccgctagtcaggtgatgcttaatgaaggcagccagctgacgctcagcgacgcgcagcgggaggcaggcataaatgatgccgggacaattgctggtaacacccttatggggtcgggtgagctggatgtgctttccggtgagcttcgcgtcgatggcgcgaataccggttataccggcaatgttgccctgaatgacggcgcaaacgccattcttaacgatgtcgcggggctgggtaacagtggaaccgtcaccatgacgtctgctaacgacacgctgacgtttaacgacggtgccgagggtgcgctggcgaaaacgctggcaggaaacggtcgggtcgcacttaaggacggtgctgctctctctctggctgcggataacagcgcattctctggcctctttgcgctggagagcggaacgactctgactgttcaggggccagagcagactggacaggccgacattgagaaccacggaaacctggtgctgaacaatgtggcagcctggacggtagaaaaccatattacgggtaccggggatctggtgaaagatggccggggtaacgtgacgctgacgcagtcagcagcccagtacaccggtaacacagacgtcaatatcggcatactcaccctgggggatgttgacaatgcggttacgctggcttcttcggctgtaaacgtcgcgagtggcgctgtatttggtggttacggcagtacggctggcgatgttatcaaccagggtacatttgtactgggagactatggcgtcgtaaacacaaccccactgcaattcactgtaggtggcaatctaaccaacaacagtacggtgatgattggtcagtcgggtggcagcgccgggaacacacttaacgtggctggggactatgttggtaacaacggaaccctaaacttcaataccgtgctgggtgacgacaattcggccaccgatcgaatggttgttggcggctcaaccagcggcaataccaccgtcagcattaccaatgcaggtggaagtggtgctgccaccctcaatggcattgagctgattacggttggcggtaagtcagacggggaatttactcagtccagacgtattgtagccggggcttacgattatgttctgacccgtggccagggcagtaaaagcggaaactggtatctggtgagtggtgacacgacgccggttgatccggtcaatccgaatccgaatccagatcctgaaccagggacaggcacggatactgattcaggaacagatacggataccggcaacaagcctaagccaggctgggtacgccctgaagcgggtctgtatggtgtaaatatggctgccgctaacacactgttcacacacaggcttcacgatcgtctgggcgaaacgcactacgtagatgcgcttacaggcgagaaaaaagtcaccagtatgtggctgcgtaacgtcggtggtcacactcgctcgaaggacagcagcggacagctgaacacccagtcgaaccgatatgtgatgcagatgggcggggatattgcgcaatggagcagcgacggtgaaaaccgctatcaccttggcgtcatggcaggctatgcaaaccagaagagcaacgcgcgtaaccacgttaacgctaaccgggctgatggcagtatcagcggttacagtgcaggcctgtacggcacctggcttcgggataacgaagccaagaccggggcctggttagatacatggctgctgtacaactggtttgataacaccgtaagcggtaagtctgccggcagcgaaagctataaatcgaaaggttttactgcatcggttgaaggtggatatacctggaaactgggtgaacgtgatgagcggacggcttactacatccagccgaaagcccaggttatctggatgggcgttaaggctgacgacatcactgaaagcaacggtacccgagtaacaggtgaaggggatgggaatattcagactcgcttagggacccgtgctttcatcaaaggtcacagtgcactggacgacggaaaagagcgaaccttcgagccgtttgttgaagctaactggatccacaacaccgagacattcggcaccaccctgaatggcgtgcgcgtgaaccaggccggcacccgtaacattggcgagctgaaggttggtgtggaaggccagctgagtcgaaatgtcaatctgtggggcaatgtcgctcaacaggttggagatgcaggctacagcgacagcagtgcaatgcttgggctgaaagtgagcttctaa

SEQ ID NO: 141305 - DNA, 2121 bp, Enterobacter cloacae
atgaatgcgatatataaagtgatttttaacagagcaaccggaaagcctgtcgttgtttcagaactaggcaaagggaaactgaaaagttcagcttctagggctgttaaatcggctattctcttagccattgtgggaatgaatgcgtccgtttctgccagtatctgcaatgtcacttctatgacatgccagcttgatcaacagtggtcataccttaataacaataatcgtgcgggtggggttaaaataaatgatggtcaaatgtgggatgtttcaggtgttaattcttggcttactggtgacacatcttttgtgcaatacaaaaacttgaaaaacgtacttgctgatggatatacagttgtaaaagatggggcggctttaaatagtaagacagcacttccgcaacttcaaaaacttgtgttttctggtttacaaacaatttcaataacagatccaattaccaatgctccgaaaagtgtaagcgttttttcttcttctggtattgttctggaggattcttatgaattcccataccatgttgcgtttcttttagaaaatgcacctgtttatataaatactaatctgatagacgtttcttcaggtgttgcaaatatctcactgggcaataataactatgtgacgggagagattcgaaacagtaatttagtcaatgttgatggggcgttaaataaggcagaggttaactggaactcaagtcagcttttcagtattaaaactgcaaatgactgggggaccactccttcttcagctgattttttagtggaaagtgatacatttaaagggacatttacagcttttgataaaagtcaacatacggtaaataacattagtgacttaattatatataatgattggctaatatctcagatggtcaagggtaatcttaccgatgaaaatgcttataaagcggcgttggaggatgcttatgaacgtaagtcagagatctattcttactcccctttccctaataatagcgatgcttcgagctatggaacggctgattctgcgctaattcatgcaagtggtaaatttgcgcaagctaatatttctaaaggagtaactttagaggtttcctcaggaagcaagggagcctttaagataatttccgcagaaaatgatgctgtggttattaacaatggatacgtttcaggtactggtgctttggttgatgttaaaagtggcgcatcatttgttaataacggagtggtttcagtcggaggaggtggtctgagttcatacaataatggctattattataattaccctttaacatttactgggttgggtagtaatttaattaataatggttcttttaacattaatgctgttcatgcttatagtactaaagagttgaatggtagaatgtttggtgtttatttggatgatggttcacacgggataaataaaggcgaaatcaatagtggttattgggggggcggggttattccgcaagagtataccagttccattatcagtgttagagtgataaataatggctcttttgttaatgacgtgacagggttaattaaattaggcgtgggcgaggatggaaatacgtccagctatctcaatgtaggaagtgctgctattcaggcttacagcaatggtacggcgattaatgatggccgcattattcttggctcaaaggctgatggtgtttatggattgatgggggttggaaataatgtaaatttggtcaacaacggtacaattgatgttaacagcgatggcgacaatgggctttataccccagcccaaagtattggggttttttcaaataattcggtcaacggtactatcgacaaccgcggtaccatcaacctcaatggcgctaacaacgtaggtgtaaaagcaatagatggtgggaaagcgacttccactggcgtcattaatgtcaatatttcttctggccaaagttctatgaacaactatggtgtttgggtagaaggaaacggctctcagattgagatttccggaaatataaatctaaacggcgataaaactataggtgtacacgcccgcaataaagggacgataagtttgacggggaatagctctattagttttgtttccggtcaaaaccagattggttattttgtctaa

SEQ ID NO: 141306 - DNA, 444 bp, Enterobacter cloacae
gtgagaaaatttggttatattctgggagatgacagtaatggtgtgatggttctgcgggaaaatcgggttctgatcccactgaacagtcagaaaataaatcagaagcatatttacctcagacagacaatgttccggttgctggagtttcttcttgaaagaggaaaatctggtcttctgcgtgatgaaatcattatgagggccgtatgggaagcatatggcctcaaatcctcggcgccgcgcttatggcaggtaatgaatgaattaaagaaaaggcttggcggactcggcgtggatgaggactttattatgcgtgtagagggacggggttatatggtgaataccgccggttatgagcccgtctatatccgcgcctcatacgaccggcttagtcggttcatttttacccgtcaacagactaccaaaatggtcaagtcagtgaaataa

SEQ ID NO: 141307 - DNA, 801 bp, Enterobacter cloacae
atgaatacaacgtttttgatcgacggcaggttagtttttcaccgcgagcagaacgcattgaccagtctggttcaaccggaactcacggaaatcctgaacgagccctgtgcccgctgccttgaggcgctgctggcggcgaagggcaatatcgtcagccaggcagagctatatatagcaggctggggcgagtcttataaagacgtatcccccaataccctttaccaaaatattctcctggcccgcaaagctttcaagaaagtcgctgacagtaatgaagatttcatcatcaccgtacccagacaggggttccggtttaatgaaaccttgccggtgacagtcggtgacacccaggacaatttcgcttcagctccggatgaatttacacctgaattaatcagtgcagaaaagggcaatctgttgttcaggctatctgtatatccactgctgctacgtcttgtactcccaatctctgtagtgttttttgttgcttcggcgatgatttttattttcgcgtcttacaattacaggacgataaataatgatgattttacctcagaatataattattcaggcacacattccgggtgtgagatttacatcaataaacggcagaccctgtccggcgtggaaactgaacagcttctgaacatttggccgggtataacatccggctgccgcagattaccgctgagatatattaccccgtaccgcaatcacctcagcgtattttatctctcatgtaacagcacagaaagggcagacaggatatgcagctcaggctatcaccgcttatcagaatag

SEQ ID NO: 141308 - DNA, 501 bp, Enterobacter cloacae
atgcagctcaggctatcaccgcttatcagaatagcagtttgtttagttagtattctgatgttcacttactctgttcattatctgctggaaatgaaaaacagattggaaggtaacgtaatccattgcatgtcggcgtttgacagtcagataaataacagtcgcctgcaggcaaaagtaacgctttatatgtatcgcgaaaaaggtagtgttcagatcagcggggattatatttcacctgaaggcatgcagactccggtcaaaatggtttccggtattgcatatcaagtcaagggcgatgactatcatgtccgttttaccggcaataaaacctcattgcggggagacgatatacatgaagcgttaagtcatttgctcccattttctgtcaccagtgaaaatgttgattttatttaccagttccaccagcagattgaagggacttatctgatccgacaaaatggtatacctcttctgctgtgtaaaaaaattgccagtagatga

SEQ ID NO: 141309 - DNA, 318 bp, Enterobacter cloacae
atgagttggcagcccgttgctaagaccgtctggcaggggcgcgacgacagcgccgaggccagcaacgcaaaacgtatttttcagaccatacgccagccgtcgcaatttaccccggtttcatccgcgattgcgctgataggctttgcctgtgatgaaggagtaaggcgtaatcagggcaggcagggtgcggcgcaggctcccgacgtgctgcgtaaggcgctggcgaactggcaacgcattccggccacgaacggctggtggacatggggtcggtttatgttgaggatgaccaactggaagagggccaacaggcactga

SEQ ID NO: 141310 - DNA, 489 bp, Enterobacter cloacae
atgataaaattcacacctgaaaatggaatgcgaacttatattgatgaacagttagctcagtttggttttcaatatgatgatagcttaacaacaattgaaaatttaaaagctgttttcgccttacaaagaagaataccaagcgataaaagaagattagtaatcgaactaccaggaattcaagtacctgaagaaacagaaaaggcatatgaatccatcaagaggaaacttacccttgggttaacaataaatccgcatctttccttgagtacaacaaaatacatttacaacgacctactattaaactcttggaatattcatcacctacatctttctgaagaacccgttaaaaatggattctttaagcgaacaggtcctgttttattttgtatgttttttgaaaacgccgtcattttcatagacattatgcctcatggaagaggatattctgatgtttgggtaaatgaaaatctgataaaaaaaaattcataa

SEQ ID NO: 141311 - DNA, 261 bp, Enterobacter cloacae
atgaaaaatgaaaatgatgtatccaaagaagagatgttaagtacaatagtggcacaagcaaaagagtacgcagcgatcgactttgaacaacttgaaagagatggtgtcattaaaaaagtcaggggaggttatctggttgtcaagcatagtaaactacctgatgcggctagaaagttaatgaaatcacttaagtctacgaaagatggtgtacaaatgattatcagtaagcctccaaagtcttttcttgatttagggaagtga

SEQ ID NO: 141312 - DNA, 303 bp, Enterobacter cloacae
atgttaagtattatcattgaccttatcaaaaacggtataagtcttatcagtaagaacaaaaccgaagttgctaagtcaaaagacgaacttgaaacagaaaaaacaagtgaagcacaggaaacaaaccgtgaagagatcaaggctggaaaaggctggagatcatttttaggttatgcgtgtactggtattcttgtttataactatatcttagtacctatcttagattactttggtatcgttttattctcattcccactatctgacattatcagaatcatcattttgttacttagtggtaactaa

SEQ ID NO: 141313 - DNA, 249 bp, Enterobacter cloacae
atggcgtttcgcacggcggtaccggatttacgctgtgaagtggagcagatgattattaccggcgaccgcgtcgtttcgcatttgcattttcgcggaagcttcacaggcacatttggcaaactgaaaggacaggggcaaaaaatagattttatcgccacggatatttatcaaatccgtgaaggaaaaatagtcgccaactggcatttagaagacaacctgacgctgatgaaacagttaggagtgttataa

SEQ ID NO: 141314 - DNA, 663 bp, Enterobacter cloacae
atgaaaaaagtcattctggctacggccatcgcgattagcacctcatcagtttttgcagccggaacggctgttatgcaggttaaaggtacattaaccaacgcagcatgtactgctgaactgggtaacggcggcgttatcgattacggctttattcgcctgggcgagttatccgaaacatcaaataataaactcggtcaaaaacagataccggtgaccattaactgcaccgcgccaaccaaagtgggttttaccatcaccgataaccgcgccgacagcaacccgcaactgccggtcgatattgccggcaacttaaatcagacgacaaaatattatacctatggcgttggtatgacgaacgacggtaaaaaaattggtgactatggcatgtggatgaccgatgtcactgtagacggtaaatctgtagaccctattgggaataaccacgactggcccgcaaccaaatggaaaaaaaccggtatcccgcgcagcgatgccttccagaccatcgcctttgctcaaaccggcaccaccaccccattggccatcaccacagctaactttaactttgtgaccaacctggtgatctgggatacctccaccctggccattaccgacgataccccactggacggccagaacaccatgacgctggtttatctgtaa

SEQ ID NO: 141315 - DNA, 663 bp, Enterobacter cloacae
atgaaaaaagtaattttggcttcattaattgcactggccagcgcatcagcttttgcagaacctaccgcagtattaaaagtacaagggactctgaccaatgcggcctgttcgccatctatcggcaatggcggcgtcattgattacggctatattcgtctcggcgagctctctgcaacggaaaataataagctgggtcaaaaacaggtgcctgtcaccattacctgtactgcgccaaccaaagtgggctttaccgttcttgataaccgtggcgacagcaacgcacagctgccgctggatattggtggtaacctgaaccagtctgctaaatattatacttacggcgtgggcaccacgaccgaaggcgtaaaaattggtgactacggtatgtggatgacggacatcacggcggatggcaacacggtagaccccgtaaccaataaccatgactgggaagcgactaaatggcgtaaatccggtattccacgcagcgatgcgttctccaccacctcctttgcggtaaccgggacggaagcacctatcgccatcaccaccgctaactttaactttgtcactaacctgatgattcgcgataccacatcgctggccattaccgacgacacccctctcgacggtcaggcgacaatgacgctggtatacctctaa

SEQ ID NO: 141316 - DNA, 312 bp, Enterobacter cloacae
atgagcaaggctgatgatgtcagagcgctggtgaataagtatttctgggtaatgcctgacgaggcatctttgagcactggtagcaaaagtatattacccgaagaagccagtgactttcttgaagagtatgcagatcagctttcggttgatatgagtacttttgatttccgtcactatttccctaacgaagggattcgttttcttcctaatgcaatcctcccaaaatacctcaaaaccgaccaccatgatcccgctccgctcaccattaatatgttgattgcttctgccgaagcaggacgctggctgtattaa

SEQ ID NO: 141317 - DNA, 471 bp, Enterobacter cloacae
atgacgttacgaaaagcgcatccgcaggaagctgaaatactctggaatattcgcaatcaggcgattcgtcacggctgtaaaaccagttacgacgcggacgtcattgcgcgctggacgcccgacgacatgccggagcattaccggcaaatggtggccgaaaatcccttttacgttgtggaagacgagaaaggtgacatcgcagcaaccggctatttggatttagaaacccataacatagaagcggtatttacgctgccagcagcctccggaaaaggactggcaacacagattatcgaggcgctaaaaagcgaggcccgcactcgcgggataacacgtttaatgctctcttcgacgccaaacgcgcatgcgttttatcagaagctggggtttgtcacgatgggagaaaattatcattactcgcggatggcagatgcgcaattacgctgttttgatatggcttttaatatgtaa

SEQ ID NO: 141318 - DNA, 402 bp, Enterobacter cloacae
atgaaaaagttagtcatcgtatcagggttggtcatcgcggttgtaacgattacatatctacttttgccctatgaagatgagatgtcataccgtgaatcagatatggttcgctatcatttgtacacacctgcatcaattaaacaggcaccacgactttcacaggattatatttttagccactctgcggctaatggacagccggaatcaaatggtgtgtgctttagcggcgtttctgatgccgcagcgcttaaacaatatctggtttcacgtgattttatctttaccagaaaagtcgcaaccggcgagctctggacgtcagatcgtaacccgaatgtatacttcactattaccagaaacatctcacctgagagcaaggtttgtctttatgaatcaacacgttaa

SEQ ID NO: 141319 - DNA, 705 bp, Enterobacter cloacae
atgagcagccggaatgatattatcggagttgatgaatggttagtaacaactcgcagtggtcttgtctacagtgaggttcttggctggatcgatcttgggcacgccagaggggaagatatttctcttcttctggccgatttcagcagcggcgaagccagcggcaagccctactacaccatagaatacacccagcgtatgaatatagggaaaggactgttcggaacgggtaagtttgtccgctgggaaataaaacgtggtcgttccatgtcagaaataaacagcattgcgctggcaatgatgatggatgccgcaagaaattttgaacattaccagtcccgcgcttttttcagttggtacaccgacagcgggtttagtggagaagacctggtgtcggatttactcggtttttaccgtgcgctgattccttcggattaccgttctcaattacggcctgtcagcagagaaagcgcactacgccgctgggatcattacggaccgctcggtaatttcaagaaccgtggatttcttccactattgtttcctgaccctgatgatctaaatgtaaggcatgagccctatacaggccagctaccccgctttatgaagtggattacgccatttgataactttagttcagatattgttcgtattctaaatgataacggcacatatcattccttctttacaaactcaggacgacgttga

SEQ ID NO: 141320 - DNA, 366 bp, Enterobacter cloacae
atgttcgatcatgtgaaattcggcgtcagtgattacgaaagaagcaaaacctttttcatcaaggcacttcagccgcttggtattaagatcgtcgatgaaggtacacccgaatatggggttgaaatgagctccggcaatgtttcactttgcctgttccagacgcgcgacaaaccggcccctctgcacctggcgtttgtggcagaaacacgccagcaggtagatgatttttaccaggctgccctgcaagcgggcgcgcgtgataacggtgtcccaggcttgcggccctacagcaaaaactactatgccgcctttgtcattgcgcctgacggccataatatcgaggcggtctgccatgcaccggactga

SEQ ID NO: 141321 - DNA, 183 bp, Enterobacter cloacae
atgagttgtgagatcctaaagacagaggtccgcgtgatgatatcggtatttattaatgtgttttcacggctatcaacaactaagggaattacggccatgaaaagctggattcgccctgaaccaaccttggtgcgcataatgtatattatgttaaatatggtgggtttgctcttaagttcatga

SEQ ID NO: 141322 - DNA, 1671 bp, Enterobacter cloacae
atgacgaagacttcacattcaaagatctattcaactgagagcggtatcaccgggggtggtttttttaaaacccatccccttcactttacaaaagaacagcttgaatggattgaaaatattcagctccctaaacgattgtttttaataagtgcaacagaatttgatgaccgatatttatatctacatgatgattggcgttacagattctcaggtaataatttggctatattattctctactggtaaatacttttgtgatttatcaccagtttcacttaagctcttgaaatacttaacgatcgcgtacattaatgagaactcggcaagtgttgctgataaatttgctcagtttgtcgcaacaactttcaaacaaattgaggttatcactcgcgaaagccttattgaaaaaatgcaaatgctagttgcgaagactgagcgaaatcactcagacagcagtcagttctattacaccctctatgcattacgaaaacttgatcgtaatggattcttcgaaagtaaggatgacagtgatgagctggaagatctattgctggaagtgccacgccctaggaacaataactgggctcgctaccaaaacctagacctcgttataccagaagaagtatgcctaatgatagaaaatggcattcaacgttgggcatctaagctatgtccaaaaattgatgttgaagaaaataaaaacattcatctggaaactgtaaggaaaaccattaaaattgatacattacgggactgcattattattggcatagtttattacattggggccagacctgtacagatcggtaaactttccggaggcgattttatcgttgataccgagaataagtacgggatgcgttattcagtacttgtgccatatgccaaaaagtcaaaactaactatcgatcgagttcgagttgcaattccggaagaacttggaaagttaatcttactgtataagtacctagttggaattggtgataccgacccgatgttttccatcatagtatcttcaatgaagatggtggaagcgtcattaaagaaaatgcttttcagattttcaccacaagagattcaggaggcagtaaaaaacgatgattatcaactacctgtatataccgcaagcctctttcgtcacaacgttggtcactcaatggcaatgagtggtgccagtgctcctgagatagcttatatattgggacaatcctcttatgttgttgcagatcgatacattgcagccacccctgagctggctgatattcgtgaggcagctttgggtcgcaaccctgtgtttaagaacatgatggcactcatgttgactgggaatttagttcacagcagcgaatgggaaggtcgcaatgttgcagggtcaattggtgggcaacttcattaccatctcggtggatgtaattatgaagaagacatttgcccctttgcacagggtcgtggatgttacggttgcctgtatttcaaaccatttatagatggaaaccacaaaaaagtatttctttcgctgaatgatgaaatccaaaatgttcgtgatgttgccgatgatgctggcattttaaatcatccacttctcaaggaattagtgcggcggaaagagcatgtaaatcaggttatggctcgcattgaaatggcaaaggccggaggactatttaatcgatga

SEQ ID NO: 141323 - DNA, 141 bp, Enterobacter cloacae
atgatccgtcactccagcgattgccaagaatgtatttatgttatgtctcggtacatgctttttgataatgacacgggacccatcatcttcaaaaagattaaagtgatcaaagatagattttcggttttgtgttccgcctaa

SEQ ID NO: 141324 - DNA, 942 bp, Enterobacter cloacae
atggggcgtgttgatatcacccagaataaacactatcagcatcaggccgaatcacagtcctatcagaccgcttctctagcaatcaatatgctggaaaaggcttatgatgagaacaatcaagctctcacgaagagtttccagctatcactctttactacgcagcagaagccctgcattccggtcaacctaccctcccccagaactgaggttagccgcagaatggcagctctatcacggtcttccaagacggtaaaaaacacaggtgttggaaacgttaaattaacaacctcactaatgataaatcctgagctcaataccgagcataatctgaagcagaacatgcagacttttggtgaaacaactgctgaggttgtggactatataactggcacaatgtccgataagtttctgcctgaactaaaacgtgcacatgacaagttagtacaacaaaatttggctgataaggcgaaatcactgcttcaacgccatgcaaaactgcatcctcttggatttggagcctgtacgagagatgtagctcgctggggttgtcctcatgcgcttaagtgtcagtctggtctaccttgtggctacttcactcttacaggtcgtcttggcgaagcggaagaagcatcacgacgtttatcaaacaagcgaaaagaaatcattcaactccgtaagttgactatagtgaatccaggcttcatgctggctttaaaagaacaggaagaagctctcatcgtgctcgaggctcttgaagctgatgctataaaggttcaaggcgagaaaaaactggtttccctgttttctgatgatctgaacaacccattatataaagttattgagcgaattaataaacaaatgctaattggcaaaaccccaaaaaccctagctgatcttttctttattgaacagaaacgtatagagagaaataataatggctaa

SEQ ID NO: 141325 - DNA, 504 bp, Enterobacter cloacae
atggctaagaccccacgcagtcgcaatgcagacgataaagtcattcagggtaaggaacttgatgcttacatcaaagccgagctacaagccatggtgcaagagggactggaaaaatccccaattcagccatccacgttacatgcccgtcttaaagccaaaggaatagttaaaggtggcattagtaccctcacctctcgaaaaattatcatcaataattacaggcttcgccagcataacaactatgaagatggtaaacgagagttgacaacagatgaaaaggctaaattggctatggggcgaaccggcgctgcttatataagtaaggcaaatcgtcttgatgctgaaattatagcattgaaagctaaatatgaacgaaatgtactggcgctcgccgacatcattgagtatatcgacaacgcaactcctatcaaagttgaggacatgcttgcagacgatctcattcgagaacttgctgagcgcaaaagaaattcaagaatgagctaa

SEQ ID NO: 141326 - DNA, 1992 bp, Enterobacter cloacae
atgaaaaaaagtatcttatcaatattagtctgtgcagccattacctgcactgcgtatgcgcaaaccggaccatccgtacaacaggaacaaccgcaggtgctgcagggcgtttcgtatgatgccattgtcgttaagctcaagccaggaaaagccaaaacctatcagctgaaacttcatgatcccgctttggttgccacccgtatgtatcatgcggagaacctaagtagtgaacgtgccgccgaactggccaaactgaacgagcgctatggttttgatcgctatctgcgtattactttgcctgcggacaaaaagcaggatcgaaactatatcgagaatattattaccgcgcttgaacagaatcaggatgtcgagtctgtttctccagaagcgttgcccgtatttcaagaaactgagcagacttcggctaaactgaagtcaacggtaaataataatctcggtgcggtatcagtacccgattttcgcgatcagcaggattatttaaaagcccctacagataagcgtgtgggttattatatgggtggggtaaaccgcgacagtgtaaatcagtataaaggcaatgaaggtgaagacatcaccattgtttcctctgaaaactgcggctggaatactaaccatgtgaatttaccgccaatggcgttcgtgaaggggcccaatgaggttacctgcagtgaacgggaacataatacagcttctgtcgggatcctcgctgcgcgggatattggcagcggcgttcgtgggttaagtgataaaagtaagataggttatgcggcctggccggcgtccaacctctataacgttattcccctattaaaagcgggggatgttgtctcgctaaacatgcagacctacggcggtgaaatcgcaggaacctgtaccaaaaattgttatatccccattgaatggctggacagttactataacgtcattaaggcgctgaccgataaaggcgtgtttgttattacctccgcagccaacggaaacatcaacctggattcgccagcctttaacggcaagtgggatcttaacgtccgggattccggtgcgattatcgccggggcattctgctcaaaagacggtaaaaaagcgagttttagcacctacggttcgcgcgtgaccagctcctcaagggggtgtaatgatgtcaccacaaccggttatggcaacctctataacaggactaatgcaacctataccagcacttttggcgggacatcgtcagccacgccaattgtggcgggcgtagtggccagcctgtcgggcattgccaaagctcacggaattacggtcacgccgcggcagatgcgtcaaattcttgctgaaacgggtacgccgatcgctaacggtgactctgcgaaagtgggtacgcagcccgatatggagcgcgcggtcgcccgcattctggcgctaaaagatgggggagatatgacgatcccagccccaaccgctgcggcaggcgcggattacaccatggtctccccgaccactggcgtgagtacctatccgctggatggcagcaagagcctgaatgccaaatcctataactggagcgtgacaaaaggggcggaaaccttctcgctggaggcgaacctgaacggcacgctggtgaagagtgtggatagcgcgcatgcctatgccgttattcctgccaacagcgaaggagaagcggtcttcacgctgaccacaaccggcgcagatggccggaccgcgacggacagcatgaccattaaggtcactaagccggcggtacccgcgaaagacgacaccacggaaaaagatgacacgccggtaaaacctgccgcaccggcctataacgccaaaatcgcttatccgaccaaatgcaccaaagtctcttacaacggtaaaatttggttcaaccagtggtatgtcaacccgggtcaggaaaccccgggaaccggcggccagtggggcgcgtggcgcgagcaaggttcttccagtaacagctgtaaataa

SEQ ID NO: 141327 - DNA, 663 bp, Enterobacter cloacae
atgttaataaagattgtcatagccgatgagcatcctctgattcgtcggggcattcacgcaatgcttgagggtattggcaattccgatgcagctccagcctatttgctggcaggagaagccgggtcgacacacgcgctgttcacattactgacgcagacaacgccagaaatcctgctgcttggttatacgctcaacacctcacagaccttaggccgcgctggggaggtaagcgggctggaactggttaaagggcttagccagaaataccccgcgctaaagattgtcctggtggcgtcgtataaaagcccacagcttattcgcatggcgatagaggcaggtgcgaaggcctatattagtcacaccattagcgagaagacattacaggatgcgctcgcgtgcgtgatgaaagatgaagtttatatagagcccacgctagtgaaagggtttcttcaaagcgaggcgtcgctttcagcccgagaaattgaagtgctgcgtttactctgtaaatggggaaacctgacggatgtttcgcgtcagatgcacttaagcatcaaaaccgtcagcgcacataaaatacgggcaatggagaaactgcaggtaaaaaatgattgtcagctttactacctgcttgcgagaacccggatgtttgagattgttttctga

SEQ ID NO: 141328 - DNA, 534 bp, Enterobacter cloacae
atgcttatctataaaaatttcattccgtatattccagagagtggtgaaaaaaaagaacttgctgatatgggatatgaattccttcaggataacgaaggaaatgactggtacgaagttcaagacaacttttctgagggtacgctgaaaatagcttacttccctgatggaaaaattgattctgtatccttcgatgtttctgctttagtaccgcgtggcctgtctgtcgcagaaatccagccggatgatattccgactgaattctcaaattcagggcagtggttattcaatggtaatacgatagaactttaccattacacgaaagaagagcttatagcgaatgctgaagaacaaaaacactcgctcatgtctgcagcagcagaagtaatagcaccactgcaggatgccgttgatttatcgatggcaactgatacggaaagcgcttgcttacaggagtggaaaaaatacagagttctcctcaaccgtgttgataccagcaaagcgcccgacattgaatggcctgaaaaaccgcaataa

SEQ ID NO: 141329 - DNA, 231 bp, Enterobacter cloacae
atgaaacttacccaaaattctgttattggaagcagtggaaaaggtacacagggtaagatcgtcattgggaataacttttatctgggatcgaatagctgcataatcggcgacgatctgaaaattggcgataatgttactattggcgcaatgacattcatcaataaagatctcccggataactgccgtgtttatacaaaaaaagtaacagagattgtaagcgtgtcggtataa

SEQ ID NO: 141330 - DNA, 999 bp, Enterobacter cloacae
gtgagagccgttacctttatcctgcttttttgtattgcctttaccgtgtgcgccacgcaaccgggggaatcccttcgcctgctggcgcgtagccatgaaaaggtgatcgaaccgggactcagcggcagcgaatggcgctgggtgcgcgaacaccgcaaaatccgtctggcggtctgggagccgatgatgcccccttacgacatcaccaccgggttgaacgattacggtggtatcaatgcggatttcaccgggctggtggcagaaaaccttggcctggagatcgaggtggtgcgttatcccacctatgacgatgccttgtcagcattgcgggcaggcaaggcggattttatgcctcaggcaggggatagccagcaaaaacaggggctgatgctgagtgtgccctacagcgacaacatcccggttgaagtggtgaataccgatgcctcgcccgatgagccggtgaaaaggatcgccgtttcgcctgtctacagcagcagtgacgtgctggcccgttatccgggggctgacattgtgaatttctcctccacgcggcatgcgctggaggcgctggcgtttcgcgaaatcgatctgttcttcagcgatgcgatcaccgcgcgctatctggcgagtcagtccaatttaagcaatctcagtattcgtccggtggcggacacgttcgaggcgtcgggattctcgttcgccgcgatgccaaagatggcggtctggatcgcgatcctcaacaagatgctgatggcgctgccggagaacgcgggcgtggagagccaccgcgttacacctcgctcgaacataaatggatcaaagaacattcgcggatccgcgtcgcggtggcgcaggataacgcccccattgcctttttcaacgagcgcgggcagctgcgcggcatcctggcggatctgctcaccgcgctccgcctgcgtaccgggtttacctttgaaatccgccgttatcccagccaggccgccgccttcagggccataa

SEQ ID NO: 141331 - DNA, 147 bp, Enterobacter cloacae
atggatatagaaattaatagccctataaatattactcttgacgtaatggaacttgacgggaatattccctccatgaagtttagtgtaactattcgggtaaggaaattttgctatagctgcgaggtaaactctcagttctggatataa

SEQ ID NO: 141332 - DNA, 507 bp, Enterobacter cloacae
atgagcattagcattaatctgaataacattaaaagaagatgtactttatttttttgcatgttcttttttagcgctgtcacctggtgtttttatgatgcgagtgtaccagacatcactgatctctttgaatcaagaagcattgtttattttttctggggggcatttcctgtgttgctttcttttccgcttgcttgttgttttgtgttggttattgcatatatgacctttacgaaaaacatgcagccgccctggttctttgctaaaggcattactgtcggttttcactttttgggcgcaggatttgttattggtaatatcctctcttttatcgtccttttttatccccttggaaccaactatgtcctatgcgagcgcccgggccccttttcgggaacgtattacaccagaactgaagaaatttgcacgcaggtaaaatacctgcttaaaacaagagccaaagatatccaaaaactgaatgatcaactggacggcgtatcgccacagtga

SEQ ID NO: 141333 - DNA, 879 bp, Enterobacter cloacae
atgaaagggtattcggactggataagagctcatcgtgaagatattctcagaggaaataactggcagcttaatctgcgtttcgaaaatgaaatcaagcagctgaaaaatagtctggtcaacaatgccaaccacattatgctgctcacgcctgacgaggcgcagggggtgattgacgatttgataggtagtccgtctgtcagcttttccactacctatgccggtaacataaaagagacggtttctgcgactaaaaatctgtcgaagctattttcttatcagcaggccggaaagattgttttcactttaaaaggtcttggtatcaaagcaacacagtatgcttatcagggaaagatgtatgtgaagattacgggctacccttctctgcgacgcattcttaacggaacgcgttaccggattgatcatcccaaagtgcttgaggtgggcattggtagagccgggtttcgaaacggcattatgtcaggcgccagattatgcatctggttttccgcatgctggcggttggtcgaactgatctttaaatctgaccatgatgtcgccgcattccttgggaatgtgacgatggatgtggcaaaagtgattgtgggggtttttgtttcgagattggcaggagttttttactcattgactatatcaccatttatagcgagtgcagctgttcctgtttggggacagatagtttgtgtagttatattaggcgtagttattgcttataagctaaatgatctggacaatcagtatcatttatcaaataaacttatagatcgtatgagaaaaggactaaaagagcagcaaaaaatcgcagagtggaactttcgacattcggtatatggaagttcattttaccccgggaactactga

SEQ ID NO: 141334 - DNA, 879 bp, Enterobacter cloacae
atgaaagggtattcggactggataagagctcatcgtgaagatattctcagaggaaataactggcagcgtaatctgcgtttcgaaaatgaaatcaagcagctgaaaaatagtctggtcaacaatgccaaccacattatgctgctcacgcctgacgaggcgcagggggtgattgacgatttgataggtagtccgtctgtcagcttttccactacctatgccggtaacataaaagagacggtttctgcgactaaaaatctgtcgaagctattttcttatcagcaggccggaaagattgttttcactttaaaaggtcttggtatcaaagcaacacagtatgcttatcagggaaaactgtatgtgaagattacgggttacccttccctgcgacgcattcttaacggaacgcgttaccggattgatcatcccaaagtgcttgaggtgggcattggtagagccgggtttcgaaacggcattatgtcaggcgccagattctgcatctggttttccgcatgctggcggttggtcgaactgatctttaaatctgaccatgatgtcgccgcattccttgggaatgtgacgatggatgtggcgaaggtgattgtgggggtttttgtttcgagattggttgggaggggggctgtgtggtttgtatcaacatttgtagcgagtgcggctgttcctatttgggggcaaatagtttgcgtggttgcattaggtgtattgattgcttattcgctgaacgttgtggacaaacattatgatttatcagataaactaatagggtttattaaaaaaggactgaaggaaaagcaaaaaattgcagagtggaacgctcgaaactcggtatatggcagttcgttttatcctggggcgtactaa

SEQ ID NO: 141335 - DNA, 243 bp, Enterobacter cloacae
atgatttgctatttgttgggtaagccggagaggaaagagtgggaattgttcccggatatcaatcaccgagtcattaaactcagccagatagaaaaagttactttcgacagaagaaaggagatgatggtttcgaaacgtcttaaggccaaagactatcgaacggtttccacgggatttaacgtcctgagctctaagccagggctgataactttggccatagcccactcctatgccgtcacctag

SEQ ID NO: 141336 - DNA, 441 bp, Enterobacter cloacae
atgtcgagatggcacgccaacaaagctgaccgctggaaagtggcctatcgcgaagaaatcattaagacattcgagcaagatgtgttcccgttcattggtaaacgccctatcagagaaatcaagccgttagaactgcttgaagtattgcagcgaattgagaagcgcggagctttggaaaaaaccagaaaagtgcgccaaagatgtggcgaagtatatcgctatgctattataactggccgggctgaatacaaccccgcgcctgatttagccatcgctctggccgtaccaaagcaaaaacaccatccttttctatctgccgaagagctgcctcatttcattcgggatttggaggcatataccggcagcatcatcaccaaaaatgcaactaagatagttatgcttactagtgtcagaacgcaggagatgcgttttgctacgtag

SEQ ID NO: 141337 - DNA, 261 bp, Enterobacter cloacae
atgaatagtatttccgtttccaccccggcaccagctgctccggtgctcccggttccggctcagcaggagcgcttcatacgattacctgaagtgatgcacctttgcgggctatcccgttcaaccatctacgaccttatcagccgcgatgccttcccgcagcagatatccctgggtggaaaaaatgtggcctgggtacagtcggaggtcagtgcatggatggcggcgcgaattgctgcccgcgagcaaggaggccatgcgtga

SEQ ID NO: 141338 - DNA, 783 bp, Enterobacter cloacae
atgaaagaacaacaattgacggaaaaccagattcaggcagcaaccgaacacgtagttacactcctcaccagggcaaaaaaacctcttaaggatgcggattggcttattcggttgcctgcagatgaaatagctcgcgagacggaaaaactgacaaaaagcctttcctccggctggcagtcccgaattatcgacctttaccaaaaaatgcaggcctgggtggaggccagccaggccgaagaagcagccattgagaacctcaggactctgcgccatcatcaggccgaaactgaagaggccagcaaagacaatcgggcgcagttcagggaattgcttaaccagaacggcggcattgtaacgccggagatgaaagctcttcgggctgagtatctggaacaacaggaaacagccaccgagctggccggactgattactgaaaaagaagagcagctgccggtactggctggcgccaccggtcgtaaggcaaaagcctatgccaactgccatcacggcctcactgaggagcgtatcgatgagcttctgcgtgacttttttattttcaacggtgctgaattgagtagtctgctcaggatgaagtacaggcaatttgaacggaatagttcagcacatataccgggcattattgaaggcataaatgatgcagatacgctatatcgtgaatttatcctgaatctaatgctgaaatggacgaatgaaatattgccgctgagattccgagacgacgttatgagcctgaccggttcagcaccgatcaggctcacataa

SEQ ID NO: 141339 - DNA, 801 bp, Enterobacter cloacae
atgtttaaaataacggtctgtttattaactttcaactcagaaaggttgttacgtgacgtaattccgcctcttttaaaaatagcggatgaaatcgtcattgttgattccggaagcacagataatacactacatatttgtcagagttatggtttgtcgccggtctacaaaaaatatggctggcatggcgagcagatgaaccatgccgtgtcattagcgagtcatgactgggtcctgtgcatcgacagtgatgaaattctcgattcagacactgttgatgctattttaaaattaaaaaggagtgacgaacccgatcctgcaatggcatggcggatatgtcgtcactggtatgttttgggcgaaaaagtccgaacattatatcctgtctcttctcctgatttcccggtacgactttttaaccgtaagcaggcacgatttaataatagacccgtagacgataaggtagaaggttttcgccactctgaacgtattcccggttacgtcagacatgatacatttcacacattgcatgaacttttttgcaaattgaatggttatacaacccgcctggttcaatatcaaacgatacgcccctctatcggtcgaggtgtgatcagcgccatcggtgcctttttcaaatggtatctgttcagtggtgcctggcgtcagggcagagtgggggcagcaacaggcttgtatgccacggcctacagttttttgaagtatttcaaagcctggtatcaatatcaggaaagaaaagagcccgttacaaaagagcacacggactctcaccttataaaatag

SEQ ID NO: 141340 - DNA, 522 bp, Enterobacter cloacae
atgcccgacggtaccctcaaccccgaccttccccgctacctttccgaagccagcacgctcaacgcgctgtggctgaaggtatccctgggacatttcagcggcacccggccgcttaccgccctgcgcgctttgctcaatgagagcggcatggcactggtggtggaaaacgaccagaccgactgcggccagcttgcgccgatgcagcgcttccaggccgcctgccgggaaatggcgctccccgtcacgctgaccttcgacatgggtaactggctgtgggtcggcgactcgccggaagaagcggcaacccgtctggctccggcggtcagctatatccacgtgaaagccgccgtaccgcataaagcacagttccgcgccgtcgcgccggatcgcgccgatgcgcgctggctggccctgctcagtcagttgcctgccgatgccccacgcgggatcgagttcccgctggaaggggcggacttaaccgctgtcacccggcattacgttaacctgctgcgcgaggagtaa

SEQ ID NO: 141341 - DNA, 876 bp, Enterobacter cloacae
atggacggattaacgcttatcccggcgatggacgtgacgcatgcgtgcgtttgtcgccgtttccgccatgcctcctgccacgcctgtgcggacgcttgccctgtgcaggcgttctcttttacggactcgggcgttctgattgatgacagccgttgtattgaatgcggtgactgcctgtttgtctgtccagccggagccattaccggcatcgtaccgcgaaaacgctttttgcgtggagatgcgcttgtcgggccgtttacggaacgcgcacctggagtgaatgagctgctactgtggcacgcgcaataccgcgttcgttttatcagtattgaggtggagcaccatcctgactggctgctggcgcttgcccggcttaatcttacgcttcgccgacgcggtgaagcggcgtgggcatttaagctcatcccgcacaacgaggtgaatctcgcccgccgtgcgctaatgcacgttccccgtgaggatgtacgtgcctgttgcgtcatgcccggcctgcgtgagttgcgaagggcttttcccgcgtttagcgaggcagagatcgctctcgacgccggaaagtgcgtgctatgcggggcgtgctggcgaagctgtcaggaaaaggcgattcgttttgagaacgccagtctgagggtggacaccgaatattgcaccggttgcggtggttgtgaagcggtttgccagcatgcggcgataaaagtgacacaaacagagggaacagcgaaaacggtaaccatgcccgcatatgaggccatttgccagacgtgccgccgtcggttctggtcatttacgcctgaagaaaagcagtgcccgctctgtttccaccatcactacgggatgcgaaatctgtcctgttgctaa

SEQ ID NO: 141342 - DNA, 234 bp, Enterobacter cloacae
atggaagaaaagaaactcaaagcccttgcggctgaattggctaaaggccttaaaaccgaagccgacctcaatcatttttcccgaatgctgacgaaattaaccgtcgaagcggcgctcaacgcagaactgactgaccatctcgggcatgagaaaaatgcgcccaaagcaggttcaaacactcgtaatggatactcgtcgaaaaccctgcttgtgatgacggcgagattgagctga

SEQ ID NO: 141343 - DNA, 216 bp, Enterobacter cloacae
ttggacagccagattttatccctctacgccaaaggcatgaccacacgtgaaatcgtcgccaccttcaaagagatgtacgacgccgatgtgtcgcccaagttgatatctaaggtcaccgacgcggaaaaagagctggtcactgagtggcaaaaccggcaactggatacgctgtatcccattgtttatatggactgtattgctgtcaaagttcgttag

SEQ ID NO: 141344 - DNA, 189 bp, Enterobacter cloacae
atgtggctggccgaaaatgaaggtgcaaagttctggctaagcgtgctgacggagctgaaaaaccgaggcaatcaggacatcttgattgcctgtgtggatggtctgaaaggcttcctggatgcgataaacagcgtcttccccaagcccatattcagctgtgcattatccatatggtgcgtaacagcctga

SEQ ID NO: 141345 - DNA, 483 bp, Enterobacter cloacae
atggtgcgtaacagcctgaaatatgtagcttggaaagactacaaagccgttcccagctgcctgaagacggtttatcaggccttgaccgaagatgcggcactgatggcgctggatgcgttcgcggaagtctgggacgataaatatccgcaaatcagcaaaaactggcgtgcgcactgggaaaacctcaacacgcttttcagctatccgccggatatccgaaaggccatgtacacaacaaacgctatcgaatcgctgaacagcatgatccgggcagccatcaagaaacgcaaagtgttcctgacagatgactcggtacggaaggttatttatctggcgataaaggatgcgtcgaaaaaatggagtatgccgatccagaactggcggctggcgatgagtcgtttcattatcaagttcggtgatcgcctgagcgaccaccttttacgaatgggcagttacacagaattactgacaggctcaaattaa

SEQ ID NO: 141346 - DNA, 1506 bp, Enterobacter cloacae
atgagtaatccaatttcatataagggaaaagaatatccttcacttaaaaagttagttgagtcagaagctagtgacggactttcatattcaattgttgcgactcgtataagagatggttgggatttagagaaggcattatgtgagccaagaaataaaaactcaaggaagatatgggtaatagataatagaaagtttaccaaccttaaagaattagctaaagaagcgggcatctcatacgaggccgctgtaaaacgttcccatagagggtggtctgatgaagagatattttacggtcgcacaaaggaaaaaaaagaaagagtcatagaatctaaaaaatcaagaggaaaatcagtttatgtaaaaaacaaaaaatatcaaaaccttagacatgcatttgactccattggcccaaattgcacattcaatgcggtgcgagccaggctccgttgtggttggaatctagaagaggccttagaaatagagcaaaaagttgatggcagaaaaacgaaagcttatagtaagaaattaactattgacgatgttacgttatctgtatcacaagcctcccaaaagtatagcgtcccatattcaacaatattagacagaataaatagaggtgcttcatctaagcaggctgtaggtttagaagttatagagaagggtgatttatcatctcaatcaaaagcatataaaaacaggagtaaaagagaaaagaaaaactacattgttaatggtgttatttatagctcagtagctgaattagcaagagctcacgagcttgctccaactcttgtttacaatcgtatgcgtatcaatgggtggacaccagaacgttcaataaaagaaagtttaactgaaacagtggaagttcaaggcattacatatcgaagttctatgaacgcatgggatagagttggaaaaacaagctttagcacttaccaagggcgaaaatatcaaggacttcctttggaggtttgcctgggtttggaacctcttccggtattagaacgttacgatatagatggtgtgtcctatggctcccttgcagacgttgcaaaatcatatgatttaactgttggtcagcttgtatctagactaaacaatatgacattagagcaagctgttgtttataaaccttcgaatgggcgttattctgattccgcatttgaaaataatcctgatttagcaagtattcctggaactctttattttataagagtaactctgactgatggtattttgcataagataggaattactcaaaaagaaacaactcaacgattttattcatatcacatagaagtgatcgaagagtttcgaggaagacttcgtgacctgtatgaccttgaacaattgattattagtgaattttcagatttgcattatagggccgaagatgagtttgaaggtagaacggagacttttttgctaatggacgaggaggaaaaagaaatattaaacttcattgataaaaacttagatacctttggcgtagagagaaagtaa

SEQ ID NO: 141347 - DNA, 537 bp, Enterobacter cloacae
atgctccagttctggatgaaaatatctttatcttcgatgaaaaccaagtttgcggaaaagtcttatctgtacatagactctctgtaccataactcctcgttgggagtcatcgcggatgataatgatgatctgttcgtcagaaaatggcttcttcatagggatgtcctcatgtgtcttatgaagacattgctaacatcgcggtgtattaatcaacggggagcaggtcaccgtgctgcatatccagaagataaattcttgtttcagtcaaagtctaaccgggtaaaaaatcagccacccagggccatcaagcgagaatcagccagccgtgcattcagtgaagcgggggaaatggtcacagagaagaacatcagcagccacagcgcccgtaagtgtcggggccgtgcattgtgggaggcaggaacaccaatcgaaacgatcagtaagatgctgaaccacagcagcccagcagtcactatgacgtaccttgatattactcaggacgaagtgaaccagacctattatgagctgaacatttaa

SEQ ID NO: 141348 - DNA, 234 bp, Enterobacter cloacae
atgacttttttaacattaagaaatgtgagcgcagaagagctgatgagtgctaaccgtgtgccatctcaaatgatggggatgatgcctaacaatactggcggctttggttatgtggtgaagactgcgcaggtatttgtgagaaatgaattaatcccattacaggaacgaattaaagagattaataaatggattggagcgttatttttaacttatacaaattataataacaaatag

SEQ ID NO: 141349 - DNA, 1734 bp, Enterobacter cloacae
atgtctataaataacaaacttaaagaattgcaggatgcaaaaacattagaagatcttgctactctattggcaattcccttgcaattgcttacttatgttttacatggcagatataaatataagttagaaaactatcgttcattcactttaacgaagagaaatggcggcgaacgtttaataaacgcccctgtcaatgaattaaaaagcattcaaagaaaattatccttagttttacaagattgccagagagtaataagtatcttagaaggccaccgcacacatcaaaaagaaatcaaaagtattgcgcatggttttattaaagggaagtcaataattagcgacgccactccccacaggaataaaaaattcgttttaaatattgatttgcaagatttttttggaagcattcattatggccgtgtttatggtttttttctcacaaacaaatatttccaactcaatgaagacattgctcgagctattgctaatttagcttgttatgaagggaagcttcctcaaggagcaccaacctcacctgtgatatctaatttaatcgcagggattttagatataaaaatttccactttagcgcataggcataaactatactatacccgctatgctgatgacataacattttcaaccaatcaaaaggagtttccttcaagcatagcttatgaagataaaggaatagtggttattggtcatgcattgaatagcattattcaaaaacatggatttaaaattaacacatccaaaaacagactccagtacaaaaactctaggcaagatgttacaggtttgattgttaatacaaaaatcaatatcagaaatgaatatcgtaatagggttagagttttatggcataaagttcagaatggtaaagaaatttatgcaatacaaggtgacaaagatgacaaaaagaatattaattacctagttggggttttgagttacatttatcatgtacgtaaatctaataaaatcaggacaaatacaatagtcaacttaggtaagaaaccacaaaaaaaagaaatcgatagcatccttgatgctgatgaaagaatgtatagagatgttcttgtttttaaaaacttcataattaatgaaaagcctttaatcatttgcgaaggcaaaacagatataacctaccttcgctcagcactactttccctatcaagtaaacaccgtagtcttgtagaaaaaaaagagattaaaatcgattttttacggataaccaccacaattcaagaattatttaaaatcagtggaggaacaggtgatataggcaatttgatcagcaattactcaagttattgcgatcactttaagagatttgcaccaacctcacctgtaattattcttattgataatgattcaggtgcagggccactaagatcattaataaaagaaataacaaaaacaccatttacaaaagagactgagtatgcacacattatcaataatctttatattattcagacgcctttaattgatggtaaagactctgcaatagaagatctattcgaatcaaaaaccctcaatacaaaacttgaaggtaaaacatttgtttataacaaagcaaatttcgacacaaaaaaacactatgggaaaaatcactttgcagaatatgtaattcgtcaaaacaggaagcatataaacttcaatggtttcaattcattgtttgaaagcgtaaaaaaaataataagagattacaaaaagaagccccgctga

SEQ ID NO: 141350 - DNA, 732 bp, Enterobacter cloacae
atgaatatgattctttacaaatacttatcttactcgtcagcagtgagactactcacgtctaacactctttcattttcttcatatcagagttttaatgacccatacgaactatgctgcgtatcccatggcggaaatagcgtcaaaaacatcataaagatgcatgaccaaataagtttttggggtcagcactcgacaattctttgtctaaccagacagcctctaaaccctcttatgtgggctcattatgctgattctcataaagggattgtcgttgggttcgatgtaactgaccccagattaacaagccttgaagaaaatatccttccggttcaatttggaaacgtcatttacgcaaaaacacaaccaacatatccctttttcactaaccatttccctccaacgaaaataggaaatttcatcggattcaacaccgattatctagagagacttcaacgaacatttctctataagtcccaccactggtcttatgaagaagaagtgcgagttgttaagcatataaattgccagcatttgaccaaaatcccaaacattgatattttcacaatggaaattagtcaggaagctataaaggaaatatatatcggtctccgaacacagcatcacaacgaattcatgtcaatttgtgataaacatcaccctcaagcaaaaataaaaaaatgtgtgataaatggcctcagttgggacatgcattgcatcgatttcaatgaataa

SEQ ID NO: 141351 - DNA, 807 bp, Enterobacter cloacae
atggatatcgcgctgctcaacagaggctggaacagaacatggtcagataccatggtgaatctggaagcccggaaactcgtcgaaacagcaaaccggttgtcagcattctatttgcaagatggtctaacacgtatcaagtttgtcgaagagataaaacaggtcgtagaaaaggagttcgaggcagcacggcgagctaaaacagacgaagaatgcattatatgcatcaaaaatctgcgtgccgaaacggataatctgcacgaacaagaacgcctgttaaaaaccagagccgcacaactttatgcaaaggtcgagtttgttcgggaaaataataaaatcgtcggatatatgatttcggctgtgaatatcgttatatcagggatggttttctatggtgggatgatcatgatctcgacgatgaaccctattggagtcctcgctggtgcaatcttagttgctgatggcactaacggtataactaaagaagtgaataaatttttatctcaaggggaatctaactctgaaggtgtggtcgctgacaaagtgattaatatcgctcagtttatggggtttaaggctgaatctggtctggctttgtataacactctgacattaagcgcaaacatctacagcatttttggattagcgcgaaaaacaggtgcctggcgattgttccgttggcttccccacgattactaccgtaaagtcaacataatgagtcgccccaagttaactatgaaaatagtaggctacggtatcaaggctaaagttatttttgacctgctttccaccgaagcaccgaatcattaa

SEQ ID NO: 141352 - DNA, 315 bp, Enterobacter cloacae
atgaaagttactgatgaagctttgttacgttctggttttacaccatcggatttgcagaagataaaaaacaatgttgaaagctatggtggtacgttgggagaagcgattcaggatctggcaaatcgattcaggatagttatttggatcttttccgctttcatggcaatgtttctctgggtaattatttcaaatgaaatacaatacatcatatccacagggatcggtttatctatagcaatgttgattgctgtttttgttcaaccgccagtcctttcttacaaatcctggcggttctggagaaaatacagaggttaa

SEQ ID NO: 141353 - DNA, 903 bp, Enterobacter cloacae
atgtataatgatgattttagttatatattatcatgcgttttcactattgatgccgagaaaagaattactgaatacttaagatctcagaatcttgaaaatataaaaaatatgcaggttgaaaagacgtttaacgatttagggcacgaagtaaatatttggaatgttagaacaaaaaatgatggtaactggtgggttgctgagggagaactcgtccctttaaatctttatactcagggtgaatatttcttttctgctgacgaagcatactcttttcatttaggtataacgcagagactacaggcaagacatcatagtgagttcaaacatgttattgatgaattgcccttagatatcgatatgctacgctcaatcagtcgtaagcttaatgcctctgctgttgctctgaatgatataagtgcccctgaagacattcaaagtattgggttaacatgtagagagagtatggttgaacttgctgcccatctttataaagctcatgaggatattttaaagaaagataacattaaggctgctgattttaagaatatctgcaaaataatcattgggttatatgcggcaggaaagcataattctggcttaagaaaatattgccgttcaactgttgaatctgcgtgggatctatctgcagaaacagtgcattcttcaaataaaaatttacctgatgcaaagatttgtcttttacttacttgtactgctgtttcattaattcaaaacctattccttaaatttattggatttgataatgaaataaaatgtcctaactgtcacagcttaaagagtgaaatatacgaatccgaagaagatagccaacttcacgtggtgtgcggggagtgcggggaagttgtggaagtcatatccgaagaaacggatgaacagccataa

SEQ ID NO: 141354 - DNA, 1089 bp, Enterobacter cloacae
gtgattaacaccctgcacattcaaaactaccgctcaattcgcgatatgtcgctggagctggaacagctcaacattgtcttcggcccgaatggcaccgggaaatcaaatatttacaaggcgatccacctgatgcacagcgccgcgcaggggcagttttctcaggctctggcgaatgaaggcgggattttgaaagtgttctgggcgggtaaaacccgcagcgaccagctgcgacggatgaacctggcggtagaaaccgaaacctacgaatacgagctgcaggtaggctttgttgagaagctgccctatccctcgcagtttcagctcgatccggtgatcaaggaagagtcgctctggctgagcggccagcaccgccgcccgtcggcacagctgatgaagcgcagaaatcaggcggttttcctgaataacgtccatcacgagaaagtgacccacagcggcacgctgtacgagaacgaatcggtattcggacagctcggcgaaccgcacctttacccggaagtgtcgcagatgcgcgaatccctgcgtaactggcgcttttatcatgagttttccgttgcaagcggctccatgatgcgtgccccgcaggtgggtttccgctctccggtgctggcgagcgacggcgccaacctcgcggcggcgtttcagaccattgtcgagattggcgatgaactgctgctgatgcgcattcttgaccaggctttccccggctgcgtgttttacagcgacaacaccggcggacgttttcgcatgatgatgcagcgcgagggcttaagccgcccgctggaaccggcggagttctctgacggcacgctgcgctttttatgcctggcggtggcactgttaagcccgcgcccaccggcgtttatcgccctcaacgaaccggaaaacagcctgcatccgcagatgctgcccgcgctggcaagcctgattgccgaggccagccgctactcgcagatctggctcaccagccactcgccggagctggcgacattgattgagaagcaccgatcgttttcgctgtatcagctgtcaatgacggagggagagacgaagatggagaagctggggtaa

SEQ ID NO: 141355 - DNA, 330 bp, Enterobacter cloacae
atgtccaatattgaaacgcagttacttgacgcaggttttaccggtagagaattagcgtatctgaaccggaatattagtcgttatggttcatccttgctcgaggtcgtgcttgagttaggtaagcgtttcatcatggtactgtgtattacggcagcggtggctctgattttcctggcgcttcttttctttgctgaacagtacaatgttatttccgggggcatttctctattcatcgtgttgatgattgtctggttttttcaacccccgatcattacctataaagcctggcgctacaggaaaaaatacattagttctggtcagacgcgttag

SEQ ID NO: 141356 - DNA, 399 bp, Enterobacter cloacae
atgctgcatatgttggatacaaacatagtaagccacctcgtcaggcaacatcccggggtgataaagcactattctcgcaccccaatagaaaaaatgtgtatttcaagcgtgacggaggctgaactgctttatggaatagccaaaaagcaaagtgacagattacaaaaaacaatacttgagttccttaaaaccatcactatttgcgactgggacagtgaagccgcagcaacgtacggtgaactccgcgcagaaatggagaagagagggagagtgatgggcgatctcgatcaactgatcgctgcgcatgctcttagtcggggtacaacaatagtgaccaacgatcatgcattcagaatggtgcaggcgcttgccgttgaggactggacaacagcgtcgtga

SEQ ID NO: 141357 - DNA, 552 bp, Enterobacter cloacae
gtgaattacgccattcttgataataatcgttattatgctgaagggttgcgttacgcccttcttcgccgtgacgctcagacgcaggttcgaagtggagaggtaaggtggcggcgttcgctgttgacctgtagcaccctcgtcgttcgctgccgtttttcagtcgcggggacgcatctggccctggtcgacattctgctccagctggaattcaggcgctgggagggaatgatttatctggtatgtaatgaaaaaggctgggcgctggccacgcatttgcgaaagcgttttgccatgctgaccatatatattcttgatgacagaattgccgtagcggatgctgcgtatctgcttgctaaagagccccgtcgggtacgaagtctgaattgttgtctgacaggcatggagtttaacgttctcgacagactggtgaatgggcagtcggtgcggcatgtcgcacatatgacacagatgagcgaaaaacaggtgtcgacgtataaatgcaacgcattgaaaaagctcaatgctaataatttgctgcagctacttctgtag

SEQ ID NO: 141358 - DNA, 1143 bp, Enterobacter cloacae
atgaaaaaatacattttactttctttgcttatctgcctgtgggcagttaaatctcttgcagctcctcctgtggaaaaaaacaagactgtccagctcagttttgatcgcgctgcgccgccctaccgtttttatatctggtaccatgaatctgctggttatgatcccgccgatcccaaaaagtggggaatgaatacccttgtctgtgcctctaccattagcgagcaaggtgcctgtaaaacgaccccattctggattacagataatccggctaccccaaacgtaataaccgttcgatttgttcatttggcaaccagaaaagaggtggagctgcaagtttacggaattaaacatatgtttctccggaatagagaaacctcactcgcaagcaacactaccgatgggtcgaaaacgccttctgactgggacggtgaaccctactttgatttttatatttacggcgatgaattgagcaaactgaacctctctggtgtctgggagcaggtgctaatacagaacgttaagcagtgggataatgggggttgtgggattgttccgattaatgtggcctgttatgccaacgtcgcgaactggatagcacgaatcagacttgaagtcgtcgatacaggcaatcagcaaatctatctgccgggcttcccgcattcgacgccgatagttaacctgaacctgacgaatttccctggcaggccggggggaagtgagataagcggcgaaacctcgctcgacatgtgcctttacgacggcaacagcagtaaaagtaagcgcctcttcctgcgctttgaggatgacggactggaagcagtaggtcgcgctgccggagcattttctattcgcaggcgtggaggttttcaggcggaaccgagagatcgcctcgattaccaggtctcggtgacaaatcccgtcacaggcgcaaaggaaacggttacaaacggcagagcggtagactggcagggcgtcaacaatcccaaatatctgcgacaagtgatcctgcctggcgggcgtgaagccgtacagtgcgttcccgcccccatagttctgaccacgccagcgttttctgccagcagcaaaaatgccggcgaatacaccggcacgctacgcattatctacacacccagtacgttataa

SEQ ID NO: 141359 - DNA, 2718 bp, Enterobacter cloacae
atggcttttcacagaaatactctcctttttgttactcttttatccacatccattcaatttgcctgtgcagaaatggcaatcccgtctgggtttgaggatctggcaaaaacgcagcgtctgtggacggaagtcagcctgtacggagaatcgctgggtctttttgaaacagaaattaatcttgagacggtcaccttcaccagaccacaggcgcttatcgacgccattaaacatcaatttaacgacgatcctgcgctgattgcctctataaacgaagcgctggctgcgccgctacctcgtaacggcaatctggcttgcagtagcaatggttccgcaacgggatgtgattatatcgatacccaccgcctggcgattatttatgatgaaaataacgcccgcattaatctgtttttggataaacggtatttgccgaaacacaccgctaacagccaatggtatcagccaacgcacgacagtgaaaatgccctgattcatcagcaaaatattaacttcgttgcggacagaaactatcagtcggccacaattcagggtaacggggcactggctcttacggaaaaaggttatcttaacctcgactggacctggcttgggcaacgctctcgccatcaacaacagcaagagattagcgtcaacaatgcctggtatcgtcaggatataggccatgaacactatctccaactgggggagatggatacccgcgatctgttcagcaacgccggcgggaatatttctcttagccagcttcctctggggaaaatacgtgggcttcgcgcgggttcgacccggacatggctcaatccggttcagctctcgcagggcacgcctctcaccgttcttttgtcccatgatgcgcgcattgatgcacgtcggggagatcagttgctggccagtttttaccttaacgccggtgcgcaaacccttgatacgcgttcgttcccggagggtagctataccgtcaccctggcaatctatgaaaataaccgtttaacacgcactgagcaggtcccgtttacacgtaccggcatagcaccatttgaccgtattgaatggtttatacaaggtggcgaaacttataatgatgggcctggtgaaacgcattcttccgtggcacaagctggcattcgcctgcctctcactccgactctggcgctgaccagcggtgttactgtaacaagtgagcgccgttttgttgaaaatgccgttgactggagccagggtttcaactctgggttcattgatggggtattaagcactcgttttagttacctctacggcggcgagggtgagcgtggaaatatccagcagataagctacaacgacggtttttccctgagtttttaccgtaacgcgttatcagccaataactgcgataacagaagccaggggttcgatgctgtatacggctgttaccgtacgctgtcggcacttttttccgtacctgtcggatcgtggtacgccaacctggggtattccgataacaagaacgaaggacgctatatctaccgtcgtgaactttctcagaatgacgatcgttacagcgaggggctcccctgggaacaggtctttatgactcgttctcactctcgcgcctggcaggcggggctgagcaacagttttaatatcagtggcctgaatatttatggcagcgctaacgtgtttaaacgctacgacgattcacttagcggcagtgataaagggggttatttaagtttcagtctctcgctggcacataacaggaatggcaacacctcccgcttcacttcgcttggcgcaacctggcaacaccagcgaaatgaaaataatcagctcagttacaatctttcccatagctggtacgccggcaggaatggcgagaacgaatatggtctaagtgcctccgggattaacagcgattccttaagtaccactgcctatacccgaaaaggcggacaatttggtaacgccagcctgacactcagcgacttctgggacaggaatgttaacagccacacgccgagcagcagcggaaattacaactcaacattcgcgctgtcacgctccggcttgtggtttggccgctggagcgacggacgcccagcgtctgccattgcggttgacgtcgaaacacaggaagagagtgagacttcacgcgttgccgtctcgctggataacggcagcagagcggatattcctgcaaacagtcgcggattattcgccgtacccggctatcgtcaaacgaccctgaccattaacgaatctctggatatctctcacggtgccagcagtgaaattacacagggttcaggaagcagaacggtctttatggtgccagggaaaatgcttcacagagaagtgctcacttcggcaagttacacctggattggtcggctcacggatgaacatcatgctccactcaagggtgtcatgcctctgaatgtcaacggctggaacgatctggggcaaggcgggtttaacgcgcaaagcgattccctgctccaccatctttatatcctcaaccagcagcagttctatcaatgcgcgctaagcgtaaaaagcatgcgtgatgtagtgcgctatgtcggcactattacttgccgcgggatccgtttttccagcctgccagaaacggttcaacaacaggcgcagttaatgctggccgctcgtggaaagagcgttgataccacggttatgaacaccgataacggtttaaaaggaaaatga

SEQ ID NO: 141360 - DNA, 495 bp, Enterobacter cloacae
atgcgtaagttaattaaacctctgatgattgttgccgcgatgacagcatctatgaacgcaatggccgttcagaaagatatcacggtcaatgccagcgtcgattcgcaactggatatgacccaggcagacaacacgccgctgccgtccagcatcgatatgcaatacctgcctggcagtggtttagtcagttaccgtctgaataccaaaatctggtctaactccgccaccagtaacgtcaaggttcgtctgctcagcgcagccaaactgacgaataccgatggtgaccagaacgttccgatgaccgttatgcttggcgataaaacactcaatacaactgacgcagtattcaccggtgctgaactctttccgagtacgacagcaaatggttcagctgttttaccattaattatttctcaaacgacgaaaggtgttctgaaaagcggccaatatagcggcgtggtaagcctgatgttaacgcaggcaacaacagcataa

SEQ ID NO: 141361 - DNA, 747 bp, Enterobacter cloacae
atgttgaaaattaaaaaacttaaaaaaaggccttatgcgttttacgcaactgtgctgtcactgacatttttctcggaaatgtcagtcgctaatatgagcgtatatccgatggaacttaatgtggatagctccggaacagcgcaaataacagtggcgtcgaagagtgatgatattcagttcattcgggtgaagcaaaagaaaattcttaatcctggaacaccgcaggaaaaagagatcgatgttcccgcgtggcaggaaggtggcattatcgtgacacccgagaaatttgccctggcggctggcgctatgcgagtggttcgcctggtatctttggctcccccatctaaggaaagcacgtggcgcgtctattttgaaggcgtaaaacagccagacgacattatatccacaccggaaaaacgcggtgccgatgtggcgaaacttggggtgaatatcatctggggagcgctggtacacctcgcgccgaataaggaagaagtatctctacagctgaatttgaggcacggcaccttaaaaaatacaggaaccttacgtgtgccgctaaaagaaatcggtatatgtgatgaaaaagataattgccgctggctaaaagaagaggcaacgatttatccggacacggaacgaaaattacaatcactttcgaatgccaggagctttaaatataaattccgctacttcaactggttacaaaaaactactgatgaagccgaattacccgtcgtgcaatag

SEQ ID NO: 141362 - DNA, 774 bp, Enterobacter cloacae
atgttatctatattcaacaattcattattatttaatcctgaggcgcataccatcgggctggtaggccagccggagtcagcattaacactctcagctcccgccgtccgtcttttacaggaatttgtacgaaataaaggatgtgatctcagccgcgaggagttaatcacgcgcgtctgggaagcatatggttttactccgtcaggcaataacctcaataaagcggtgagtgagctccgtaagagttttcacgcattgggtgaacgtcaggagatgattgtcaccttgccgcgcattggttttcgttttgaagcagacgttattagctatccgaagcagttctcccgcacgtctgagcctgaaccgttgcagattcctgtactactcagcagcaacacgttacgaaactggaaacatattcgttttgtcgggtggatgggtatttttgtgctcactgctgcagcaatcgggacggggatgtactggtgccgtttacaggacttcacagcccccgttgaacttaaagagatcaatgaaaaaattgggggctgtagattctggtttgtcaacgagcaggatcggccagtaaagatgtcaaaaatatcaagattgcttgaagcaaataatgttatatgcaagggagatgagtacgatatttattattttaatgaaagacttaccctcacttcagcggatgagatttttatcggcgcttgtccgataaataaaaacagtccgtgcaaaagtattcgttacaaaagtgggccagaagaatga

SEQ ID NO: 141363 - DNA, 477 bp, Enterobacter cloacae
atgaaaataaaaatcctgttcggacttggaggggttgttattggaagccttatagtcgtggctttgtatccttcaaacagaaccacacaagatgtgctggcatgcaccaccgaatttaactttacccgaaatgagggaaagccaaatgaagtgaaagtaaatgctattgctcaattctatatacgtcaggacggtaccggtttaacgacctataagggtgcatcaaaggcgaaagggactgagatgatagtagatcgtgacgtgaattttacctgggagcggcgaaaaaatgatcatgtcattatgctgacttacaagaatacgttacgccggcataatgacaacacgcccgacgcgttgtgggggagttttgcgcgcccgggtgcacgctactacattactctctctaaacttcccccttctgtgtggcttattcaagaccggctttatccaacctacatttgtcgtgaagactaa

SEQ ID NO: 141364 - DNA, 324 bp, Enterobacter cloacae
atgtcacaagatttagaattttcgctttatccaccgatctggcctgctgtggtctatttcattgtgtctattgtggtttttttcttgctttatttggggaagttaaaagttaacaggcttcataaatatccattgtttattgcttatatggtatttgtaatcgctattgcatccattcagataaacatttttgcaaatggatacgattttgtaagaggatttttgcatattgattttgatccctatcgatatgactcggtatattggggatccttgtttttctccatgctttacttgctggcgacgcccagaaacaatttttag

SEQ ID NO: 141365 - DNA, 489 bp, Enterobacter cloacae
atgtccggctggggcgcctactggctgggaatgaactacccggtacgctttatcttcttcggcggtgcgctgctggcactgtgctggctgctgcgcggaaggctgcaggcgcgccatctatacacgaccagcaaagcgatggggctcacgtatctgtttgtcgccctgtggatcatgtcgatttttggcaactacgatatcgataactggtatggcgttacgcaggcttcgctgctaccgtgggcgctgctgttcgccgtggcggcggtgctctgcatttacatcagccttaaaaccgacgacggcatgctgcgcggttttggcctgaccttcctcgccattaacctctacacccgctatttcgaatacttctgggacggcatgaacaaagtggtgttcttcctgctcctcgcggcgtcgctggcggtgattgggcgctatgcagaacgaatctggcacgccgggatccagcgtgccagtactgattag

SEQ ID NO: 141366 - DNA, 372 bp, Enterobacter cloacae
atgaaatcacgtctagtcttcaaatttttcttagtaattatattctgtagccaacaagtatatgcaaaatcgccttgttacaagctggctacaactactttctttaatagtagcctttcccctactgtctcaacaacggagagtctaaaagatgcacaagaagaaatggccgatagtgaaatgttttgcaagcggctggttcaggcagtcaaattgaagaaaaccacatccaaagaattacgaagcaatgccgataagatgttaaaagaagcaagaaaagaattcgaacatgatggagatatggataagctagagcttgtaaaatatcactatgaactggtgatcggctcggcacgtatagcggaagaatag

SEQ ID NO: 141367 - DNA, 1980 bp, Enterobacter cloacae
atgtcaaggatcaccgtcaaagcaggagccgactttcttactggattggctcatgcaaaaccagttgctgcactaagtgagttaatttggaatggtttcgatgcaaaatctaagcaggttgagatcgagatcaagacggatccggcctttggaggggttgaagccattctaattaaggattatggcactggaattgcccacagtaaggttgtggattactttggtaatctcggagaatcttggaaaaaagctgcgaaagcaaatggcgatcgctccctccatggccagtttggtcgagggagattcaaatctctctcacttggggaacaggttcgttggaaaaccgtgttcgaaaaaaatggatctaaatataaatatacgatttctaccgatgctaataaaattaacgattttacaatcagtgatccagagttagctgatgaagaaaatcttggtacgcaggtagagatttataatgctagtaacactgctgaatttctattaactgaagaggcattgtctgatctcattatggagtttgctcttttcctaacagagtatccaagcaggaaattaatattcttaggtgagagtgtctcacctagtgatgcttggtccgataaacaggactatgatgtaggtggagtaattcttccagatggttcattgattaatgcttccttgactattattgaatggaaaaagaaagttcagagagagcttcattactgtgatttgttagggttttctctatacaaagagaagattgggcaggtaattcgtgctcctgggtatgattttacgctatatgcgaagtgtgattactttaagtcgctaagtgataaaaatgaagtatctttaggcgaacttattcctgaggtgagagcgattaaagatgctattattcaacgagcgaaaattcacttcttggataaagtatttcttaacaaatcaaaaatagtcgactcatggaaagaacaagaaatttacccatatgatgatgacgtacatcaaggaccgacggaagttattgaacgcaaggtatttgatattctcgcagttaatgttcaaagctatcttaaaagttttgaaagcgctgataaaaaaactaaaaaattcacattcatgctcttatcgcaagctattaaacagaaccccacttcggtacaaaaaattctaaccgaagttttgggcttaaaatcgaaagagcaagatgagttggctgcattattggacaggacaaccttgtcatcaataattagtgcttctcagattgtgtcaaatagagttgattttataaatgggttagacaaccttttacatgataaaaacacaaaaaaaactttattagaaagagatcagcttcataaaattctagaaaaagaagcctggctttttcgagaggacttcttccttgctggttctgaggactggcttgaagatgttttaaaaaaacatattaagcatcttggcaaaagaaatgatgaggatgataacgaacctgttttactgccagatggaaggcaaggtcgtgttgacctaatgtttgccaagtgccgtcagccatatgagggctttacagaatatttagtcgttgaacttaaacgcccctctcagaaaattaattatgatgttatcggtcaggtcgaaaaatatgcgttatctgtttctggggacgaacgttttgatcatgctaaatcaaaatggactttcatagccgtttctaactcaatggatgaatatgctgaacgcagggctaatcaacgtggatggcctaaaggaaaaacattagatgatgctgaattaaatgttgaagtatgggttatgacttgggctgaagttttgaatgcagcaagagcaaaattaagtttctttagtaagcagttaaatttagaggcatctagggatgatgccacatgttaccttgaaaagacccaccgtgagtttattccggtcataacagttacagaagaagtataa

SEQ ID NO: 141368 - DNA, 1488 bp, Enterobacter cloacae
atgtttcgtcagtggttagcgttagtgattatcgtgctggtgtatatcccggtggcgattgacgcgacggtgctgcacgtggcggcgccgacattgagcatgacgctgggcgccagcggtaatgaattattgtggatcatcgatatctactcgctggtgatggcgggtatggtgctgccaatgggcgcactcggcgaccgcatcggttttaaacggctgctgatgcttggcagcacgctgtttggcctgtcatcgctggcggcggcctttgccccttctgcgggctggctgattgccgcgcgcgcctcgctggcaattggcgcggcaatgatcataccggcaacccttgcgggtatacgcaccttgtttattaacgcgcgagatcgcaacatcgcgcttggcgtctgggctgcggtcgggtccggcggggcggcgtttggcccactgattggcggtatgctgctggagcatttttactggggatcggtctttttgatcaacgtgccgattgtgctggtggtggtctcgctggccgcggtctatgttccgcgtcagcaagggcgcccagagcagccgctgaatattagccatgccgtcatgctgattgtggcaattttgctgctggtctatagcgccaaaaccgcgctgaaaggcgggctttctccatggctggtggcctgtacactgctcaccggcgcggtattgctgtttatcttcgtgcgtattcagcttcgcgcccgcgtgccgatgatcgacatgcgcctgttttgccatcgcatcattttaagcggggtggtgatggcgatgaccgccatgatcgccctggtggggtatgaattattgatggcccaggagctgcagtttgtgcatggctttaccccgtttgaagcgggcatgttcatgctgccgctgatggtcgccagtgggttcagcggcccgattgccgggatactggttggtcgtctggggctgcgcatggtagcgtcaggcggaatggggctgagcgccgtcagctttattggcctgtcgatgctcgacttcagcacgcagcagtggcaggcgtggtgcctgatggtgctgcttggcttcagtgcagcgagtgcgctgctggcctccacctcggcaatcatggcggcggcaccgaaagagaaagccgccgctgccggggcgattgaaaccatgtcctacgaactgggcgcggggctggggatcgcgatatttggtctgttgctgacccgcagcttctcggcgtcgattgaactaccgcagggcttaccttcaacgctggctgataaagcctcgtcatccattggcgaagcgatgaaggtcgcgcaggatctcagtccggcactcggtgaaaccgtcattgaggcggcaaaaacggcgttcatcacgtcgcacagcgtggcgttaggcagcgccggtgggatgttattgctgctggcgattgggatttggtttagcctggcgaacgcgccgcaacagtaa

SEQ ID NO: 141369 - DNA, 189 bp, Enterobacter cloacae
atgaaaccaaaccgaacagaaaactgcagtggcagaccaccccggacagagagaataacgcgtcaggtcttgactccagaggaacgcaaacgccagcaccatcaggatcaggagttcataaaagccatgaatgaatttactgctaaagcgggattattatcagatgacccttattttggagggctttaa

SEQ ID NO: 141370 - DNA, 480 bp, Enterobacter cloacae
atggcactgaccccggctcaaatacgctacctcaatcaatgtgaaccaggcgaacctgtgtcacatgcattgtccgagctactattcaatgatcatgatctactcagtattgatgctaacgaacggtccattacctttcgctttgcgatgtacctccagctatctttccccggttggaatgtagattgcgaatataaccgggatggtgtagaacctaaacggctcagacatttggatctttatccagacagcgaagacgttgaagcaaagacagtatttcctgatgtgatcgtgcatcggcgaggtacacaacagaatcatctggtcttagaatttaaaaaatcaacgagtcgcgtcgatagacgaatcgatctactgaaacttcaaggttataagcagcagcttggctacgatcacgctttgtttgtggaggtcggtactgagggacaatcgattatcacggcgctcgagtgggtctga

SEQ ID NO: 141371 - DNA, 1434 bp, Enterobacter cloacae
atgagctacgcggactggcgagtttatcaggaggccacagctgaagtatttcgacgtcttggatgtaatgctttggttgattatcgagccaaaggtgttcgagcgacccatgatattgacgtctacgcgaccttccttcgatcgggtatcctctgtacttgggtaatcgaatgcaaattgtggaaaactcgcgttcctaaggaaaaggtgcttgctctcaagagcctcattgatgaccttggtgccgatcgaggaatcatggtcagtgaggttggtttccaacctggagcacaggatgcggcacgagggtcgaacatcactctggtcatatccttggatgattttgccaagactgcacaggcagcaacatcagaagcctctcttattctagacagtagtgatgatggagccccgatttataaatttccaagccgctctgaaccacatgacattctcctgcataacaacttcctgataactgcaaattgggctggatgcagcatttcaatcgttaatccatcatccaaatcaatcatacgtaccatcgacctggataaatatgagtcgatctccccgcaaaacggtgaaagagagattttgagccatcctcctggtagcttagttattgcagatggccgtttgtttgtcggccaggttttttcggactttgtgctcgttattgatttggctacgcatgctatcgttaaaagaatagtgttacctgggggcggtaacggacaattagcagtgtcacaaaacgaaaaagaaatctatttcgcaagcaatcgagtcaaccagttctacatcattgacagtgccacatacgttgtaaagacagtagcatatcccgaaggtggccgaggctgcatgtcgctgctacgacatccgacactgccattaatttacattggcattcaacgcggcggacgcagccacgggctgagttatccacatgctaactgctatttagctatctacgacttgagtcgtcaaaaatatacggcggatgtccagctcgccgagataagcaatggtcgtgcagatgattcaacccctgcatgtctaacatatgacgatctctacaatcgcatctatgtcggcatgttccagtccaagcgtggcatctgtgtaatagagccggaatcaggggagctaattcaagaaattcgctttgcctcaaatgataataataattttttcgcatgggcagacccgttatcgcaaacggtgagtggaaacttactgttatcggtcaatcgaaacaatcatgagcttgtagcgttagatcgtgcttcacttcaaataaaaaaaattctatttgttggtgaagcgcttaacggcccgagagccgttttggtgtggggagataatgctgttgtcagctacccaagtcgaaatggattacttttcattccacttggaactctgaaataa

SEQ ID NO: 141372 - DNA, 3123 bp, Enterobacter cloacae
atggactttattgacaaacagattctcccgccaaagtcgtgggagaaattcgaagatttgactcgtgcattgtttgccgcagtgtggaggtctccccttacgcaaaaaaatggtcggtctgggcaaaaacagcacggtgttgatgtctatggaacgccacaggcaacacccggcataaattttggtgtgcaatgcaaagggaagaacgaaggttatggggccaaggcgactatcgtggagttcgatacggaactcatcaaggccgaaaattttaaaccacagcttggacactggacatttgctactacagcgcctaatgatgcgcgacttcaagaacatgcccgactagtgtcagaacaacgcgtgaaggaaggaaaatttcccgtagttgctattggatgggacacgattcaagcgctgctatccactcatcaggaagtgattgaagaaatctatcccgaacatgcaagcgatctgcataaaatcatggcagctctgcgcgcgttaccaagttccgaggagctcgatcagatccggcggagcctcattgtgttcgcaccaagatcatcagtactcaatattgaagcatcagtttggtctgaggttaagttcgaaaagcctcgtgatcttggacctgctctaatgggtcgtccactcgggcctgcagatgtcgctgcttgtcccattcttccggaggtagctctactgactgcagacctggagcgcgcaggaacagctcgacttgcgggggtaccgggagctgggaaatcaatctcaattcttcaagtggcgcttcaaatgtattgtcgcggctggcgtgtcctaagattagccgacccaattggagagataccttcttttgatgagagtctgaaaccgacactctacatcgttgatgatgctcacctgactcgcccagcatttcttcgtgagttggaagaacaggccactgcatcgcgatgggtattaagtgcgtacacgatttccgaagataagagcggctttccaggcgccatccatcttgatgctaagcgagcggttcgggttattgcgaatggttttctggcttcccgcgaagcaacacttgccgctgttcgtcaagccgatgatcgcatcggcgatcggcctggagatgagcagttcgatctacgccttgagcatgcagcggagaaagcgctttatccctggcaattctgtttcatccttggaggaggatggcggcgagcgaatgcaatggcaagttctgcgcgcgcagcaggcgctgacgtggttcttgcagctgctgcaattcgacagctggcatcacgtgatgcgcactgttcacgcgaaatgttgttgcggttagtcggggacgagttgtcgaattctgatggaaatgctgcgattgattggcttgtagcgcaacgatttttactgagtttcaacgaccttcgctgtccacaccagcgtcttgctattgtactcctggcacgtattctcgacggacagacagccgaagagcgtcagaaaattgcagttatgctcagaacagttctgaccgacattcagatgcctctcagtggcctaagtgttctacttagcgaactttcgttagctggcgaatttgggatgtggcgaaggcttgtacagccggcatggcttactcccgctttagaacgctgctgggtagcgacagaaccacttgatattcggcatgcttgctggttactgaataatttgcatagctatctgcccgatgagatggaaacaattgccgatcatagtgagactcttgcagagtggatacaggcggcgccggaaggtgcatgctatgcgattggccgcgtgcttaatcatgtacttaatactaatcgggcacttggtgaaaacatcgtcatgctagttgagccacgcgcattagcaaaggcgatcagtgctgctgccccgttgcatgcgggtgagattgccgaactgctttcgatgataggtgcttgtaaagatgatatgtggaaggcacgctatctcgaacacattgatcacgatgcgtgccttcgcattgtgtcacagtggccgcaggatgcctacctatcggtcgttgccgatttttgcgaacatttctgctacgtcgaatcagagttcgggttcactttgatcgaagcacttatcccggccatcgccgatcgactgcgtgccgctccgcaagagtctttccacgaactaaacgatatcgtgtggaacgcgttgcggctctacgatccgcttaacatctatgttggcaagttggcaccgtcccgaagaatgcggcaggtggggcgaaaaatctgccgttgctggtcgcctaaggatctcgcgatctctttgtcgcgcagtacgcaacgaaacttccaagctgccgcagggcttcttagcttcatgcataaggcctcgccaaagcagttcgaggagacggtattagcactcaattggagcgagatcgaccaagcgataggctcggattgggcggaaaatatcggcgatgcgagaatgctgctcggagttgcgcacatcgtaccagcagcgagactcgcaattcaggagatgattgcgcgcaatgagccgcgtatcgtcaacatgtcgacgcatctcgcagccatcgcgccggctagcgcgttacgtcatatagccgcgggcagacgcattgcactcagccattggggtcatgtcgattggcaactgggagcattagttttggcgaggattgctcagtcggagccaacactggtttctacatttcttgaaccgcactacagtgggctagcagaggcgttatctcagcccagccccactttttacaatgaggctctgatgtttctttgtctcctcgtgcaagtccagccttcaggcttaattcgagtgctggatcaaattgatgtaaacagggcaacactggggtggcgtaatgcacttcgcgggcaggataatagtcgtgagcctggcgcaaaggctcaggttcggcaggtagcgtctttgctagtccatcatgcgatggatcgtagtgatgcattgggagagttagcccgccgactgcgacgtgactttccccgtcaatctatacctttagcaaagactattgagttcattgatttaagcgagccgattgaatga

SEQ ID NO: 141373 - DNA, 1650 bp, Enterobacter cloacae
atgaaagagacttacatttttaggttccgtgatctaggaaaaagtgaaggatttaccatcgaacagcataaccaaattgctcgtgaggaaggggatgtttggtggggatggtgggcaaaatctggtgaggtgtttccatcacaagaactaagaattgctgccgaaaatctcaccaaaatatatttttttgattcagggcgactaaagttctatagggccgaattaaaagaagtctgctcctcagctgctggggatagcaagaagaaggctcctgataatggtagaaaaacaccaaggtattataatgaagatgagttgttaggttggttaaaagtttctgaaatttgtgaaattcatgataatgatgatgttctcaaaaccttatcctatattccattagattcattattcaccacctcaaaggatttagatgaacagcttttcaataaagttgttttttcagtaactgaattaaaagaacaagatagaacaatttggaaggtgagacctgctattgattctgatcttcagcatgaattattagcatcccattatattccttataatttcaaccaaaaatatagccaaaaaaaaggggagtttataatttggctttcagatattcatttcgataacggaaaaggcaagcatgcgtttccagcgcaagataatgatcaacagaaatgtttatcttctcgtgtagtagagttggcagacaaatatagcaatggaaataaatgtgccggattggctatttcaggtgatttgacttggcaatcacaggttgagggatttgagctggcttcgaaattcatcaaagatgttagttcttctcttagccttacaccggatgatataattatttgcccagggaatcatgatgttggtttggtttctaaagaacaatattttgaaataatgggaaagcctactactgatactccatgggcaactctagcagaaaactatcataaaggaagcaaagaaaactatataaaattttataaagatgttttccaaagaaaacctgaagaagatctctcgcaaggaagaaaatttttattgggagggcacaaagtagttgaagtggcggccttgaactcatgtgttttacaacaagttaaagattcatttttgggtatggggtttatcggtgagaaacaactcagtaacgttgcggaatctatgggatggatgaacaaaagtggggagtatatatctaaaaaaaggggggtcacaagaattgctatgctccatcatcacctaacttcaattaatgaggccgaagatgcctatttggattcaaaatatagtgttacactagatgcggagagattgttgcgttgggtggtgaaacataaagttgactatattcttcatgggcatatgcatagaagtagttgtattacaataaaaaaaatactatctccattagaaccagtctcggcttcaaatcctgaacatacttttcaaattatttctttgggaagttcaggggttgctagttcagaattgccaaatcaagattgtgctaactatgcatgtataatggatttttctggtgaaaagctagcgttcaaatttttcaagctcgatagacagaacggagcaaatgaaacggcaacctatgctattgaaggtttatcatga

SEQ ID NO: 141374 - DNA, 837 bp, Enterobacter cloacae
atgaaattacttatcaccgatttggataatacactgtacgattgggtaagtttttattcccaatcatttagtgctatggctgaggaactatcaaaggagataaatgttcctttagatatacttttgtccgagtataaggtcattcatcagaggtttggtaattctgaaaaaccgtttgctactctagagttgccatctgttatttcttattttgggaccaatgataagattttattacaaaaaaaactcacgcgagtattttctgcttttagctcaaagcgcaatcatacattgaaattataccctactgtcagggatactttaaatattttaagggagcgtggtgttaagattgtcggtcatactgaatctttagaatataattctttgtatcgcctttataagcttgatgtcattgatttttttgatcacctttacacaattgaagacaatcacaatctccaccccaatcctaaaaacgcaaaagttatttcagtaaaagatgattttattataaggttatctagtgctgaatctaagcctaacccaaaactcttggagcacatttgtctcactgaaaatgtagatattaaagatgcggtatatgttggtgactctattactaaagatatatcaatggcaaagtctattggaatgaaagctgtttgggctcgctatggtcgtcagtttgctcccgagctatgggaaattttagtgaaaataacacactggactgataaagatgttgaaagagaagagcaactgaaggaatcattttcaagagttaaaccggattattcaattaatagttttgcagaaattttggatctgatgtga

SEQ ID NO: 141375 - DNA, 558 bp, Enterobacter cloacae
atgaatagtcgagtatccaaccctgagtcgtacatattttctgcaataatctacatttgcaaggataacttcaccagtaatgatgtagcaaaaattcttgtcgagcgattctcactcccgaaaacttatcgaaaggcaaaagctttttcttataaccaaattcaatatctagttaaaaaaggattattaaataaagtaagaaaatcaggcgtgtatcaatatttatactcaatcacatcagaattcaatatagcaaaagaaaatgtgcaattaattgaggtaagccaaaaaatctcacttcaattttcaagtgctaccagccatgaacacagtgatgtaaacattcaaataagatatctcattgaaaaatacagcagtgaattggaaaaagtttcaggagcaaaagaaatttatgaagaattgataattgccgtgccgagcagggaaaatgaattcaggaaactttctcttgagcaagataaaagacatattaagataaatgaaaaaataaacacactaattgggattgttaataaaaatatcgcaataaggcaatga

SEQ ID NO: 141376 - DNA, 924 bp, Enterobacter cloacae
gtggaaacgacagacattgttcgaaaactttttgacggtgttgttcctgagagagcatcagagattgaatctatcgctaacgattatgatgcccagttccgactgattgctgaccgcgaaggatttaacttagatgctggagggttctccgcaatccagtacaccagcagatcaatgcgtcaaatgtggcttttcggttatgcgggaaggcaggcgttacattgttattcttcgttgatcgtattgttcaaatcattcggtaccactctcgacataaacgaaatcaacaagattccagatcaggcagcagaagatgaagccttcaagtcgatacttgatgcagtgaaagacctgagcactgcatttcatgaagacgactttgaatggccagtggctattcctgatcctgagaagggtaggccgtcagattcagagcgcgctgcagtatatgatctcacgtgcatggctacggcatatgtatttttacatgaactgaagcacgtaattttctcagctgaaggaaatgcaccggaagacgcgaaggacgaagaatatctgtgtgatcagttcgctaaagatatgatgatatccaagatcgatcagtacgccgcaagcagtgggtatcccccggaaaaggttaggatgaagcgtatgatggggatcactctagcatccgcctttatccttttcgcaacaggaagaaaccgcctcgcgggttcagagactcatcatcccatttacgggcgttggtcggcgactgtgcaagatgtcaatttaccggaagatgactggttctggctgtatttttcctcattcgcccttgcgttgctgaaatatcattcaataaccattcagccgaagatcgtaaaggattataaatcgctatgctttgacctaatcgcagatcttgaaaatggcatataa

SEQ ID NO: 141377 - DNA, 318 bp, Enterobacter cloacae
atgaacaacaccacatggggtctgcagcgggatatcacgccgcgcctgggagcacgtctggtgcaggagggcaaccggctgcactatctggctgaccgggcaagtatcaccggtaagtttagtgatgccgaatgcctgaagttggatgtcgcattcccgcattttatcagtcagatggaatcaatgctgactactggtgaaatgaatcctcgccatgcccactgtgtcactctgtaccacaacggttttacctgcgaagccgatacccttggtagttgcggctacgtatatatcgccatttatcccactcaacgctaa

SEQ ID NO: 141378 - DNA, 330 bp, Enterobacter cloacae
atgaaaactctacctgctacaatttctcgggcggcgaagccttgtctgtcgcccgttgcagtctggcaaatgcttcttacacggctactggaaaaacactatggtctgaccctgaacgatacgccgttctgggatcaaactgttattaaggaacatattgatgcagggatcaccctggccgatgcagtcaactttctggtggataagtacgaactagttcgtatcgaccggaagggattttcgtggcaagagcagaccccgtatctttccgtagtggatattctgcgagcaaggcgctctaccggattgctaaaagccaaggtgaaataa

SEQ ID NO: 141379 - DNA, 921 bp, Enterobacter cloacae
gtgaaccaacttgaagagattatcacgatactcagttcaggagatgagggaaccaccaacgcactccttaaaacaaaagtgttgatgtatgctatcgggaaaaaagagcttgccgcatgggtgaaccatgaactcaatggttatcctgataatatgcctcttcctgactatcgcaccgtagctgctcgtatactggcagacgcaaataatggtgtgcgcttatatacagcttacccgcttccgatttcgtatcttaatgatgaagattatgaggatgcaactactgcatctataaggctttcaatcagtcaaattgaacagctagtagttaatgctggtgataatcaaactcttcaacagcctatacctttggatttcgcatattttaaatattgcaaaaatgtagtaaccgattatgaaataaccagatgttacaaagagatagcacttcataatttcactaacattttgacgcaagtaagatcgagacttctagattttgttttagaattaacggaatatgcatccgccgtacctggagcaaatacaatgatagataaacttaaaaaagtagatgctgcatccatttttgaaagtgcaatatttggtgatcatactgttattaacttgggtgatagcagtgcttttaacattactaacaatgttatcaaaaatgatattgcagctttaaggcggcaccttgaaactgaaggggtttcaaacgaagatctaaccgatctagaagttgcgataaattctgatggcccaattgcgccacgtagtaaaaattatggtcccgcagttggtcaatggttttcaggcatgatttcgaaagcagcgactggcacaacaggaattggcgtggcggcaattactgagcttctctcctctgcattgaaaaaatattataacctcgattaa

SEQ ID NO: 141380 - DNA, 174 bp, Enterobacter cloacae
atgttgctggttagcatggtcgggagaaaccagtttgtgaagctaatgggccaggcgctgagcactcaagatggtgaagcgatagaaggggaaactctgaatgacgtaacggtatattgtattcttacacaaacacttaaccaagttaaagatgataaatcgcctgtaatgtag

SEQ ID NO: 141381 - DNA, 804 bp, Enterobacter cloacae
ttgactcttggcatgcttgataaaatattaagttacgcatcttcgtttggtacatttgtttctgcggtagccgctttatatgcaatatggctgacaatttttcagcgcaggatttcatatagaccgaacctaataataagagatctgctgattaattccaaaaaagacaagtttgatggtttcgatctggatgaaaattcatctcttataggtgtaaaagtagaactaaacaacataggactaggaacagccatatcagtgaaatatagttgggagtatgaatttgaaaaagagcttaaaaaatatgatgagttatttttcgaaaaattcaataaaaaagatgatagttttgattttgattataacaatggcttgatttctttcaaaaaggagaggagtggttatttttacccaggtttgaatattgtgcgcgatattgacttcattttacctcataacataagcaaagaaagcacaatattggaaattccctatgcagtattgctactgcttacaaatatcagctatttaattattttaaatagacataactttaataaaacatttaatggtcctaaattaattgttgtattccaagatattgaaggtaatacaattcgaaatgaatggacatcaaaactgcaaattggacattcatcttttagctctgacaatgatgttaaaacttcatactcgttacgttttagcccaaggtcaacggggagttcactaagaagattacaaaagatacgtaaaagctacgctgatttcatgaacgaacataacttcaataaaaacaaataa

SEQ ID NO: 141382 - DNA, 171 bp, Enterobacter cloacae
atgaattttgcagaactccacaaccagcatgagccacttcttatcgctaatgtctgggatgccgccagtgctgtagcagcgcaagaaacaggttatcaggcattgggaacgtccagcgcagcaatctcgtccacactgggatatgaagacgggcagggaatggccatttga

SEQ ID NO: 141383 - DNA, 240 bp, Enterobacter cloacae
atgccacgtacagcagacataaagaccgcctttattgcggccatacagttaaatccaaagggctaccagtaccttcggaccgatagcttcatcgagaagctgcgtgagtacaactggcacttttccgcggccgatgccaatgcatggatagaacgttaccagcaagactttgtggataagacaacagaacacagcgataaccgctactggatcctgcggaacatggggagggtgcaataa

SEQ ID NO: 141384 - DNA, 321 bp, Enterobacter cloacae
atgggctttccttcaccggcgtcagattacgttgagcaacagctctcacctgttgtgctgtgtaacattggagcggatagcagagtgcttgagacagatattggttttgcggttatcgagccgtgcgtgaaaacctgcgaaggggatgtccttctgattcttagcgatggacgcacgcagtttgccaggctgatgggtaaagcgctcattacggatgatggggaggcaatagaaggagctgcgcttgcagatgtggaggtgcttggagtggcgacgttcttcatcaaccgagtaagggaagatgactccccggtgatgtga

SEQ ID NO: 141385 - DNA, 261 bp, Enterobacter cloacae
atgagcgtagaaaaacagaaaatgattgcgggtgaacattaccgtcctggtgatgaaacattacgggccgaccgactgcgcgcccgccatctggttcaccgctataaccactccgccccgatgagaaaacagaacgccagaagattctggcggaactgctggggcaaagtgaaggggcttatattgagccagctttccgttgtgactatggctataacattttcctgggcaaagaattttacgctaacttcgactgcgtga

SEQ ID NO: 141386 - DNA, 3147 bp, Enterobacter cloacae
atgcctaatttctttatcgatcgccccatattcgcatgggtgatcgccattattatcatgctggccgggggacttgcgatcctgaagctgcctgttgcgcaatatccgaccattgcgccaccggcggtgacgatctccgcaacctacccgggggcggatgcgaaaacggtgcaggataccgttacgcaggttatcgaacagaacatgaacggtatcgataacctgatgtacatgtcctcaaacagtgactccaccggtacggttcagatcaccctgaccttcgagtcaggtactgatgctgacatcgcgcaggttcaggtgcagaacaaactgcagctggcgatgccgctgctgccgcaggaagtacaacagcagggtgtgagcgtcgagaaatcgtccagtagcttcctgatggttgttggcgttatcaacaccaacggcaccatgacgcaggaggatatttccgactacgtgggcgccaacatgaaggacgccatcagccgtacttcaggtgtgggtgacgttcagctgtttggttcccagtacgcgatgcgtatctggatggacccgaacaaactgaacaacttccagctgacgccggttgatgtcatcaacgccattaaagcacagaacgcccaggttgcagccggtcagttaggcggtacgccgccggtgaaaggccagcagcttaacgcgtccatcatcgcgcaaacccgtctgacctccgccgatgaattcagcaaaattctgctgaaagtgaatcaggacggttcgcaggttcgcctgcgtgacgtggcaaaagtggagctgggtggcgaaaactacgacatcattgcgaagtttaacggcaaaccagcttctggtctgggtatcaaactggcgaccggtgctaacgccctggacaccgcaacggctatccgtgcagaactgaagaagatggaaccgttcttcccgtcaggtctgaagatcgtttatccgtatgacaccacgccgttcgttaaaatttcgattcacgaagtggttaaaaccctggtagaagcgatcatcctggtcttcctggtgatgtatctgttcctgcagaacttccgcgcgacgctgatcccaaccatcgccgtgccggtggtactgctcgggacctttgcggttctggcgatatttggctattcgataaacaccctgacgatgttcgggatggtgctcgccatcggcctgctggtggatgacgccatcgtggtggtagaaaacgtcgagcgcgtcatggcggaagaaggtctgccgccgaaggaagcaacccgtaaatccatgggccagatccagggtgcgctggtcggtatcgcgatggtgctgtccgcggtgtttattccgatggccttcttcgggggctctaccggtgcgatttaccgtcagttctccattaccatcgtttctgcgatggcgctgtcggtgctggtggcgttgatcctgacgcctgcgctgtgtgcaaccatgctgaaaccgattcagaaaggcggtcacggcgagcacaaagggttcttcggctggtttaaccgcatgtttgataagagcacgcaccactacaccgacagcgtggggaacatcctgcgcagcaccggtcgttacctgctgctctatatcatcatcgtggtgggaatggcattcctgttcgttcgtctgccaagctcgttcctgccagacgaagaccagggcgtgttcctgagcatggctcagcttccggctggtgcgacgcaggagcgtacgcagaaagtgctggatgagatgaccgactacttcctgacgaaagagaaagacaacgttgaatccgtgtttgcggttaacggctttggctttgcgggtcgtggccagaacaccggtatcgccttcgtttcactgaaagactggtctgaacgtccgggcgaagagaacaaagttgaagcgatcaccggccgtgcaatgggcaccttctcgcagattaaagatgcgatggtcttcgcctttaacctgccagcgatcgttgaactgggtacggcgaccggtttcgacttccagctgattgaccagggcggtctgggccacgagaaactgactcaggcgcgtaaccagctgtttggcgaagtggctaaacaccctgacctgctggtcggcgtgcgtcctaacggcctggaagatacgccgcagtacaagatcgacatcgaccaggagaaagcgcaggcgctgggtgtatccatcagcgacatcaataccactctgggcgcagcctggggcggtagctacgttaacgacttcatcgaccgcggtcgtgtgaagaaagtgtacgtgatgtctgaagcgcaataccgtatgttgccgaacgatatcaacaactggtacgttcgcggcagcgatggccagatggtgccgttctcagccttctcgacgtcgcgctgggaatacggttcaccgcgtctggaacgttataacgggctgccatctatggaaattctgggtcaggccgcgccgggtcgaagcaccggtgaagccatgaacctgatggaagagttggccagcaagctgcctgcaggtattggctatgactggaccggtatgtcctatcaggaacgtctgtccggtaaccaggcccctgctctgtacgccatttcactgattgtggtgttcctgtgtctggcggcactgtatgagagctggtcaattccgttctccgttatgctggtggtgccattgggggttatcggtgcgctgctggccgcaacgttccgtggactgaccaacgacgtgtacttccaggtaggcctgctgacaaccattggcttgtcggcgaagaacgcgatacttatcgtcgaattcgccaaagatctgatggagaaagaaggtaaaggcctgatcgaagccacgcttgaagctgttcgtatgcgtctgcgccctattctgatgacctcactggcatttatcctcggggtactgccactggttatcagctctggtgcgggttccggcgcacagaacgcggtaggtaccggggtaatgggcggtatgatcaccgcgaccgtactggctatcttcttcgtaccggtgttcttcgtggtggttcgccgccgcttcagccggaagaatgaagatattgaacacagtcattcggtagaacctcactga

SEQ ID NO: 141387 - DNA, 132 bp, Enterobacter cloacae
atgcggggcaagttccggatcgggactgcttcagacgaacttctgcggcacaaaaaagccaacactaacggggttggttttggccgtgtgaaagacattttgagaaaagataagcacaacttactaaaataa

SEQ ID NO: 141388 - DNA, 1263 bp, Enterobacter cloacae
gtgcattctacagaatatgcaattcaacaagctcttttcgcagtcggtaccgctccgacacggagtaaagctctcgccagttttagggaaaaccagcatttattaaaagattggaggatcctttatgctgatgagtgtaaaacagggccgttcccccttaggcgagcccaattttctgaaaaaggtttcgtatcaacattattctctgggcattcattatgggttctggatcaagatgtcatttcatcatcaaataccatgatgtttcaggttggctacggtacttatattgattcgaatgcagcaagttatattcgttctttggcctaccgtgaagaacccaaagaacatctactgaatttttgtcgaatgctttcagattcattttcatttaatgaactatccaacattaatccttatctttatttatgggaggctcagagagacagaacaccggaaacggtaaccgggatccgggaaacaatggctgcattgtttgctctttcctggattaaacaacctctgaatgctgaatgggggaaaatttacaggaaattataccaggaacaggcggaagcagaggctgaccgctttctgtatcaattttaccagaacttagatgccggtttaggaaaggcgatcgaagaccaagttgacctactggaagctatgttattaagaacgaagttaatcgaactgtcttccaaaaaatcagcccacaacaaaatgaatgatcttgtgcagttcatgcatgatgaattatctaccatgatgattcgcgaattacttgtttgtgccgacattctgttccgtgaaggaaaatcacagatgtcacgaaaacttgatggcttacaaaataaaaagagacccttcgatgtactgagaaactgcgccagagatttaaatatgctcaggagcatggatcagctgactaactctatcgcagataacacaaattctgcattttacgtcgctaatttaattacatttgatcgcgatattatcgatattattcagttaacagaactgcgtgctattgctctacatcgttcatcttcagacgcatttccgatttataatcagcaactggatacatggctatccgagaaattaggtcaaaaaggcttgagcggcttagaaaatacattcaggaaggatggattcaatatacgttccagaaccagaagtcggagtaacgtgaaaacgatattgcaagaagacagacaaaaactggcctgcatcatcgaaaaaaacaatagttga

SEQ ID NO: 141389 - DNA, 492 bp, Enterobacter cloacae
ttgataaaaggtcatattatcaatctgggtagtcatgttcgactagagtttaatgtccctaaaaattttcccatatatggcaaccatgacattgtattagctacatatttaacggataaagacatggatattattgatagtgttcaaaacagcaatagtatcgtctttttaccttggtcagaggaggaaggtaaacgctggctatctacatgggagcctgaaatagttggcccatctacctggaaaatcctaaaacctgaattgccagctcctgttggtaatgaaattttaagactcggtcgctgcatcaacatgtcaacaggacttagccacccatctgataaagacagggcaaaacggatttttgctgatctgaaaaagcaagggcttaaaacatctgaagaagcaatcagacaatttgcagtcaacaatggctgggaccctgtcagcgcgcaggagttagctagttttgccaagaaatatgtggggtaa

SEQ ID NO: 141390 - DNA, 924 bp, Enterobacter cloacae
ttgtcaatttataagcatccacttaatcaaaatgtccttgacgctgccacagagcgcataacatggacgcttgagaatctgccaagggtctgtgtttcattttctggcggaaaagattccaccattatgttccatttaacggcccggcaagcccgaaaaatgggaaagcaaatttgtctgttatttatcgactgggaagcacagttcacctgtaccattcagcatgtgaataacatgatcgcacaatacgccgatgtgattgaaaaatgctggtgggtagcgctcccgttgaccacgcaaaattcgctctcacaattccagcccgaatggcagtgctgggagccgggtaaaaactgggtacgcacgcccccggaagaggcggtaaccgatcccgattacttctcgttctaccagcccggcatgaccttcgaggcctttgttcgcgaattttccgactggtttgccaaaaggcgcccggcagcaatgatgatcggtattcgtgccgatgaatcctacaatcgctttttgactatcgccaacgcacgaaagcagcgctttgccgatgacaaaccctggaccaccgtcgcccccggcgggcacgcctggtatgtctatccgctttatgactggaaaaccgccgatatctggacctggtttgcgaaaacgggcgggtgctataacccgctttacgacctgatgtttcaggctggcgtgccgccgcgctatatgcgcatctgtgaaccctttggcccggagcagcgtcagggattgtggctctatcatgttgtggagcccgaacgctgggcggcgatgtgtgagcgggtaaacggcgtgcacagtggcggggtctacgcggggcaggacaatcatttctatggccaccgcaaaattctgaaacccgacgcgctcagctggcgggaataa

SEQ ID NO: 141391 - DNA, 1809 bp, Enterobacter cloacae
atgccttcgtacacatcttcaaacgtagttcaagcgtggaaagatagcgtttcagagtatggttatgtgtattttcccggcaatgatggaacacctaaaacatatacgatattgaatacggtttctgaaacgaataatcttaaaaatagtaaagtaattgttgataatgagactgttttgtctttcgattatgaccattactccctaattaaaaccttaaatttctctgggcattgcacgttacattttcctggaaaatcattcaaaacaacagggggccaagtagactacattgcagagcaagcaatccttaatagaaatcctgttcgagttaacaaggttaatttcactgattgtaaaattagggctctaacgggagactctttcacagatgattctcctggtacttcatcagatacagcagtattagttccattggcgcaaaacaaatatacaggtattttctcacctatcggattgggcgaaaccatttctgcacacgtcagaatgcagtcaggaacagcacagcagtatggtgtactgcttcgatgtggtcagggttgggtattgatttacgcagctcctggggcttcatcatggagttatcgtgttaaacaagtaggtcagtctccagtggatggaacacctgtatctattcctggtggaaatgttttgtcatatgcatcaggaaaagcaacaattggcgtcacactacagtcaaaaacaatgtttagttttgttgttaatggagttgctattggtttgcctttcaattctggattggctggcgaaatatatgaggttgggtttgtaactttaagctcagatagtgctgccgtatctcgtgttactggactgtgtagctatgtatctctgaacggagtgcagggaaaagctccgttaaatattttgattcatggtgatagtacagctgagggttttatttctgcattcgataagtatttaccacaactgatggatggaggtaacgggacacgctctgtaggtatcgttaataaggccatagctggaacgtacatgcggcaggcgcttgatttactgaaagctgaaggtccaggtaacgcctacataattatcatggttggcggaacaaatgagggacaagctaatagcagtcctgatactttcgcagcaatgattgatgagtttgtgacttactgcaccggcctcggaagggtccctgtatgggtggaaccatggatgtggtactcatcagcattgattggaggggcggggcaggaaactgctaattatgatggtgcagccgaattgcgtgaagctggtaagcggcaaatgatgaaatatggagattctgctttgtgcattacaactacccatcaacttccagcgccacttccagaatatttcaactctggtaaggcggcattgctcagggatgcaattcatcaggatcagctaggctaccgtttatatgccgaaataattgcatcatcaatacttgattggtatgccaaggtggattttactgcccgagcaatacctcagtggtggtgtggtagttctgccacgatcgataacccatcatccatcaccgggaaatcagtgaatgcaaaagttaatctttcaggctttgctgatggatccgtaatcttgacgctgccaagatgggccagaccaaacagggcaagaaacttcacagcaccgtttacaaccaataatacggcctactctattggcgtagcgacggttaacacaacaggacaggtttctctgactggtataacatcagcaagcgctacagtgtatcttgacttaagatgggattga

SEQ ID NO: 141392 - DNA, 405 bp, Enterobacter cloacae
atgactaaacacgacgatattgctgcacgaatcatatccagaagagctgagcttggttggtcgcaagagcagctttcgaaagaaagcgatgtcgcagctgcgcagatttcgcgttatgaggccagggtgaataaaccaagggcaaacgtggtcgctaagctagctaaggggctgatggtgcctttttcatggcttgcgtatggtgacacttctgagttcatatcttcacccctgcctgaaggtgagactgagtattctttgaccgtgccttctgaagttgctgactatatagataaaaaatcggctgaactaggcatcccccctcatgaagtggcaagaaaaatgctcgaattattttatgagcacaattcattgattgaggatggtgacaaaaagcccacctga

SEQ ID NO: 141393 - DNA, 609 bp, Enterobacter cloacae
atgagagtgaggaaatctgtaagggatattcaagacctcaggatgatgaagctcaaattcgaaaggcttctgggtaaacccaatgtcgatggatgcgtggagtggaagggggcgctaaattattacggatacggtcagttctcatttgaggggcgcacttggtctgcgcaccgcttagcttatgaaattaccaatgggccaatagctcaggatgctcaaaagtggtgggttctccacaaatgcgacaatccagcctgttgtaacccagagcatctttatcttggagacgcgaaagacaatgcgaacgacatgatagacagaaaacggcagagaatgggattcaagcggtatgggggtggagaaaatattcgcttcggaagggtattttatgaaattggcggggaaattagaactctatatgaatgggcagagcgattagaggttaaccccatcactctagagcagcggatttcagctggttggccagagaaagatctgggtttgtcttcaaaggtattcaagcgtcatttaaaagctgatgggcaagcacaatacagaagattttctggtttagaagaagtaaagaattataagagcgaaacccggtag

SEQ ID NO: 141394 - DNA, 633 bp, Enterobacter cloacae
atgaatattgtagcaaaatcagatctgaacttccacggcatgaatcttgtcccggtgcagaatgtgaatggtatttggctgacatcagcggacatcgctaaggctctgggatacaaaagcaccaagtccatttcaaacttatttgcacagtacgaagacgagttttcacaggggatgacaatggtcattgaatcagtgaccaatgggattaacgggtcgtctcgcagaatgaaggtgcgagtgttctctcttcgcggtgcacatctgatcgcaatgttcgcccgtacgccagtagccaaagagttccgccgttgggtattggacattctagatcgtgaggttcagcactctccaatcgcgaagcagttcaccgacgatgaattatgcaccctggcatatctttggcgttcggctgcggtgatgtacgaggcgtgccgagaagtacatcctctactgttggttgcagagcatcgactggttcctcggtttagctctattggcacaaattacaacagggggatcaataaggctcgcgccattcttaagcgcgaaacagatcacatcaaagaacaaccatggggagatagtgactggaaaaacgtcttctcatacgggaaaggaattttgcagtga

SEQ ID NO: 141395 - DNA, 591 bp, Enterobacter cloacae
atgtcaaatcaactcagtaacatcagtaaaaacagcgctctgctggttatggattttcagacgatcatccttaacaatttcctcccgcaagaaagcgctggaaacgttatacgcaataccgcatcactgataaccgctgcgcgcacggcaggcgttccggtcatttatatcagtgtcggattccgcaagggatatccagaggtcagcaaaaacaacactatcttctctacgattaaagagaatggaatttttatagcggacaacgagagcacggctattcatcctgatgtcgctccggcagaaaatgaggtcgtcatcgttaaacgcagagtcggagctttctcgtttactgaacttgagatgatcctgcgtgttcagggcatcgaaaacctgatccttaccggtgtgactaccagtggtgtggtgctttctacagtcgggcaagcgtttgacctggattatcgccctatcgttgtgagtgattgctgcgcagatccagatcatgacaccaatgtgtttttacttgaaaagattctacctcaacatgcttttgttaccagttcatctgaaatatcaaaagcctgggcataa

SEQ ID NO: 141396 - DNA, 1203 bp, Enterobacter cloacae
atgatccaattttataacagcttttggcagcgaaacctgattgtttgcttcattggctcgttctcaaccgtctttgcaatgaccctgatgttgccgtttctgcctttgtatgtcgaagagcttggtgttcatgggcatgcatcggttgttcaatggtctggcgtggcattcagcgcaacgtttatcactgccgggttgatcgcccctgtctgggggaaactcggtgacagatatggacgcaagtcgatgctcgtgagagccagccttggcatggcggttactgtttcgcttatggggctggtgacaaatatatggcaacttgtcggactaagattgttagttggcctggcgggaggttactcatccggcgcgacaattcttatcgcagtccaggctcccagagaacgtgcagcctgggcgctggggattgtttcatccggtgtaatggctggcaatcttgtcggtccacttgccggaggatggctccctggtctgatcggtattcgaaccacgtttttctgtgccggtgcgctgatatttctgtcctttatcatgaccctcactctcattcgcgaagaagtgcataagcctgcggatgcagtggcaaaaatgggagtgagctggtcgcagttgcctgcccgtactgtcattatctgcatgcttagcaccggtctgctgctgatgctggccaatatgtcgatagaacccattatcacggtctatgtgcgtaccttggtcagcgacgcttctcagataacgaaagtggcgggatatgtgatggcaacagcggcgcttggcagcattatttccgcctcatggcttggaaaactggcggacaggataggacatttacgcattatcacgctggcgctgactgcggccggtttactgctgatcccccaggcatttgtcacttccgggtggcaactgattgccctgcgtttccttatgggagtggcgctcggcggcttattgccttgtattgcagcagtgatacgtcaccgcgtaccagaaggcatggtgggcagcattcttggctattccgtcgcagcgcagttcgctggccagttcatcgggccgctgattggcggctttgtcggcgggcatatcggtatgcgagccgtcttcctggcaaccagctgcatcctgttagccggagctgcctggaactttaaaatacatcgccagtcaacaacgcgctga

SEQ ID NO: 141397 - DNA, 690 bp, Enterobacter cloacae
atgcattttactgtcaatttgcgggggaacattgccgtcatgagtcaggcatctgaggttgaaaaccaattaagaaaattgatactcagcatggagctgggtccgggagaacgactgaccgagcgctgggctgaagcaacgtttaacgcctcccgaacgcctgttcgagccgcattacaaaagctggagtctgaggggctggtatgtcgtgacgggttacgctggttggtggcaccgatcgatgtcgttgaagttgaacagctgtgtatttaccgggaagtactggaagtggcggcactaaaactgtcagccagccaaatgacggaggaacaactcaacggtctggaaaccctgcttaaagagaagactgctgatgtgtctgaagggataatggatgatgccggaacacgattccatctgcatctggcccgtctttgtcagaatgcgtttatcatcgatgggataagtgatgcactgcgtcggctttcacgggcaagatggctagataaagcgccgtcgaaccccgcctgggaagatcatcgcgaaatatttgctgcacttcgctcgcaggacatcgagaaagcggcagagctactcgtcactcatctccgggaaagccgactccgccttctcgacgctatcaattcaagcagacgtagcctgagggcgagagggattgttatatcctga

SEQ ID NO: 141398 - DNA, 1557 bp, Enterobacter cloacae
atgctcaatgtatcgtgggacccagtgttaatagccatctcttatcttgtggcctttatcgcctcgtttgtggccctggagaatgccgggaaaatcccgctttccagcgggaaggccgctctgttctggcgttttgccggagggcttacgctgggcgtcgggatctggtcgatgcatttcattggtatgttagcgatgaaaatgcccatgatcatgagctacaacctctggttaaccctcgcctcaatgggcgtcgcggtggtggcgtctatgctggcaatgaatattgccgtcacgggcactcgcctttctcccttcagactgcttctctctaccttaattctgagcgcaggcgtgatatcaatgcactatatcggtatggccgcactgatgctggacagccccatcatctgggatcaccccatcatcggtttatccatattaattgccgtaatggcctccggtgccgcgctctggttggcctttcacctgcggcatcagcgaaaagggatctttatcaatcgcattctcgccgctttagttctgggcgctgccatctgtgccatgcactacaccggcatgcgggccgctcagttcagtgatatggctcataccctacccggcggtatcagcgaactgggattatcgataggggtgtcggtcaccacgctgtgcctgctcggcatgatgttgattatctcactcattgattcccactggcgtaccaaccggctcacggacaaccttcaggcgctcaatcgacagcttgaactacaggcacggtttgacgcccttaccggccttgctaatcgccaccagatggatctgcgcatgcaggattgcctgcgcagcgcgttgcttagcaataaacaatttgccgtgatcttcctcgacgttgatcactttaaacaggttaatgacacctggggacataacgtcggggatgagttgttaatcaccattgcacagcgcatcacggcgaggcttacccgtgagatgaccctggcaagattggggggcgatgcttttattctgctggttccagaatgtgatgacgacaaactccagtccctcctttcaacgctgctcgacgatgtgcgccgcccgctttccgtatgcgggcatacgctgagtacaacgctcagcgcaggcgtcagtcgttatccgcaggatggcgaaacgctgcatgagttaaagctaaaagcagacgcggcaatgcagtacgttaaaaagcaaggccaaaacgactgggcggtctaccggacagagatgtcgacggcgatcccggctaaccccggttttttgcaggaactcacgcaggcgcttgagcgcgatcagtttgagctgtggtatcaacccacctggcacgctgaagagagaactatccacggctttgaggcgcttcttcgctggcgacatcccgaacaaggcgtgctgctgccgaatctgtttttaccttcgcttgaacagacggggttaattattcctgtaggtaactgggcgattgagggtcatgacgccaacttagtgctgctgtatacttcgccttttggataa

SEQ ID NO: 141399 - DNA, 1050 bp, Enterobacter cloacae
atgcgtttgcagggaatgaaaatgatgtccgcatcgtcaatctccgatcctgttattcagcttattgcttccctggcactcgcgtttgttctttatgctgccagcttcccgagtgttatggcgaccctgacggcgggaacgattagcgtcgttttcacatcgatgattgcattgatgcggcctcttaaatccctgaccaatgtgaacgcacagttccagcgcgggatggccgcttgccagacgctgttcactattcttgattccgaacaggaaaaagatgaaggtcagcgcgtacttgaacgcgcaaaagcggacgttgcatttcgcaatgtgacgtttacctatccgggacgtgaggccccagcgctacgcaatatcagcctgaacatacctgccggtaagaccgttgcccttgtcggacgttccggctcgggtaaatcaaccatcgccagcctgatgacgcgattttatgatattgatgaaggtgaaattatgctggacggccacgacctgcgagaatatacccttcagtcgcttcgtaaccaggtggcgctcgtgtcgcaaaatgtccacctgttcaacgacacggttgccagcaacatcgccgacggtcgtacggagcagtacacccgtgaccagatcgagaatgccgcgcgtatggcaaatgcgatggactttatcaacaagatggataacggtcttgataccatcatcggtgaaaacggggtactgctttctggtgggcaacggcaacgtatcgctattgcacgcgcactgttgcgggacagtccaatactcatccttgatgaagcaacgtcagccctggatacggaatcggaacgcgctatacagtctgcgctcgaggaactgcaaaagaaccgtacgtcactggtgattgcgcatcgtctgtcgactatcgaaaaagctgatgaaatcattgttgttgaagatggcgttatcgttgaacgcggaagccatgcggaattgctgactcacaatggggtgtacgcacagcttcacaaaatgcaattcggtgcgtcaaacagttaa

SEQ ID NO: 141400 - DNA, 228 bp, Enterobacter cloacae
atgagcaggaaccatatggctacgggccaggcggaaaagagactgccgatagcagtacagagcagcagaaaaaaacaaaatttattcaatgtgttaggtccagtcacaggatatgtaagcgtattcagagaaggcattatacggtatcttgcgcatgaatcaggtttgggtgacatgacgggataccccgcttttgcaagcggggtaaaaagcgtgaatgtgacttaa

SEQ ID NO: 141401 - DNA, 891 bp, Enterobacter cloacae
atgccaatttacaataagtcgttttgcgtagccgtactcgcgctgtgttcttttcatgcccgggctgagcagtgctcacccgaaagcgtaaacaaaaataaaaccaataatttcattctactgcaacagcaaattaatggagcaatacctaaaacgattgagaccaggattgagagtccggacggttacatccgtacaacaataaatgcgagttataaccgctgtggcgaacttcttggcggcagtatgctggaggtaaaaacagcaacctatcctcaatctgttcttgtgattaccagtgcgataaaactcagtaaagcggactacggctggcgcatccttgtcgatgacaaaggcatcggaacggacaagcgcaaccaaaaatcgacactgttattccgtcataatgttgaaggtatgtatttgctaaacaaaaaagggattatcagtaaagcagttaaccgcggcaccattactgccacaacgccgggggagaaagatcgaaccagcatgggcaccattctgtataccctcaatacaacaggggctcttacccgttcagaaaacaaaagtaacctggcgattgagaattaccgcacggagtacgagtacgagtacgacacgcatcatcgcctgacaaaaaggtacacacctaacgtcgtggatgagtatgtttacgatgatgcaggtcgccagctgacctggacgaacaccgagacctattacactatcgaaaaaacggtgaatacctgtaaggaatgggacactaacggggaatgtatccaggcggatatcgacatcactatctcctcaccagataacgacaaaggcaaggcttttgagtacaaacataaagcagccatgacagcgacttatgaatactggaactga

SEQ ID NO: 141402 - DNA, 1401 bp, Enterobacter cloacae
atgtttggtttagatgcttttcaccttgcacggatacagtttgcctttaccgtatccttccacattattttcccggcaatcactatcggcctggcaagctatcttgctgtgcttgaagggctgtggctgaaaacaaaaaatccggtctggcgatcgctgtaccacttctggtccaggatatttgccgttaactttggcatgggcgtagtctccgggctggtgatggcgtatcagtttggcactaactggagtggattttcgcagtttgcgggcagcattaccggcccacttctgacctatgaagtgctgaccgcctttttccttgaggccggattcctcggcgtgatgctgttcggctggaataaagtcgggcctgggctgcacttcttcgccacctgtatggtagcgctggggacaattatctccaccttctggatcctctcctccaacagctggatgcagaccccacagggctatgagatcgtcaacgggcaggtcgttccggtagactggtttgccgtggtctttaacccctccttcccttatcgtctgctgcatatgtcgatagccgccttcctcagtagcgccctgtttgttggcgcatcggcggcatggcatctgctgcgcggaaacaatacgcctgccatccgcgctatgttttctatggcgctgtggatgaccctgattgtggcccccatccaggcaatggtcggtgatatgcatgggctgaacaccttaaagcatcagcctgccaaaatcgccgccattgaggggcactgggaaaacccaccgggggaacctaccccgctactgctgtttggctggccggatatggaactggagcgcacccgttttggcctggagatccccgctcttggcagccttatcctgacgcacagtctggataaacaggttccggcgctcaaggagttcccgaaggaagatcgtccaaattccaccattgtcttctggtcgttccgcattatggcgggcttaggcatgctgatgctgctgctcggcgtggtggcgctctggttgcgttataaaaagcgcgtttacacctcgcgccccttcctgtggtttgccctgctgatggggccttcagggttgatcgccatactggccggatgggtgaccaccgaagtaggacgccagccgtgggtcgtctatgggcttcaacgtacccgggatgcggtatccgcccatggcgatctgcatatgagcgtcagtttgctggctttcttcgtcgtttacacttcggtcttcggcgtcggttacagctatatggtgcgcctgattaaaaaaggacctcagcctcacgaatcgttcgccaccgaggccgatggacgtccggcacgcccgctttccgcagttaccactggcaataaggagcagccataa

SEQ ID NO: 141403 - DNA, 489 bp, Enterobacter cloacae
atgtcatggaataaagatggtgcaatctcgtatgccaaatctcatgcccagccgcgtagcatgagctattgcgcttcccttttacttttcgccctgtcaccgttcgcagtcgctgatagcagtgatgcaccggcagtggcagctcttacatttaatcaatggtatatcgcgcagttgaatcagtacaaaccgccagtcctcaatccagacatcatgaatgattacgttacctctgagaccgttgcagcaattaaagcaatgtactcaggcgacagtaacgaaaaagatatgcctgacgcggatatgttcatcaaatctcaggactggaatgaggactgggatcagataacagtcttgcattcagattttgatgccgtatgcacaaatgtctatctcgcatttggtaaaacgcaagatcatgttgtcgcagattgtctcgtccaggaaaaaggaaaatggaaagttcgatcggctacgctgattaagtaa

SEQ ID NO: 141404 - DNA, 840 bp, Enterobacter cloacae
gtgttaaaccgtattgatcagtatttaatgaatccgccgccgatgaatcgtaccggtgttagccgcgttgtaattgagtttttttggttcggtaccaaggagctacgtgcctgtctttttgccggtctgttttttatagccatcttctgtatcccgcggaccggtttattcgggattgcccgctatgatgttttattgctcattgctgtggctattcaggtctgcatggtagcaacaaagctggagagttgggacgagcttaaagcaataacattgtttcatgtactggggttcgggctggaactgtttaaaacctcgtctgaaattggatcgtggcactaccctgagtccgggtggagtaaaattggcggcgtgccgctatttagtggatttatgtatgcggcggtgggaagttatattatccagtgctggcgtctgtttgatttaaaaatacgtcaccatcctccgctcctcatggcggtagcgctagccctggcgttatatgtgaacttcttcacacatcatttcattggtgactatcgctggtatattgccgccgtagcactgggaatgtatgcacgttcaacggtgatatttacaccttacagtcgcccttacaaattgcccttattgttggccttcattctgatcggcttctttatctggctggccgagaatctgggaacactctttggcgtttggcagtaccccaatcagattggtgcctgggcgacagtgcatgtgggtaaatggggagcatggtcgttattagtgatgatgacatttaccatcacgttgtttcttaaagatatcaagaaacgcattcatattgctcagtag

SEQ ID NO: 141405 - DNA, 612 bp, Enterobacter cloacae
atgaatataataaaattgctgaccggctccaggtttcagttattaattcaggaaggaaaacaggttgaacggttgataaaaaatagtggggaggccttgcttaaacaatcttcgccgaaacaggaaaatgctctcaatcttcaatggtactggcattcgctccctaatcctttccccgtcggtattatacttgtgctactggtaatgctgcttgtatggggatggtcgacgataatatattattttgatctttctgtcccaacaggtgcaatattatgtttatccattcttccgtttatgggtgtataccttgccttcatgccctatacattaggtcgcggatatgctagtggtttactccttatacattatttttatctttttgacttactgctgacgctgattgctttctttctgatggtcatcaaatccgcagggcttaatgagtggatggggcaacttgacttcttaccattgcagttacttattttttatttgtgccggtatgtcatgaacagccgctcgttttataaaacaatatcatttaaccgtaccacgcgcatgcttgttgaagctaaaaaggtaagagaaaaactacagaacactaaataa

SEQ ID NO: 141406 - DNA, 267 bp, Enterobacter cloacae
atgtttcccggtgaacgtataacaccactgaccgcacttccggaaaccgtcattgcactggtcgttgtgtttataagctgttttattaattcccgatgcagagattctgtagaatatcgtccgggatatttcgccgcgcgaaatgttaattttatcgttctggtgggaatatttggtggcgattatttagcatcttgggtctttttccttgcttttttggcctcaacaagcaggcgagtggtgcgaaaaaatgatactatcgtataa

SEQ ID NO: 141407 - DNA, 696 bp, Enterobacter cloacae
gtggtgttatacattcaccggcaagcatcaccacctccggtgagtatgtttttggattattacaatcagtggatactattaattaatgaatatattaacactgctgactggccccggtttcagctgttaatcaaggaaggggaacaggttgaccggttaattaaaaatagcggggaggctctgcttaaacagtcttcgccagaacaggaaaatgcgctcaatcttcagtggtacaggcattcgctccctaaccctttttcacttggaattgcaatcatactgctggctcccccggttgcctggggttgggcgatgatagtatattattttggttttcctgtcccaaccactgcgatattgtgtgtatccattatgccatttatgggaatatacgttgcttttataccgtggggattagggcgcggatatgtcatcggattacgccttattcgttatttttatctgttcaacgtactactgactctgacaggattttttctgacagttataaaatcaatagagattaatgactggatcgggcagtttagttttttccctttacaattgctgagtatttatttatgccgacatgtcatgaacagcaacgcgttttatacgatagtatcattttttcgcaccactcgcctgcttgttgaggccaaaaaagcaaggaaaaagacccaagatgctaaataa

SEQ ID NO: 141408 - DNA, 615 bp, Enterobacter cloacae
atgaacataataagcctgctaattggttcccggtttgatttgttaatcgaggagggaaaacagattaaccagttgataagaaatggtggcgaagcactacttaagagttcttcacctgaacaggaaaatgcgctcaatattcaatggtacaagttttcacttcccaaccctttttcaattggaattataattgttcaattgatactccctcttgtatggggatgggaatcagtaatatattatcttgacctctcgaccccattaagtgccatattatccctatccattctaccgtttatgggtgtatatattgctttcataccctataccttaggtcgtggttatactagtggcttacttcttatacgttacttttatctccttaatatactaatgactttgactggtttttttttgacgtttatgaagtctatagagttcaatgaagaaataaggcaactttactttttccccttacagttactggttatttatttatgtcggcatgtcatgaacagcaattcattttataagataatatctttttttcgtaccacgcgcctgcttcttgaagcaaaaaaagcaagagagaaacaggagaaaagcaccaaataa

SEQ ID NO: 141409 - DNA, 966 bp, Enterobacter cloacae
atgtctcgtttgttttatcccgaaggtaatgatttaccgggttatgagtggtctcgcctactgggacagactcagggaactgattttgattttagtgcgctggctgactctcttgactgccagcgtgatttttatggtgcaggcattatatataatgacggttaccgctcatttttagttcgcccttcgcgccgcacccccactccgggtcagaatcagataacccacgttattgtgactcagacaacgcagctatctcgtgaagggatggagaaaagtgtcaaagaagccgttaaagacccgtcaatcggaacagaaattgcgtcaaccgcgttatcatgtggcgccgccatactcacggctgttgcatgggttgcttctgtgggcgccgtaccgcttacgggggggatgagcacccctttggctatcctggctaccgccggaacgattgcaaccgcagtacaatgcggtaatggtctctggcgtttgcgtgatattacttcgaataatggccataaagtcgactggattgatacacagggctggtatattgccactaccactgcgctcgatttaatttcactgctttcactaacggggccactaaaagaagttgtcatgacatacaaggcaatgaagtcagcctcttcgttgaaagttattgactggttgaagcgttatccgagaatggagcgggttcgcctgaccgaaggtattatcaaacagcttaatccggggatttccaacaaagcaatgaaagcgatgatccgcgcagggaaatatcccaaacgttttcccacagaggctgttcacaaagaattaataaaacaactcattagcgcaatgaccagtgcaatggcgatttccggaagtgccgtcagtggtgttatacattccccgggaagcatcgctacgtccggtgaatatgtttttggattattacaatcagtggacaccattaattaa

SEQ ID NO: 141410 - DNA, 153 bp, Enterobacter cloacae
atgctgtttttgtcatatcagcgcggcgagaagccgtgtcagtacagggttacgttttcattacgggagatggcggacgccggaaacttcggcggtagcgtacctgaagacgaacccaacgctgtacagccatcacagtccagagtgagatga

SEQ ID NO: 141411 - DNA, 519 bp, Enterobacter cloacae
atgccaacaccgtgttatatttcaattaaaggacagacccagggactgattactgaccgggcgttcaccgcagaatctgtgggtaacatctatgttcagggccatgaagacgaaatgctggtgcaggaattcagccataacgttaccgtccctaccgacccgcagtccggtcagccaagcggacaacgctctcacaagccatttatctttactgtgacgctgaataaagccgttccgttactgtacaacgcgctggcttctggcgaaatgctgccaaccaccgaactgcactggtatcgcacgtctgttgaaggcaagcaggagcacttcttcaccacccgactgaccgattccaccattgtggatatcgactgcacgatgccgcactgccaggacgataccaagcgagagttcacacagctggttaaggtttctctggcctatcgcaaaatcgaatgggaacacgtttctgccggtacctccggagctgacgactggcgtgcgccgctcgaagcataa

SEQ ID NO: 141412 - DNA, 498 bp, Enterobacter cloacae
atgagcactaataaagacggcagtatcgcgcctaaagaacgtattaatatccgctaccttcctaaagttgaggggcagatagcagaagtggaattaccgcttaacctgctggtcactggcgacctgaaaggcagggcagatgacacaccgctggatgaacgccagccggtttccattaacaaaaataatttcgatgcggtaattgcagagtccggaatcggacgggacttcaccgtgccgtcggcgctcagtgaagttcctgatgtacggatggacatcagcctgaaagtgaaatcgatggctgacctctcaccggacaatgttgccgccagtgtgccggagctgaaaaagctattggaactgcgtgaggcactggtagccctgaaagggccgatgggtaatatccccgcgtttcgcgctcagctacaggcgttgttgggtaatgaagaaacccgtgaacagctgattcaggaactgggtctcgccggtcagaaataa

SEQ ID NO: 141413 - DNA, 1473 bp, Enterobacter cloacae
atgtctctacaggaagaaatgacgcccgttgctgcaccggcttcaacaggatctctgttggataatattatggcgcagagccgttttcagcccgagtctgaaagctatggtattgctcgtcagggcgtgactgcctttatcgctgctctgttgcagcatgaagccgaatccatcgatatcctggcggtgaacgccatgattgccgatatcgatgagcgcatgggccggcagatggatattattttccactccccggagtttcaggaaattgaatcgttcctgcgttctctgaagctgttggtggagcgagcggacacgcgagaaaatatcaaaattcagctactgcatgtaacaaaggaagaactgctcgacgatttcgagttcgccccggaaatcacccagtctggtttttataagcacgtttactcaagcggatacggccagttcggcggagagcccgtcgcagcggtggtcggcaactatgaatttgctaataacgcggcagatatgaagctgctgcagtatgtcagcgcggtcggtgcgatggcccatgcgccattcctgtcatcggtggcacctgagtttctcggtcttgactcgtggacggaactgtcaggtatcaaggatatcagcgcgattttcgaaggtccggcctacaccaagtggcgatccctgcgcgaatctgaggattcccgctatctcggcctgacggcaccacgtttcctgctgcgtcagccttatgcgccgggtgaaaatccggtgaagagctttaactaccgcgagaatgtcagccgcagtcataacgattacctctggggtaatacggcgtttctgttggcggccaatatggcggaaagtttcgcaaaataccgctggtgcccgaacatcattggcccgcagaacggcggcgcggtgaaggatttgcccgttcatctgtatgaggcgatgggacagcttcaggccaaaatcccgaccgaagtgctcattactgaccgtcgtgaatacgagttggcggaagagggtttcatcaccctgaccatgcgcaaaggcagcgacagcgcggcttttttctcggccaactcggtacagaaaccgaaagtgttcccgaacaccccggaaggtaaagaagcggaaactaactaccggttgggaacgcagttgccttacctgttcatcattaaccgcctggcgcactacatcaaggtgctgcagcgtgagcagattggttcgtggaaggagcgcggcgatctggagaatcaactgaacacctggatacgccagtatgtggcggaccaggagaacccgcccgctgatgtccgcagccgtaaaccgctgcgccaggcaaaaattgaggtgctggatgtggacggtgagccgggttggtaccaggtggcactttctgtgcgtccgcattttaaatatatgggcgccagctttgaactctcgctggtcgggcgtctggacagggaatag

SEQ ID NO: 141414 - DNA, 423 bp, Enterobacter cloacae
atgatagcggaacggcgtatcggggggagtttgtttgagcgtattggcgatgcggcgaggctatcgccgcgccgcaggccgaaggcagtgctgttaaattctattgggcataacctgcaaaacatcctcaatacccgttccggcagttgtcatggctcaccggaactggggatcgccgatttaaatgatgaagctctggtttccagtgattttcgtcaggaaataggccggggcattcatgattgtatcctgcgttatgaaccgaggatcgcagaggcggtggtgacagccgccacaacggatggttattccccgctggaactgcgttttcatattgtggcgcgggtgaattttgctgatgcatccgatgtcctggagtttgacatcctgctggataaccaccagcactatcgggtcgagtga

SEQ ID NO: 141415 - DNA, 1833 bp, Enterobacter cloacae
atggcttttgaagagcgttactaccaggaagaattggattaccttcgccagttaggcaagctgttggcgcaggaaaagccgtacctggcccgttttctggccgagaaagagggcgatccggatgtggagcgcctgctggaagcgttcgcttttctttccggcggtctgcggcagaagctggaggatgagtttccggagtttacgcacgggatcatccgaatgctctggccaaactatctacgtccggttccggccatgaccgtgattgagtaccagcctaaaaacaggctgagtgcgcccgttcaggtttctcgtgatgagttgatccgttcccgtaccagtaacggttcattgtccttcggtcaggagatattggcagacaaagaatcaaccctgccccctgtttgccattttacgcttgcaagggctctctggttacagcctttgtacatcagggatgtgcataacaacagcaccctcaaagaggggattattgatattgatttttccgccggaaatggcgtatccccgcatgttctggacttgaataaagtcactttctggctgggtaacgatgatgattatacccgccatcagctctatctgtggttcagtgaacgcctgatgaacgcggaactgatttccggagagcacagggttacgttgcccgatttatggttggatgccgccgggttcggacgtgacgacgcgttgctgccgtggccgaaaaacgtccacaatggctaccgtgtgctcgaggagtatttctgttacccggagagcttctttttctttcatctccgcaatgtcgctccgtttccgaaagattttccggtcggcgctttcacactgcgtcttcgttttaaccagccgctgcctgttgatatcaaactgcgccgcagttcgctgcggctacactgcacgcccgcagtcaacctgttcgtgcatcacgccgagccggtcagaccggacggcagcgtggcgcagtatccgttgcgtgccagccataagttcccggatgcttatgatattttccaggtagaatcggtttccagcaacattcagaattcagaggaaacatcaaaccaaggcaataaaatccgtacctggcctgagtttgaaagtttcaaccaccagattgaatacagtcgccagcgcgaggtggtgtactggcatcaccggacaaaaacctcccttttccaccgtggtcttgatcacgcgattgcctttgtccatgccgatggcagtgtcccagaagcttcccggctgaaaggcgaggtaatcacagcctcgctggtctgtaccaaccggatgctgcccgtagaattgcataccggagatatctgcgtctccatcggtaaaaatccgtcagtggcttctttccgaaatgtcacgcgtccgacgcgtccattgtatccggtcatggacggcgatatgcactggtcgctgatctccagtatgaatctgaactacctctccctgctggatcgggacgcgctggtgcagattttgcgtacttttgatctgccgggtattcaccacccgcagcaggcccggctctcccggcagaagctggatgccattgagaagatggaaaccacgcccgtggaccggctgtttaagggcgttcccgtcagggggcttgccaccacgttgtggattaatcccgcaccgtttgtctgcgagggggaggtgtacctgctgggaaccgtactgtcgcaattctttgcgctgtacgccagcatcaactcattccactgtctgaaaatcattaacacggaaagtcaagaggcctgggaatggcagaacaacggtcagcacgccttgatgtag

SEQ ID NO: 141416 - DNA, 1047 bp, Enterobacter cloacae
atggcagaacaacggtcagcacgccttgatgtagcagagaatacagcgcttccggcagacattcgcagcatgaacttctatatgctgctggaatcgctctatcgccgctatggcgaacccgggcaggagccttccctgcgtaccgagccggaaaacgaggtggtgttatttaaatccgacgccagcattgcctttccgggcagtgacttaacctcactcacgcgaagcaacagtgggcagtttacgctgaccagcaaatttctcggtttttccggcagccagtcgccgctaccgggctattacctggatcggatggcgcgggaatccgcgcaaaatgaagaggggctgaaagagtttctcgacctgttcagtcatcgctggacgcagtttgcataccacgcctggcgtaagtaccgctattacatctgttttcgcaacggcggtacggatacgttttcgcagcgcatgtattctctggtcggtctggggaatccgggggtgcgcaataaactggccattaatcacagcaagatgctggcttatgcaggcgtgctggcaacgccggggcgttcgccggacgtggtatgtaatctggtctcccactgttttgatctgccggaggttacgattgacagctggcagttgcgtaaagtggcgattgagccatcacaacaaaaccgtctgggagagcgtaacccgaagaggcgaaccgccggttatgtggttggacgctccgtactgggtgtcaatttcacgcttggcgcaagcgtgcccgatcgcagcggtaaatttctgctgcggataggcaatctgtcgatggaacgctatctgtcatttttaccggatggtgaaaatcatcaggcgctgaagatgtttatttcctttctgctgcgcgaccagtttgcgtgggatttacagttgtgcctggcaccattgcaggcaaagggaatgcaactgggggataaatccagtacacgtctgggccgcaccggttttatcggtcagccgaaggcaccgccttacgtcaccctccacatcagggagtaa

SEQ ID NO: 141417 - DNA, 1296 bp, Enterobacter cloacae
atggagcagtctgtggttgaggaacagcaacaacgcggcaatgtatcactgaccttacaggtgatgaacggtaacgaactggaaagcgggcatgccgcgagatgtcttttttctggcgacggtggtgagattggtcattcggaaagctgccactggtcggtacaggaccgggccggatcgattgccggacgcgcctgcgccattgtccggcacgacggcgcattctgtttgcgcagcctgatgccgggattgatgatcaaccttgcgccagtgtcgacggatgcggggctggtgcgcctgcgccagggtgatgaaatcagtctcggcgcgctggcgctgaaagtctttctgcatgaaggcaaacgtgtcagctatgacgagcagatggcgacgccggaaagcattgtgacgcagcgtgacaatctggtggaggcgctgatctctaccgatggtcagccagaatatcccgggatgcagcagcgccatcagctgacctctacggtgatgaacagtttttcttccgatccgttgcaggtgttgcagagtgaaagccttaccaccgcgacgccggtcgtggcttacgggcagcgcacggtgccgttgtccgatctgaaagccagtggcgggatcgacatatcatttatggatctgccgccagtgtatgccgactcgcgtgaagatgatgaattctccccgacagagatggcgcagaagcacctggcggtgacgccgctgctgcgcgggttgggcagcactctcagcgtacaaaattcacaggatgccgacgcttttctggaagagatcgggcgcgcccttcaggccgccattcaggggctgctcgatttgcagcacagccagaacagcctgtcagacaagcacctgcgtccgctggaagataacccgctgcgcctcggtctggactacgccacggcgttggaagtgatgtttgccgaaggcaaaagcccggtacatcttgccgcacctgcggccattcgcgagagcctgcgtaatgtccgtcaccatgaagaggccaaccgggcggcgattactgaggcgctgcgcgtaatgcttgacgcgttttcgccgcagagcctgatgcgccgtttcgttcagtaccgccgcagccatgaactgcgtcgcgagctggatgatgccggggcatgggatatgtatcgtcattattacgatgagctggcgtcggacaggcagcaagggttcgccatgctctttaacgaggtttatgcccaagtctatgaccgggggctgcgcgagaaacagcgggagacggaagtatga

SEQ ID NO: 141418 - DNA, 519 bp, Enterobacter cloacae
atgagatgggctttcgtcattctgatgctgtcgagcgcgctctgcggctgcacaatgaccaaaaagataggtcaagtcatcgccgatcccgatattcaggttggtgacatgaaggagcagccttcggagctaaccgtcacgctattgacggagccggacagtaacctgaatggcgacggtgaggccgcgcctgtcgatgtacaactgatgtatctgagcgacgactcgaaattacaagcggcggattacgatttgctggcgaccacgccgctgccggatgcgttgggaaaaaactatctcgaccaccaggatttcaccctgctgccggacagccttaaaacgctgcctgccgtgaaactggatccaaaaacgcagtttatcggcatcgtcgcttacttttccgacgaccagaccagcgaatggaagcaaatagagcccgtggaaggcaccggtcatcagtatcgtctgctggtacatgtgcgacagaacagtattgaaatgaaaacagaggacaactga

SEQ ID NO: 141419 - DNA, 1344 bp, Enterobacter cloacae
atggccacaatgaaaaaccgggtgctctggcaggaaggcatgttcgcactgccgcagcattttcagcaacagcagcgtcataacgacgccatgctgtgcgagcggctggaggcgctgggagatttcgcctggggattcacgtcgctatcgctgaacacggaacttcttgctcaggggaaggtgatgatcgaccgtgccgcaggctgtatgccggacggcactgtgttccgtatccctgatcaggatctgctgccgcagccgtttcagccgcgcgaactgacctcgccagaaagccatgatatttatctggcactgcccgttgccgcccataacatcagtgaagttcagggcgtacgcagcgcggggcaaagttcagagcgctacagcatgacgcgaactgatgtccgtgacgtacatagtagtgatggcgatgtacagtcgctggtgctgggccaactggcgttcagaattgtcagcggtgcggaggatctcagtgcgatggtggcactgccgctgtgccgcattcgcaattatcaacctggcggagcgctagtgttggatgacgattttatccctacctgccagacgctacgagtcagtccggtgctgaaccgctttgccgctgacgttcagggactgattgctacccgtgcggctgaactcgcgaagcgaatcggttcgccggagcagagcggtattgcggatgtggcggaatttatgatgttacagttgcttaaccgcaaccagatgcatttctcgcatcgtgtgcgcctgcatactctgcacccggaaatcttttatctggatctggtgcgtctgctcggtgagctgatgaccttcaccgaaaacagccgtctgccctgcacggtggagcattacgatcatcgtgacttgacgctgtcgtttaaaacggtgatcccggagctgcgccgggccctcaatattgtcctgcaaccgcgggcgcagaatttgccgctcattttcactgaaggagtatatctggcgacggtcaacgatccgggactgcttcagtccggcgcatttgtgctggcggttcgcgcccggatgccgcacaaccagcttattctccagttcacccagcagtcgaaaatcgccgccaccgacaaaatccgcaacatggtcagcgtgcaggtgccgggtattccgctgcgcacgctgccggcggcaccgcgccagttaccttaccatgatgggtatgtctattttgaactggaaaaaggctcttcagcctggcaggacgtggtgaaagcgggggcactggcgatgcatatttccggcaccttcccggatctggatatgcaactgtggtcgataagaggttaa

SEQ ID NO: 141420 - DNA, 756 bp, Enterobacter cloacae
atgagtgaacacgttctcccggcagagcctgaaagcgcttcatcgggccgtcagtatcgtctggggcttcgcggtaacagccttaatccgatgatcgacgccgccacgccgctgcttggcatggtgatgcgtctttcgggtatgaacaatcagacgatgccggagcacctgtttgcgcaggtggtgacggacgtccaggcggtggagcagttgcttcaggagcagggttacgagccgggcgttatcgtctcgtttcgctacatactctgcacctttattgatgaggcggcgcttggtaatggctggtcgaacaaaaacgaatggatcaagcagtcgctgttggtccatttccacaacgaagcatggggcggggagaaggtcttcattctgctggagcgcctgatgcgtgagccaaagcgttaccaggatttgctggaatttttatatctctgcttttcactcggctttcgcggccgctacaaggtggcgaatccgggacaggatgagttcgaacagatttaccgacgcctgcactacgtcctgcacgggcttcgcggcggcgcgccgtttccgttgctgcatcacaacaagaaaacgcagggcgggcgttatcagttaatcagacgcctgactatcaggcgccttttgctgggcggtgttatcgccctcgcgctggtatatctgttttacctgctgcgccttgatagtcagacccaggatattcttcaccagttaaaccggctgcttgccaggtaa

SEQ ID NO: 141421 - DNA, 2655 bp, Enterobacter cloacae
atgattcagattgatatttccacgctggtaaaacggctgaacccattctccagacaggcgctggaagcggctgcatcagaatgtatgagccagcaggcgacggaaattaccgtcagtcatgtgcttatccagatgctcgccatcccgcgcagtgatttgcgtgttatcgcagaacaggcggatattttacaggacgacctgcgccaggcgctgaccgttgaacattatgctaccactcgttcaacagacagttatccggccttctctccgatgctggtcgagtggcttaaagagggctggctgctggcctcggcgcagatgcagcacagcgaacttcgcggcggcgctctgctgctcgcgctgctccattcgccactacgttacgtgcccgcggcggcagcccgcctgctaaccggcatcaaccgtgaccggctacagcaggacttcgcacaatggacgcaggaatcggcagagtcggtggtaatgaatgctgacggacacgtcgccagtagcgcagcagactccggcgacagcctgcttgcccgttacgcgaccaatatgaccgaagatgcccgtcacggcaggcttgatccggtgctgtgccgcgataatgaaatcgacctgatgatcgacattctctgccgccgccgcaagaatagccctgtggtggtgggggaagcgggggtgggcaaaagcgcgttgatcgaagggctggcgctgcgtatcgttgccggtcaggtaccggacaagttgaaaaacaccgatatcatgactctggatctgggggcgttgcaggccggcgcatcggttaaaggtgaattcgaaaaacgcttcaaagggttaatggcggaagtgagttgctcgccggtgccggttattttgtttatcgatgaagcacacacgctgattggcgcgggtaaccagcagggggggcttgatatctcgaatctgctgaaaccagcacttgcacgcggtgggttgaaaaccatcgcggccactacctggggagagtacaaaaaatacttcgaaaaagatgctgcgttgtcacgccgcttccagttagtgaaggtcagtgaaccgacggcagcggaagcgaccattattctgcgcggcctgtctgccgtgtatgaacaggcgcatggcgtattaattgatgatgatgcgctccaggcggcagccagcttaagcgagcgctacctctccgggcgtcagttgccggacaaggcgatcgacgtgctggataccgcctgcgcccgcgtggcgataaatctttcgtctccgccaaaacaaatttcggcgctgaccactctctgccatcagtgcgagacggaaatccgccagcttgagcgggaaatgcgcattggtctgcgcaaagatacagcacgcctggacgaagttcacgcgcagtatgaagccgcacagacagagcttctcaccctggagaaggcctggcagcatcagcagacgctggtaaaggagattatcgccctgcgtaaggcgctactgacgcagacgacggagttggatgacgccataccggaagataatacagcctcagtttctccggcagagagccttgccgcgctgggcgcagaactggatgcgctacaccatacgcaattgctggtttcccctcacgtggataaaaagcagattgccgcagtgattgccgaatggactggcgtaccgcttaaccgcctttcgcagaatgaaatggcggtcattaccgacctgccacagtggctgggcgacaccattaaaggtcaggagctggcaattaagcacctgcacaaacatctgctgacagcacgcgcagacctgcgccgtccaggacgtccgctaggtgcgttcctgctggccgggccaagcggggtgggtaaaaccgaaaccgtgctgcaactggcggaactgctttacggcgggcgtcagtatctcaccaccatcaatatgtcggagttccaggaaaaacacaccgtctcgcgcctgattggttcgccgccgggctatgtcggctacggcgagggcggcgttctgaccgaagccatccgccagaaaccgtattcggtggtgttgctcgatgaagtggaaaaagcgtgtccggatgtgcttaacctgttttaccaggcgtttgacaaaggcgaaatggcagacggtgaagggcggctgattgactgtaagaacatcctcttcttcctcacctccaacctcggttatcaggtgattgtggaacatgcggacaacccggaagcgatgcaagacgccctttatccggtgctggctgacttctttaaaccggcattgctggcacgtatggaagtggtgccgtacctgccgttgtcccgtgacacgctgaccactattatcgccggaaaactgtcgcgactgggcagcgtgctgcgtagccgctttggcgcgcaggtggtaatcacgccgggcgtgactgacgaaattatgagccgcgtcacccgtgcggagaacggggcacgaatgctggagtcggttatcgatggcaacatgctgccgccgctctcgctgctgctgttgcagaaaatggcggcgaacgccgtaattgcccgtatcacgcttgatgcgcaaaacggcgcgtttatcgcagacgttggggatgcggtgacagaggaagaagacgctgtatga

SEQ ID NO: 141422 - DNA, 678 bp, Enterobacter cloacae
atgaaactttccgcccgctggctgctgccattgctgtcgataatccctccggtatatgccggtgagacggcggatgcgcaggccactgttaatgccatgtcggcctgccggaaagagcctgccgctcttgagcgtctggactgctatgaccgaattctgacgcctgttcgcacggaaggttttgccggagagctggtgaaagcgcgctacgacggcgaggcatggacgcgcgcgctggcgcaggaaaagcagcgtacggataactctactgggctgctgataacccgtgcggagggggagcgtccgacggtgattatcaccacgcccgccatcggcaatctgccgccgcgcccggtgctgatgttcagttgtgtggataacatcacccggatgcaggtggcgctcgggtcgccccgcactgaaaacgatattccggtggtgctgagtaccgacaaagggcagtttcgctcacgctggtttgtgcgcgagaacggctctctgctggaagctagccggggtttgtcggggattgatgaaattaaacaattgtttggtgcgaaaaagctgacccttgataccggaacgggtagcgcgaccggaaagctgacctttaacattgacggactggcgcagatcattgcgccgctgcgtgaagcctgccactggacgggggaataa

SEQ ID NO: 141423 - DNA, 1392 bp, Enterobacter cloacae
atggacatacacaacccggaagtctggctgtcgcaactgctagaaaatcttccggaagagaagctggcgagtaagctcagcgaagataattcggactgggaatatatcgacggcgaaatcgtcaagctcggttcgctgaaccatgcgcaacttgatgtaccggagcttcagcgccgggggctggtattactggcctctgagagcaaggattttcgtctggtatcgcacctgctgcgcaccctgcagcacgcgggcgagcacctggctgcgctaaggatgctgacgcagtacgtcagctattactgggctatcgcctggccgcaaaatatggcgcacaaaaagcgttttgctgaacagatactgaagcgctttgagccgggtatcgccggttttgcgaccgcatccactccggaaaagcgagatactcttctcggcgaactggcaaagctagcgctgtgctggcagaaagtcgggatgccggaactggcgtccgccacagatgacctgtcagggctgtatcagcgggcgtttcgcgaagactcgcctgcggcatcagccccacccacggccgttgccagcgccaccacctcatccgtaaccctctccgctgcaactgccacagccgtgccggtggtaccggttgacagccatgacgataaagcctggcgtaacacacttctgaaggtggcggccattctgtgcgagcgccagcccgcgtcggcgcagggttaccgcctgcgccgttacgccctatggcagaacatcaccagcgccccgcaggctgaaagcgacggacgcacgccgctggcagccgtgtctgccgatatgacggcggattaccaggcgcgccttgtacgcgctgatataacactctggcagcaggtggagcagagtctgctgctggcgccgtactggctggacggccactgtctttccgcccgtatagcgaagcagcttggccacgatgaggtggcgcaggccattcgtgatgaagtgcgccatctcctggcacgcctgcctgcgcttgacggcctgcagtttaacgaccgctcgccgtttatcagcgacgctacccgccagtggctgagcgatgaaccgcagccgtcagccgtaccggcagtggccgtggatgatgtggcacagcaggtctggcaatgtcatcaggcgcaggggctggaggcggcgttgacgctcctcgaacagcagcctgacagcacgccgcgcacgcatttttaccaggaatatctgacggcgcaattacttgatgcgtccggcatggcagcgatagcccgtcagcattaccacaccctgtaccaggccgcgcggcacatcacgctcgcggattgggagccggaacttttgcagcaactggaagaccgagccagaagataa

SEQ ID NO: 141424 - DNA, 3525 bp, Enterobacter cloacae
gtgttcagaatacccactccccggatgttcagcgggctgagtaccctgctcagaccggccctgccccggcttaaggtgtccgcagcctggctgctggcgctggcatggattgttctgctggtattgatctggtggaaaggcccggcgtggcggctttatggagaacactggctgaaaccgctggccaatcgctggctggcaaccgccgtctgggggctgctggcgttggtctggcttaccgtcagggtggtaaaacgcctgcaacaaattgagagccagcagaagcaacagcgtcaggaagagcaggatccgctcaccgttgcagtgaaccgccagcagcgttacctcgatcgctggctgttacggttacagcgtcatctggatagccgccgttatctgtgggaattgccctggtatgtggtgactggactggcgggtagcggtaaaacggcactgttacgggaagggtttccggcagacgtgatttataccccggatgctgtccggggcgtggagcagcgggcgtatatcacgccgtatgtcggcagacaggcggtggtttttgatatcgatggcgcgctcacggaaaaggacgacagcgacatactgcaccgtcgcctgcgcgaacactggctcaactggctggtacaaaaacgcacacgccaaccgctgaatggcctgatcctgacgctggatctgcctgacctgctcaccgcagacaagcagcgtcacgagcaactggtgcagctgctgcgtacacgcttacaggaagtccgccagtccctgtatacccggttcccagtctacgttgtactgaccaaactggatttactgaccggttttgccacctggttccgaacgttggaccggcgtgaccgcgaccgtatcctgggggtgacgttcacccgtaacgcccatgaaagcgatgcctggcgcacggagctgagggccttctggcaggcgtggggacagcagatgaacctggcgctgatagatcagatgctcacgcagtcttcagcacagcgtagcgcggcattcagtttttcccgccagatgcagggggcgggagaggttatcgcctcattgctggatgcgcttctggacggcgaacaccaggatatctgtttgcgtggcgtgtacctgacctcttccctgcaacgcggccagatggacgatctttttacccagtccgctgcccgcgagtacggtctcgagagtaattcgttgaccgcctggccgctagtcgataccacgccctatttttcccgaacactgtttcctgaggtgctactggccgagccgaattttgccggggaaaaccgcctgtggcaggccagttcgcgccgccggatgcgtatctttaccggctgcagtgcggtggtggcgattgcactcatcggcggctggcatcactggtataacgagaactatcgagccgggctgaaggtgctggcgcaggcgaaatcctttatggatgtcccgccgccgcagggaaccgatgagtccggccagctacagttgccgctgctgaaccctgtccgtgatgccacgctggcctacggcgactggggcgagcggaactggcttgccgatatggggctgtatcagggaacacgcgtcgggccttacgtagagcagacatatctgcatttactggagcaacgttatcttcccgccctgtttaatgggctaatgaaagatctgaatcatgcaccgccggaatcggaagagaagctcgccgtattgcgtgtgatgcgtatgctggaggacaagagcgggcgtaataatgaagtggcgaaacagtttatggcgaagcgctggagcgaacagttccatggtcagcgcgacgttcaggcacaactgatgtcccacctcgactatgccctggcgcataccgactggcacgcacagcgccagaaaggcgatgcggatgcaaatagcctgtggaggccgtatgacaggccagtggcggcggcgcaaaaagagctgagtaaactgccggtatatcagcgggtttaccagagcctgaaaacacgggcacagggcgtgttgccagccgacctcaacctacgtgaccagaccggcccgaccttcgatcaggtgtttgtttccgctgacgataaccggctgattattccgcaattcctgacccgctacgggttgcagggctattttgtgaaacagcgcgatgaactggtggcgcttaccggcatggactcctgggtgttggcgctcacgcgcaacgtgacttacagcgatgccgatcgcagtgaaattcagcgtcagctcaccgaacagtatatcagcgactataccgctacctggcgggccggtatggataacctgaatatccgcaattttgactcgctgacggcactgacaggggcgcttgagcagattatcagcggcgaccagcctctccagcgggtactgacggcgctacgggacaatactcgtccccttatcctgtcggaaaaactggatgataaagcccgtgcagaggcgcaggctgaaccggagtggaagttgctcaataggctgggacatgagttcgcgccggagaacagtactctggaagagcagaaggataagggcagcacgctacaggcggtttaccagcaactgactgaactgcaccgttatctgctggcgatacagaatgcgcctgtaccggggaagtcggccctgaaggcggtgcagttgcggctcgaccagaatagcagcgatccgattttcaccacccggcagatggcgaaaacgctgcctgcgccgctgaatcgctgggtggaaaaactggccgagcaggcctggcatgtggtgatgattgaagcagttcactatatggagctggactggcgcgacaacgtggtgaaaacctttaacagccagcttgcggataaatatccgtttaacccgcgtgcaaaagacgatgcgtcgctggatgcgtttgaacgcttctttaaaccaggaggcgtgctggatacgttttaccagcagaacctgaagctgtttgtagaaaacagtcagggactgagtggggaagacaatgtgattattcgcgaggatattctgagccagttagcgaccgcgcagaaaatccgcgacatcttcttcagccagcagaacgggctgggggcacagtttgcggtggaaaccgtgtcactttcgggcaacaaacgccgcagcgtgctgaacctcgacggacaactggtggattacgcccagggccgcaactatacggcgcatctggtgtggccgaataatatgcgcgaaggcaacgaaagtaagctgacgctgattggcgcgggaggaaatgcaccacgcagtattaccttcagcggcccgtgggcgcagttccggctgtttggcgcaggacaactaaccagcgtgcaggacggtacctttagcgcccgcttcagcgttgacggcggcaccatgacctatcgtgtccatacggataccgaggataacccgtttgccgggggactgttcagtcagttccgcctggcggatacgctgtactga

SEQ ID NO: 141425 - DNA, 1338 bp, Enterobacter cloacae
atgagtacggatacgcagatgattattaccggccaggatccgcgcggcctgccggaattcagcgcgatgcgcgaggaaatcaacaaggccagccatccggcgcaaccggtgatgaactggacgctggtggagtcgctggcgctgagcatctttaaaactaatggcgtggatctgcatactgcgacctattacacgctggctcgcacgcgcacgcaggggttggcggggttttgcgaaggcgtggaactgatggcggcgctgataaaccgcgaatgggataagttctggccgaaggatggttcggcgcggacggaaatgctggactggtttaatgcccgtactggcaatattctgcgccagcagaccgcgttttccgcggccgacatgccgctgctataccgggtggagcgggcattacagattatctgcgacaagctccaacaggtgagcctgaagcgtagcccccgtgtcgagaatttgctgtattttgtgcagaacacgcgaaaacgttatgaaccgcagccggagacgactgtggcggcaaaaacgaaagtgcgcacgctggtctatatgccggaaggtgcaggaaccatagctatcccggaaacgccactaccggaactgccggaagtgagggtggctgttcagggtgtcactgcggatccgcaaccttctgctacagcgaaagcgggcagtaccgtgaagggatttgcaatcggtgtgctctgtagcgcggttgtcgccgctgcgctctggtggtggcaggtttatcccctgcgccagttggtggctgcggtacaagatacggcacagggtgcggccacggtctggttggcttcgccgcaactgagtgactacccgcagcggctacaacaactgaccacggtttcaccgttgcagatgctggaaagcggccagcggatgacccggctagccgacagccgctggccggaaagtctgcagcaagagcaggccaccgcaacgtggaataccaccctgaaagcgcgggcggcggacagtccgcagatgctgggctggcagcagacgcgaactgatttacgctcgtttgccgaactgcttatccagcgtgagcgggcgaaagaagggttcacgctctcaagtatcaaaaccgtcatttatcaggcagagcgcacgctgaatcaggagacgccgcttgaatatctgctgacgaagtaccagcaggcaaagtctgtcgggcaaaataccggggtgctggaaaaacagattaatgaacgaattgacggtgtactgagccgctggctgttgctgacgcacgacccgttgccggaaaccccggacggtaaacctgaaaaataa

SEQ ID NO: 141426 - DNA, 480 bp, Enterobacter cloacae
atggcaaatcttgtttatctgacactgaacgggcagttgcagggactgatttcggcaggctgttcatcgctggcgtccatcgggaataaggcgcaggtgtcacatctggatcagattatggtgaccagtatgaagcatggcatgagtagggcgcagaacgtcagtcaccagacggtggatatcagtaaaccggtggataaatccacccctctgctgagcaaggcgattaacgaaaatgaatgcctgacctgcgattttgagttttaccgcactaaccgttttggtatcaatgaggtgtattacaagctgaaattgatcaacgccagaatagccagaatcagtttgcaacagcctcatacggtccttaacagcgagggacagccggaagaggcgatttcgtttacctacgaaagtatctctcaggagcactgtattgccggaaccagcgcgttcagcctgtggagcgaacgtatattttaa

SEQ ID NO: 141427 - DNA, 762 bp, Enterobacter cloacae
atgaaaaagcgtttaatgatattttcatgtgtggcaatatttttgttgaatggttgcacgcgctccccgatagatacacgaaaaaaggaagtgtccagaactgaaaaacctaccagtaggagttcagttcctcaactgactgacaaagatatctttggcaacgaaaccacactagcagtatcagaggaagatattcaggctgcgcttgagggtgagaaattcagcgtaccgttgaactctgccgtcatactggttcagtccggtagtcgagcaccggaaatgaccatgcagcaggagatgggaaaatactatcgggtctcaacattctccggtatcccggacaggcagaaacccctttcctgcaacaaggtcaaaacagaggaaggggacgctgttgtcagcgaaaatatgaactatatgcaggcgctgcgttatattgcggcaaaaggacaacaaaaagccgttattgtttactgggatacactacaaaccggcaggtacgacgcctcaacaaaaacacacatctggtcagattaccatggtgaaactttttccagttccgcatcgctgcgctacctggtacgtttcgctctggtggatgtggcaacaggagaatgggccacctggtctccgatcaattacgaatacagtatcttccagcccatgaccggaaaaactccggtgacagaacaacaaatcgctcaggtcagacaaaaaacttatgctgccgtggttaaggatctggttaaccgctatcagtaa

SEQ ID NO: 141428 - DNA, 174 bp, Enterobacter cloacae
atgaatgcgcttctttattgcagtaattatcctgtcatgcctgtccaggtaacgattgatgaaaccgttaagataataaaaatacacggtggcgttgtgatcacggccagtaaagtctggcgctatgctccctacgggcttcttatgttacctgtctctttccagccccggtga

SEQ ID NO: 141429 - DNA, 1575 bp, Enterobacter cloacae
atgggcattatgataaagcctaccaaagaccgaaatggcacctactacatccgcaaagcggttcctcaggagctacgtccagctatcggcaaaggcgagctaaaacgttcccttgagacgaaagatcttgagcaagccaaactcaaagcccctgcagctctggctgaaatcaacgcgatcatccagaacgcccgagcagagcgaaccgtaacgcaggacgacacagaggtgatcgcttcagtatggatgacaagaatcctacagcagccggaactcatcaaagcacgttatgtacagaaatacgatgagggttatggcctgaccgctgataacgggcagttaagcgagtgtctgcgtaaaggtgagcgggcagacgaagctgattttcggcttgtcacccaactaatgcagtcagaacttgaagaagcccttcggtggacgccagcattactgactcctgcatggcgacaaaaactcgcatggcgtctggcggagcacaggctcagcacagcggaaatgtacatccttgatgaacttccatcatacgccgccattaccgccacacagaaacagaaaagcctgaccttcactgatcttttcgagcattacaaagcacatatacggctaaccgacaaggacagagctgagtcacgtatacgggattacacttcatcggctaaccgcttcatcaaatttattggtgataagcccatccgggacatctctaaaactgacctgtcggcattccgcacacttatggagcaggccccggctaaccgcagtaaggccgtcaactcgctgtcgctggagaatcaggccaaagctcagggcaagaaactcagcgccagcaccgtgcggaacatcttcatgcacctgtcagcaatgttcagggtcgcactcgaagacgacctgctggatgaacatcctttcgacagcttcaaaatgcgtaaaaaagtgcaggcaatgaacgagcatactccgttcactgatgaagaaatcagggcgatgttccggctgcctctgttccacggcgagcagtctctctatggcgagatggcttactggataccgataattctttactacacaggggctcgtgttgaggaaattgggcagctccgcagagcagacattgaggttgcctacggtgttccctgcttcaaaatccagatgggggaagaacaatccgtcaaaacggctggctctgtacgttatgtaccgatacacagccatatactggagctgggctttatggatttcgtcaacaccagagaaggccagctctttgcggagaaatctgtcgttaacgataaatacgcctacaactacggccgctggtggggccggctgatccgtaagcacggcatccgtaaggaagttaagccctcacacagcttccgtcactatttcattacgcaatgccgtgctctggacgtccgcgaagatacgcagaacaacattctcggacatgtccccggctccgttccacggcgttatggcagctatctgattgaaacaagccgggtactcattgagaggatccccagactggagctaaagcggctgaaaaactga

SEQ ID NO: 141430 - DNA, 936 bp, Enterobacter cloacae
atgttaagaattcctgactcagactggcggaccgtagacggggtctcccagatttctgttgctttcttgcggaaagtgacgcctcaggcagccagatttacgcagtggatacagcggacacataccagattgctcagggcccccgaaaacgtcctgtcgtgctgcacatcgggcctgattgatggtgacattcccgacaaaaacggctggctttctgctggtgacgcccttgccctgctgacttacagcgtccactccagccagaatgggcttctcattgatgccattgaacaaaattctggtctgatactcccggtgaggcccggtgaaagccgtcttgagggacaatttgccgtcagattacaccatttgatcgtcgaactaaggcaacaaccacgattcataagctatgagcttgaacggcaaaagcaggtcggcccctacaaagtggatttcctcctcacagagcagtggtacaccgatatggcaaaaggggaaactgctaaacgccagttcatcattgaatttgacgagaaggctcacagaacgacacgttatcagctcaatgataagcgacgggatcggtggttacggaaaaatcggccccatataaagctaatcagggtcagacatgaagagcaagaaacctggctggaagcagtccgccagctaaagcggttcgtcagtctggaggattgctatgcccactgcctgcgaatggcctgtatcagcctttcagactccacgctaaagataagcagcgagtcagcccgaaaagcctatgatgcagcccataacgaatgcagtttcctgctaaaaagcccacgccagcctctaagtgagatgggtaaactgctggacaggctgacaatcccctttgataaacgcagggacatatacttccaacgtgcaaaattgaggtcatacagcatataa

SEQ ID NO: 141431 - DNA, 132 bp, Enterobacter cloacae
atgcatgatgaaatcattaatcaggcccgcgaaatcctcactcaacggctctaccgtaccgacacactggtatcaccgcaggacaccgcgagctatctggctttacagcttggcgaaaggggctggctatga

SEQ ID NO: 141432 - DNA, 576 bp, Enterobacter cloacae
atggctactgttggttacgcccgtgtgtccaccaccgggcagagtctggatacacaactcgaagccttatccggatgtgaaaaagtgtttcgggagaaaatcagcggggccaaagacgaccgccccgagttacaagccatgctggagtttgtccgtgaaggcgactccgtgcaggtgacgaaactggaccgcctcgcccgtaacacccgccacctgctggaaatatcggaatacctgcaaggtaaaggtgtcgcgttgaatatactgaatattggcatcaatacggccacaccgactggaaatctcatgctgaccatgattggagctattgccacgtttgagcgtgaaatgatgctggagcggcaggccgaggggatcgccttggcaaggcttaaaggcaagtacaaaggccgcaaagcgacagctatgtgtaaatctgaagaagttcgagatttggttaaaaaaggcgtcagtaagccagagatttctcggcagttaggcatcggtatcactagcatttaccgaatcattcgcgataaacaagcaggactactaaatgtcgaaaatgatagttag

SEQ ID NO: 141433 - DNA, 672 bp, Enterobacter cloacae
atgattttaaatcaattagatgcagtcgaatggttgaagacactcccttctgggagtgttgatctgtttgtcacagaccctccgtatgaatccctagaaaaacatagaaaaatcggtacaacaacacggttaaaagttagtaaatcttcgagtaatgaatggtttgcaatctttccaaatagtagatttggagagcttctgactgaaatgtaccgagttttgaaaaataatcgtcatttgtacattttctgtgatcaggaaacgatgtttcatttgaagccagttgccgaagaggttgggtttaagttctggaagccgatcgtttggaacaagatggccatcggtatggggtatcattaccgcgccaagtacgaatttgtcctatttttcgagaaagggaagagaaaactcaataacttaggcatacccgatattttagaagccaagagagttatgcgtggttatccaactgaaaaaccagttgatctcattaagattttgatcgagcaaagtaccattcagggtgagtctgtatgtgatcccttctttgggtctggttctgccctgattgccgcttctgagctagaacgtacttttatggggaacgatatctcttcatcagcacatgattattttaaaaaaaggttgtctgaaacggttcctggtaactga

SEQ ID NO: 141434 - DNA, 2241 bp, Enterobacter cloacae
gtgaccaaccaaaccataaaacgttttggactggaaaatatgatactcgataaatcagtgacgcacccggatcaggatcgccacggatttcttcatatcgctagacaacttgcaagtgccattcacgcaattggacgagaaggtagtgcagtgattggtatcgaaggagcgtggggttcaggaaaaaccagcctattaaacttgctacgttcggaactagataaagagaaaaatgaacgaacttatattctgaatgtttccccttggcttgacggtgatggtatcagctctgtggaaactttgttacttcctgtggcgagagtcattgctgatgaggaagaaaaattattatcgccaagacaacgcaagcgcctccgcaagaaaaacgagctgactgaatcggcgaaatcaatcctccggtactcacaggctacagcacggcatctggctccaatggcggaatttgctagtctaattcccggagttcccaatgcgggtaaagctcttaagtccttctcagagctaaacctaaaggaaattcggaagactaccgcggaattacgcactgaaatagcagagaagattgctgctcttgacctcagttttattgtactacttgatgatctggatcgtcttgacccagtacaagctgttgagatcattagactcgtaaaatcggtcgcagatttccctcgtttccgctacatcctgtgttacgacaaggctgttctggctcaggcaattaaaaccgggttaggagtagaagacggaaatgcctatctgcagaaaatagtacaaataccgttcagtcttcctcttccggaatcgtttgatctacgattacagttttttgatggtgcggtcgctctttacgagtctgtaaacggctttccaccagacaatgaaatattgacagacctgaacacaattacagataccttcggtgtcgcgctaaggactccacgtgaagtgcagctgtcattgaatgcccttgctttccgctatccaggcgtcagagattatgtctatctgccagatctatgctttcttcaacttatccaagttacctgcagtactatgtatgagtggacagaacagtacctgacggagtatgcagtggttgcatcaggcgatggcacagtaagtgaggaagagcatcagcaactcagggagcatttcgtcactgctatttcaaaactacgcccttcgtcagaccttctgatatacaaacttcgcgagattattccaggaattgaaggatataaagaagatacactgaagctttttcgtcagtgcagtgaagaagagaaggcttccatgggcgcaaaacgaaggcttggaagcagtgcctactggcgttactactttgcattttctgctccgcaagatgttttgccaccagaattctttatcaatttgtttaccttagcccgaacacacagtaaagaaactgatcttgcaattgagttgctcagcaaaatcaatagtaaagggattacatcacgaacatggtatgaacatatcctcagccaacttagtacccatatgatccaagaacgtcatttcgatgaatgtgcagggttgttaagattttttttcaattacgctgatggcgttatggcactctactttgaacggaacaagtggttctcttggcaaacactaggtacggaagaggttgtgaacaatctgctccgtagactactggatctcgacagaccaagcggaatgcacctgctaaaacagttgttcaaacagggaagcgcttggaactgggccgccggatatcttcgggaattgctttggcagaatggcatggccggaaatcaagcggttgcaatgaataagcgaattttgaaagatactgaggtgacctcaatctgcaagattatgtcgcgccgcttaagaacgcggcgcattcaaaatgaaatgttccagttcgatagtcttctacgttatatgtatgcttggcgtgaaatagattcaccaaaaattgtttgtcgatgtctacggcgaatctgtaaggaagatgatggttttctgaacctgctactgcgtctacggggagttgtatttagtagtcaccgtggtgcatatcgagaactaagaatatatgaaatttctcgtcttacaggattcccagaagttactatcgcctcgcgattagaaagccttggtaaacaacatagcagagtctggatggtagatgaattacagaattcacttgagaatacattctaa

SEQ ID NO: 141435 - DNA, 156 bp, Enterobacter cloacae
atgatggtgaatggaaactggtctttcatcagggtactccggcatcaggtacagtataaatttaccagtcaattctcctttctaatcagatttaacatgaatctccaggcatgcctgcttagcccgctgggcagacattgcggactgacgatttga

SEQ ID NO: 141436 - DNA, 1137 bp, Enterobacter cloacae
ttgggtacggcagagactgggattatcgccaaaactgatgatgcggtagcgcagctggcgacagccatagatgcagcgcttggtttactgaaagggaagtttgtcgtcgacaccctgctgtttgatattttcggcttcagccgtggtgcggcggcggctcgtcacttcgccaaccgcgtccagtcagaagaccgtaccattatcaaggcaattcagactgggatggacgaatatatataccgtggagctcccgcaggtaaaacccgcttccttggcattatggacaccgtggcagccgtcggtacggtaatgaatggcctaaatccacacagtgcgaataccggtagcgtcgacatacgcctgcgtcccggcgtggcggaaaaagtattccacatcaccgcccagcacgaatgccgctataactttgccctcaacagcgtcgcccctgcctggccggagctcacgcttcccggcgctcattctgatatcggcggcggctatctgccccagttgcgggaagacctctttctcacccgcccgctggtggaaaccctgcttcacaagcagcccggtccgcaatcgcatgtttaccagcagacgatggcgcagctacgcgtgcttgagcattcaccggccatcatgcccgtcattcgaaccaatgccatcactccggacgtctgggaagatgatttcgccccgccagatcgctacagccagccgcaaaaacggaccttttccgccctgacgctgcgtcatcgcacggtcttttttgactggtcaaaggtggtgctacgggtcatggttgatgcagcggttgaggccggggcgttatttgctgacgtagacaatatcaaaacacacgccttaccagatgaactgaagccgttgagcgaacgcgcccggcagatgggtaaagcggcccgtcagcaccgatgtgtaaccggttttacgcctgaagacgtggacgtgattgccagaagatacatccactgctcagctcactggaacgccgtggagcttaaacagtccggtgaattacagggtggagtctctgcgtccgaaaccatcggttttgttaacaggccggacgagaattggatcagaacgatttacaacatggatggaaacaaacgatga

SEQ ID NO: 141437 - DNA, 1323 bp, Enterobacter cloacae
atggaactttcacaagccctcggcattatcaacgttacctcccctgagcacgcccgtagcctctcggacctcattccctctgaattcattcagaaagcgttaacgttgactgatactgtcgcactccgcaaacgcaaacttcctcttgaatccatgatttggctggtcgttggcatgtccattttctgcaatcgccctatgaccgagatcgtgaatctgatggatatcactgacaggaccggtgagcctttcaccgcccgcagctcagtcattcagcgccgaaaaacgctcggggaagatgctgtgcgggaactgttcgacattacacagcggtactggaaccagcaggcggcccatccgaaatggcacggactgaatctgtttgctgtggacggtgttgtctggcgtacggcagacacgccggaaaacagcgcggccttcagcagacccgcagggcgaaatggtaccggtggctatccgcaggtcaggatggtttgtctgatggaactgagcagccatctgatcaacgccagcgcctttgacagcgagaacgtcagcgaaatgcgactggcagcgcagctggcagaaagaacgccggatgagagtatcactttattcgataaaggattttactctccgggactgcttcatcactggcagatgtccggagaaaaccggcactggctgctgccactgaaaaaaaacacacaatatgaagttgtgcgtaagctgggacgtggcgacgagcttgttgaactgaaaaccagcccacaggcccggaaacagtggccagcactcccggggcggttcaccgcaagactgctgacccgaacggttgacggaaaagaaaaacaggttctgacatccctgacagaccagaatcgctaccctggcaatgatatcagcgagttatatcgtcacaggtgggaaattgaactgggttaccgggaagcgaagcagggaatgatggacagccgctggacgttacgcagtaagttgccagaactggtgcgacaggagttatggggggtactgctgacttacaacctggtgagataccagatggtaaggatggcgtttgaactgaagggcgattatctgccttaccagttgagctttagcggcacaataagtgaaataaccaggcttctgataacgctgccatgggcctcaccgggtaagatgccgggtgagttaagaacgctgtatgagaaagcaaagtggctagtattaccgggaagaagagagcgaagttacccccgggaagtgagaataaaagcccagaaatatccggcaagaaaaaatgctgatcaccttaagtga

SEQ ID NO: 141438 - DNA, 405 bp, Enterobacter cloacae
atgtattacgctaaatctacaggtggattttatacgcctgcaattaacgggaaaaacattcctgatgatgctattgaaatcacggaagatgaatatttgggattgctgcaggctcaggctgacgggaaaataattacctcagatgataaggggaatccggttgcaatagatccaccgccattgacgcaagaagaacttgttgcgcaggctgaacgcgaaaaggcttctttgttaaagcaagcaacgaattcgattgctcctttacaggatgcttccgaccttggtattgcgacagatgaagaaattaaacagcttactgacttgaaaaaatatcgggtgcagctgatgcgtgttgatacatcaaaagcacccgctttcgagtggcctacatatccggctgattag

SEQ ID NO: 141439 - DNA, 429 bp, Enterobacter cloacae
atggaaaaatatatctggagtccttcattagcaggattttatcccactgaagaaaaatctatttttgaaggtatgggcaagtggcccgatgatggtgtagaggtatcagcatctgcccatgacgagttatttccaattcctgaagggaagtgtatcggcacagttgatggctatcctgcatgggttgatcttcccccacttacatatgaagaaatggtggcacaggcagacacagagaaacaaaacaggatcgatgctgcgaacaattacatgaacagcaaacagtggccgggtaaagccgctatgggtcggctaaaagatactgagaaagttcagtacgctgcgtggctggattatttggatagtattgaagccgttgatgtatcaacggccccggatattaaatggcctaatcagccggatatgtag

SEQ ID NO: 141440 - DNA, 720 bp, Enterobacter cloacae
atgggaagcgaggatttatttaaaaagaaacgtggtcctaaaactgctaaggatctggcaagacgtaatgcagttaaatcccctctcgctaaaatattaattgtttgtgagggtaagaaaaccgaaccaaactattttgaggatttgattaaccattatgaattacttacagcaagtgtaattgatgtaactggtgagtgtggctctagtccaatgtgtgttgttcgtcatgcaaaagaaaaacataaagaaatgactgaaaggggggctccttatgatcaaatctttgtagtgattgataaggatgctcacactgactatgtggcagcactcgatgctctcaggagaagtaaaccaagttcaagttggtttactgtaaattcagtaccttgttttgagtattggttacttcttcattatacctattcgacaaaggcatttagaaatttaccgggtaacagttcaggaaatcaaattgtcagtgagttaaaaaaatatattaagaactatgagaaaggcgcaaaagggatttttcataaaacccttaatgctctagattcaaaagatttaaatgaagtagtccttagggctaagagaagtttacaggcagctgaagctagcgatactgataatccaagtacaaaagtttttgagttggttgaaagacttatccagcttaaaaaacaaatagagtcgaatcgtaaacagaaacgatcttaa

SEQ ID NO: 141441 - DNA, 1266 bp, Enterobacter cloacae
atgcttattgaattcaatgttgagaactatctctcaatcaaaaataaacaaacattttcacttattgctaacaaaagcaatgagttagaagagaatatctttacagttgaagggaacgttaatcttaatgttctcaagtcagctgttatttacggtgctaacgcagcgggcaaatcgaatgtgcttctcgctgtcagagctatgatggatatcgttactcaatctgcatctaacactcaggctggcgaagaggttcctgtattccctttcaagcttgattcagattcaattaaaaatcctactgaatttgaagttacttttattgcagagggcattcggtatcagtttggtttttctgctacaaatgaaagaattattgatgaatggctctttgcgtacccaaaaggaagacctcaaaaatggtatttcagagcttgggatgaagagaaacaggaatatgagtgggattttggcgcatcactacttggtgaaaaacaagtttggcagcgctcaactagaaataatgccttgttcttatctacagctgttcaattaaatagtgagcagcttaagcctgtatttacttggtttaaaaaaacactgaggctttctggtattaaaggatgggccaatacattctctgccaaacgctgcactgaggatacgaagaaagatatcttgaatttcttgaaagctgcagatattggcattgatgatgttttagttacaaaagaaaaatttaatccagacgatttgccatctgatatgccagatgatatcaaaaaaatcgttatttctaacatgaaggataaagatatctttgatgttactaccgtgcattataacgataaaggggagccggttagtttttctcttgaggaagagtctcatggcactcagaagcttttttctttagctggtccatggctggacgccctcgataatggatatgtactatttatcgatgagcttcacgatacattgcatccaaagctagttagttttttggtaaatctttttaatagtcctgatactaataaaaaaggtgctcagttaattttctcaacgcatgagacatccattctgaatcaaagcatttttagacgcgatcaagtctggttttgtgagaaaaatgaactcagtgaaaccaatctatatccattgactgattttagcccaagaaaaggaagggaaaatctagaagccgcatacctagacggtagatatggagcattgccgttcatcaagaaattgacggggatttga

SEQ ID NO: 141442 - DNA, 858 bp, Enterobacter cloacae
atgagcactatcctgaaatgggcgggaaataaaaccgccatcatgccggaactgattaagcaccttcctgctggcccgcgactggttgaacctttcgcgggttcatgcgctgtaatgatggcgacagactatcctcattatcttgtcgcggatattaatcccgatcttatcaatctctataaaaaaattgccctcgattgtgaggctttcatatcacgtgcaaaaaatatttttgcgatagcgaatagagaagttgcttattacaacattagacatgagtttaatcattcctctgaaattactgatttcatgaaagcagtatatttcctttatctcaatcgtcatggttatcgtggactgtgccgctataacttgagcggtcattttaatgtcccttacggtaattataaaaatccgtatttccctgaaaaagaaatacgcacttttgcagaaaaggctcaacacgcaacgtttatctgtgccagctatgacgaaacactggcgatgctgcagacgggtgatgtggtttattgtgatccgccatacgatggcacatttaacggttatcacactgccggttttacagaggacgaccagtatcatctggcgtctattcttgagcgccggtcatcagaaggtcatccggttatcgtgtccaacagcgacacatccctgacccgttctctctatcgtaatttctcccgctatcggctgacggcaaagcgtagcatgggcgtggctgccggtgatggtaagtccgccgtggaaatcatcgctgtttcaggagctacccgctttaaccgggtttattccacacacggggatgtgtgctcggttattttagaggtgcgggcgtga

SEQ ID NO: 141443 - DNA, 1026 bp, Enterobacter cloacae
atgactatcaggaagcagccgaacggaaaatggttgtgcgagtgttacccgaccgggcgcgacggaaagcgagtacgcaagcagtttgcgacgaaaggcgaggctatagcatttgaaaacttcaccatggatgaagttaacaaaaagccctggctgggagaaaaggaagaccggcgccatttgtcagaggtgattgagcaatggcattcactctacggacagacccttgctgaccctaaacgcctaatggcgaaactcagaattatttgcaatggcctaggtgatcccattgcatcggagttaaccgcaggtgatttcacaaaataccgggaagcccggttaaagggggaaattaaaaatgaagatggcgtactcatggcgccagttaaaccccggacagtaaaccttgaacaacgcaacctctcctctgtatttggcacgctgaaaaagatggggcattggtcagcaccaaaccccttagcagggctgcccacattcaagatcgctgaaggggaactggcgttcctggctgaggatgaaatcaaacgcctgctagatgcctgcgctgattctcaaagtcctagcctgctgatgattgcaaaaatttgcctggcgaccggcgcacgctggagcgaagccgaaaacctgcagggacatcagctatcaaagtatcgaattacctataccaaaaccaaaggtaagaaaaacaggaccgtacccatctctcaggaactgtacgatgaactccccaaaaaccgaggaaggttattcactccatgcagaaaagcttttgagcgtgcagtgaaacgggctggcattgatttacctgaggggcaatgcacccacgtactgcgtcatacctttgcaagtcattttatgatgaatggaggaaacatactggtactgcgcgatattctgggccacgcagatatcaaaatgacgatggtatacgcccactttgcccccgaccatctggaagatgcagtaacaaaaaacccgcttcacaatcttaactggaaccgataa

SEQ ID NO: 141444 - DNA, 738 bp, Enterobacter cloacae
atgcgagatcaattctggaattctgataaggtaggaactcgtgtgattttgtacagtgatccatcacgtaaggagtataaatattctactgttgacggagtggagcaattaaaagaggaatatacagaattatatgatccagctcaggaatgctggaaacagttaaaattacgtattttcagagaaacattttgtcatcttattcaggatccttttttaattaatgatgtgtttaaatcacatctattttttgcctcaatgtcttatcaatggggaaagtcagttatgtcggagaatgaatgtgttgctattaaagcgttcattaagtcagctgaattatttgacagatgtattggtatgtcatggtttcatgtttctgtatgtacccaaaaaaaattatcacatgttagagctaaggccggaaaagaaggtgggaacagtaaatcagaagtgtatcgaataattcaggataagcttgtttatttaatcaatagctccgtacctgaaggtgggtggaaaagtaaagcagctgcggtaaatgacctcattgaccccttatggaaatttgtcgaagagtcaaattttgaaattaataatcaaagtaaaaaataccggatatcaacaatgagccctgatgcgttggcagataccattataaaaaactggtcaagaaatattgaaagtgtcaaattggctttagataatacggttactagaaaaaagaaaaccaaagggtaa

SEQ ID NO: 141445 - DNA, 213 bp, Enterobacter cloacae
atgaacaatccatcaaccgttaggatactccgcttacctgcggtaatccaaaaaactggtatggcaagggcaacaatctacgactggttgaaccccaaatcaccgcgttacgactcaacttttcccaaaaagcgaatgctcggagttaaatcggttggatgggttgaagcagagattgatgaatggttaacacggcgtagcaaacttatctga

SEQ ID NO: 141446 - DNA, 1377 bp, Enterobacter cloacae
ttgagcacccatccatttcctgtccatgtttttccgtcgctaatcagaaatgcaatttatgaagtagagcgacaaacacaagctcctctatcgttgatatcagcatcggcgcttggagcaatttcattagtgtgccaaaacagaattgacgtttgtaggctaaatgatctatgtagccccgtttcactttttttgctgacgcttgctgaatcaggagaaagaaaaagtactgttgataagattttcatgaaaccgctgtatcaacaggaaaaaatttggtttgaaaaacatagccaagatttacaattatggatgaatgacaaagcagcttttattatcaaaacaaaagcactggagtcaaaactaaaatctgatactcgtcgtaataaagattgcagtataacgaatgaacaattgaggtttctatttgaaaacaaacctaaagaacctgttagatataggctgatgtttaatgatgcaacgccagccgcaattaaagattatctttgtggagaatggaagtccgtgggtattatgtcggatgaagcagggaccatatttaatgggcatacattgaatgaacttcctttcataaacaagatgtgggatggttcaaatttttccgttgatagaaaaaactctcctgaacgtttaattcatgacgccagaatgacattatctatgatgatacaacctacagtatttcataagtatattgagcgtaaaggtgatatggctaaagggattggtttttttgcccgttgcttgatttgccagcccgattcaagacaaggattccggcagattacaagtccagtgatatccagtgaacacttaccagtattccatagccgactgcttgagatagttaatgatagtattataagaaagggcaaaggtgagcgaatgatcctacgactctctccgcaggcagagcaactatggatctcattttataacagaactgaatcggaaatgagcgaaattggttatttatccaacatgaaggattatatggcaaggattgctgcattactccattatttcgaaggtcgtaacgaagatatatcaattaaagctgtggaagctgcaattcagataagtgcctggtatgttgatgagtacaaaagattgttctctaaagtttcagaatttactcttgttaataatgaaagtgacgaactatactcctggataaaaaattattgtgctagtactttcccaccgcatataagtaaaacgaagattcttcaatacggaccttatcgattcagaaataaaattaaaatggatgaactgcttaatatcttacttattaaccaaagaatagtagtaacacatttcggtaaaattctctatatacaaccagtacaatag

SEQ ID NO: 141447 - DNA, 621 bp, Enterobacter cloacae
atgaaattatacaatggttcccatggtgagcatgtaatcgcctatagaaaaaatattgaagatgtagtccaaaatgctatcggtgaattctcaagaacaatggcattgcgtgttgatgtgcattacccacctatccttgacagaggtgatactgtatgttgtttcccaaacctagagcctggagtgatatctcgatttcgcaattctctaaatgctatattagatgcaaatgaaaaaatgagagcaactgaagggaaaagaatatatcgtaatcgaacgagacatatatgggtaagggaattttctgaagagggaaaatgccactttcatctcggtcttttttttaataaggatgcttattaccatttaggcgattatgagactgaaagcaacttacggatgatgattatacgggcatggtatagcgcattggatctggagttggatgattacgcaggactagtccatttccctaaaaattgccgctatatattagatgtgaatgactttaactttgaggatgaatacaaaaagcttcttaaccgactggattacttagccaaattagatactaagctatacggtgatggtgacagaaatttcggatgcagtcgcgggtaa

SEQ ID NO: 141448 - DNA, 243 bp, Enterobacter cloacae
atgagccagtgcagtcactgcgaactgtcgctaaaggcgattcgggataactatgtgttcatgaccaccacgtttatatcggtgggtaggctgctgataactcaacagacccagttctttcatgagctttccggcaagccagcgtcccattttgaagcctctcagggttgccataatcgcgatacttcttgcgccagcagaaccatgactgatgttatgcagctccaaaacctgactgcgtaa

SEQ ID NO: 141449 - DNA, 303 bp, Enterobacter cloacae
atgaaaaaaagaaatttcagcgcagagtttaaacgcgaatccgctcaactggtccttgatcagaactacaccgttgcagctgcggccagtgctatggatgtcggcctttctaccatgacgcgatgggtaaagcagttgcgggatgaacgacaaggcaaaatacctaaagcctttcctataaccccggagcagattgaaatacgtgagctgaagaaaaaaatacaacgcattgaaatggaaaacgacatattaaaaaaggctaccgcgctcttgatgtcagactccctgaacaattctcgctaa

SEQ ID NO: 141450 - DNA, 1443 bp, Enterobacter cloacae
atgagcacagttaagaaaattgataccatttcttcttactttaaaatttccccttcaatacttgatcaattagatgttgttgatgttctgttagaatcagacacattgctttttattgacccaatgctactccctgaaagtaaacattcagaaatgaaagatgatgctgatcaaaaatacatcgacactttcacaaaaataataaagctgcttagtgcatgcaaaatagctaatgacagtgatattgcatggagaactgcaaaaaaattattttcattttccgaaataggatggacatgtctgggttatggttcatcagccaaaggatcaggatttggacctcagcttgttaataacactatgaaaactgctcatcaaatcgtaagtatggatattgatgatcctgatttattcatggttatgtcattatttgaagaaggtattggtgctgaccgaatcagtgatatgaccaccaatataatatttgattccttagtcaagttttctgaaagagtaaatacaacacttaaaatcccaacaaaagaattcacttttaaagggaataaatacaacgccccccataatccattaacaaataagccactaatattagttcctaaagatattgtccgagacttaccaatttctacagattggagtggtgcagtccacacaatgaaggagaatactgacttaagagacaggatcaatacaaatattggtaatctcctcgtatctatgaccaaaaaacaaaaggaggaagccaaacgtagagctttagagaaaaaagaatactttgaggatttgctaacattaataaaagaagtagaaaaagagccctacgattttaaagcggatagaaacggtgaattattctggttaagattggcatcatctatagacaagaaatatccttttaatctctcaggatataataaaaaactaaccttagatgatgttgaacatcttgtaagcgacattttaaatcagttcaaggatcttattgaaaacaaagggttatggaaagaaatgtgggctgatgataaaaagccacgtaaagaaaaagctgctcaacgtttgctatttgctgttgcatattcatattgtaaagcaaacaatttagatataagccctgaagccgattcaggaaatggtcccgttgactttaagctttcacaaggctttgagcaaaaagtattagttgaagtaaaactctcgtctaatcctaaattattacacggatatgaaaagcagcttgaaatttataaaaaaggggatgacactgaacgtgcatttttcgtaatagttgatattggccacatcggagataaatatcaaaaagttcagcaagcaagaattgccacagaaaaagaaggcaagaaattttcaaaaataattcatattgatgctcaacaaaaggactctgcaagtaaacggatttaa

SEQ ID NO: 141451 - DNA, 534 bp, Enterobacter cloacae
atggtgttagcagcgagattgttgatccttactggtctaagaacgggtgaattgcgtagtgccttatggtcggaaatcgattccgagaaagcgctctgggaaatttctgctgaacgcatgaaaatgcgacgtcctcatatcatcccgctatctacccaagcgttagccatcatcgaaaagatcagagcaatgacgggacaattccctttgctgtttccgggccgcaatgatccaagtaagaccatgagagaagccagtatcaatcaagtatttaagcgaatcggctatacaggacgggttacgggtcacggcttccgtcacatcatgagcaccgttcttcatgaacagggctacaacacagcgtggattgaaacccaattggcacatgttgataagaatgctattcgtggcacctataatcatgcgcaataccttgatggtagacgcgagatgctgcaatggtattcagactatatggaaagtcttgagaacaacggaaatgttgtgcgtggcgcgtttaatcggcgtgcgtag

SEQ ID NO: 141452 - DNA, 552 bp, Enterobacter cloacae
atggaaaggaaaagttattggcgctggggggtatatcccgatgtgtccttggctgatgccagagcaaaacgtgatgaagctcgaaaaggtatcgctgggggtatcgatcctttagagcttaagaaagaacaaaaagctgagcgtgtagcgcagggcaaaaataccttccagcaaattgcgctcgaatggcacagcatgaaagtgaaaaaatggtcagtggggtatgcctctgacattcttgaagctttcaataaagatatttttccttttcttggtcaacggcctgttgcggacattaagccattggagcttcttaatgtgcttaaaaaaatcgaagccagaggtgcaacagagaaagcaaagaaagtgcgccaacgatgtggtgaagtgtttcgctatgctatcgtgacaggcagagccgagtataatcccgcacctgatctcacaagtgccatgcaggagcatgaatctacacactacccgttcctgtccaccgaagagagctgcctgccttctttaaagcccttgctggctactctggtagtgaattga

SEQ ID NO: 141453 - DNA, 735 bp, Enterobacter cloacae
atggcgcaggatgcttgggatgtgcaattgcagatgctattagctcacatacctgtcaaggatgtaatggttaatgcggttggaagttttgttggtggtgtagcactcatttggctcgcaatgagtaagcatggagttcgtattttaaggtcaaagttagcaagacctaatgtacgtatcgaacgacgtagaacacctgaaaatatattttcagggatagagcttggtgctccatctcgctgggttgaacagcaactaggtgttcctaaccgcataggggataaatggtggggatacaggttttcagactcattggtttctctgacattcgattcaaacgattctattaaaaccatcgcagtggcattgattgaccatgatacaactttcgaatttccatcttggcacctttgctgtccaccgctgggaagattaaccctaaaagatcttatggaagaggaacacttaactttggagtatagggagtccttacggcatcaagaactcgtagtttcaggaagagaaggaccgccaggtgcatggtattatgttgcttttggggcgctgtcgcctcatgccccagggcagttgttaccgagtgattttgaatgggatagggctaatgaaactcttctgagcagttcaaaagatgtaaaaatcaactgggcagcagtttcaatcacctcatacatcgatgtttttccatgggatttaggtttaacgcttcgaccttga

SEQ ID NO: 141454 - DNA, 228 bp, Enterobacter cloacae
atgaaacagacccttatcacccctcatgatattgagtgccttgagcatatgcgtaatgtcggccagctcgttgacgagctgatgaaggtgcaggactcaacctccgtttgtcgcgacccggcgcagcagttgcagctcacctccgtgatttacctcatgaccgcccagctcgacggcgtggtcgagcgctgcaaaaagcgctggctgaccggggaggacaacgtatga

SEQ ID NO: 141455 - DNA, 744 bp, Enterobacter cloacae
atgaaacccgaaacagtcattaccgccctgcagaatgtagccgctcaacagtcagcagagagcagccagcgcatcacagacaagctgagtgcattcactgcggccagagacacgcacgcggccagcatgcaggaactgaaagagattgatacgtccattgaacgctgtaagcaggagcggcagaccgccctcagtgagagtgcagaggcggagcaggactggcgcagtcgcttccgcaccctgcgcggcaatctcacccctgaaatgaaagctgagcacagcaagcgtatcgccagtcgcgagctggccgacgagttcaccggcctgattgcggagctggaaaccgaccggacacgcgccatgctgaatgcctgctccaccgccagtaaatacctgtcagcgcatgacgatgcctttaccgcttatgccggtgcggaatgggctcaggcggtcaacatgctccccgtcgcgctcatacgcgctttcctgctgcgcattcgcgcgctcgaaatgcagggtgacagtgccccccagtcggttgtcgtcggcgagttgcgcgatgcgctgagccgtcagggcagcctgtatcacttcgatatgaagcaggagccggtattgtctgtgacgggcatgcaccggccgcagattaacggtgtggatatggagctgttacgcagcccggcgaagagaatgatgctcgccagaaaactggctggtaatggcgagacaaaagcggaggtataa

SEQ ID NO: 141456 - DNA, 564 bp, Enterobacter cloacae
gtgaccacactgacgctacagaaagcctttgaggcctgtcaggcaaataaatccgcctggctgcaacgccgggatgaactgaagcaggccgaacaggcataccgcgaacagcttgccggtaacggccacagcggacggagtctgcaaaccctgcgcgaaattatcgatgtgaaaaagtgggaaataaatcaggctgccgggcgttatatccgctcgcatgaggaggtgcagcgcatcagcatccgtaaccgtctgaatgattttatgcaggcgcacggcgcggagctggccgccgcccttgccccggagctgatgaattattcctggcagcatgccgccattcagcgctgcgccatgcagcactcactcgactatctgcgtgaggcgctgcaggtctggctgaccgccggtgaaaaaattaattattcggcgcaggataatgacattttaacggccatcggattcaggcctgacgcggcttcgcgcgatgataatcgtgaaaaattcacacccgcacagaacctgaattacacccgccgacgcgcagagctggccgcgcagtag

SEQ ID NO: 141457 - DNA, 648 bp, Enterobacter cloacae
atggctgatattgaaaacctttatgtttttaccagagatgatcttttggctatcgaagaggtcaaacgaggtaattatacacatttgtcttggggggagggtttgctatctaaccttagagcaagaattcgggatttttatcgtggtgaacaacgcggtacgtgtgcattttgtaaaaatgatatttcattacgctctgctttaaactgtactgttgaacatataataccaaaatccttaaagttagattttatgttcacttctaagaatctatgtgtaatatgtgctgattgtaatgagattaaacgagctcaggaagtgattaatgaagttcctgatgtcactagaaacagctctcgacgagtaagatacccaacgacaggtactgtctttaaaatagtacatccccattttgattcatgggatgagcatattatcaggtttggcagggcatatattgacaaatcaatgaaaggtgcgaacaccataagcatctgtaagctaaacagattttttcatgaattcgaagttggtgatgaatatataaccgaaactgacttgaccggtttgatggaagagtatctcagcactcagagtattattaggcgggctgaacttttgttgcaaataaaagcagccttgcgatag

SEQ ID NO: 141458 - DNA, 894 bp, Enterobacter cloacae
atgatggatattagtttctctttaaatgtcaatctcggtaagttaaaaagcggcaactatgtagaattctataacgattacgtggagagaaacagatttaaagacccattgttcattgaaaaacttaataattataaagaaaagaataatttaactcatcttgaagattttatatcaaatgtttctaaatacatcgattatacccaatatcattatcttggtaaaaacttctatttcaggctcaacttatattcagaaagcgatatgtttgaatctgaggttgaaaatttgttagttcttattgatttaaatattctgcaagttaaggatattagggtctttgggaaggctgaaaaaaacaaaattagcctttttcaatctagttctggtcagcaatgtatgattttgatgatgatgggaatagcgagctccatctcaaatggctctctaatttgcattgatgagccagagataagtcttcaccctaaatggcagttagaatttatagatttactacaaaatacattttctgactatgtcggttgtcattttttaattgcgacacactctccgcaaatagtatcaggtttaaaatctgataatggatacattctctctcttgagaatgatgagctaacttcttctgtcgataattcatttagatcagctgattatcaactagcagaagtcttcgatgctcctgggtatagaaatgaatatataactaagctagcaatcaacttattttcaaaagttaaaaagaataaatctttcgatgtagaagatactactttgttggaaaggttaaaaagttttaaggaaaatatagcatcagaggatcctgtctacgagttgattaaagtattggaggaggttttcgattattatggctga

SEQ ID NO: 141459 - DNA, 240 bp, Enterobacter cloacae
atgaatcaatctaaaatgttacactcattagatctagataatatttccttggtatctactactgagttagctgattttctaaagcgcaaacctcaaacgataagaatgtggttgcatgaagatcgccttcccttcggtctagtcagaccaatcaaaattaacaatagaaattattggtttgaagatgatgttaaaaattatctaaaaacgttaaaaacagccaacgttaaatgtttgtga

SEQ ID NO: 141460 - DNA, 201 bp, Enterobacter cloacae
atgcctttgattgcagttcaatgttacagaaataaaaaaaaccgccgggagaacccggcggcagaggtctttcaacccgacgacttacttattgccgccatggctgtttttacccccttttttgccagcctcagatgcgcgctgagggtcatttttaaaattacccccgctatgctggccacctttacggcctgcttctga

SEQ ID NO: 141461 - DNA, 372 bp, Enterobacter cloacae
gtgtatggtgaagatgacgccaaccgcgcctcgccgccaaccgtacgtgaactgtttggcgccgtgcgtcgcaactatttccgtctttacttccactatatgtacttcaacattgcgcgcattttgtatctgcaggtggataacgttttcggtttgttcctgctgttcccgtccattgttgcgggtacgataacgctgggtctgatgacacagatcaccaacgtatttggtcaggttcgcgggtcgttccagtatctgattagctcctggaccacgctggtggaactgatgtccatctacaaacgtctgcgcagctttgaacgcgagctggacgatcgggatctgcaggaagtcaccaatacatttagctaa

SEQ ID NO: 141462 - DNA, 735 bp, Enterobacter cloacae
atgcaggtgggagcgtttggcctggggaatagttctgcgcaggtaattactgacgtgtgggataaatcattaggcagcaggtttattatgatgtctccatcaacttcaggcgggccacaatattactctatgggtattagaatatctgagcgtagttggggaaatggcccaaatgatgtttcccagcaatcattttctgcattctcgatgggagggaaaagattcacatggatgacaatggctgatggggttaattctgggtggctagaggtttatcataacggcaataccacaaagtccagtgatgggacactgaaagctgcctcgcctgtgattaaacttttttccgatggcagatacctgaccaacgatgaatcagagggctgtactgtaacccgtctgggcatcggtgaatatctggttgaagggtgtgaggggctaaactcggacgccgcatggggcggcattgatggtggttttgatatccccacagaccgcaacaaacagcccctgatctggctggattatgaggttaatgctgacggttcagtgttagtgaaaacctatcaccgcacgtatccagacgcgccaacattcgccagaaatgaattactgggtgttgatgatggcgctccggtcgatattccgcgtgaccagtttgtcagtattcgagtggaaatgcccgcggacagcatctggaatcaacgacagaaatatacaacgagagccccgtaa

SEQ ID NO: 141463 - DNA, 519 bp, Enterobacter cloacae
atgaaaattaatccggctcttatctgcgttgtcgttattgctggcctttcggtcgctctcgctaagagttgcacaaacgccagtagcctccagagcgataacgacgttctgcgaagtgacaacgctttgcaggggcaggtgattgctacacaggcattcaacttcaatcgattcaatcaggttgcagaacaagccaacaggcttaactccctggtcgacaccagcaccgaagaaaccgtaatcgaataccgggagattctccgccgtgaaaaaacctgtgatatgcctgttcctgctgatattgctggtgggctgtacgaatacgcgtaccgtttacgttccagcgcaatgcacacctataccgacggaattgacgcagccaatgatcgttccgctaccgccagctcaataacgtattgccaggctgttttgtggattaagccgctgctggctgtaattgaaaaaggcaacaacaacctcatggggattcgacaaattgagctggaaagaaaaaaatga

SEQ ID NO: 141464 - DNA, 537 bp, Enterobacter cloacae
atgggaaccagaggaaaattgagtgcgacagttctggggctggtactggctggtgcgcctgcatcagtcattctcgatcagtttctgaaagagaaagagggtaacagcctcacggcgtacaaagatggcggtggcatctggactatttgccgcggtgccacgatggttgatggtaaaccggttgtgcagggcatgaaattgactcaggccagatgcaatcaggtgaacgccttcgaacgaaatgaggctctggcgtgggttgaccgcaatattacggtaccgcttaccgaaccgcagaaagccgggatcgcatctttctgcccgtacaacatcggaccgggtaagtgctttccgtccacgttctataagcgcattaatgctggtgaccgaaaaggggcctgtgaagctatccgctggtggattaaagacggtgggcgtgattgccgattgaccaaaggtcagaagaacggctgctatgggcaggtcgagcggcgcgatcaggaaagtgcgctggcgtgctgggggctggaccaatga

SEQ ID NO: 141465 - DNA, 303 bp, Enterobacter cloacae
atgaaaatgaatgactcaggaaatatcttcacgcagttctttgcgtgggtagctgctgtggcctcagctattggatttaccactcaggatctggttttcatgttctttggcgctaccggtttactcatttctcttgcctcctacctcaacgggcgtgttgatgcgcatcgcaggcgtaaagaggacgagaagcgaacacaaatggtcaatgactacttgaaaggcgttagtgacaaaccccttcacgaacgtcctgctgctgcaagcgtggtcgttgaggcattacaaaaggaaggtgagtga

SEQ ID NO: 141466 - DNA, 177 bp, Enterobacter cloacae
atgaatcttgatgcatatcagaagcttgccaaacatttgctgagattggttgaagttcagaaattagagggtaaagactactgtgtagtagatcataaagtactatgcatcactgccgcggcaattgaagaactcctggcccagcttaagttgaacaaagaaataaaaaacaattaa

SEQ ID NO: 141467 - DNA, 660 bp, Enterobacter cloacae
atggaattattcgaaaattatttgtcaacgttacctaaaaaaaagcgattgagtgaagtcaagttgactatcctgaagagattatggggctcggatgatattgattttcctaaaccttgggtctcatcaatagaactactggaactgacagggcaaaagtacttcgatagacgaacaagagaattgcgagatgaactaggctgtgatctcgaaagctcgtacattgcggagttctcggggcatgcttggcggctaaaatcaaatatgattgccccaccaatggaaagggaatacctgacagaatcacaacgatctggtttattttctaaccacagcaacacatgtgcaacatgtggtaaaactgttgctgctggggtcagggggctacaagcggatcacaaaatacctttgtcacgtggtggtggaaatgagttaaccaattggcaagctctttgccacaattgcaacgtaggtaagagaagagcatgtgagggatgcactgatgattgttacacatgctcatgggcattccctgaaaagttcgggataacaacaatgctccatctgccagaagctgctttaagaaaagctcagcagctagccgatgcagatgggatttcattagacgaaatcgttgcctacgcaatacgcaagctctga

SEQ ID NO: 141468 - DNA, 1071 bp, Enterobacter cloacae
atgttacaatatacatctgtagagatttgcgcaggagcaggaggtcaagccttagggttacataacgctggcttcgctcaccgcgcactagtcgagattgatccagctgcctgcgaaactcttcgcctcaacaatgagctccattctttgggttggggagatatcgtagaaggttgcgttaagcattttgctgaacacactgcatatagtttttctgatgttgatttggttgcagggggagttccttgcccaccattctcaaaagcagggaagcaacttggcaaagatgatgaacgtgatttgtttccgacggcgctcaaaattgtgaacaccattaagccaaaagcagtaatgattgaaaatgtttctggtttactagacccaaagtttaagcaataccggcaagaactagatcatgctttctctgcaatgggctataaaaccttttggaaacttcatcatgcctctgattacggagttcctcagcttcgcccacgtgttcttttagtggcattgcgtggtgaatatgcagctcattttcattggccgagtgaaacgttgataccgccgactgtgggtgatgccctctttgacttaatgtcaatgggaggttgggaaggagctgaagcctggagaaaggcagcagataatatagctcctacacttgttggcggctcccataagcatggtgggccagatcttggcccgacaagagccaaaagatcctggcaagcgcttggagtcaatggacattccatagcggataatggccctgaaaaggggtttatcgggtatgttggaagagacggaaaaattcggactggttttgaaaatatgcctcgtttgactgtaagaatggctgcacgaatccaaggtttccccgactggtggaaattctctggtaaaaaaacagctgcttatcgtcaagtcggtaacgctttccccccccctgttgccgaggcaacaggaaggcaaatccgtaaagcactcgaagctgttgacatcatgaaaaaacaacagttggcgttaccactcgagtcaaatgatattcagagcttgcgtattgcgtag

SEQ ID NO: 141469 - DNA, 342 bp, Enterobacter cloacae
atgaaaactctacctgctacaatttcgcgggcggcgaagccctgtctgttgcccgtggctgtctggaaaatgttactgacacgcctgcttgaacagcactatggcctgacactgaacgacaccccgttcagtgatgaaactgtgattcaggaacacattgatgccggtatcacgatggctgatgccgttaactttctggtggataagtacgagctggttcgtatcgatcgcagagggtttagttggcaagaacaatcaccttatcttcgggccgttgatattctgcgagctcgacaggcaactggcttgttacgacaaagccgaagtgacctagaacgctga

SEQ ID NO: 141470 - DNA, 477 bp, Enterobacter cloacae
atgaaacagctttcctttttacccggcgagataacgccacaggaccggcgtctcatccagcgcgccctcaggattctggaccggcatctgcatgagcccggggtagccttcacctccacccacgccgtacgtgaatggctgcgactgcatatggccgcgcttgagcgggaagagttccgggtgttgtatctggacaaccagaatcagcttattgcccatgagacgctctttagcggcacgattaaccgcaccgaggtccatccccgggaggtggtcaagcgcgccctgtatttcaacgcggcggcggtaatactggcgcataaccatccttccggcgagacgacgcccagccaggcggacaaagcccttacgcagcgactggttcaggtacttcagttggttgacatccgcatccctgaccatctgattgtcggtggcaggaaaatctattcattcgctgaacatggtttgctttga

SEQ ID NO: 141471 - DNA, 567 bp, Enterobacter cloacae
atgaaaaaaagactcactactctggctgttacagggctcctgctgctcacgaccagcgcacatgcctacgatgtcaccggtcgtctcaccaactggtacgacatgaagaaaagcggctggacctctgcggatggctatgatgatgtgaaaatgctcaatgcgcttgggttgaaggctgacatcattggttattatccgtggacgaatacatttttgctgcgccaggcctataacacccctctgtatctagctgacaaaaaaacaaaaaccgtccgttatctgaacctgaaaacggctagcggatatgcttctgatcttgatgtggtgtaccagggtgaggataacggtaaagggtgttacttcagtatcgtcgatacacaggtgcagcttgagatggttaataaaaaggcggagccccgtgtattgatggtgctgcctgaaagctgcacaaataaacaacaactggctgccattaaggccaggcagacagaaaaggatcgccaactgcaacagtgggcctctcagcaaagcctgaaagaactgtgccgccgtaccggtaactgctga

SEQ ID NO: 141472 - DNA, 864 bp, Enterobacter cloacae
atgaaacaatttgacggtctgcagtcactgcagcaaacgctttccggcctgccccagtgggtctctgaacgcattctgcagcagataaatcagttaacccactacgagcctacaataggcattatggggaaaaccggcgcaggcaagagcagtctgtgcaatgcgctgtttgccggggacgtttcaccggtcagcgacgtggccgcctgcacacgtgaacctttgcgctttcgcctgcagctgggaaagcgctatatgaccatcgtggatctgcccggtgtgggcgaaagtagcgttcgcgataacgagtatgccgcgctgtattgtcaacagcttccccggctcgacctggtgctgtggttgatcaaggccgatgaccgggcactggcggtggatgagcatttttatcatcaggtgattggcggggcataccggcaaaaggtgctctttgttatcagtcagtccgacaaggttgaccccacctgcggtggtgaaaagctgtcaacagaacagaaacaaaatatcagccgcaaaatctgtctattgcatgagttgttccaacctgtaaaccctgtctgtgcggtgtcggtacgtttgcagtggggactgcgggtgatggctgaacggatgattcgttgcctgccgcgggaggccagtagtccggtagcggtacagcttagtgctccacttcgtaccgataccgttaataaaaaagcccgtgacgattttggtgaaacggtcggctcggtactggacacagtaagttccatgcccctgataccggccccggttcggacagtcatccagtctgtacgcgacatcgtggtatcagtcgctcgtgcagtctggaatttcttcttctga

SEQ ID NO: 141473 - DNA, 1908 bp, Enterobacter cloacae
atgctcagaaggttccggttagagcggaagtctgactatgaaaagctggtaattgctcagcgtctggcggacatgcttgagaaattcttaagtggaaggctggcacctctgtcgattggtgctgaacaaggtggcattgaggagtgggacgatgtggtaatcatgcacaccgcagaccactatgagcatttacagattaagcgtcagtcgactgacttttgtaccaaagatcctgataaagctgtacaactcgctaaaaaacccagaaagggttcctcgcccatctccccgaccaattccgttttagactcggcattttccagtcttgccagaatcgcgaaagcgggaaaacttgatgaatctcctaaccgtgagtttagactcaccctcgtgggtctgcatctacaaataaaagatagtttttcagtcaatcatttagaagaagtctgtgatctttgtcgtcaaaatggactcagtatagaggaattagctaagcgtcaggatggtccaaccacgagggcttatttatggctaacaacctggtgtggattcgaagactggagtcagatacgaaatgtacttcgccgggttaaaatcaattgtatcggtaacgatgcgacattaaaagatcggacaattcactcgcttggtcgttacttcagcgatccgaatcgtacactggaccgtttaattacctatatcgcggcagaaacatctgacgtagcagccttgggatgccatgacgtcgtccaggaactgcgaagtgaactgcgccctgatgttgaaacctgggtgcagtatcagttaagcgacggttctactatggctggtaaaacttggtcattagccggaacgcttgatcttgccggttcaacagaaaggtccgcaaaaggggtcgttgagcacatgtggagtcgtgagcccggcaaccgcaaactcagagtttatgccaattactccccccctgcaggcgataatctgactcttctttctgccattgtgcgtatggctttgcatttaccccaaggcagtcaggggctgatgttaggtgaaccagcgtggcgtagtagcattggtcatgaaattggacacacacttggctgtgcagaacatgacttcagcgacctaccttggcttgaaaatgccgaacgcctatcctgtgcacaggattatgaatttaagacagtaaatgctgctcgaggagaagctgaagcgcttgctaaagctatggacgacgtgctgtggcaacgccttcttcaaggggtttcagaaaagcttggctcaatctcagattcggcgctagcagatgcgatggagacggtttggcagtcatggctgagcgggttcgcagctgcaccagaaaaacgccgaaaattcatggagcagcttctctatccgaaaacggagaaaaaaaatgaaagacatgcgcttcgcctgggccttcgtactttaaatcttcttgttaccgctgttgaaaccttattactggttgctgtgggtttgcctgaggacagtaataactgggaatcttttcaggaaggtggcccagtattgagcattgctcttaagtactggtctggtcctgcgggtggtttttcgggagtacgtgagctttctgacgatccgttaatagacgttattggccctaatccggatcccatcgttatcttatcgggtgtgagtacatccccatcagaattattgaatataggtatggctgacgacgcagagactgcgaccagtatggccgcggagcgtcaacctcacctgctcgtcacgcggtctggtatgtttcgtcatttacataacggaacacttgactccgtacgccaacatttcactaagcagtggcaagatcgaaagctcgctcgtgaatcggccattgagaagaatgcgaagggatcctga

SEQ ID NO: 141474 - DNA, 600 bp, Enterobacter cloacae
atgccgacaatccaagaactcgttactgctataaccaagcgtgctaagggccgctatgaagttcattttccagatgtggacgaaatggtttcaccctcaattgatatcggcatgactgcaatacaactcagacgcattaatcgggagaatgctggatggcgaacagtgctgatcacagcatttcctagtaacgtggataatatccagagtgctttccgatgggccgctgatatccgagacatacttgcagagcctcagacagcagacctttacatgtttatgctcatcgatggagttgagtcagaagatgctgcccgttttgaaacggacgatcgattttgcaggaaggtggtgctcagaaagcaggaagatattgactccttccttgatcgaagttttctggcgtctttaacacctgcgagaggtgggaatgatatcagcgatcctctgctagcgtctctgaactcgatggggcaagcacactcttgggtagaacctcatctcgaaacatggcgtgaattgttgctctctgagaaatctggcgatgaaattgttaatgcgctgagggatatgatgtttggagagaaggactttcaatga

SEQ ID NO: 141475 - DNA, 2985 bp, Enterobacter cloacae
atgaaacaacttaaatctatcacgctctcaaatgtccgccgatacggtaccgacaccaaaattgagctcagtggcggtgcaaccattttactggcccctaacggtacggggaaaacggccttcttcgaagcgatcgaatttagtctcacgggtaatatttctcgtctaggcgagaatctttcacccattatcagggacagccagactgtcgctaaggtggtcttggattttggggatgtacaagcctctgcgcaggtgagcaacgaaggtgacgtcgaaaggactggtgatttaagctctctttttccggatacgaattcggaggacatcccctttttattaagacttacccacttactggatcagcgcgagggccaatggctggtcaaagcggatgcaaaagttgcgggcgctcaactggctcgcttgccaatcggtaaagatggaaccctagttagtaatgctcttggcggcattcgccgcgttctcactgaaaagctgaagcaagcaaagggagcccttgaggcgctcgaagctgagtttggggagtggcaaagtctgattcttgatcgggaccaggcggcatcacaatctcagggggccctgcgcagtaaagaaaacatcgcagaatcaatctcagacatagctcgcaatactcagagtgcagaacaattgccagtaggtttactggttccgccagtgggtatcagcaatctggaaacaatgcacgaggcattagagcaaacagtacaagcaaagctgaaccgacttcgcgaacagattactgcgcttatggaagtggatggactaattggccggttcgtttctgagcaagcgcgttctgagcagcttggcaatgcgcttataactgctaaagaggaactgacacaaaaacaacaggaacgagcccagctagttgataaaaaagataaactccagaaggaacttgtcacagctgaagcagaacgtgatgtaattatacagcagcttaaccggctcaatagtgaggcgcgaaccaaagaggccttcgagcaatgtaagcttgacttggcgtcagctgacaaagcgttggccgacgcccagtctctggcatcaaccttgcgtcacatacatgaggggaacgaacagctacgtattgaacatgaacttataaataaacagcgtaagtctctgcagcttgtagatagtgaagtactcactgctcatcaacttatcaagcgctgggaagacattcttcaacacattgcgacaattaccgacttggttagcaatgaggaaattcaggagcgtgtacttcaggagcatcttcataccgcgaattcgttaaaggtatcagctgaaacagatgagctttcagcgaagcagttccatgagatgctcacgtctactgctgactctataaggcaatccgtagccaccattgccgcacatttaccagaggatcgcggggactgccctttatgtggagtggaacatggcgctgccgttcttcataaacgcattactagatcattagaggctatagaccccaaagtcatcgaagcagaacagcgcgttaaaacagcatccgatcacttgcggaaatgcatagaaacagtgacgcataccgaaacagaattgaaagcgtgccagagtaaaattgttgaattgcgaggcgatatcgttcgctcagtagcagagatcaatcaactcaaaacaaacatccttcttgacggagatacggtacaactagcgaaagcatctatccaacgtcgcgaagaatcaaatgcttcagcgaaacagcagattgacgaaaaacagcttaaccttgcccccttaccgacacctgaaatattggaagcgtctaaaaacgcataccaattgtcgactcgcgaactggatactgcgcggcataatcgggccggagccttggctagccttgaacaaacaaccgctgcattagctgcaataacagcaggggcactcccttcaaaaacgttggctgatttatccactgaacaaaacaaaaatacgattcaactagctgaattaaaatcaaaaattgaggctgggcaatctgcattggatagacagaatatccctttagctgaagttaataataagataaatggcctcgaaaagcagatcactgacgctcatgctcagctagcctcaattcggtattcatggagacaactgtcctttcccggcgatcccgctctcgaagtggcgagcagtaaagagattcaactgcagtcatccgttgctgacctgtcccgacattcagaacagttacaaacactcaaaattgagattggcacttggaacaagctggaacagactcgtttggcacaagggcttatagatcgtcgccgaggaacatcatctgagcaggaattcgctacaagtcttagccagcgaattgataacgagagaacaaatcagatgcagttgctgcaattatctgaagcgatggagacgctcaatcgatgcctatctactgagatctcgaatgtacaaaaacatgtgctctctgtcgttccaaggtggcaggctttgctcaaacgcgtagtcagagaacagcgctttactggcaccagtttgggttttcgcagtatctacagaaaggaacatgctgaagtatctgttccgttacatggggagtcagtaccggttccggcgatagcaagcgaagctcagcttactgatctacagcttaccttcttgctctccatggcattggaacaccagtggtcctcatggcgctgcctgcttctggatgacccaacacagcatcatgacttggtccacgcagcgtccgtattcgatttactgcgtgattacatagttgatcatggcttccaggttgtaattgcaacacatgatgcccttcaggcgcgttatttcatgcgcaaactgcaaaatgatggcattgatgcacgcttgtggtcactcgttcctacacctgaaggggtgacggcatctgagatgcggataaccaggtaa

SEQ ID NO: 141476 - DNA, 933 bp, Enterobacter cloacae
atggaatctgctcgtgacaaacgcaccggagaaaaagtggatgctgaagagctctggttgttggatatcgttgataccagtggttatgtttgctggggatgcggaatcgaaatgtatccttccgcctggcaaaaaggcagtaagaaaagaccgtcgtttaataaaatgccaggaaaagaacacatcaactgcgatgctgatgctgagagcactgttgttaagcagggccagaagaaaagcgtccgccatctcttggacagtgcaccgggtttgatgcctgcagggttaaagttgattgaaaaacgcccggttgttgatcctgacacaacgggtggtgaaaacaattcgagcacaacgcgttctgcatcatcaacatccagtaaaggcaatcccccaacacggcaatcgcgtcgtccggttaatgctattcgtcagatttgtagagcgtttattcgtttcccgtatgatcgaggtatgtcactacatataccggatattgatgccgatacttacatgactgtctttaaaaaacttaaagatccgattcagccctatccggaactgcgagttttctactcacagttgttgtggcagaaatttgagcaagatgagaatcggattgtcattccgctttcgggagaatgggttaaagatgaatccggaaagctcaagccttctcgaagttataaactccatgtggaatggagcggctggtcccaagctaaacgcacagcacttcgtaacgagttggaggccgcccaggaagaagcgaaagatgcggggaagaaaaagctaaaagacagggctcagattttcttcatcggtgagcaaagtactgaggaccatgaggtcttctatgtagccgattacaggttgatttgtgcgatcattgggcatatcacttatccgagaattgaaaatataatcaggtag

SEQ ID NO: 141477 - DNA, 1785 bp, Enterobacter cloacae
atgtggtcagataaggaatcatcagaggattacctaaattttggtgaagtatcccagttagctgtagacgtgcttactaccgaaaacatgttaccagtatcaatcggcatttttgggaattggggggcaggcaaatcttcacttttgaaattgatagagcaaaaacttgagcaagataaaaaagattggattgtaattaactttgactcctggctctatcagggctatgacgatgcgcgagcagctctacttgaagtcatcgctacagcattgacaaaagctgctgatggaaatacgcctctcatctcaaaagcgaagagacttctgagccgagttgatgggtttagagcaatggggcttctggcggaaggagctgctttatttgctggagtccctactggcggtttactttctaggggaattggcgcgtttaggaatgttaccgacggtatccaaagccaggaagaatatgaggctttgggcaatctggctaaagaaggcaaagagaaggctggtggtttgattaaacctgaggctaaaaaaagccctcctcagcagattgatgcatttcgtaaggaatatggagaaattttagaagagcttggtaagccactcattgtggtaattgataacctcgaccgctgcctaccggctaatgctatccatacacttgaagcaatcaggttattccttttcttaactaatacagcctttatcattgcagcagatgaggacatgattcgttcttcagtagctgattacttcaagggagcatcacagcggcatcaaatagactatcttgataagctcatccaagttcctattcgggtgccaaaagctggggttcgtgagattcgttcatatctgttcatgctttatgccattgaacatggcttaaaaggcgaaaaacttactacgctccgtgacggcctagaaaaggcattacagcaatcttggaaagatgaacctattacacgccaggacgctctgaaaatgactggtgagtctgaggatagtaacctcgctttggcatttgctcgtgcggaccgtattgctcctgtgttagccaattcgccaattatccatggcaatcctagaatcgttaagcgcttgttgaatgttgtcaaaatgcgatctcaaattgccaagcggcgagcaatgcctttggatgaagcaatcatcactaagttagtaatctttgagcgatgtgttggagtagatggtaccgctgacttatatcatctagtggatattgaacaaggtataccacagttgcttaaacagcttgaggaagctgacggtcaaatacctactgaagcgccaaagacatggactgataatccaacaactaaagctttcattgctcaatgggctcagcttgaaccgcgccttggtggaatcgatttgagagccgccatatatctgtccagagaaactatgccaataggtgcatatgtggttggtttatcgtcgtatgggcgggaagcactgaatgcactcattgaaatgaaaaataccagttctcccgcagcagaagctcttttggaaacgcttcctcgtgaggaacaagtgcctgtaatggaaggtttaattagccagttaaggcaagcatcggattggactcgtagacctaaggggttttctggtgcatgccttttggctcgccactcggcagatgctgccagtatattaattcgttacttgcaggaattgcagcagggaacgaagccacctgtatggatggctgcagcattgaaagatgagcaatggaataaggacgcttaa

SEQ ID NO: 141478 - DNA, 753 bp, Enterobacter cloacae
atgggaacttcacaatcaagtataggcccgggtggtggttctccactggttccaccatgggctgatgatcagccacagcaacccttaaccccgccacaagaacgaaggtttgcgccttttagggagtctttgggaaatgcagtttcaaacggcaatagagcagactttagaaaagcaatagggcattacgcgcgaaaagcgtctggagggagcagtagtgcagctcgacgactagggagtgtcacacaggctgggggcggattgtttggggctctggcgggagtgcaagcggctccaggagaaccaagcattgatttgggaagcttggctggccttccatgtgaaatagcaatatcggctattgctcaagctttaacatcacaggatggtgattcagaaaagatttgtgctgccatgaatcatgccttagtggaagctctcgatggtgtggcaattttcgatcctcaaaaaataactgatagtgtgatcgttgacacaatgatttgttatttagctgaaagcatttttctgcaaatggtcatggattctaacaaggcatggaataaagcggacactccttcaaaggccattcatgcagaaattgaacttcgagaattgatcaaagttgttgttgataagcatatggctccaaaacttgtcggtaacattaggacttttacgaaaaaccaaatggttaaaatcgagcgtcaggtaattactgaggcttggcaagaatgggaggcctatcaatga

SEQ ID NO: 141479 - DNA, 1305 bp, Enterobacter cloacae
atgacacacttagtttttcatcatgatcatcgtctcttaccgccagcaagtgagaacttgttgcccgtacagctttatggattaagtgggcaggggcggggtgatatatccattattgggaatcctgcgattgagcgaattaagcgcttgggagtcaaaattccagctcaggtcatggattttttgagcatcgcactagcggttacagcggctgataccttcgttcagcgtgaaagctctgaggatggttggactcgtcaattctcgctacgacttccccttcatgagccatctcgatggattgctctaaagaaggaacttgaaagcactttgcatttccttagcggagacatctgggatttcgagttttgcactggtggttatgcaccgccagaaccctatagtcaacattcaagatttcacctaatcaagctcaaagaacttgattgtgtctgcttgttttcgggaggattagattcggctattggcgcaatagatcttctgacaatggggcgcgctccgcttttagttagtcatgcttataaaggagataagtcacgccaagatcaaatcgctgaaagattaaatggtcgatattcacggtttgaaattaatgctgatccgcatcactatcaaggtgtgactgacattacgatgcgaacgcggagcctcaattttcttgcttttgcggcagtgggcgcttgtgctattcaagaagtatctcaacaaaaaaaggtcgatatttttgtgcccgaaaacgggtttatctcgttaaatgcaccactaaccccacgccggatcggtacgttgagcacacgaacaacacatccatattttattgccagcatccaacagctgtttgatgcggtcggaattccttgccaaataatcaacccatatcagttcaaaacaaaagggcaaatggcttatcaatgtttgaacaagccactattgactgaaattgtagaaagtacagtatcttgcagtcattggaaacgcactaatcagcagtgcggggtatgtgtaccgtgcatcattcgacgggcatcgcttcatgcagggggaattaatagagacgctggttacactttccagtccctggctaaagtaatgaatgaaattgatcgtagggatgaccttatcgctctaaggattgcaatcgcccagaaatccactttgaaaataggagcatgggtcgccaagagcggtcccttgcctgtggccgctttcagtaattttaagcaagtgtttatggaagggctaaatgaggtcgaaaactacttattgagtgagggcattgtgtga

SEQ ID NO: 141480 - DNA, 714 bp, Enterobacter cloacae
atgcactgtcatcttgacttatatcctcagccagaacaagtggctgaggagtgcagacgtcgagggacttatatactgtcggttacaacgacaccgagagcatggcatgggacttctttactggctaaaggaagccaacgaatccgaactgctcttgggcttcatccccaaattgcgcatcaaagatctcatgagttagagctgtttgattcgttactttcggagaccaggtatgttggcgaaatagggcttgatggaggtaaggggtttaaagaacattgggacgtccagctgaaggtatttcgacacatacttaatagtgtgcatcgtgccggaggtaagattatgactattcacagtcggggatgtgcatcagatactattgatgagattgaaaatattgatggtatagcgatattacattggtttactgggactccaaagcagctagaaagagcaattgatttagggtgttggttctccgtaggacccgctatgctcgaaacaattaaggggaaagcgttagttttgaaaattcctaaatcacgcattcttacagaaaccgatgggccatttggtaagtttcataatgttccactaatgccatgggatagtgagatagccgagactcagttagccgcattatggggggtgagcctgaaggatgttaaagctcagcttgctgataatttaagaagactgtgtagttattaa

SEQ ID NO: 141481 - DNA, 699 bp, Enterobacter cloacae
atggaatcacaatatacacttaccaacgaagaaattgatgacttggtagaaatagcctccaaaaagtatagatcacctatcgaccgcgatattctcatcccactacttaacatggtctacggcgcactagtgcagaataaccgaatactaggtattcgttctgatctgagatttgcccagtcccatgtactgggagagcctgatctacccctctgcttccagcgcgatgatacgcaggcaatcactcgcttcttcgagtcactgaaaagtcagctacgggtagatcataaccggtccaagagaccgggtgacccgacatttccatcttatgggtggtgtagagaacgtgacacaagtgagcatccccattaccacctgatgctgttatttaatgcggatgtgtatggatacttgggcaattaccaagaactcaatgctaaaaatatggcaacccgaatacagaaagcttggtgcagtgctatagggcttgctcacgaagagtacgcgacattagctgaattcccacctaatgctgtttacaggtttagcagattcgatgctttggatcgtaactcagtctactgggatttcctgattcgactggcgtacttggccaaaaccagaactaaggatgtccactgcggttaccgcaactttggtacaagccaatgtccgcggttaagcggattagccagttga

SEQ ID NO: 141482 - DNA, 1563 bp, Enterobacter cloacae
atgaagcctgaagagttccgcgctgataccaaacgcccgttaaccggcgaagagtatttaaaaagcctgcaggatggccgcgagatttatatctacggcgagcgcgttaaagacgtcaccacccatccggcgtttcgcaatgcggcggcctccatcgcgcagatgtacgacgcgctgcacaaaccggacatgcaggatacgctgtgctggggcaccgacaccggcagcggcggttacacccataagttcttccgcgtggcgaaaagcgccgacgacctgcgtcagcagcgggacgctattgccgagtggtctcgcctgagctacggctggatgggccgcacgccggactacaaagccgcgttcggctgcgcgcttggcgcaaacccggccttctacggccagttcgagcaaaatgcccgtaactggtatacccgcattcaggaaaccggcctgtactttaaccacgctatcgtcaacccgcctatcgaccgccacaaaccggcggacgaggtgaaagacgtctatatcaagctggaaaaagagaccgacgccgggatcatcgtcagcggtgccaaagtggttgccaccaactcggcgctgacccactacaacatgatcggctttggctccgcgcaggtgatgggcgaaaacccggactttgcgctgatgttcgtcgcgccaatggacgccgaaggggtgaagctgatctcccgcgcctcctacgagatggtggctggcgctaccggctcgccgtacgactacccgctctccagccgttttgatgagaacgacgcgatcctggtgatggataatgtactgatcccatgggaaaacgtgctgatctaccgcgatttcgaccgctgccgtcgctggactatggaaggcggttttgcccgcatgtacccgctgcaggcctgcgtgcgtctggcggtgaagctcgacttcatcaccgccctgctgaaaaaatcgctggagtgtaccggcaccctggagttccgcggcgtgcaggcagatctcggcgaagtggtcgcctggcgcaatatgttctgggcgctgagcgactccatgtgttccgaagccacgccgtgggtgaacggtgcgtacctgccggatcacgcggcgctgcaaacctatcgcgtgatggcgccaatggcctacgcgaaaattaaaaacatcatcgaacgcaacgtcactagcgggctgatctacctgccctccagcgcacgggatctgaacaacccgcagatcgatcagtatctggcgaagtacgtgcgcggctccaacggtatggatcacgtcgaacgcatcaagattttgaagctgatgtgggatgccatcggcagcgaatttggcggccgtcacgagctgtatgagatcaactactccggcagccaggacgaaattcgcctgcagtgtctgcgccaggcgcaaagctccggcaacatggacaaaatgatggcgatggtcgaccgctgcatgtctgagtacgaccaacacggctggacggtgccacacctgcacaacaacagcgatatcaacatgctggacaagctgctgaaataa

SEQ ID NO: 141483 - DNA, 153 bp, Enterobacter cloacae
atggctgtggatttatccagaaccaacatcgaacgaaactggaaagcgcctcgcaaaattcctctgcaggctgttgccctcaccctgcccctctcccactgggagagggagaaaagcacgcataaaaaaaccgggctattgcccggtttttag

SEQ ID NO: 141484 - DNA, 1116 bp, Enterobacter cloacae
atgtcagctaatgatgcgaaaaaacttgcggacaaactgttcccgatcataaaagatgatgatgttgcaataattgatatcccccccgaacaacgccgcttacacacagaaacttatgatttctcaatctcgacacttgtagaatatcttaggaatggcgcagtttttattccagaattccaacgtaaatacgtatggaatcgtggtcaagcctcaagattgattgaatcattgattatacaatgcccaattccagttatttatcttaaccaagagaaagatgaaaaattatcagttattgatggtaatcaacgactcacttctataaagctttttatagaggacggctttgaattacaggggttgacagcataccctgaattagaagggaatcttttttcgtcactagatccgcgttttagacgacacattttgaaccgcactttaagatgtataacaattcttaaagaaactcaccctcaaattaaaattgatgtatttgaaagaatcaatactggtgcggtacagttaaatccacaagaaattcgacacggcgtttatcatgggccgttatttaccatgattgatgaaattagcgaagaaaaagtttggatagatttagttggaatgaaaaatgatacgcgaatgaaaaataatgagcttgttttgagagcattcgcgctatcatattcagaacatccgtatagaaaacctcttaagcggttcctgaataactttagcgctgattttaaagatgtctccacagaaagagttctggagtggaagagtcagtttttgacagcactaaataatattaataaattatttgggaaaaaagcttttagagtattaaaccctaacttagaaccacaagttaaaaacttcaactctgctctttttgatgctgttattgttgcatttatgactggagattataatcgtaaccgtatccaaaacttaagtgaaccggagcgtatcgtttttcttacacgtttccaacaggttttatctgaccaaagatttgaagagtcaataacatctggtactagtgcaacgcagctagtgacgcaccgtataaatacaatgaaaaacttcatacaagagtgttttcaataa

SEQ ID NO: 141485 - DNA, 717 bp, Enterobacter cloacae
atggcatatgttaaaagtgctgctagaaaagattttgagaacatatataatactctactcgaacaggctgtttttgcctctaagcagaaacaattgagagcagatatcatacagtgcgtttataataatgctattttcagactttctgctgcgtttgaagattatattaaagcgatttttgaagactggatcgatatgctagaaaagcatgatggttgtttgtcagacttgccagaagagtcagtatcttatgcacttttgaaacatcatgaaaatatgttcctccagttcttgttaaatggttcggaaggaaaggttattaatgaaatctcaacaaaaaaaattttgacgaaaaagctatgtcttgagggttcgcctgtaaaagacttaattaaaacgaatcaacttgtaatggataaaaaatatccatcacaaaaaaacctcaagcaactatttaaccgcttcggatttaaagatatatttaaagacatggaagtcaaaggaaagaaagactacaagttattattgcagtctttttcagatagcagaacggaactagcacattcgtattcttctatgccaatgagtaagcagacagttaaagataatattaataatgtttatgagatcgttagagttattgatagagttctttactcacacgtttgtaacaaaagtggaagtaggtattggaaagttgcatctttagctctctaa

SEQ ID NO: 141486 - DNA, 420 bp, Enterobacter cloacae
atgaccaaagcattaacacaaaaacagcaggtagcagtgtttgtgcgctaccaaccgaactgcgccgtaggcgatgttgcagaggcactggatatgtcaggtgcaacagctggcaaattgcttcgtgacttaagcgaccaaggcgtgatcgttcgttcccggaatagtgttcagtacacatacgaggtggtaccagacgcggatattccggatgtaatccttccgtgtatggcggaaaaaagcgatccagtcaggatgcaggccgcagaggagaaagcgaaggcgcttgaggcaaaaggcctgtggcgaagagcagctgtggtgtattcagaaatgtttggcatagctggtagtgctgttgaggtcgcccgtatcgccaagcgtcgtaaagactgcctgcgtcaggcggggagggcgtaa

SEQ ID NO: 141487 - DNA, 1044 bp, Enterobacter cloacae
atggatttttcccgatttatgaagccgcaagatcttgagggcatcgagttagaacacgcaccgattggtttaactattcattacacggttctttgctttaatgatagttttaatcatagtggaaaggaattttttaccaatttcataaatgaatttggtaaagtaaaaaaatggatcatttcttcagattatgcattttatgataaagataagaaaaatgacgtagtgacattttctatttttccacatcttgcacattttaacaaaatgtctgattacataaatgcaattgctccggcagacattaaaaaggtgaaatcagtcagtgatgaattcataacttttctgagcagtggccctgtgtttaatatttcatttattcttgatcgagaaaggcggatgcacagtgatgaaagaagttatcacttgcaccggttggagtcgatgattcgccttctggaatattggtgcaaatctacccctgagggaaaagaaaattatcaaaaaagaatattagagctgaacaaggctaaagacttaatcaattcgcctggggtaaatctacgaatttttagggacattgaaatagttgctcagttggctgcctttctccttgcagaaataagcatgaccgctgatgtggaaattatttcgtggttatcagaccgggatagcatgttaacctttaaaaataaaatcattggcgactacatgcttgagcaggtagcctccacctatcatgttttatgtgggaataatggagtggactcttcggagaaattattattacctaaacctggactggagggggataatttttatgatagcttcattcgcattcctgattatatctccggcactcttgcagattttgatttcgaaaaaaacaaatcatctcgcccaaagtttgaaaaggtgaaaaatggcactttttccgaggagagtagaaatatcatctatcaacttttttttcatccgaatttcagagcttacaggatcccatgggaagtcgaaagtgatggtgatattaaagtaattgactga

SEQ ID NO: 141488 - DNA, 759 bp, Enterobacter cloacae
gtggctgttttcaaagtggaaaagtacgaatccataccttctatcttgctaagttcgacgcatgatatccatcagtctgaggatttagcattactgacgaatgtattatgtgttggttatccacctatccccattactgcgcatccatttcaagttgctgtaaaatccacaattagttcgttaattattatgcgaggaagtcaatatctgagttatgttatagcaacaatggctagaggaggattcagtggaggtccaattatcaatgacagaggagaagcaataggcgtagttaccgatagtctatgtcgtaacgatcaagtagtggaaacgggttttatggcatgtataagcatatcagctgctgctgagctagctttaaaatatgggtgggacccagatgaccatgaatactatcgcgatatagaatcattagctacaataaagttggcattaaccaatactgcaagattaaatccacatgcatttgatcttaaattatccgtttatgatgacaaccgcgatgtttttatagaagtgtcttgttttgatgagagtgttcgaaatttagttataagttcatttagcgtgatttgtccgctaagtataaatatgacggaaggatcttcgctaatagccacgccaatcgataatccccctcctattttgttgaagagagctgctgaagctgcacgagatatgctttgtgcgtctgggtattcattggtcagacaaaggtttacagatggatatttctaa

SEQ ID NO: 141489 - DNA, 912 bp, Enterobacter cloacae
atgtacttccctttactcagaggtaaacagttcgagtttacagcgttaagagaactatcggctattttgccaaatagcctttttaaaccagttattgagcccgtacgagaaaacacaaaacagcttgagacaactgttctctcattgaacaaaaataatattataccacttattatagtcaattctgagataggagaactcaaaggaaggacagatcaattcataaatgaactatataaaataaaaagcatctcatttatcccctgtattaaatatatagataatatccaagagtttgatagactaaatggtcttataagaggagaaaaagcatcatacgtggaaagtggtgttacccgagatttagtttctcgtttaaaattgtttacaattaatatcattccagaaggttctcctaacattgtactacagcaattatcaaatattgtcttaatggatgatcccttcaaaaagaaaaaacggaatgctgattatccatcaaattcatatttttcagatttgcatgtccgttataaagatgtccataactcagtaattggttttggtgacttcaatattgcgggttcagattatgctgaatctggaggccctgcgtacgtggtgactattcatgcaagttatttggatagtgatgaatttgatgcaatgtcagtcaagcatttttcatcagtagatgatggcaccccctcgaatccatcaggaaaattccagcaagctttagaaaagcttgtcgtgcatgatcaaacctatcccggcttctttgataacaccttaggcctgcgtgagtttaaagcacttcattcacgtagacattaccctgggcttggccaagtcaagcagttttcgatgcaacaccatattgaaacaatctgcaactacatcgcaatctag

SEQ ID NO: 141490 - DNA, 897 bp, Enterobacter cloacae
atgatgagtaataaaaatattggacaattatttacaagccaagctataaatgctgttgcagatggtgatttttcgttactccacgagttagcggcgataactttaactcctaaacttttccctgttaaggtttctgaaatattcgacatagcttttaaaaagctatctcatgaatataaatcagagtattttttcaaaaatatcatagcaaacgaagtatttttgaaaaagcataagaaaaatgaggcagtaatgctttctgagtttagagttggtacaaataaagcagattgtgtaatattaaatggattatcaacctgctatgagataaaaactgaattagataatctgaaaagattaccagaacaattagactcatatactaacttatttgataaggtctatgtcgtagcggctaagactcacatagaaaaaatcaaacttataattccagaaactgttggcatcattgaactaacagaaaaaaacaaattggatgaaataaaaccagcatcagtaatcgattcggaaattaatccaaaattaatgattggttctatgcgaattgcagagtataaacatatggcagaaaaaatatcaggtatgagaatcgacctcccaaatatggatgtatattctttttgcctagaaatattcgagaacacagactctcaaactctaagaaagtacttccgtgactcactcaagacacatagagcaaacaacattagctttattaatacgttacctagatcactaaaatcatcagcgattagttttagtatcaatcagtctcgtcagagatcgctgaccaaaatactatcaagctacattgaaaaggatgatatatgtacttccctttactcagaggtaaacagttcgagtttacagcgttaa

SEQ ID NO: 141491 - DNA, 165 bp, Enterobacter cloacae
atgctgccgcagaccaacggaatgtttatgggcaatgccagcattgtcccgcgtgattaccgtaaatatctgtatcacgcgtatctgacctatatggaggctaacggatacaggaacgtgctcagcctgaaaatgttcgggctggggctgcccatgatgctgtaa

SEQ ID NO: 141492 - DNA, 1425 bp, Enterobacter cloacae
atggtaatagggttagtttgttccgttggcacagacctagaagcaatcacaaaaaaaataagagatagattatccttatataaatttgaatgttctgaagtccggatttcatcggatgtgatagctgagctctcaggtaagggagattatacagataattaccaaagaattgatagcttaatgactaagggaaataagctaagggaagatagtgaatgtaattatatattggctcttggagcaatagctaaaattaatgagatcaggacaaagcatgcacgtttacaaataaataaaaaaggaattgcatatgttataaattcaataaaacatcctgaagaggtgtataaattaagagaggtatatggctcgggatttttactttttggtgttttttctgatgagagtcgcaggttagataatttgattcgtaataaaggaattccagaagataaagcagagttattgattgctagggatgaagatgaagagtcagggcatggtcagcataccagagatacatttcatttagctgatttctttttaaaccaagatggccgagatgataagcttaataatgatataaaaagagtctttgatttactcttcggtaatccttttattacgccaacatttgatgaatatgcaatgtatatggccttttcttcagctttgagatctgctgatttatcaagacaagttggagccgtattagcaaaaaactacgctattatgtcaactggtgctaatgatgttcctaagtctggaggtggtttatactggccatattttaatgcagagaacgaaagttatgaagactatccggaaggaagggactatgtaagaggttttgattcgaatgccaaacaaaaaagagagattatagatgatattctcaatcaaatacctagaaaatctcgtgataatttagagaaaatcctcaataacagcctgattcaagatattacggaatatggtcgtgtggtgcatgcagaaatggaagcgattttagcatgcgctagaacaaacattagcactcaagatgcttatatatattgcaccactttcccatgccacaactgcgctaagcatatcatagcttcgggaataaagagggtggtttacatagagccatacccaaaaagtaaggcttatgaatttcattcagaatcaataactaatgatgaaaaaaaccaagggaaggtgcttttcgaaccttttattggaatagggccgcgagtctattttaatctattttccattgttaatggaagtgggaataaaattaagagaaaagataaatcgggaaatgttgttaaatggactgagtctaattcgtcattaagaatatcactgttacctatttcttacttggaaagagagcagatttctgttaacttgttcgcaaagatcataggagtttaa

SEQ ID NO: 141493 - DNA, 171 bp, Enterobacter cloacae
atgtctatcgaaaatggttttattaaacatgtggttgcaactaaaaaaagaattaatgaatggccggaatggaaaaaaaatatgttaggaggagatgatttatcttccaagtcaattaaagtattaaataatcttgttttacaagaagataaaaagaatgaagagcaataa

SEQ ID NO: 141494 - DNA, 621 bp, Enterobacter cloacae
atgaacgccaatccacttatgcccggtgaaaaatacgggcacttaaccgtcaaagaacactcgcacatgctgagaggtagaaggatgtatctctgcctttgtgtgtgcggtaattcctgctatagggccgcaaatcagctcaaaaacaactcaataagcagctgcggatgcatgataggaaaaaactccactcatggccagcgcaatacccgcgtttacaggatttggagcgggatgaaaaatcgctgcacaaacccaaaaaacaaagacttcgaaaaatacagtcagcgcggtatctgcgaaagatggctgacgttcgagctatttcttgaagatatggggccacctcctacgcctaagcatcagctagatcggaagaacaatgaaggcccgtattcaaaagaaaattgcagatgggcaacggttaccaagcaggcggaaaacagaagcacatcgttttactggtttgttgatgggttgcgttttgaaagcgccggagccgccgcgaatcattttggcgtgaaatcagcaaccatccacaaatggtgtcacggctacaacaatagaggcattaacatcccgccaagagccaactgccgtaaggagaggaaatatggataa

SEQ ID NO: 141495 - DNA, 639 bp, Enterobacter cloacae
atgtctgatttgagtcatgagagactgctgcaactccttgaatatgatgaattaacaggagtgttcataaggaaggttcgcacaagcgcgagtactaagaaaggtgagcgtgctggattcaataatggtgatggatatctacgcgtcatggttgatggaaagagatatctccttcatcgcttagcttggttctatgtccataaacgttggccaaagaacgttattgaccatatcaatggagatggaagcgataacagaatctcaaatctgcgtgaggcagatcccgaacagaactccagaaattcaaggctcagggttgataataaatctggagctaagggtgctagctatcacaagagaataggcatgtggattgccacagcaagattaaacggcaaacaagtgcatcttggcgccttcaaaacaaaagaagaagccatctccgtttcgaaccaatttcgaactgagaatcacaaagaattttgcaatctgggctcagcagaagacatcaagagaaacacacgcatagccacaattgacgggctaatcgatgggtatctcaaaaaaacaggcggcaattacaaaggccttggtgccgccatcgtcgattatatctcccttctcaataagcttgaatga

SEQ ID NO: 141496 - DNA, 249 bp, Enterobacter cloacae
atgagcgatatgattcagcttgtccccaataagtgggtatcagagaaggttctgatggcgattaccggcctgaccaaaaatgcgatcagattagccagagaaacgtcatggatggagggaaaagagtaccgccattactcatgcgactgccagccgaaggacaactcccctatcctctacaaccgccacgaagtcgacaaatgggttgagcgtcagcaacccgcgattccccgcaagaaatctgcttaa

SEQ ID NO: 141497 - DNA, 231 bp, Enterobacter cloacae
atgacaattaaacagcatatcgaccctcgtacaccaatcggcagggcaacacttcgttatcgtggtcttccaacgagacacctcctctcaatgctggggatgggtactgattcatccgagcgcccttactacagtcgagacgagcttatctcaatgctggtggaccgtgatttgaataatcagttgcgtcgagcatttgcgaaactggagtctggtgagctggagtcttga

SEQ ID NO: 141498 - DNA, 1092 bp, Enterobacter cloacae
atgaacatccataaattcatcgacatgaacgaagttatcgccagcaatcatcctcttgccaaaggtaccactgacagcgtaacgcaggtcatcgtgtcacacctgaagtccggcgatgcaggtatcgacatcctgaatgcgcctaaggccgctagcgatatgtctgccagcttcctgaatgacttgaagagcaagtatcgtgtcgtgactggtcgtaactctgagggccacattgatgcatggctggcgcataagcacagcggacgccgggtgacgactaaaagcagtaaggaaggttatcgcgctgtgagcgtgaatggtcgcctgtatcaggagcaccgccttatcatggccctgttctatgatgtggcactgccgggctgggtggtcgttaatcacgctgtgtcctgcaccatttggaacgaaggcaaatcaaaccatccgttcaacctccgattaacgacatcatatggtaaccagcttgataagaaggtccgcgaaggtgttcgcaataagttcaccgggtaccacttcgatgaatatcgtggcaagtggcgcgtccagatgaagctgcctttcgctggtggtccgcagcatttcggcatgtacgacaccgaagctgaggcctacattgtccgctgcgctgtcctccaccagcattttggtgcgttctgggcgatgaccaccggggaatccggtctcgtgccccgagtcaaacctgacggttctctggtactgcctactgagcatggttacgactgggcggaaaacctgccttatcctgaggactgggacgacgagttcaaggcccggctggaggagatgaagctgtactgggacgcatatcatgtgttcggtattgaagacgaagaatacttcggcgactgtgtgtcagggcttgatgtgaacgcagtagtgttcaacggcgtgcctgccattatcaacatcacagagggactcccggtgtcatatgctcactggttcggaccaagccaacgcttcgagttcaccaactactaccagcgctgcattcacgcctgtgaccttgatgcggaacctgaagatgagggctggatggagaacgatttctga

SEQ ID NO: 141499 - DNA, 918 bp, Enterobacter cloacae
gtgtcccgcagcaagacggcaattgaaaaaccgggccgtgagtacctcaagcgcctgaaagaggctgtgcgtccggctgaggcagaaattaagcgattcgttgatgcctgtgacgagttgcgcgatgcgacccgccgcccactcaccgaatgggaagccgagcaggaacgcatcaaggctgaggaagccatgaacgcgctgcacgccgaagcgctggagatgaacgaagagtttaaccgccagctcgccgcgaagatcgaagcagaccacgaaatggctctgctgatgaacaaggatttcgaccgtgaccgcgaagaacagcgccgactggcggaacaagctcagcgtgagcgtgatgaaaagatccagcgagaagccgctgaaaaagccactcgtgatgctgaagaaaaagccaaccgtgaacgccagcagcaccaggatgcacttagtgagatcagcggaattcagcagcaggtgatcattgctcagtcgggtcgtttaggtgttcgccagggtggaacaatccagtgcattaaagaaacgctagctgaaactgaggcgtggcctatcgatgggcgctttggctcattaatgggtgcagctgaaaatgccaagcagcaagcaattgcgcagatcaaacaactcctaattaacgctgagactaatcaaaagcagcaagaagaaaatgaccgcattcttcgcgaggctgaagcaaaagaaaaaaatcgtctggccgaagagaagcgcaaagccgacgagcaagccaagcgcgaagctgacgtgaagcatcgcaagacggtcggaactaacatcgttaacgcgctcaccagcaacaccagcttaacccgcgagcaggctatcgaagtgcttaccgctctgaaagatgacctcatcccttgcgcgaaaattcattactga

SEQ ID NO: 141500 - DNA, 159 bp, Enterobacter cloacae
atgacggcggcagaacggtgggatgaagagtcattcctgcgccttatgcgcgacgtgctgccggaaaagccggagaacgacgacgagccggttaacctggctgccgagcggcagaacccggtgatcagctgggcagaatttgcaggagatttcacatga

SEQ ID NO: 141501 - DNA, 726 bp, Enterobacter cloacae
atgaacctgaatctgttagacgagccattcgccactgatgatatcgagtggcgaattcagcaagccggcaaaagtggtaacaagatttgggccaaggtgctggcctacgtcaccaatcgggcaatcatgaagcggctggatgaagtatgcggtaaagctggctggcgtaacgaatatcgcgacattccgaataacggcggggttgagtgcggcatttccatcaaggtggatggggagtggatcactaaatgggatgcagctgaaaacacccaggtggaagcggttaaaggtgggaggtcaggggcgatgaaacgtgctgctgtccagtgggggatcggacgttatctctacaacttggatgaaggcttcgccattgtctcggcggaacgagcgcctggattccactatgccaagtcaaaagaagttggagtgttttactggaaaccccctgtcctgccagcctgggcattacctgccgggtcggtgcatgagcagagcgaaccacagcccgcagagcaaacaaacgagccagagtcacctcaaagcgtggatgcggacaagatactagccgcgttctcttcctacgccaatcacgaaacggacatcaagaagttaactgagcagtacagaaagacctgggcggagcttagtggctatgtagagcaccaggaaaaatgcaaagacgtcactggcatcagacgttcagaacttacacaggcggcataa

SEQ ID NO: 141502 - DNA, 1131 bp, Enterobacter cloacae
atgagctatcaacttcacgtcgggcgctgcgaggacgtcctgaaaacgctgccggataactcagtggactccatcgtgactgatccaccgtacgggctgagcttcatgaaccacaaatgggattacgacgtcccgactgtagaacagtggcaggaatgcctgcgcgttctcaagcctggcggccatcttctggcgttcggcggctcacgaacctatcaccgccttgtcgttaacgttgagaatgccggcttcgaaatccgcgaccaaatcctctggatttacggcagcggcttccccaagtcgcataacctcgatggcgattttgatggctggggtaccgcattgaaaccagcccatgagccaatcgtcatggcgcgcaaacctttcaaaaaaacggtgtcatcgaacatggctgagcacggtaccggggcgatcaatatcaatgcctgccgcatccctaccgacgaggcgctaaatggcggtgctggcggtctgctttcacaccagcgtgatggtaccgaacctgttgctgattatgagcaggcacctgagggacgctggccagcaaacataattcacgacggaagcgatgttgtagtgtcagcgtttccggatgctaaaggccaacaaggggcgcttaccggcaatgagcccagctcgaaaatgggtgcggcgaattgctatgggcaaatggaccggcggcacgagtcaactccacgcattgatagcagcaagagcgccgcaaggttcttctactgcgcaaaagtgaaaccgaaggagcgcgacgaaggactcgagagatttattgcgacgtcagccagcgaaatgaccggcggacgcaaggaaggtagcgtcggcattaacgatccgcgcgccggtgccgggcgtaccagtggtgcgaagaacaatcaccccaccgttaagccgatcgctctgatgagttatctctgcaggctgattactccgcctggcggtaccgtgcttgatccgtggatgggaagcggtagcacaggccgggcagccatcgaggaagggtttaacttcatcggcatcgacctgaacccggattacgtgaccattgcttctgcgcgaattgctcactccttcaaaaagacgacggaggccgcatga

SEQ ID NO: 141503 - DNA, 342 bp, Enterobacter cloacae
gtgatcggaatactcaagccggtaccggaatcgcagtggccggtacgatgccacgaccccaagcggagcaacgtgtgggctaactcttactttctggttcaggagtttcaggaagacgacggtgtcatccgcctaacggtgaacaccaccagcattggctgctcgggtcggtggaaggatggcatcagctgggatgcattgcaggagataaagtcagccgttggctatggggatcgggatgccgtggagatttacccgcgggattctgatgtggtgaacgtggcgaacatgcgccacctgtggattacgccggagccgattgccttcgcctggcgcaaataa

SEQ ID NO: 141504 - DNA, 171 bp, Enterobacter cloacae
atgctaaagccattaattgaaatctttcttttcccaatctacacaatactagtattgatgtttatgattctcacagtactagcacttccactaaagataccatttgtagaacgtcacgtaagacaacacataaataaaagtactgataaattacgaaagaaaaagtcctaa

SEQ ID NO: 141505 - DNA, 177 bp, Enterobacter cloacae
atgaaccctttttcaggcggcagccgttacgtatctgggatacgtaacggcgcgatgtcttacgtaaaaaatgacgtaacggctttcgccgccgcagctaaaggggcggtaagtccgggtgtgcacatcgtcattttctcctgtgatgcctttctcctgcgtatcagcttccggtaa

SEQ ID NO: 141506 - DNA, 288 bp, Enterobacter cloacae
atgccaacggagtatgagtgggatagcgataaggcgaaaagtaaccagcaaaaacatggcatacgctttgaggatgcggttctggttttcgacgatccttatcatttgtctgttcaggatcgctatgagaacggtgagtttcgctggcaaaccatcggccttgtgcaaggcgtcattgttatcctggtcgcacatacggtacgtttcgaaagcggaggcgaaattattcgtatcattagcgcacgtaaggcggaccgtaaagagaggaaccgttatgagcatcgttaa

SEQ ID NO: 141507 - DNA, 954 bp, Enterobacter cloacae
atgaccccgattgccgtcaccctgttgaccggtttcctcggcgccggtaaaaccaccctgctgcgccacattctcaacgcgcagcacggtttcaaaatcgccgtgatcgaaaacgagttcggcgaagtctccgttgacgaccagctgattggcgatcgcgccacgcagatcaaaaccctgaccaacggctgcatctgctgtacccgctctaacgaactggaagatgccctgctggacctgctcgacagccgcgatcgtggggacatccactttgaccgcctggtgattgaatgcaccggcatggccgaccccggcccgattattcagacctttttctcacatgacatcctttgccagcgctacctgctggacggcgtgattgccctggtcgacgcggttcacgccgacgatcagatgaaccagttcaccatcgcccagtctcaggtgggctacgccgaccgcatcctgctgaccaaaaccgacgtggcgggcgagagcgttaaactgcgcgagcgcctggcacgcatcaacgcccgcgcaccggtatacaccgtgacgcacggcgatatcgacctgtctcagctgttcaacaccaacggttttatgctggaagagcatgtcacctcaaaaccgcgttttcactttatggcggataagcagaacgacgtggcgtcgattgtggtggagctggattacccggtagacatcagcgaggtctcccgcgtgatggagaacctgctgctgtcgtttgccgataaactgctgcgctacaaaggcatgctgtggatcgacggcgaaccaaaccgcctgctgttccagggcgtacagcggctgtacagcgcggactgggacagaccctggggcgacgagccgccgcgcagcgtgatggtgtttattggcatccagctgccggaagaggaaattcgggcggcgtttgcgggtctgaagagataa

SEQ ID NO: 141508 - DNA, 864 bp, Enterobacter cloacae
atgaagggcattattctagcgggcggttctgggtcgcgtctgcatcctattacattgggaacttcaaaacagttattacctatttatgataagccaatgatttattatccattgtcagtattgatgctggccgggatccgtgacattttgttgattacgacaccggaggatcaggctagtttcaagcgtattcttggcaatggtaaacaattcggtattaatttacagtatcaggtacaaccaacaccagatggattggcgcaggcatttatcctgggtgaagaatttattggcgaagatagcgtctgtttggtccttggtgataatattttctttggccagtcttttggtaagcaactcaaacatgcggttgagaatcttaatggtgcaacggtgtttggttacaaagttatggatccagaacgttttggggtcgttgagtttgatgaagactttaatgctatatctattgaagagaaacctaaagtacctaaatcaaactgggctgtaaccgggctctatttttatgataatcgcgtagtagatattgcgaagaaagtacaaccttctgagcgtggcgagcttgaaataacgagtatcaaccaaaaatatctggaaatgggtgagttgaaggttgagcagttaggtcgtggctttgcgtggctggatactggtacacatgactcattacttgaagcatcacaatttgtgcaaactgttgagaaacgacaagggtttaaaattgcatgtttagaagaaattgcatataaccaaggatggttagataaagaaatgatcaaatccattggaaaatctttatcaaaaaccggatacggtagttacttgttaaaccttgtcaaataa

SEQ ID NO: 141509 - DNA, 552 bp, Enterobacter cloacae
atgaaagttattaatacaaagctagacggtgtactaattattgaaccgcgtatttttggtgatgagcgcggttttttctatgagactttccatgcacaacgttacaaagaatttggtataaaggaaaactttgtgcaggataaccgttctcgttcaacaggaggtgtgttacgaggacttcatttccaaaaaagaaaaccacaaggtaaattggtaacagtaactcagggggaagtttttgatgtggcggttgatctccgtcctaactcttcgacatttggcaaatatgaatctattgtattaactggagaaaataaaattcagttttacataccacctggatttgcgcatggtttttgcgtattaagcgatagtgctgattttcagtataaatgtacagatttctatgacccatccgatgaaggtggattaatttggaatgataagaccgttgatattaactggcctattgaagagccaaaattatcagataaagataaaatacttccttcattagaacaaatagctaaaaatcttaaggaagggtggtga

SEQ ID NO: 141510 - DNA, 720 bp, Enterobacter cloacae
  misc_feature (698)..(707): n is a, c, g, or t
atgtctcattatacagtaataggtggacgcgggttcattggtaacgaaatcgttgaacaactaagacagttagaacacgatgtctgggtaccacagcgagatgaggaaactctctttacaaaagacttgggcaccgttatttactgtgctgggaacggtgattgtcaaaattcacccttcagtgtttttcaggccaactgtgctcttcttgcagatattttgcagcattcgatttttaagcgcttagtatacatgtcgtctacacgcgtatatatgaatggtagtaacacgctagaagatagcgacttggttgttagtgaagatgattcccgtcggttatttaatataacgaagttagtatcagaagagttatgtcttaaaagcggtaaagatatagttattgtaagaccaagcaatgtctatggagtagcattgaacagtccgctattcttaccatcaattacacgtaatgcaattaataatggccacatagatatgttcattgatcgtcattatgaaaaagattatgtgtctgttgaggatgtggcatcagcttgtatcaagttatctcaaaataagaatgcctctggcaatatttataatatagccgctggatataatatttctgcagaacagatcgcgaatttgctaacgcaatccacaaattgtaccgtaacatggcatgaacgagccttccnnnnnnnnnntcttccctgttaa

SEQ ID NO: 141511 - DNA, 369 bp, Enterobacter cloacae
atgaaaaaaagaaatttcagcgcagagtttaaacgcgaatccgctcaactggtcgttgaccagaactataccgtggcagatgcagccagcgctatggatgtcggcctttccacaatgacgcgatgggtgaaacaattacgtgatgagcggcagggaaaaacaccaaaagcctcccccattaccccggaacaaattgaaatccgtgagctcagaaaaaagctacaacgtattgaaatggaaaatgaaatattaaaaaaggctactgtagattcaattggtcaacgcaacagttatgtgaaaacatggggttgcggaggttttttgaatgagacgaacatttacagcagaggaaaaagcctctgtttttga

SEQ ID NO: 141512 - DNA, 999 bp, Enterobacter cloacae
ttgagtaacttacgcgaataccagaatcgtattgcagatatcgcaaaacgctctaaagccgttcttggctgggcaagtacagcacagttcggtactgataaccaattcatcaaagatgatgccgcgcgtgccgcatctatccttgaagctgcacgtaaagacccaatttttgcgggtatctctgataatgccaccgctcaaattgctaccgcgtgggcaagtgcactggctgactacgccgcagcacataaatctatgccgcgtccggaaattctggcctcctgccaccagacgctggaaaactgcctgattgagtccacccgcaatagcatggatgccactaataaagcgatgctggaatccgtcgcagcagagatgatgagcgtttctgacggtgttatgcgtctgcctttattcctcgcgatgatcctgcctgttcagttgggggcagctaccgctgatgcgtgtaccttcattccggttacgcgtgaccagtccgacatctatgaagtctttaacgtggcaggttcctcttttggttcttatgctgctggtgatgttctggacatgcaatccgtcggtgtgtacagccagttacgccgccgctatgtgctggtggcaagctccgatggcaccagcaaaaccgcaaccttcaagatggaagacttcgaaggccagaatgtaccaatccgaaaaggtcgcactaacatctacgttaaccgtattaagtctgttgttgataacggttccggcagcctacttcactcgtttactaatgctgctggtgagcaaatcactgttacctgctctctgaactacaacattggtcagattgccctgtcgttctccaaagcgccggataaaggcactgagatcgcaattgagacggaaatcaatattgaagccgctcctgagctgatcccgctgatcaaccacgaaatgaagaaatacaccctgttcccaagtcagttcgttatcgcggctgagcacacggtatag

SEQ ID NO: 141513 - DNA, 738 bp, Enterobacter cloacae
atgctgaaaagtatcacgttgagccgcagcgcaaccgggaaatactacgcgtcgttactctgtgacgatgggatggaagcgccggcaaagcccgcattgatatcaaatgtgacagggctggatatggggctggcgcattttgtcatcaaatcggacggcaataaaattgccagtccccgccacctaatcaatgcaagtcgcaacctgcgccggaagcagaaagcactgtcccgtaagaaaaaagggagcgcaaacaggcgcaaagccagaatacaacttgcagccgttcacgaacgggtagccagtgcccgtgccgatttccagcacaagttatctcgcgcaattgttgacgaaaaccaagcggtaattgtcgagacattgaaaacggcaaatatgatgaaaaatcaccatctggctcgtgcgataggcgatgctggatggtctggattcatcacaaaactggaatacaaagcaacagagaaaggtgtgcatctggtgaaactggatcaatggttcgccagttcgaaaacctgccactgctgcggtcacaaaatgtcggagatgccattacataagcgcatctggcagtgtccagagtgtggagttgaacatgaccgcgatatcaatgcggcgctcaacatcaaacgcaagggcatactggaattacaagcggcggggctcgtcgtttctgcccatggaggccagcgtaaatccgtcacacagacggttgcggcttaa

SEQ ID NO: 141514 - DNA, 456 bp, Enterobacter cloacae
ttgtttgctgatgaagagtttgatcgggacattacccgtttaattctgaatggcgataagattgcagacgaagtctgtgtcagtatcctgaactggctctgggaaaaagatgaagccctgctctctgaggcaccactcctcagccagcaagccctgatcaggttctccaccaaaataaccgatgaccggcagaagcagatactgctgatgcaatgccttaaaaatgacaaagtgtcgcaccagttcatcagacagatgctcttgacgttcgggcatcaggattatgctgctttcctcatagagaggagttatcgtagcattccctggagtgatgccatgtggcaactagctgtccagctgggaaatagtggatttatcaggccgccgaaactcactcacgatgatacacgtatccgcatagagcccttttttaacgctgaaaatgaatacgactga

SEQ ID NO: 141515 - DNA, 1083 bp, Enterobacter cloacae
atgctcagccagcttaacctgcgttttcataaaaagctgatcgaggcactgaaagtgcgtgccggtcgcgaaaatacttcggtcaacgccctggccgaacgcttcctcgataacggactgaaaacggtcgcgcccggcgacgggtatttccagctgatcgccgaccctgaaagcacgatccggcagctgtaccgcaagatcgtcgtcggcatgtccttcgagccagtctcccgggacgaactgcggttcatgctggtcagcgcccgacagggtttcctgcgcggacgtcaccgcctggtcacccggccggcgctcagcacgctgctgcagatcgtccaggaactgctgacctggcaggtggaacaggacagggtgcgggacgaacattatttgcggggaacctaccggctgcgcgacggggatctgctggcagactatgaccggtttctgaccggactgcgcccggtcatcgaccacgccaccgccgagcagctgctgcgcccgctggaaagtggctgtctggaactgacagattttccggattccgtgctggcagggagtttcactctggccagactgagggaggtttttccgctggtgctgtgcggactggagcggaccgagacccaggtcgaggccctggtgcaggagctgcgcccgctcatcccggccgtgacggaaactattgcagccggtacgttgcgcctcgatattcagattgacggactccagcctgggcagcgtcctggcgcgctgtacaggacaccgaaactacatatgatcctgaccgggcaggagtttgtgttcccctgcggctgggcggcattctctgaactgctgggcctcctcactctgtacacccgtcacccggaagccctgcagcatggtcatcagggggagcgggtgatgttctctccgccggggagcgtaaccaaagagggttttttcgggatcgacggcctgcggatttttttgccggcggaggcctttgatgtgctggtccgggagctcaccacgcggtgtaatgaaggctcgctggcggaggccctgaccgggctgcgctgcctgtacggggatgtctga

SEQ ID NO: 141516 - DNA, 684 bp, Enterobacter cloacae
atggcggacggaatttcagtctgggtaccggtgatctccacgttatcgggagggatactgaccggaagcattgcccttctggtgagccggttgaatcatcgttacgctggcgaacgtgaggctttagcggctgcagaacggcatcgccacgagctaaagattgctcaggaattactggataaagaacgtttattcatagcaactgagttgattttcttactggaacaattcgcggaaggctgcgctcgtatggccacagactgcggcgagcctgatccgcagggtgtatacactccaacggaaaatcttccggagctgataatcaagaatatttcgggtgactggcgggcactcccccccccgattatgtaccggatccatgaacttccggtacttcagaatgaagtccggagacatctcgcggcttattatgagcagtactgggagcctccctatctctccccatattatcgggaacgtcagttccattatgcccgtctggggataaaggccgttattctggcccagagactgcgaaaactcgtcggtctgcctggaacccgcctcgatgcaacggaatggtctgcacaactcgtcctctctagggtgtggcggaaaaaacgtaaagaaagaaccgaagctaaaattcgtcgtctgcgtaaaaagactggggagaattcatga

SEQ ID NO: 141517 - DNA, 924 bp, Enterobacter cloacae
atgataagaaaacaaaatatcagcaatgcccaacagatgattgaagggcattggaaatttttagaacgtaatacgggtttagttaatgacaataaaacagatcattttgtactaaacccacaaaacgttttagcaaacaacaggcactttatagcggaaacaggctgggaggcacaaccggacggtgacgcaaccacagaaggacaatccttagcaattcttggtgctatctatgcgtatcaggcaaccaaagaacagtactatctacaacgtgctaaagactttttcaacgcctatcatttggcgttctttcgtggggtagcgtttcccgatccacctaatggttcattacgttgtaattggatctgtaatggcaaagctccagtactggcacattacccattagatccagagtatccaactcatggcgggttcaagggcgtcttgttcacatggacgaacggacaaacacagatacctcatggttcacctaactacggtgaatacctcgatgcggtatggtttgcctttccagaaagggcgggtcttggttggaaccaggttaacgcaactgcctacgcatggttagccagtgaagatagcattgattgggatactaaagcccctacctatgatgttgattggattgttgaccgtacaggccgaaaggtagatagcaatggtgatgtactggcagaagggctaacaagccagatcggtacagtccagctcaaagacacgtctataaacggcaattaccgattcaactacgccacgaagaatcctgtatcagaggggggctatctcatggggcgtaatgagcgttggcacaacaggccagtaaacgtacctattgataactatggtactctacactatcctcttcgtcggcagcgtcagatgtgtataagagacagattctga

SEQ ID NO: 141518 - DNA, 744 bp, Enterobacter cloacae
atggctgactgccctaactcgaacgagcgcctgttcggcggtgcgatcgtgctggaggtcgctgacggctgccctgatgttaaacctgaagaatcagagtggaaatctctggctgctggaacatcaaagggcttcgacttcaacccaaactcggtaacatctgatgcggatgacggcggcggctatgtcgaaaccatcatcaccaacagcgatttcacgattagtttcgaaggtgaggtccgtaaaaaggacaagcttgaccagtacgggatcggaaagttcatcacgtattttgctgcacagcttaaggcgaaaaagcagccaggcatttgggtgcggatggattacggcccggtggagtttatcggctacatgaccgttaatgccctgagctctgacggtggaaccaacgacatcgtaacgttctcaactgagttcaaagtcggcgacgcgagtaccatcgaagttaacgaactgaccgcagtagcggtgactggcgtgacagtaaccccgacaaccagcacaggtacggctggcggtaccagcaccttcacggtgaatatcgcaccaaccggcgctaccaacaaagatttcactgtggcgactaccgatgcgactaaagcaactgctaccgcctccggcaacaccgttaccgtgacgcgtgtcgccaccggcagcgcgcagatcatcatcaacaccgaagacggcaactttgtggccgtgcatacggttaccgttacctaa

SEQ ID NO: 141519 - DNA, 1479 bp, Enterobacter cloacae
atgacgactgctgagcaaagggcatttgcccgtaaggttgaatgcgaagaggacgggctctattacgctcgctacttcttcaagcagcgcaccggcggaaagatgatagtcgcgcctcaccacaaggtgattcagcaaacgctggaccgcgtcattgatggtgagattcaacgcctgatcatcaacgttccgcctggctacacgaaaacggaactggcgaccatcaatatgatgggccgagggctggcgctgaactgccgggcccgtttcatgcacctgtcctattcgcataacctggcgctgctgaactcatccactgcgcgcggcatgattaagtcgcaagcatatcagtcaatgtggccgatggcgctgcgcgatgatgctgacagcaaggcgatgtggtggaccgaacacggtggcggcgtttatgcatcgtcagctgccgggcaggttaccggttttcgtgccggacacatggagccaggctggcagggcgcgctgattatcgatgacccggttaagccagatgatgcttactcagagatcgttcgcgacggcgttaacaaccgctttaacgagacaatcaaatcacgactggcgatcgaaacgacgccgatgattgtcatcatgcagcggatccattatcacgacctgagcggctatcttctgcggggcgggagtggtgagaaatggcatcatctgaatctgccggtgattatcgacaatagtcagccatatgctgctcagtaccctgaaaacacccacgccataccgattgaccacggactgcctgatggctggctgtggccgttcaagcacaatgaatcgcaccgcgtatcgctgttctctcacagacgcactgccgaagcgcagtatatgcagaagcctcgcaggtttaatgcagaaggcgctctgtggacagaggcgatgataagcgcggcacgcgagctccaaattcaccacgataaggttcgtactgtcgtggcgattgacccacaggcaacaaacagcgatgaaagcgatgaaacaggcattgtcgctgccagctcatatggtgccggtgacaaaaagcagttctctgtggatggcgattacagcggcaaatattcaccagctggatgggccaagaaagccatatcggcttatgagcaacacgaagcagacgcgatagtcattgagacgaaccagggcggcgacatggcggaggagacactccgcaatgccgggttcaaaggtcgcatcattcgtgtccatgccagcaaagggaagtatgcacgagctgaaccgatatccgcgttgtacgagcagggccgggtggcaaatcacggaaatctctacgtcttggagaaccagttgatggagtacatccctgccaccgcgaagaaatcacctgaccgcctcgacgcgatggtttacgcactgactgaactgaatggatcgcaacctgtggggatgatgattccgaaacgccttcgctaa

SEQ ID NO: 141520 - DNA, 288 bp, Enterobacter cloacae
atggatgaagagtatcgtaaagacctgcaattgtggtttggcctgtcacatgccgctttttgcgtgttgccccgagtttttatggaggcaatgccagaggaatggcaagaaaagatggctcaactgctttttgaatacgacgacacaattaaaacgaatgcctgtgggattcatagctgttttgttactgccaaagacagcaacaaccgcttcatgaagatgccagaagatattctgaattatcgtcatccccggtatgagtttatcgaatccttcctgaagaagtag

SEQ ID NO: 141521 - DNA, 279 bp, Enterobacter cloacae
atggcaggtgagctgacagcattcattaatgcgtttatctgcgcggtaatcgtcgtcgtattgatgttttaccagcgccacggtgcccggcatcgtcctttcgtttcgttcctggcatatgtgaccgtgctggtttatgccgcgatccctttgcagtatatcttcggcctgtaccacgactcgcactggctggtggtgctggcaaacctcctgctatgcgcagctgttatgaaggtccggggaaatctggctcgtctggttgatcatctgaggtactaa

SEQ ID NO: 141522 - DNA, 231 bp, Enterobacter cloacae
atggaaaacgaacttctttcctggcgtcgtgcttccactaaagaagagtggcacgctttggcagttaagagcggtacatcaacaggatatttgaatcttattgcctacggatacagaaatgcgtcaccaaaacttgcaacttctattgaagcagcaagtagaacttttgtgggtaaaaaacccctcaagcgagaaatgcttgttttcccacgtccgggcaatgaggtgtga

SEQ ID NO: 141523 - DNA, 639 bp, Enterobacter cloacae
atgtgtaaacgaattgatggggagattatccggggcgtcattaacgaccctcgcctcttctcaggaatcgaacgtgtcagaagcggcagagttcagatgtttggaaagcggattgtccagggtggaaagtgcatccaggaatgcgactttgaaatcacgccaccagaaaggagttggtactcaaaggaaattgatggggtttggcattgggttgagggttgtgatcattgcaatggctcacctattaaatgggcctatgttcgctgtgacaagcatgatgtctgcgttgattgcggtgtagatagagagcgcgcagctaaatctccaggcattgatggaattggtgctgtttggggttgcagtgacggatggcgttgcaatgactgtcaggaacaaattaacaaaaagcgtcttgcagaagcagaggcgcggatcgttcctgatgatgaatatgatgagatggatttttggcacgaagatgaggctcgctgcccatggtgtaaggctgaaatttccaccgatgaatcatacgacgcctgccaagaagagcatcaatgccatgagtgcgagcgccacttcaaactgacggctgagcactccgtgacctggacaacaattcgagcaatcaaagccgcctaa

SEQ ID NO: 141524 - DNA, 198 bp, Enterobacter cloacae
atggatttggatgaagaaagagtgaacatgatggttcacgccatggtgcgggcggtgatggaattgtcactggctgatttacccatgacccagcaaaacatcatcgacaagctggagcagtaccggaaggaaacaggaaacgtgatagggaagggagtgaacagggatgcggcggagttggtgcggaagggtaaataa

SEQ ID NO: 141525 - DNA, 696 bp, Enterobacter cloacae
atgtcaggaataatcaatacgggcaatatcctgaagatgacaagccgcgaaatcgctgaattgaccggcaaaaatcacgctcatgttatgcgtgatatcgatgtgatgttagaacaactcggagagcgtgctgaggggtatatccagacttgggtacacccccagaacggtcaggaatatcgtgaatattctcttgaccgtgagcataccgaatgcctggtaaccggatacagcgcgctgcttcgcatgaaggtgatacgtcgccttcacgaacttgaagaacaatctcgccctctgcttccgcagacactacctgaagcgctgcgcctggccgcagatttggctgaagaaaagcttcagcttgagaatcaactttccattgcggcgccgaaggttcagttcgttgacaactacgttaatgcatcgggttcgctcggatttcgcgagacctgcaaacttctgcacatcaaagaaaacctctttcgtcagttcctgctggataacgaaatcatgtatctgctggccgggaagctgacgccgtacgcgcagcacattgacgcagggcggttcactgtgaaaacaggtgaaaaccagcttaacggccatgcgtttactcagaacaaattcacacctaaaggcatccagtggatcgccgggttatgggccgctcagcaggttaaggagcgtgcagcatga

SEQ ID NO: 141526 - DNA, 690 bp, Enterobacter cloacae
atgaaatctcttgcagagcagatgcacgatttcgaccgcgagcagatgagccgcgtcgccaacaacctgcctgagcagtaccaggagcgcgcaccggtagagcaggtggcccaggtattcaatggcctgttcaaccaactgcgcgccgcgttcccggccagcatggcgaacttccgcacccaggacgacctgaacgaattccgccgtcagtggctgctggcgtttcaagagaacgggatccactcaatggcgcaagtcgatgccggtatgcgcattgcccgccgccaggagcgcccattcctgccgtcgccgggccagttcgtcgcctggtgcaagcagagcggcggcgcgctgggcgtcaacgttgaccaggtgatcgccgaatactgggactggcgtaaccgttcgtttgaattcacctccagtgagcatttcccctggtcgcagcctgtcatgtaccacatctgcgtcgagttgcgccaccgcagcacagagcgccagttaacgcatggtgagctggcacgcgaagcgggcgatctgctggatatgtgggaaaagcgcgttaccgagggtaagcctgtgccgccggtacgccgggcaattgcagcaccggctgccgagcacgggccgacgccgatccaactgcttcaggccaagtacaaccgcaacaagtcgaacgggatggtgtga

SEQ ID NO: 141527 - DNA, 282 bp, Enterobacter cloacae
atggctaaatttacagaagtacacgacctgttaacggcttatcaaaaacaggctcgcaaagtacctgcaaagggggtttatgcctcaaagcagcgtcaggctgaggtccaagcggctcatacacgtaagataattcgccagcgtcggcggtcagtcggcaagtcaaataagctcggctgtcgctttacggcagaaatgcgcgtggcactgatttgcgaaatgaatttttgggccctggtgtgtcgttcaaaccgtaagaattccatccagggtgaggactaa

SEQ ID NO: 141528 - DNA, 549 bp, Enterobacter cloacae
atgagtttttttcttaaatcattagccgcaggtgtttttacgatagccagcttcagtgttggggctacaactgctcctgttttagacacaacgccacagatggcctatgaggatatctctcgctccttaactgaattgcagccgattacgtttcagtctggagtggaaaaatataaaatattagtttttgtagataatcaatgtgtttattgcagctatgttgtaaaaaacatcaagaaatacactgatgcagggttgactatgtcatttctgacggtggttccatcatccatcaaagactcagtcattgaagatatgggacgagtatggtgtgcatcagatcgtcagaaaagttttcaaaatgcgatggccggttttttgccagacaatgatagctcagaaaaatgtaaaaatctggtgattaaacaatctgaacttgctgatagactgggcgttacagtaactcctgctatggtagtgctggggccgtctgtgcatactttcctgggtagtgtttctccagataaaattctctctgaactccagtaa

SEQ ID NO: 141529 - DNA, 351 bp, Enterobacter cloacae; identical to SEQ ID NO: 102281

SEQ ID NO: 141530 - DNA, 300 bp, Enterobacter cloacae; identical to SEQ ID NO: 102280

SEQ ID NO: 141531 - DNA, 3390 bp, Enterobacter cloacae
atgagaggaacattactaacggaagttctaataccggaacccggtactgacaatgctcaggaagaacagatacatatcgcttatgaacctctgactccctcagtcattgatgatgaaaaagcgcaaagctatattgaagcattgaattttgcctgttctcgcccggatatcagaaatattgcggtaacaggcccatacggggcaggtaaaagttcggtattactgacatgggaaaagtctgaggataatgattatcgggtgatgaccgtatctcttgccgactttgaaatgcagcgcgcatcccccggagatgcttatgtgggtgagagcaaacctgacagtgatggtcacgataaaaaatcgaccaaagctgaagagaaaacaatcgagtacagcatcctgcaacagctgctctacaaagagaaaaaaagcgtcttgccgtattcccgtctggagcgcatttctgatgtaagtacgtgccagatagccatgatggccgccaatttgttattcatactggctttgacggtcaccggcctactttttcttttccctgattacatctgcacgaagctttccatgccgccagagttgagtcggtttctcctggctttgcctgtactgggaagggctagcggcgcagggatatttctttttactgccttatttcttgtactgaagaaactgcaccatacaggggtgtttgatcggcgcgtcagcattgacaaggtggacgttctgaaaggagcgatttcaacacgccctgcagccccctctcttcttaatgtatacattgatgaaatcgtctactttttcgaacagactcaatacaatgtggttatatttgaggatcttgaccgtcataacgatggggccatcttcatcaaactccgtgaaattaatcagcttatcaataactctcttccctcagacaaaccggtcagatttatctacgctgtaagagataatctgttcagcacgccagaatcgcggacaaaattttttgatttcgtcatgccggtgatcccggtgatggacagtgagaatgcttccgaacatttttttggcaaatttacacccgatgaactgagtcagagtgggttcaaagattgccttgccagactggctctgtttattcctgatatgcgggtgatgcataacattgcgaacgaatttcgtctttaccggaatattgtgagtaatggagaggatctaaagcggcttatttcccttatcgcttataaaaatctttgcgcggaagattatcacaggatagaccagaaaaaagggctgctttttggcattgtttccgagtatacatcgggtaatttaagaactgagttttgcgacgaaatgaatattcaattagaggagtatctatctgagctaacacaacttcagaatgaacgaatggtcaatgaacacggattaaggagtgagattctgcgcccttatattagtgaagaaacaggacccatgttgcactttgtaactgatattggatcacaatacaatattgaagatgttattggtaatgaatcttcatttctttctttgctcaatggtaatgtgaccattaaaccacgaatatataattttgctattgccacaataaataaaacagttgccaatatgctaaaagaagagtatcaagaaagatatgcctttattcaaaaaaaaacaaatggagagatttttcgtttagaggaaactatcaagaaaattaaatatgacattcagaatacattctcatatgatcttgctttttttatcaaaaatatggggagagttggcttcgaaaaacggtttgcaggcagtgacatatccgttcatcacgaaggtgtgacctctgctgataattccagcaaccttgatttcatttttttccttttatctcacggctatctttcaactgactatatggcctaccgttctgtatttatgccgggcagcctgagcacggaagacaataactttatcagggcggtgacgtcaggaagaagcccagatgaaacggcaaaaatgcctatcagtaatattgctaacactgtcgtaaaattgcgtaacctaggcatgctgatgcatgacaatgcatggcattctcagcttctcaggcatcttctgtataatgataacatttccatgaagactatcatgcaaatgcagttagaggccggagccgagcagcgcatgatcaggctggccaaggagatcttccctcgctgggacaccaccacgcagctgaaatacatcaggttgatggtcgacggagatggccatttgtccagtatgatccaccagattggtagcctgagggataacgaagctgaacaaacgctactgccgttattactgtccttatcggctttgccctggagcaccgtatctcaggcaactcgggaagcgctacagcggctcattgatttacaatctaatctcgtcgcgtccttaccagataattgtgcgcagcatttctgtgaaaatctgcgggattcaggctgtcttctgactaacattcctttggttcggagcccatctggccagcagacgctgcatttggtagcacaggaaaaattgtggtcctattccgccttcaatctgcaaagcctctgtttctcacttactcatgagtcagagaataacagcgatatcttccgcaagaggccggtatcaacgataaggtcgctttgcgttccagcactggaaaaatatgtgaatgaaaatatatcatcatttatccgtgatattttcattcattctgaagaggatgaaatcattcctgagttccttaatgcgacttttgttgactgggaggatgcaaagtacctgacagaaagtatgagcttcatgctagaagatgtttcggttatcctgaacaaagagaatacagaaaccacagaactttattacgagcaaaatctgcattcacttctggcacattataatcatataaccccaacatgggataatatgttattcctgcttgataatagtgtatctattgctggcgatactttttgtgaatggctaaatattcattactcattactgccagatgaaacattgccattgaccgacgttcagctttcacaattacttataaaaacggtatcgtcagcaatcatcagtaaagcagcgtttgtcgtggtcactcaaacattcaggctatctcttattcaattacctgataacttactgattaacaatgctgcagttctgatggagcagaaatggctggcaccaaccagcaccgtatttgaacaactttatcaggcactgcacgaagacggtgataaactgacaccactgctttacgcgcttatctgtgcccgtcctgtattattaagtgagaattacgagcttgttttgttggtcatgacgccaacttag

SEQ ID NO: 141532 - DNA, 540 bp, Enterobacter cloacae
atgagcaacatcgacaaacaggcagtaacagcaaaaacaaaagaactggcatccctcatggttgagcgcatcagcatgaaccctgtgagctgcaagttgctgaatgaggcatgggaaaaagaattccctgacgaagtggctatcgctgagcgaatgctggctctgctggatgagctggaggcctcacaatcagaaaacgagcgtctggcgaaggcgctgattgaaagaaacggcgagcccgtagagggattggtgaaacgcgttgcagagctggaagagatagccactgattacggcatgaaattccagagggcacaggatgcgctgaaacatcagtctctgctgcataaatctcagatggaagccgcagagaagcggattgctgagctggaggcgcgggaggtgacgcttccggcacaaaaatattgcccgggtgaatacgcagggagcgtgttatggggtgaaacagaagtctggaaccaggcaatttctgagtgcgcaaaagcaatccgcgccgctggcatcggtaaaggagagtga

SEQ ID NO: 141533 - DNA, 171 bp, Enterobacter cloacae
atgcggttatctgaggctgctgtagcgctgcttgaaatcaaaaaggcattcaacgtgatgatcttaatgagttttattggcttcatgcgtatgtctttccttgtgctatcgaaaaaactgcgactcttcagtaaacgtaaattggttgatttcgaagtgaaatcaggctga

SEQ ID NO: 141534 - DNA, 1038 bp, Enterobacter cloacae
atgataaagtatacatgtgttccatcgctgaataaaacggcagcgaaatgcctgatgctgctcggactgctaatggcaggtggtcagagtgcttatgccgcctgttacgtcaataatggctacaaggcgcaagtgatcaacatgaatcttgggcgtgtgctggttacaccaagcagccaggttggggatactttggtcaccgctcagttcacgattaacccggtctctaggtatggcagttgtactaatggcggcaacgcgattggggagatcctccagggcagcccgacgagcttcagcaatgtgtggagtaccaatattccaggtatcgggattcgtttataccgagaagcggggagtataagtacctattatccccataccttgccgttgaacggcaacattgctgtcaacctgaacggtggttatttcaagatcgacattgttaaaaccgccgcacaaaccggttctgggcaactggtccctggaaagtacacgacttattatatggatggctctggacggaacttaccgatgctggaatcgatcgtcgacgccaacagtctgacaatcgttacatcgacttgtaacgtggacagcggttccaagaacaaggtggttaatctggataccgtcaccgcagcctcatttggtggtgtaggttcaacgcagggcgaaaaggcatttgatatcaatattaattgcgttggtggcattggcgaggatctgttgccgggcaatgcggggcacgggatcgtcaatgtacgttttgactatacgcaggatgcttccaatgctcctggcgtgatcaaatccgaacctggtgccaacaccgcatccggcgttgccatccagctgttgactggcaatacgacccagccgatcaagaatggtgatgcggtcaatgccggacgtaccattcctaaccagtccaatacgctaacgttgccgctgaaggcgcgttactatcgcactggctcgacaattaaaggcggcaatataaaatcgaccgccacctttaccatcgagtacaactaa

SEQ ID NO: 141535 - DNA, 2562 bp, Enterobacter cloacae
atgaaagagttacctatctctgcagcgattaaaatggcgtggcccaattataaatcgattctactgttaagcggcagcgcgctctgtatggcggcccctgcagcgtcttgggcgaatggaggggctgatagcaaaaagcctacggcaccggttgaagcgacctttaacagtagcttcctggttggggaagcgcaaggtgtggatctttcacgcttccgtgatggtaacccgatcttagcgggaaaatattcgctcgacgtgtatgtgaacggcgagtggaaaggcaaaaaaaacatcgactttaaaaacgtgccgggaaaaaacagcgctgatacctgctttaccctactgtcgttggatgagtttggtgtagacaccgcgacaatgagcggggaccctgcggttaataccgagacgtgcaaaactctggctcagtgggtgcctgaagcctattaccgtttggacaccagtacactgcgcatggatatcagtatcccccaagcggcgctgcggcgcagcgctcgcggctatgtagatccgcgcttctgggatcgtggcattaccgccggcagcttgttgtataacttcaatgcgttcaatactcacagctccgccaacggcagcaattctgattcaactaatgcatacttaactttgaacgccgggctgaacgtggctggttggcaactgcgtcatgactccaacgtgaactggcgttctaacgacagcactcattggcaaaataccgcgacttacgcgcagcgggcaatgccgtctatccgcggcatgctgacattgggtgacagttacaccagcggtgatttcttcaactccataggttttcgcggtgttcagatcgccacggatgatcgcatgctgcctgattccttgaacgggtatgcgccggttgtgcgtggggtcgcgcaaagcaatgctctggtggaaatacgccagaataaccagctaatctatcaaactaccgttgctccgggcgagtttatcatcaacgatctctatcctacgggttacggcggcgatctgaatgttaccataaatgaggccgatggcagcaaacgccagttcagtgttccctatgcttcggtagcgcagatgcttcgtccaggcattcagcgttatgcaataaccgcgggtcgagtacgcgatgataatttaagcaaggaacccgatatgttccaggcgacttatcagcgcggttttaccaacattattacgggatacacaggtgggatcgtcagtgatggctatggcgcagtgctggtgggcagcgcggttgcgacaccgatcggcgcatttgcgttcgacgtaacgcagtctaatacccgactgaagcaaggtgatcagacaggacagagttataagctcagctatagcaaactgatggccgaaactaataccaacttcactatcgccgcttatcgctattcaacttccggctacctatctttgcaggatgccgtctactcccgagacaatgaacgcaagggattgagcgtagatgcggttaaccgccagcgtagcgaataccagctgacgctgaaccaagggctgggggacaattacggttccttgtacatcaccggttcggtgcgtgattactggaaccgtggtgggagcaccaagcaataccaggtgggctataacaactattacagtcgtgtgacctatggcctttccgctatgcgtaccacggatatgtataaccgagatgagactcgttattacctgacattgtcggttccattcagcgtcggttcgcagaccctgagcctgaatagttcactaggctataccgacaacggctacgacagcagtcgtgtgggcctgaatggttcaaccggcgaagacaacaacatcagctatagtgccacgttggccaacgatcgttccggcgggactaacagtagtgtgagcggtgaataccgtagtcgttttgccacgatgaacgggtcctacagctatggtaaagattaccgtcaatcttcgatcggcgtatcgggtagcgtcgttgcccatagcggtggtgtcacactgacaccgcaacgcgggcagaccatggtgttggtggaagccccggacgccgccggcgcgattgtgaccaactcgtcaggcgttcgtatcgatgataacggttatgcagtggttccttatgttgcgccatatcgcatgacgagcgtaacgctcgatccgagcggcatgtcgcgcgacgttgaattggaaagcagcagccaacaggttgcaccctatgccggtgcgattgcccggttggaattcaagacaacgaaaggccaggcgttgatcattcatgcactcggccctgatggcaacgcgttgccgtttggcgccgaagtgctggatacccgtaatcaggtggtcggcattgttgggcagggcagccgtatctacttgcgtaccgaagctcagaaaggtttgttgcaaattaagtggggcacacagccaacgcagcagtgctctgtcagctacagcgctaaggcgcaaattaataatactgactacgaaattattgaagcgagttgcaaatga

SEQ ID NO: 141536 - DNA, 729 bp, Enterobacter cloacae
atgaagaactcatttaaaaaatacagcctattgctgagcgccatgttgttcagcagcagcgttttttccagtgtcattattaacggtactcgtattatttatccggggaagcaacgggaagttaccgtccaattatcaaataatggtgcttcaccggcacttattcagtcttggattgatgaaggcgacgcaaaaaccacaccagaaaacagcaaagcgccatttatcatttcaccgccaatcagccgtgttgaaccgactaccggccaagcgctgcgtgtttcattgaccacggcgagtttgccgcaagacaaagaatccttgttctggttgaacgtactggagatcccgccagcaccaaccggggctaacaatagtgcacctgaaaactatttacaggtggcattccgttcccgcgtaaaactgttatatcggcctactggtctgccgggggaagcgaatgatgcacccgaaaaactgcagtggcgtttcagcactgcgggcgtcagcgtgaaaaacccaacgccgtactatgtgtcatttaccgagattaatgcagtcgtaaatcaaaaacgtgtgccattggccccgaacggtgacatgctggcacctgggcaggaaaaaacattgtccttctccggtgacatcacgcgtattgctgatattgcttacaccaccattaatgattttggcggacgcgtgtcccgtactaagaataagcaaaagtaa

SEQ ID NO: 141537 - DNA, 558 bp, Enterobacter cloacae
atgaaaatctctaaactgtctgctgtattggcattggctgtaagcactgctgcaatttcttctttctcagctcaagctactgacgggactattactttcaatggtagagtgactgaccaaacttgtactatatccaccccaggcggtaaagatttcaccgtaactctgccaactgtttctgcctctactctggcagctcagagcgcaactgctggccgtactccgttcgcgatcaatctgagcgactgctctaaaggcaatgtggctacttatttcgagccgggcgctactgttgatttcaatactggccgtctgaataaccaagcgcagactgacgctgcaactaacgtacagattcagttgctgggcagcaacaaccaattcctgccaatccttgctgctggtactaatggcgcgcaggagaactcccagtgggttaccgttgctaaggaaggtgactctgctgacctgaactactacgctgaatattacgctaccagcgctgccggcgccggtgatgtaacttctaccgtccagtacaccattatttatcagtaa

SEQ ID NO: 141538 - DNA, 264 bp, Enterobacter cloacae
atgcggcagtacgagtcccataaaatagtcaaactcggcctgcttaacgattttcatcgctacctggccgccggaatacgtgccgctgaccaccgtgttagccgttgctgtttcgatcgggaaatcgctggcttcgttctgccctggcacctcctgcccgtcgacatcatcgaacccgtatccttcgacgatctgcgggattacttcgccaggctggaagaactgaaattcagcgcctgcaagagagcccaggctggattctga

SEQ ID NO: 141539 - DNA, 615 bp, Enterobacter cloacae
gtgtggatcactattgcaccgttcgtgacaaccgatacagcaggtttcactgagcatgttttcgctctgatgcagctgctcggattcgcttttgcgccaaggatccgggatcttcatgacaagcggctgtttattcatggtaaagccgagttgtatccgggacttcagtcactcatctctacaaccagtttgaatctaaaggacattgaaacccactggaatggggtgctgcgtctggcgagttctataaaacaggggacagtaaccgcatcactgatgatgaaaaagctggccagctatccgaaacaaaatggtctggcaaaagcgttgagggaaattggtcgcatcgagaggtcattgtttatgctggactggttccgggatccttcgctgcgtcggcgcgtacaggcagggctgaataaaggtgaggcccgcaatgcgcttgcgcgcgcagtctttatgcaccggctcggggaaatcagagatcggggactggaaaaccagagttaccgggccagtgggctgacgttgctgactgcgacgatctcactctggaatacgatatatagaaagagccatagattctctgaagcggaaagggatcccattcaatga

SEQ ID NO: 141540 - DNA, 1110 bp, Enterobacter cloacae
atggtcacttttgagacagttatggaaattaaaatcctgcacaagcagggaatgagtagccgggcgattgccagagaactggggatctcccgcaatacggttaaacgttatttgcaggcaaaatctgagccgccaaaatatacgccgcgacctgctgttgcttcactcctggatgaataccgggattatattcgtcaacgcatcgccgatgctcatccttacaaaatcccggcaacggtaatcgctcgcgagatcagagaccagggatatcgtggcggaatgaccattctcaggggattcattcgttctctctcggttcctcaggagcaggagcctgccgttcggttcgaaactgaacccggacgacagatgcaggttgactggggcactatgcgtaatggccgctcaccgcttcacgtgttcgttgctgttctcggatacagccgaatgttgtacatcgaattcactgacaatatgcgttatgacacgctggaaacctgccatcgtaatgcgttccgcttctttggtggtgtgccgcgcgaagtgttgtatgacaatatgaaaactgtggttctgcaacgtgacgcatatcagaccggtcagcaccggttccatccttcgctgtggcagttcggcaaggagatgggcttctctccccgactgtgtcgccccttcagggcacagactaaaggtaaggtggaacggatggtgcagtacacccgtaacagttgcttcacaacagcagcagatctgttacttcagttatctacggcacaacgtcagggccgttataaaacgacgcttcagcgtggagtaatggccccccgcctgctcatcattgatgaaataggctatctgccgttcagtcaggaagaagcaaaactgttcttccaggtcatcgctaaacgttacgaaaagagcgcaatgatcctgacatccaatctgccgttcgggcagtgggatcaaacgttcgccggtgatgcagcactgacctcagcgatgctggaccgtatcttacaccactcacatgtcgttcaaatcaaaggagaaagctatcgactcagacagaaacgaaaggccggggttatagctgaagctaatcctgagtaa

SEQ ID NO: 141541 - DNA, 2271 bp, Enterobacter cloacae
atgccacggagacaaatactcagcagtgaagaaaaagaacgtttgctggttgtgccggatgatgacatccttcttacacgcatgtgtttttttagtgaacatgatctcgcgcttattaataaacaccgcagacccgaaaaccgcctgggatttgctgttttactctgttatttgcggggaccggggtttcctcccgataaaaatgcgtcccctcacggcgtggttatttcccggcttgcggctcatttgaaaattcagcctgatttgtgggccgagtatgcctcaagagaagtcacccgctgggagcatctggccgaactctaccgctatctggaattatcccccttcaaccgggcgctacaaaaaaactgcattcgccacctttatccccatgctatgcggacagacagaggctttttgcttgcggaggaaatgctctcctggctccaccttaataaggttattttcccttctgttgatgtcatcgagcgaactctggccgaagcaacaacgcttgcagacagggcggtattttctgcgctgacctcgcagcttgaaccgggacataaagcggcgctggaccgtctgctggtatctgagggtgagcaaccttcacggctggcctggatgctccagcctccgggaaaaattaatggtaagaatgtcctgcaacatatagaccggttaaatgcgatagagtcgctggcactgccagacggtattgcgctttccgttcaccagaaccggctcctgaaactcgcacgcgaaggcaggaaaatgagtagccgggacctggcaaaatttacggatgttcgacgttatgcctcgctggtttgtgtcatatcggaagccagggccacccttactgacgaaattattgatctgcacgagcgtattctgggcagtctgttcagcagggcaaaacgtacgcaggccgaacgactccagcaaacgggaaagctgattcagagtaagctgaagcaatacgttaccgtcgggcaggcattgcttgatgccagagagtccggagaagatccctgggccgcaatagaagacatccttccctggcaggaattcatcaacagcgtggaagagacgcggttcctgtcacgtaaggacaacttcgatccgttgcatctgatcacagaaaaatacagtacgctgcgtaaatacgccccccggatgctggccgcgttgcagttcattgcttcacccgccgcaatgcaactcagtgacgcgctggataccgtcagagagatgtatcgaaagcaactccgaaaagtaccgccttctgcgccaaccgggttcatcccggaaagctggagaaaagtggtgatcacgccctccggcattgatcgaaaatattacgagttttgcgtgctgaatgagctgaagggagccttacgttctggtgacatctgggtaaagggatctcgccgctaccggaatttcgatgattatctgatcccatctggagattttgaaaaatcacgcctgaataaccagttacctcttcctattccgaccgactgcaatgaatacatcgagagccgtatggcgcttctggcatcgcgtctggaggaagtgaatgcgatggcgctggccggtgatttgcccgatgttgatatatcgggtaaaggcgtgaaaattaccccgctggacaacagtgtcccttcagccgtatccccgtttgccgatctggtttatggcatgctgcctcaccctaaaattactgaaatgctggatgaagtggacggctggaccggttttacccgtcatttcacccatctcaaaaaccatcacgtcagacctaaagacagaaagttgttactgaccaccatcctggccgatggcatcaatcttgggctgacaaaaatggccgaatcctgtcctggaacgacaaaatcgtcacttgagggtattcaggcctggtacatcagggatgaaacttattcagctgcactggccgagttggttaatgcccagaagaagcggcctctggcgggattctggggcgatggaacaacctcctcgtctgatgggcaaaattttcgggtgggcagccacggacgttatgcgggtcaggtcaatctgaaatacggtcaggagccaggcgtgcagatttacacgcatatttcggatcagtacagcccgttttataccaaagtcatcagccgcgtgcgcgactctactcacgtacttgacggtttgctgtatcacgaaagcgatcttgaaatcacagagcattacaccgatgtcaacgacggatga

SEQ ID NO: 141542 - DNA, 477 bp, Enterobacter cloacae
atgctaatcaaagcagctattcttgccaatgctacagaactcgaacaaatctattcattatcgtttgaatcaaacgcctctttttttcctgatgatatggaggaagaagatgacgagggcgaagaggatttttcatttgagtccgcaataatgatgcctgacaaaacagtgctgggattatggataaatgatcgcctaatcggaggtgctgttatttccggcaattctacaggaatacacacccttgatagattgttcattctgcctgaagaacagggcaaaggttacggttttcatgcatggatggaaattgaaaatatgtatcctgacgctaaagaatggacactgagaacgccgacatgcctgattaataacgtgtgtttttacgtaaataagtgcggttttaccattgtgcgcgttgaggacatgggaaaggatggggttggcatgtacgttttctcgaagaaagcgagctaa

SEQ ID NO: 141543 - DNA, 1872 bp, Enterobacter cloacae
atgggttggacatataccgatcgctttggtcagaagcactacaccattgaaggaatcaactatctgtcccagcaggcaatggcggcctacggttacgtgatcctgaccgggaagacatttactaccggcgcgactctcaacaaccctaacgaagtgctgctcaacactgccgacggcgaatactacaaatggaccggttcgtttgcttcaggtgggaaggtcgtgccagaaaactcaacgccagcaggcacgggtggcatcggtccgggtgcgtggattggtgttggtgacgcatcattaagggctgctcttgctgctccaggcggcgtcaatctggtgaatggtgcagctaagcaatctgatctggatgctttgagcgcatatgtaaacgaagctctaccctataatggtaaaacggcatctacatggagtaaaacattacaggctggtacgattctaaacatcaagtgttttggtgattcaactatgtggggggctatggcaaacaatgttgccaatcaatctgtaaataacccaccgaaaatgctaaaagaagtgttgcttaatcttagtggagttaccaacaacgttgtcaactacgctatcagtggttctacactttacgacatgctgcgtggtacagatggttcaggtaaaacatatcaggagcgccttgctgaatctccgtgtgatattgtttattgtaatcacgggatcaacgataatcagactggaaaggatatacttcaatatagaaaagatttaatccagtttgtcaaaacatcacgattaaataacgctacgccaatccttgttactccaaaccctcaaacatcaattcagctaggcagtcctgtcaatagcaaaagatttccactttatgtagaagtcatgcggtctgtagcgaatgatatgtcagtagacattgttgataataataatttcatgagcaaatcattgaatgtattcaatataaattctcttttccctgatggagttcatttgagcgatgccgcatacaggcagtatggttacaatcttgccatacctttgattacttgccatagcttagagttcgctggtgatgtttcggggctgaatggggctttatggtatacaaattctacaaacgctcaaatatctcaacaaggttcaagatgtggagaaataatatcttgggaaaaagaaggtaatccaactgggattaactatcctgtaattctattacgcgggatgaaaagtattagcataaaccaattggtttgggggagttcttcaagggctaacgcatacattaattccgcatcagcaggtatggtttaccctaacaaaaatcttgggaatacatcaactttagactgggattcgttaacaacgttaaatgttaattgtttcgcaggtttaaatgttgttggtttgttgatagatacttcttctcctggcataggcaccgggatgacatttgctggtgtagttatccctggtggcagcgtttcatctatgacaagtgtctcgggtgattattattcttctgaaaccttgtgcaatggtgattttatatcattaaattataatttctctatagggacagagtgttatgttgctgataaatctggtggaaaagtagcctctattaagcttaatggtactacggctagggctgcagttttcaaagacaatgttgaggtatcaggagttgatcttgctacatcagtttctcctggcatttatcaggttatttttaaaatcaatgatgatgcaatccaattctttttcggagcggcatccgggactataaacactgtttccacacaatcaaaccttcaacttaaggctacatctgccagcttcacattgattagagggttatga

SEQ ID NO: 141544 - DNA, 1116 bp, Enterobacter cloacae
atgaacagaagggattttacaaagtttatagtggctggggcgggattaatggccactccacagctagtctccgcgaaatcaagcagcctgcatacaggtgaaaatgcagtcaacaatcgtacacttctaaactcggttaaggataagctttccgctggtgaagatgtcagaattgattgttatggcgactctgttatgtggggctctacaccgtttgatattgctaagcaatcgcctcaatccgcacctaagatccttaatgatgttcttagatctatatttcagaacaataaaattgttgtaaataattttggcattcaaggttctactttgcttggctttgtaaccggtgatgaccattctcaaggaagcattgaactaaaagctaaaaataaagttgatgtcatttatatcaatcatggaataaatgatgcactgcaaaatacccctctagttaaatacagcgcagctcttcatagaacaatagatgcatgccttcagaatggagttgcattaatatttgttacccctaatgttatggggataaatggttttggaagtttaaaaatatcttcaaaattgaaattatattctgaagagatgaaatctgtagcggcggaaagaggtattgaaacagtagatcaattctcctttacgactcgtgatacttcaaagcataatccaaaagtagtcattcctgacggcgcacatttatctgactttaattataatcagttaggtcacaatctcgcttttcctattgttaattatgcatatcttagaagtggcgatgtctatagattcattggaattgatgttggaatccctaataatataaatgtcataaatgatgactccaccttaacattgtcaggatctggtctgaaaagtatatcattgccactgttgttggatgatgggggggtaatatcagtcgatgtgtcaggaaaaaaggtctatgcaaacattaatggagtttatcgaggtatgaattcttctgacgaccatatccttgtaaatataaatgcagaaagcgatagagcagggttaaaattattgactgtatcatcaaatgatgactttacattgaaatcagtaaaggtgaaggcattataa

SEQ ID NO: 141545 - DNA, 1917 bp, Enterobacter cloacae
atgaactttcgatatgacattaatggcttgcgagcctatgcagtcctagctgttgtgatcttccatttcaacgcatcctggcttagtggtggatttgctggcgtagatgttttcttcgttatatccggttatttaatgaccagaattattgtaggaagatatgatgctggcaagctctctatttgggggttttatttagatcgtggaagaagaatcattcctgcgctggcgtttctctgcgcagcactgcttatcttcggtgttttaaaattatccccgatagggctcatgcaacttgccaagcacgtaataggcagcctgcttttcatatcgaatggagtttactggcttgagtccggttactttgatgcatcctcacacactaaatggctattacatacctggtctctttcggttgaatggcagttctatctgctctatccgtttatcattctcggtattgtcaaagcctttggtcgcaaaaatttaggcacaggattattgatcacctgtgccgtctcctatctgatttctgttctaacgcccgcagcacatcaaagttcagctttttatcttatccatgctcgcgcctgggaaatgatagccggcggccttgtctgcctgtttccgctatcattaacagctaaacgaactcgttttacggaagcatctggctttatcctggtgatcgcctcatacatatggatgagcgaacgggttgcatggcctggtttccttgccattgttccagtgttaggtgcatgcatgatactggcagcaaacaggcaaaactcaccgctaacgaacaatcgcctttgccagttcctgggaacaacttcgtattcaatctatctgtggcactggcctgttgttgtctacatgctgcagaacgagataactggtgtacctgccgcgctaacggggatcgctgtatcggtcctgcttggctggctctcttatttctttgtggaaaatcgtcttcgcagagacaaaaacagcaaagctaatcatcactttatccgccgccacgctttacttgcatcattctgtattgtgattattggtggtgcatcggtctatgaaagcgaagggcttccatcacgttatgacggaaaaattaatgagctgactcagataaaaaacgtctactcattctttgaaatacctgatgtctggcgtaacggaatatgccactcgtcgccaattgagatgagccagcagcagaggctcgaaaagtgcgcagaggccggcgacaacaaaatatttctgtggggagactcttacgcaggtgcgctatatcctggcctggttgcacttcaaaagagtgatcatcacaaattttctatcgagcagttcactgatggaaatggtgcgccgttcttccgaaatgccaccctggcagacaataaaaaagacatggttaccgtcaatcaggagaagctagatatcgtagctgcgatgaagcctcagcgcatcgtgataacatggatgatgacaggcgttaactcgattcagatcccacaagaagctgtggctgggctccttgacaccataagtcggataaagcaggtttcacctgaatcgaaaatcattgtcgtcggtcctgtccctcagtggaaacaaaaccttgttgcagtaatgctgaaatactgggatgagttccatacttacccgcctaagtatatggactttgagctggataaaagtatgtttgtatgggatgaggcgctcaaagctggccttgagcctcatggagtgaggtacatttctgcgctcaaggaaatgtgtaacgagcagggatgtataaccagggttggtgacggagtgaaagatttatctgccgctgactggggacaccttactcccgcatcatcaaagtatcttgtcgataagatcaaaggccaacttttgaattaa

SEQ ID NO: 141546 - DNA, 705 bp, Enterobacter cloacae
atgttgaaaaaaattatcgcagcaactatcgcgcttagcttttcgtcacaagctgatatgaacactatttttaaaggtgatgagtcagagctcagcttttatggggtcacaaataaaattatccatatgaagctgtctcagattgatgatgctgaagccagcaaaacgatcatcatgtttggcgactcgataactcagggtctcaacccaaacgggttacattttgactatgtgaatgctggtattggtggagatacggttcacggaattaaagccagggttaagagcgaggacttaggcaggtatcgggccgttttcattgagtcaggaaccaataatttattgatgggtgaaattgggtcgcaggttggtgatgagatagtcgagatgattgagtatgcagctcccagggcaagaaagctgtatgtatctcaggtgttcgtgccgaacagggataagataacacaaatagcaaaagacgctccgctcgcagactacaaaataaaactgacatgcgcgaagtttaaaaactgcgtcgtgatccctctcccggctggcgtcataggtgagaatgggatcaagtctgaatactcgctgccagactcaacccatcttaacggtaaagcttacgctttatggaaagatgagctcaacagagcaatggcttccttcccatattccctgtattacaaatacttcaagtag

SEQ ID NO: 141547 - DNA, 342 bp, Enterobacter cloacae
atgaaaatgcataacgatccccactcctggacggagtttatcgaactactccacagttggtggcgtggcgaaacgccgatgggtgccgtattgctatcggttgtcatggccgccatgcgaatcgcttacggcggtggcggctggaagaaaatgctccttgagggggcaatctgcggagctctaacccttaccgctgtgtcagctcttgattactttaaccttccacagtctctgtcgatagctatcggcggcgcgctagggtttgttggcgtagagcaggttaaggttatggcttcccgggtgtttaattctcgctttggaggcggtgatgcaaatcagtga

SEQ ID NO: 141548 - DNA, 486 bp, Enterobacter cloacae
atgagaaagattaaccagagcacgttaaaagagcttctaagttatgacgagaagacgggcgtatttacgtggattaaaaaacgtcagaatgtagtagtaggaagagtggcagggcatatagatagacttggttacgagaggataaccatttcaggaaaaatatatctctcccatcgtttagcatggctttatgttcatgggtatttgccggaaaaagagatagatcacataaacagaataagaaatgacaacaggattgccaatctaagagaggcaaccagccaactaaactccctcaatactggcatgtacaaaaacaacacatcaggaagcaagggcatttacttcaacaagaaggccaaaaagtggcaggctcaaattcttatagacgggaagcgcgagtacttaggtctctacgatgatgtaaaaagagcggatatagcatacagaattgctaatcacttcaggcttgcaaaactggattga

SEQ ID NO: 141549 - DNA, 675 bp, Enterobacter cloacae
atgactatcaacttatcgtatgtacgccagcagctcatccttgccactgctgatatgagcggtgcgactaaaggccagttgatggcctggctggagaatgctcagttcgataccaagacctttaagcgtaaaaagccgcgtgtgatggatgaggtgaccgggaaaatgattactctggataatccaccaatcccgggcaagcagtcgcgcgctaaaggctctcatatccctctggtcaatcatgtcgagtacagtaccgcttcatggcgccgggccctgatgtcactggaggagcaccagaaggcgtggctgcggtggaactacagcgagaacatccgcttcgagtaccaggtggtgataactcagtgggcgtgggcagaattcagtgggcagctcggcgcgaagaaggtggccggcaagacgatggagcgcctgaagaagcttatctggctggcggcgcaggacgttaaggctgagctggcggggcgggagacgtacgaataccaggcgctggcggaactggtgggcgtaaagccaaagaactggtcagaaacgtttacggaccgctgggtggagatgagatgtatcttccttcgcctggacagcggtgctttgttgcaggttacgcgatcacgttcacaacaaaaggcgacaaattcagaggctcaaaaatga

SEQ ID NO: 141550 - DNA, 663 bp, Enterobacter cloacae
atgccttggcactcacccgaaactgacgccattctcgagtccatgccgagaaaacagaagcggcagaagttgatctacaacgtagccgaaaacgatgcagagttctgtatcggttgcattatggacgggaaaatcattcgtcatggagcttacgcagcatggattaacatgcttcagcgctgttacggcgaatcatatcgtagcgcacgcaagcaatatcttcaggtatcactcgaccctgcctggcataagttttctgctttctacgcctggtggaagccacgatataggaccggatggcatctcgataaggacctccttatccctggaaatcaggtttatgggccatcaacatgcgtctacattcctaaagagctgaataacttcaccgttgggcgagactgtaaacgaggggatttgccaataggggtaagctgggataagcagcatggtaaatacatgtccagggccaatgacagcaagggtaaatatctattcctcggtctctacgatgatccgatggaagcccatgaagcttggtttttcaagaagcttgagatagcacttgaatacaaaggcctatgcgacagcatacaccccgatctttaccgaggcgttcagagaaagttgctgtttatccaccgggagcagttggcagcgtag

SEQ ID NO: 141551 - DNA, 330 bp, Enterobacter cloacae
atgcttccatgcccaacaccaaaggcaacacatttcgctaagcgtctggcagtggtgatagatgcctgccgcaacgccatgcttcagtcgttcggtaattccgaacaactcaactctccggtgattccggatggttacgcactggtgccggttgagccgactgaagacatgatcgtcaatgggttcgaatcagagccagatgagagctttagcgatgcagatgtttgggaggcatacgaatccatgagcggatgccagcaggcggcacaccgggctaagctgtgctgggcagcgatgatagcagcagcgcctaagccggaggtgaagtga

SEQ ID NO: 141552 - DNA, 153 bp, Enterobacter cloacae
atgcgtcgaatgaaaaatcgcatcatgatcgatacctgttgtgtcaacatctcgccagcgttcttgtattcgctgtttacgatgataaaggatagtatcagtacccgtaagcgtgatattcttatagctatcattataccttatgtaatttag

SEQ ID NO: 141553 - DNA, 192 bp, Enterobacter cloacae
atggacaacgcgtatttttttttcagatatagggcaaaacttcaacaaatcgttagctgtattgtgagaaacacaaataacgagatcactattattgattgcacgatttttctgccaggtatgcatccattgcgctggtcccttacgaaaaagttcataagtaaaatcatggacagtggtaacaattcttga

SEQ ID NO: 141554 - DNA, 597 bp, Enterobacter cloacae
atgtctctattaagtcattacggttttttaggatgtttgcgcttagccatcgataagtttatgacttttttcactattcgaaatgcacgtattatacgtcatccttttgacatccgtggcaaagataagatcctaattggtaaagggtttacaacgggacgttactgtcgtctggaagcatatggtgataaaaaatcaccaactttaattattggtttagattgtcaaatcaacgattcggttcatattgccgcagggcaatgtgtaatgcttggcgataatgttttaatagccagtcgggtttttattacggatcttaatcatggaaattatgctggtgaaaaacaatcgcatcccgactcaatctgccgcaatagagaattaagtaccattccagtacatatagaatcaaatgtctggttgggggagggagttgttgtattacccggggttcgaattggtcaatcctcaatcatcggagctaattcagttgttacaaaaaacatcccggaacattctattgcagtaggaaatcccgctaaagttattaagcgctttgatttcactaaaaatgagtgggtcaggtatgactgctga

SEQ ID NO: 141555 - DNA, 972 bp, Enterobacter cloacae
gtgtttcattctaaaaaagccttggttttttgccctaaatttttttcttacgatatagaaataaaaaaagcaattgaaaatcaaggatacagtgttgaattgcatgatgaacgtccttcaacagacctatttattcgagcactcatacgatttggcttcaatgctgtactgaaaagaaaaatcgaaaattattatttaaacatttttaactcattaaatgaaacagtcgatattttaataataattaatcccgaatccattacaccagagttgcttaaaaaatttcgcgggaaatgtaagaacattgtagtctacatgtgggattcatttaagaataagccgcaggctaaaaatctaattccacatgcggattcattttatacatttgatgttaatgattctcaagcatttaatattaaatttaaacctttattttactctgatatttataagattgatgagctacaaacgctccctagatatgatatatcttttattgggacagtacactcttcgagatatgaatatgttaaaaaaatcagccatgattttaattcatatactttctttttttgtccaagtcatttcgttttcttttataaaaaatacattactcgtgaaatcaagaaggttgctattaaggatgtatcatttaaatcattaagtgtaaatgatgtaatttcagttgttgcaaattctaaatgcatcctggatatatctcatcccttgcagcaaggtttgacaatgcgctcaattgaaacaatgggagcaaaacgtaaactgattacaactaataaaagtatcgtcaattacgatttttttgatgaggacaacatattagttgtggacaatgcctttacgaagcaccaggttgagcatttcctgcaaagaaaatataagtcactagaggcggagatatataataaatactctgttaactactgggttcaggattttttaagagatagttga

SEQ ID NO: 141556 - DNA, 1428 bp, Enterobacter cloacae
atgaagattattcctgtgattatggctggtggaagtggttctcgtttgtggccactctcacgtttaacttatcccaagcagtttctaacgcttgaaggtgagcagtcaatgcttcagcaaacaatttcacgactgaatgaattagaggttgcgcctccagtagttatttgtaatgaagagcaccgatttattgttgctgaacagcttcgtcaaatcaatgcccttaatgaaatcatacttgagcccattggtcgcaatacagctcccgcagttgcgttggcggctattcaatctttaaataatctctccgaaaatgaagatgcacttttattaacattagcagcagatcatataattaaagatggcacttcttttataaatgctatccaaattgctaaatcctatgctattgacggtaatttagtaacttttggtatcgagccttccacgcctgaaacgggttttggttatattcaagttggtgaagagataagtagtggtgaagtttctggtgcctacaaagtcaatgcctttgttgaaaaaccagaacttgcagtagcagagaaatttttatctgatggcggatattattggaatagcggaatgtttatgttctgcgcccggaagtatctttctgagttgtataaattctgccccgatattcatgattgctgctttaaagcgatacagtcacctgacaaggatctgaattttattcgcattgatcatgatatgttttctcgttgtcctgatctttctattgattacgctgtgatggaacatacggccaatgccatagttgtgccaatgaatgcgggttggagtgatgtgggatcatggtcttccttatggaacattagtaataaagatgaccatggaaatgttttaattggtgatgtcattattcataatagttcaaataattatgtccacgctcaatctgggctggtcaccatgcttggtgtcgaagatctaattgttgtccaaacaaaagatgcaatattagtgactaaacacgatgcagtccaggatgttaaaaaaattgttgaagaattgaaatcggctggacgaagtgaatacagaatacaccgagaaatttaccgaccatggggaaaatgtgactctattgatacgggtaaacggtatgaagttaaaaggattgaggtaaatccaggcgagggtttatctcttcagacacatttccatcggtcagagcattgggttgtcgttgctggtactgcgaaagtaaccctccatgataaacaattcttattaggtgaaaatgaatctgtgtacattcccgtaggagcgcaacattgccttgaaaatccaggtaaaatcccactggaaattattgaggttcgttctggttcttaccttggggacgatgacatcgttcgcgtcgcagatcgatatggtcgagtttaa

SEQ ID NO: 141557 - DNA, 390 bp, Enterobacter cloacae
gtgaagcctatcccttgtggcccgctgggcgattttagtctgtatcgtgtgaacgacatcaccaggaatcagccaagctatgtggctcaggcctatattctgcgtagcattgagtccagaaacctgagttttaacaacaaaagccaggcgcttctgaactctacgtctcctgagatccgccaaatcattgaaagaaaggtgaacgcggcgagagaggcgcttatccgcctggacaaaatggacatggagttgattgatgtcatgatgtcatcaggcgatgatctgactggcatccggctgactgatgcgcgcaagaaatatggcaaagagattgaagaacgatacggatacaccttcaaccaaacactgtctgcaacgaagctgcgttaa

SEQ ID NO: 141558 - DNA, 1074 bp, Enterobacter cloacae
atgtccgaaacagaccaggagccgaaacgctcctggtctataaaacaaatattcctgatacttgatgaagcatcaggtatctctgacaaagcgataaacatcttaaccggggcattgacggagaaggataaccgtatgctcatgatgtcacagccgacgcgtccgagtggttatttttatgattcacaccataaaaatgcgaaaagcgaacataatccgaatggcacctggacatcgatcattctgaattcggaagagtcgccgtttgttgagcctaaatttatcaaggaaaaactgattgaatacggtggccgggattcccttgagtacatggttaaggtgctggggcaattcccgcgagaaattaacggttacttgcttggtcgtgacgaatgtgatcgcgccgcacggcgcaaggtgttgctggaaaaagactggggctgggtggctaccgctgacgttggtaatggtcgcgataagtctgtcctgaatatcatgaaagtatcagggaagcgtgaaaaacgccgcgttgttccgtttaagattctggaaatgccgggcacaatggatccgctgatgtttgccgactttatctataacgaatgcactcaggaacgttaccccaatatcaccattgctgttgactcagacggtatcggcgcggcaacggcagatcagttggtacgccgtggtgcaagccctgtccgtatacggtggggatccccaatgttctcgaaagaggacaaaaaacgttatgcaaatcagcgtaccttcgccaacttttctgcaagggatgcgattatgagcggtcggatgcggcttgattccagcgagaagactgccacgcaagcatcacgtattccttatgagttgaaggaagacggcacgcttaaaatgacagaaaagaaagtcatgcggcaaaaactgaatattccttccccagaccgttgggatacctactgttttgcctggctggtggattacacccctgcaaatgaagaggctacggctgaaatgctggccttgcgcgataaagtgctggcggatgtcgaaatgccggaactggatatttaa

SEQ ID NO: 141559 - DNA, 450 bp, Enterobacter cloacae
atgattacgcatgcggcagatttcaaagaagaggctgcaacgctcgtcaagcaaattcaggcattgctggcgaatcaggttcattctcaggatatctgcattactgcgcgtactaaacatgcttgtgaccgctacgcatcagcactgaatgacgccggaattgagacatttaatttaggcaatgatagcggtgacagcgatgcacgcccaggtgttcgggtggcaacgatgcaccgtattaaagggcttgagttccagtatgtgttcctggtggggatcaacgaaggtgtggtgccggaagtaaaagcaatatcctctgatgatcctgttgaacagcgcgatgcgttatttaatgagcgcgcgttactgcatgtggctgcaacccgtgccgtaaaagggctgtttgtttcatcatctggtgtccctagtccgctattagtggttgactga

SEQ ID NO: 141560 - DNA, 270 bp, Enterobacter cloacae
atggcacaggttaatatgagtttaagaatcgacgctgaactgaaggatgcttttatggccgctgcaaaaagcatggaccgtaatggctctcagttaatccgggattttatgcgccagaccgttgaacggcagaataatacctggttccgtaaccaggttgcggcaggacgtcagcaactcaagcgcggcgatgtgcttccccatgacatggtcgaatcttctgctgctgcatggcgggatgaaatgagcaggaaggttgccgataaatga

SEQ ID NO: 141561 - DNA, 219 bp, Enterobacter cloacae
atggccgccattgaactggacgaacggattggttattcagccagcagcctggccgggcagccgtataaaggccgcaacggtcgtgtggaaggtgcccgggaactggttattcacccgcattttgttctggtttatgaagtcgatagccagtggggaaaagtgtatatcctgcgtgtattgcatacaacacagaagtgggtgatgctgccaacttactga

SEQ ID NO: 141562 - DNA, 696 bp, Enterobacter cloacae
atgataataactagctttatagcagagccgatcatgacaacttcaggccaactggttggttgtgaattgttaacccgtttccattgccaggacttgcctgtactgaacagtaagtacttcatcatggctatggataatgaaaggaagagggaactactcacacgacaactacaggccatagaattacgtgcttcatggttcagggatcaccggcttttctgtaccgttaatgttgataccttacaggcacggctatgtgtatatgacagtggtataactcacttactggataagctggagtttgtcaggttggagatctcagaagactttgaagggttggaattgggtatagatcatccggtgttacgaacaatgttaaacgtaggctatcgcttgttccttgatgatcttggttccggtcgggctaacgttgcggcgttaactactggatgctatgaagcggtaaaaatcgatagggcgttctaccgtgaggaagtacagaaaccaacattcaacgtactgatgaagaacatcatgaactattgcccctatgtaatcgtagagggagtagagcagcggcaagagctaccagtactacgcgatgctggagtaactgcggttcaaggctatctataccgttcagtaccgttcgacaagataacaaccttatctaacaccatagtaaataccctatag

SEQ ID NO: 141563 - DNA, 468 bp, Enterobacter cloacae
atgaaaataagaaggttccgtaatggggatgaaatcccattatttaacgtgttttattcttctgtacataccatcgcatcagactactacacacatgaacaaattgatgcttgggccccggcagaaatcgacttggaacaatgggccaatcacatgaggcaactacgcccttttgttgtagagcttgatggtgaaatagctggatatgcagatctccaaccaaatgggtacattgaccatttttatgtctcaggaatctattcaggacagggggtagggacgttactaatgaattgcattcatgaggaagcgaggcaacatggaactagtgagcttacttcaaatgtaagtaaggctgcggaagcgttctttctacgacacggctttcatgtagtggagagaggttttcctatttgccgtggaattacattagaaaatgcactgatgcgaaaacatttggcaaaataa

SEQ ID NO: 141564 - DNA, 282 bp, Enterobacter cloacae
atgataaaaagtttcaagcacaaagggttacaaaagctctttgagaacgacgatccgagcggagtacaggcaaaggatgtggagagaataaaacttcgcctcctgatgttagacgaagcgacgacaacagaagatttccgcgcctatccgggatttaaatttcaccccctgaaaggcgataagaagaatctttatgcgatcaccgttcgggcgaactggcgaatcacctttgagtttacagatggtgatgcctacatactgaatctggaggactaccactaa

SEQ ID NO: 141565 - DNA, 303 bp, Enterobacter cloacae
atgacgatgctcaacccaccacacccagggggattgattaccgaatacctggaggataacgaaatcagcttacgagcccttgcccgtaacctcgatgtttccccttctgcgctgagtaaagtctcggcaggtaaagcggcaatcagtcctgaaatggctcttaaacttgaggcaggtttaggaatcgcagctcgactctggctggcaatgcaggcgacctatgaccttagccgcgcccgcaaggagatcgacctctcccatgtggtgcctgttacagtcaaaagtgactttgccgtacattga

SEQ ID NO: 141566 - DNA, 828 bp, Enterobacter cloacae
gtggttcagggtggtaagacttatatcaactcagcggtgatagcatcagcgagcatcaatgaggctatgataaataacctttccgtttcccgtgcgaaaattcaggatgccgcaatagacaatacgaaaatcgccaatgccgcaatccgtaacgcccacattatggacggcgtgatcgactcagcgaagattagccagcagatacaatccagtaattgggatggtgtgaatggttgggctatcaataaaaatggtaatgcctggtttggtaacgtatctgtacgtggaaatatacaggcaacatctggtgtactgaataacgttactatcaatgaaaactgtaacattcttggtactctaagtgccgcacgtatcgttggtgatatttgccgtccacaatcaactggtatcaaccctgtaccgtttatctttggctctaagactgtatcaggtgggcaggccgcatttaatccagtagctaaccaacactatatagcattgcgtatacgtggtgaagattttccacgttattttgatagtgatttatcaattggtttaacctcatatgaacgtcaatacttctatattcgtatgggtggtgatggaatcggtttaactaatctctattattatgatgctggtaacggtggtagttctacatctttcagattgaattctatatatgttccgcctgtaggtcgtggtaactggaattatatctatgtgatgtgtacaacttcacgtagtggtattgcttcacttaatgttcctgctaactggtcatcattcttatatcgtgctggtgatcagcctttatataatgcgtaa

SEQ ID NO: 141567 - DNA, 276 bp, Enterobacter cloacae
gtggcttccatctccatcagttgtccctcctgctcagctactgaaggcgtggtgcgtaacggcaaaagcactgccggacatcagcgctatctctgctctcactgccgtaaaacatggcaactacagttcacttacaccgcctctcagcccggtacgcaccagaaaatcattgatatggccatgaatggcgttggatgccgggcaaccgcccgcattatgggcgttggcctcaacacgattttacgtcacttaaaaaactcagaccgcagtcggtaa

SEQ ID NO: 141568 - DNA, 1005 bp, Enterobacter cloacae; identical to SEQ ID NO: 31749

SEQ ID NO: 141569 - DNA, 600 bp, Enterobacter cloacae
  misc_feature (575)..(584): n is a, c, g, or t
gtgtggatcaacattggtaacgtagggcagtactctacgagttttgagatattaaatcttctatatggtgtacagtacgattttgctattgaggcttataacacattaggttattcatcagatttagtagctatctataatcaaacaccacaagttattttcgcattgccgaagattactagccttgatatggtgaatgatgatgtgggtttaaaccagacttatgctcaagattttattttccgttgggatgatcaggctaacttagccgtaaatggtaaaacctttgccgatttcttcaaatactatgaaatccgtgtatatgaccgttatcgtaattacatcacgtcatattacaccactacaagcaattggacgtactcatattcaatgaataccagtgatggcctaagccgttaccgtgtgtttgggatcatcgctcatggttggggtactggtatctatagtgaagaagttcagattgaagttagtaacccacagcatccacagttgttaggtatcaatttgaagagtggttatgattccgtgttcattgactggacagaatcaaacgnnnnnnnnnngattatgcgggggtag

SEQ ID NO: 141570 - DNA, 987 bp, Enterobacter cloacae
atggaacaggaacttcactttattggtatcgatgtctccaaagctaagctggatgtcgatgtgctgcgacctgatggccgtcaccgcagcaaaaagtttgctaacacccctaaaggtcacaatgagctgctcagctggcttcataatcacggcgtggcaccagcccatatctgcatggaggcgaccagcacctatatggaagacgccgcggcctgcctcagtgatgccggtttcaccgtctccatcatcaatcctgcgctgggtaaagcctttgcgcagagcgaaggtctgcgcagtaaaaccgatgctgtggatgcccgtatgctggcagagttctgccggcagaagcgcccggcagtctgggaggcaccgcatccgctggagcgcgcgttacgggcgctggtactgcggcatcagtccctgacggacatgcacacgcaggagctgaaccgccgggagacggcacgggaagtgcagatgccgagcatcgatgcgcaccttctgtggctggaagcggagctgaagcgactggagaaacagataaaggacctgacggatgatgacccggatatgaagctccggcgaaaactgctggacagcataccgggtataggtgaaaagacgtccgccgtgctgctggcgtatgtggggctgaaggacaggttcggtcaggcgaggcagttcgcggcgttcgcggggctgacaccgcgtcagcatgaatccggaagcagcataaacagggcaagcaggatgagtaaggcaggacatgtctcgcttcgcagagcgctgtatatgcccgcgatggtggcgctgtacaaaacggagtggggaaaagcgttcaggagtcgtctggaaaataacggtaagggtgcgaagctgataatcggagcaatgatgcgtaagctggcgcaggtggcgtatggcgtcctgaaatcaggacgcccgttcgatgccacactgcacgagaaaaatgcttgcgtggcataa

SEQ ID NO: 141571 - DNA, 420 bp, Enterobacter cloacae
atgttcaaacttgtgcttattggtgtaggcatcaccgcattccttcgccgcctgctcgatgatctctgccgtaagcgcgaggttcttcatgccctcggcgcgcgttgccatgcggtcgagaactcgaaggcggtacgccttgttggcgatcggaatatcggagatttcattctggaagcgttcgcgggtggcattgaacatgtccacccatttctgcgccagtcccctgccgtttgctttcgtcgggtcgtgggattcgacctgctgacgagtgatgctcaggccaaattcttttttgaccagctcaaccacctgggatggggtatcgaagcaggcaagagactgaacgatgaaggctttgacctcacctttcagtgtcgccatggattacctgcctgtcataatcagtcatattgttag

SEQ ID NO: 141572 - DNA, 633 bp, Enterobacter cloacae
atggcgaacgtagacgatagcaggccattaccaaatgcatcattcgtcgaagagttcgcgccatacaccaggctgatacctgctgttggtatgcgggagtgggtgcagtctcagatcattgccgacaccggccatatacataaccctgaccactttcacctcgcagatgctgatataggcttcctgtgggctgcacacgcctttaacaaaaaaggccgtacagttctaggacaggctgaagaggtgatgttccgtgccggtggctggcagaaggcgcggatggagcagcagatgcatgaatggttcggccataagccggatttcatcatcacgctggccgctgacttctgcctgcaatgctccgatttagagttctgcgcactggttgaccatgaactttaccacattgcgcaagaggtggatgagttcggctccccgaaattctatcgtgatagcggattaccgaagctgtgcatgcgcggacacgatgttgaagagtttatcggcgtggttcgccgctacggagcgagtgcagatgtgcaggaactcgtcgacgcagcaaacaatcccgccgaagtggcgaaaattaacatagccagagcatgcgggacgtgcctgatgaaactggcttga

SEQ ID NO: 141573 - DNA, 387 bp, Enterobacter cloacae; identical to SEQ ID NO: 15296

SEQ ID NO: 141574 - DNA, 423 bp, Enterobacter cloacae
atgagcactattaccaaaaagcagcgcgcggcgttgcgcatgaagttcggcggacgctgtgcgtactgtgggtgtgatttgccggaaaaaggctggcacgctgaccacgttgaggcggcattgcgtaagtgggaattcggcgagcgacaggctgacggaaccagacgtacagtcgcaacgggagagttctggcggccggagaatgatgctatcgaaaatctgttcccggcctgcgccccatgcaatctgtttaaagcaacattcaccgttgaaggattccgggaacaggtggcggcgcaggcggatcgcgcgcgagcatacagcgtcaatttccgtacagcggagcgttttggtctggttgaggtagtcgataagccagttgttttctggtttgaacggtatcaggagggggagacagtatga

SEQ ID NO: 141575 - DNA, 357 bp, Enterobacter cloacae
atgcagcagattacccagctgattgaggtcatgctcgttggccgcggtggtgaccaggctgtgggtcaggccactcttggcatcgacaccaatgtgggccttcatgccaaagtgccactgattgcctttcttggtctgatgcatctccggatcgcgttgctgctctttgttcttggtagagctgggtgcctcaatgatggtggcatcgaccaaggtgccttgagtcatcatgacgcctgcttcggccagccagcgattgatggtcttgaacaattggcgggccagttgatgctgctccagcaggtggcggaaattcatgatggtggtgcggtcaggcaaggcgctatccagggataa

SEQ ID NO: 141576 - DNA, 339 bp, Enterobacter cloacae
atgcaaagaacgaactggcccaaaaaggcgaaacgcgcattgtctatatcaggcaggcgcttgaaggcgatccttgcgctaaccagcttgttccttctgccgctgctgacagcctgcgggaatacgcagacagtttacgttccggcctcggtggttccgataagcgctgacctgacagctgacacgccgatccccggaattacggttccgttcacgtggcaggcaagtctggagttaaacgctcagctctatacggcgctgggtcagtgtaatctggataaggcggcaatccgcaaaatcgaatcctcccgacaaggaaagaatgctcaaccccaataa

SEQ ID NO: 141577 - DNA, 1260 bp, Enterobacter cloacae
gtggcaagtgcaaacaaactcacgctcttcatcgtgattttcatgctggcgggtattctttcaggtgcggcgatccatgagtatgcttcgtccgacgcgatacaggcctggtcggagaacattacgctgctgaccgatattttcctgcggctgattaagatggtgattgccccgctggtattcagcaccctgacggtgggcattatgaagctgggtgaaacgtcgacgattgggcgcgtcgggggtaaagcgatggtgtggtttatcagctcatccgtactttccattctggtggggctgtttattgttacccttgaacaacccggcagcggtctgaacctgagcattccgacagagacggttgataccggcctggccgttagcgggatgtcgctgaaagccttcctgtcacacaccattccaaccagcattgccggcgcgatggcgaacaatgagatcctgcaaattgtggtcttctcgatgttcttcggcattggcggcgcgtcattaggtcaaaaattcaacgccccgctggtggcggcgctggatgtggtctcccacattatgctgaaagtgacgggctacgtgatgtacgttgcgccgctggccatttttgccgcgatttcgtccgtgattgccactcagggtctgggcattttgctgaactacgcctcgtttattgggggttactatgtggcaatccttctgacctgtctggtattgctggcggtaggttacatggtgctgaaaaaagagattttccgtctggtggcgatgctgaaagatccggtgctggtcgcgtttaccaccagcagctcagaagcggcatacccgaaaacgctggagcagttagcgcgcttcggctgttcacgtaatatcgcctctttcgtcctgccgattggctactcgtttaacctggtcggctctatggtgtactgctcgttcgcctcgatgtttatcgcccaggcgtacaacattcacctgagtttcaccgaggtgacggtgctgatgttaacgctgatgctggcttcaaaagggattgcgggcgtaccgcgctcgtcgctggtggtgctggcggcgaccattccgagctttaacattccggtggccgggatcctgctgctgatggggattgaccatttcctggatatgggacggtccgccattaacgtgctggggaacgggattgcgacggcgatgctgtcgcagaatgaaggggcgcgggaagcggaagcagcgctggtggagcaggaggcgtaa

SEQ ID NO: 141578 - DNA, 4371 bp, Enterobacter cloacae
atgagcgataacaacgcggcccgtaagggcgacgagattattcactccagcatttttgctgatataaccagcattgtggcggaaggtgccgcctatgcggtgattggcgcggcggtgggcgcggcagcgaccgtcgcggccccactgctgggagccggggccgcagcggcaggcgtggcggcgattggatccagctgtctgttgagcggcattatcggcggggttctggcgaacgtcgccgggatcaccgacgatatcagcaacgccgctgaagggctgggtaacgcgcttttcccgccgtcgcccgcgggcaaaatcaccaccggttcgagcaacgttctgacaaataaacttcccgctgcacgcgcagccgggacgttaacgcctgccgataccccgtccccggagcctcagtcgccgggcagctttgccgactatgcgggcatgctgctctccgctgccggacagttcggcagcgagatgtggcagcccagcgtcgcctctgccgccgcggggacctcgccactggaagaagacaaggtggcgtgtgataaacactccgggccgcagtatctggcggaaggctcgaaaagcgtcttcattaacggacagcctgcggtgcgcgcaaaagatcgcaccacctgcgagggcaccgtttccgacgacgtctcccctaacgtgatcatcggcggtgacacgctcacggtccgcgacatcaaaagcggcaaaacgccgggtctggcgctggggatgattgcgctctccctgctgcgcgggcgtcctggcaagatcctgaaaaacatgccctgcgcgctggctgctgccggtggcgggatgctggcggatatggctgtcaacgccgtgttcggctcctcgcacccggttcacgccgccactggcgtgaaggtgctgaatgacgacgacgaactcgatttctcgctgccggggcgctttccgctgcgctggcaacgcagctacaacagcctgaccacccgccaagggctgtttggtctgggctgggctaccacttttgacagctatctgacgctggaagaaaacaacgccacctggttcgatgaaaccgggcgcgagctgagctttgaactgccgccggtcgaccgcgcgttttacagcatcagcgaaggcatcattatccgccgcaatgagagcggcgacgtggcgatagctgacgatgacggcgcggtgtggcgtctgtataaaccgacccgcgctaacccctccatcctgcgcctggcctccctcagcgacgagtacggcaacgcgttgctgacggaatgggatgagcacgggcggctggtcggtctgcacgatgagccgcgagcgatcgatgtcaccctgcgctatgacgatgaacgtttcccgcagcgcgttaccgctgccagccattttgacggcaaccagacatggccgctgatgcattgggggtacgacgcgcgcggccagctggccagcgcaacggatgcctccggcgtagtaacccgtgaataccgttataacgatgatggactgatggtctggcaccgtctgccgggtgggctggagagcgaataccgctggcaaaaatttgaccactggcgcgtggtggaaaaccgcaccagcaccggcgacggctgtcgctttagctacgatttagccgccgggctgacgaccgtcgatcactacgacggtcagacgcgaaagcattactggaacgcgcaaaacctgattgttcgctacgttgacgagcgcggtgagaactggcgctacgagtgggatgacaacgaactcctcacgcgtcgcatcgatccgctgggtaatgccgttactttcgtctatgacgagatgggcaaccgggtgcaggagatcgacgccgatggcaatactcgcaccaccacctggctggagcaccgtgcgcttccggcgtccatcatcgaagccgacggtagcgccacccggttcctgtatgacgaacatcatgggctgaaacgcgtggtggatccgatggggcagaccacgatgctgcgtcgggacgagtttggtcaggtggttgaagaagttgatgccgccgggaacagccgctaccaggagtacaacgaagccgggcagatggtgcgtgcgacggactgttcgggccgtgtgacacaataccgttatcatccgctgggctggctggtggctgagatccgcgccgacggcgaagagacgcgttaccgctacgacgccgcggggcgtccggtgcagctcgaccgaccagaaggctggaccgagtcgctcaaatggaacgaacgtggcctgccggtgaagcatgcgggcgccgacgggaaagagagcgagttcagatacgacgaggcagggcgcttaaccgccacccgtaatacgcagggtgaagaggtgcaccgccgctgggacagccgcgggcgtctgattgccctggaaaacgaaaacggcgaagcgtatcagttccgctggggcgcggactcgctactgctggaagaggtagggcttgatggcgtggcctcgcagtatcgctacgatgcctgcgggcgtacgatagcgcgcacctttgccgccggacatccggaggccattacccatgccttcgcctggagcgcgagcggccagctggtcgcccgcaccacgccggaggggcagacccgctaccactacaccccgtccagacttttgagccggattgggctgcatcccgcgctttcagccgatgcctggagcgccgaggccgagcaggagcttgtgtttgagtatgacgcgctcgggcgcgtcacgcgcgaaacgggcgagcacggggagctggcgtgggagtatgacgcgctgggtaaccgcacctccgtcacgctgcccgatggtcgggagctgaaacagttctactacggcagcgggcatctgctcagcatcgcgcttgataagctctcggtctccgactttacccgcgacgaactccaccgtgaaaccagccgtacgcaggggctgcttaccacacgcagcgaatacgatcgtcttggacgactgcatcgccgggacgtctttaccggcaatgcgcagcgcccgtcgccgcgccgctggtcccgccgctgggattacgactaccgcaataacctggtgcgtgaagagcgggacgataacccgttcagctggtaccgctggcagtacgacagcaccgggcgcctgctcgttcaggacggcacgctgcctggccaggagcagtggcgctgggatgcagccggtaacccgctcgaaggctctgctgagaaggtcacgcacaaccgtctgacgcacctcaacggcattcgctggcgctatgacatccacggccgcaccgtggagaaggataacggccagacccgctggcactaccgctacgacggcgagcatcgcctgacggaggttatcagccagccgcgggaccgcaacaggccgcagacgcaggtcagcttccgctatgacccgctcgggcgacgcatcagcaaaacgcgacgccagatgctgtttgggcagccgaccggcaagccagtcaccacccggtttgtctgggaagggttccggctgttgcaggaggtgcacggggatgtgccgctgacctacgtctacagcgatcaggacagctacgatccgctggcgcgtatcgacggcgttgatgccccggaaatcttctggttccactgccagcccaacggcacgccggagcggatgacggatagcgaagggcaggtgcgctgggaaggcgtgaacagcgcctggggcaagctgctgcgggaaagcgagacgcaggtatcaggatattcccagaacctgcgtatgcaggggcaatacctggaccgtgagacagggctgcactacaatctgttccggtattacgacccggactgcggaaggtttacgcagcatgacccgatagggctggcgggggggataaacctttaccagtatgcgccgaatgcgctggggtgggtggatccgtgggggttggcattaaagggagtcgactttacaggaagcccagatcttttcccaatcaatggaacgaaacaaaacattgtatctattacaatgcaaggaactcgagatagagatttcaccgaggctttcaaggcagccggtatctctaaaagtgaagcaaccggatatacatggcatcatgtcgatgattttgacccagccacaggaaggacaacaatgcaattagtaaaaacttctgcgcatgaagctactttcccacataaaggctcagtctcacaattcgagaaatattttggtgtaaaatatggttcccaagaagccattgctgtttcccattctaaaggctggttgaaggggcgtgttccgaaaaaattgcgtgcaaactgtcaccagtga

SEQ ID NO: 141579 - DNA, 360 bp, Enterobacter cloacae
atggataatttaatcaacacctatcgacgccgaattttaaaagcagcgttattacgccaccagcgtaaaacaggcacaacctgcatcgttatttctcttccgaaaggcgggataagtactgtcgagctgacagagatattactcgacggacttttgtgccggtttgaaaaaatggcgagaaatgagcatggcccggcggccggcgataaagctatccgcgatctttaccggaatgcagttgatgtgaatggtcatggcgaatacctgactgaaagcggaaagctgctggttgatgagcttgtggcagagctggtcgaacatgcgaagaaaacagcagccatcacgcaggagcattcatga

SEQ ID NO: 141580 - DNA, 219 bp, Enterobacter cloacae
atgacacttacagcgatccgaatccctgaatgggttcacgaaagggctgtgcgtgtgctgcgccagcaccgcgccgggcggatccacccccgccgcatgcacaagactggctatctgagcctgagtgtgaatctccgctggcgcctgctttcccgcgacggcggccagagctgggaagtaatgagccatgaaacctataaccgggagaaagacagatga

SEQ ID NO: 141581 - DNA, 306 bp, Enterobacter cloacae; identical to SEQ ID NO: 126971

SEQ ID NO: 141582 - DNA, 312 bp, Enterobacter cloacae
atgattatcgataaagaatacgcacttgtagatgcaacagcaagacttaacactgacctgagggattatgaatatgaaataaacaacgccgccatcataacatttggcaatgacctcattgaggtaatcgtatatcagttcagctttgtcatcagcatcagggcagagggtgaaaaaataaagcacggcctacttgttaacttcggtaaaaatatagcaagacaggtttcatcactttgtgcatccgcaatgcgagtctacccgaatgaaaaacacaaaccgagccgtcagcttttccattgcataaattag

SEQ ID NO: 141583 - DNA, 357 bp, Enterobacter cloacae
atgattcctgaatcagacgagtactatgagggctttcctcacgctatcagcagcgaaaatgaagaaaacacgtcattcaatgattacgctctggttaacacactggcggagtgcctgtatcaccgcatctctcgtgaaatcttcgatggcagcgagcctgcgctccgggccgtcattgccaacggtgagattaaattcctggctcgttatacgcttgaaggggcctgctattatgaacccctcggcacatttccacgtatgcccgttaacgtcgcgcgtaaacgagcacgtgaactctataacagatttgatgataaccgggggccggatgaagattatgagcatatcccgttctga

SEQ ID NO: 141584 - DNA, 1698 bp, Enterobacter cloacae
atgagcataaaatcacaagagataaatagttgcataggtaagttggctaataatattcgagctgagaggattgattacaatagttatttggatctttactccggtgaggaaaatattaggaatattgataatattaataacacggttgtctatgggcggcgtgggtcaggaaaaacccatctcctcaaagcattgtctgaaagggttgttgataattaccctgttgataaagttttcccggtttatatcgacttaaggaggattatacctttggtttcaccagaggtggaaaacaaggaggttgatgctcttttgattttcaaatacataatgcaagaagtttcatttaatttatatggtaacttacccattctattaaataaaaatgaatttgattctaaaaatgaggctttgtttgattccaaaaaatctcaattaaatgattcttttgaatcactatatttggaattcaatggtcgagaattaaaaaaatctaatgacttaacggtatctgaggaggaggtgaaaagtttaagtggagaagtgaatatatcgaaaagccctagtgcaaaattatcggcgtcaggtactgttaaagaaaataaacaaaccggccgtagagggcatgtctccattttacatatcactaatgcactagatgaaattttaaacgagttggatttacgctttctgatgattttagttgatgaatggtcagaaatacctcgcgaaatacagccttcattggcggagatttttaaaaaaacattttctgcaattaatgtggttacaaaaattgcggctattcctaatagaactactttgggtattaaaactgagagtaaattttttggtctcgaagaaggaggggatatttttggatatcctctagatatgagatatgtttttgaagttaataaaaaccaaactagagatttctttaatgatcttctctacaaacatctttcctcaataaataaaacagcgattgataatcttgtcaaaaaagagaaaaaaacaaaagacagcttcatcaatatactttttgctaatgttgcattgaatgaaatattaatagcttgtgctggaataccacgagacttcatgaatttgtttcttaatagctatgataaattcatgctttcatctagttcgacagctgcgaggattagtgttaaaaatttacggctagctaatgccgaatggtatgagtcagataaaaaagaacaggttgataaaaacgatgttgagaaaaaactattaactgaaatagtgaaagaagtaatagaaaaaaagaaatccatgcattttttgattcctgaaaaatattcgaacaataaacacattcaaaatcttatcgacttgcgcgttattcatttgcgtaaaagtggatattcgcataaagatcacccaggggtatcatacaatgtttattctgtcgactatggttgttataactctcttaatataacgaaaaacaaactagatacgtcaatgcttaacgacctcaatattaaggatctacgtgatgttcgcaggatttctcttgaggatgctttcttccagtcatttatgatggaaatcggtgaggcctttaggtgcccacattgcaaagctccaattgatgttaatcatgcggcttataagaaaagaggattgtgtaatcactgttttgaatttgttgaagcagaagaatga

SEQ ID NO: 141585 - DNA, 1257 bp, Enterobacter cloacae
atggccttgactgataccaaggtgcgttcggcaaaacctcaagaaaaggaatactcgcttgtagatggcgatggcatgtttttgctgctacaccctaacggctccaaatactggcgcttccgtttccgcttcggtggtaagcaacacctgatggcttttggtgtttaccccgaaacgtcactggctgatgctcgtcaaaaaagagaaaaggccaggaggcttgttgctgccggtgtcgatcctcgtgaacataagcgagcagagaaagaggaacaggttaaagaggtcatcacttttgaatctgttgccagagactggcacgccagcaatcaaaagtggtctgaatcgcatagtggccgtgttcttaaaagtctggaagataatctgttcgatgcgattggtaagcggaatatcgctgagttaaaaaccagagatttacttattcccatcaaagccgtagagatgtctggacgtcttgaagtggcggcgcgtctacaacaacgaacgacagcaattatgcggtttgcagtgcagagcggtttaatcgattacaaccctgcacaagagatcgctggagcggttgccacagcaaaaagacagcaccgtgctgcattagaacttaatcgcattcctgaactgcttcatcgtatcgacacatataccggcagaccattaacacgcttagctgtggagctgacgttgttggtctttattcgatctagtgaactgcgttttgcacgctggtcagaagtcgattttgacactgcaatgtggacgattcccggagaacgcgagccattggaaggtgtgaagcattcacatcgaggatcgaaaatgcggacccctcatcttgttcctttatcgcgccaggcactgaccattctggaacagatcaaaagcatgagtggaaatcgagagctgatcttcgttggcgatcatgatccacgtaaacccatgagtgagaacacggtgaacaaggcgctgcgggtgatgggctacgatacgaaagttgaagtttgtgggcatggctttagaaccatggcatgtagttcattgattgaatcggggttatggtcgaaggatgcggtagagcggcagatgagtcatcaggagcgtaactctgtacgtgcggcttatattcataaggccgagcacttaggggagcgtagacttatggtgcagtggtgggcggattatctggatgctaatcgggagaaggggattagtccttttgattttgctaaagtaaacaagtaa

SEQ ID NO: 141586 - DNA, 1167 bp, Enterobacter cloacae
atgaagaaactactcgaattacgccagcagaaagccgcactcaaaacccagatgcgttccatgctggacaaagccgacaccgaaaagcgcagcctgaacgaagaagagggcaaaaagttcgacgaactccgcgcccaggctgatgcgcttgaagttgaaatcacccgtcttgaagccgtcgccgacgatcagcgcaatctgcctggcacttccgttgaaggtgagccagtaagcaacgacgagctgcgccactacatcatgaccggtgatacccgctctctctccacgctggtgcaggctgacggcggttataccgttatccctgagctggacaaagagattatgcgccagttgcaggatgatagcgtgatgcgctccatcgcaacggtgaagacgaccaaaaccaacgaataccagaagctggtatctgtgggcggcactaccgttaatcgcggtaccgaaggtgaaccacgcaccgaaaccagcacgccgaagatggagcgcgttgatatcaaactcaacccgatctacgcctacccgaaaaccactcaggaaattctcgacttctccgaggtggatattctgggctggctgtcttctgaaatcgccgacaccttcaccgctaccgaagagagcgactttgtaaacggcgacggtgataaaaaatccaaaggcttcctgtcttaccctcgcgcggccactgccgacaaaacccgtccgttcggtacgctggagaagatggaagcggctgacgtttcctctgatggcctgatcgacctgctgtataagctgaaagccaaataccgcaaaaacgccgtatgggtgatgaattccaacaccgccgccaaactgcaaaagctgaaaaacggcaacggggattacatctggcgtgatcgtcttgttgccggttctcccgatacgctgctgggccgtcctgttcagtatctggaaaccatgccggatgcggaggcgggtaaagcgttcctcgcggttggcgacttcaagcgcggctatttcatcgtggatcacaccactggcgtgcgtacccgtcctgacaacatcaccgagccgggtttctacaaggtgcataccgataaatacctgggcggtggtgtggtggactccaacgccatcaaggtgcttgagctttcaggctccggttcctga

SEQ ID NO: 141587 - DNA, 195 bp, Enterobacter cloacae
atgcgtgagccaatctgtctggagcaggccgaatataaatcagcgctggcttcatcactttacgaaaccatcctggaaaaagcctctgctgaatgttcagaaacgctgctgaatctgatttctattgcgtgtgattttaatcaggaaattcaccgggcattaatcgccgagctgcacatgggagagacaaagtga

SEQ ID NO: 141588 - DNA, 174 bp, Enterobacter cloacae
atgtcaacaagcgaaaataaagagcgccatgttgtgcagctcagactcgataaagaactgtcagagcggctcgctttagcgatgaaagaagacggtgacgataataagtcgggatggataaaacgccttttgcgccgtgaacttgataagcgcggcatcgagccaaaaggctga

SEQ ID NO: 141589 - DNA, 789 bp, Enterobacter cloacae
atgaaaaagataaataaaatgaccgatttgccgaaatggttttcattggacaattacaattctatcaatgggctgagtgatcttgatttaattaatcagttagctatgagaatggaagttgctaatgatgattttgaatggcttgatacctatcccggagcaagaaatgagttcgcttcatttatggaagaaagatttagtaacccaattcggccgctgagcggaaaattatttgcagagaaaataaaaagaaaaaaatattctgaatggcaaatggatgccgtcggaggtgttgagcctttaagattaattgatgtgatgcagttgtctaagaaagcctctcattatattgatgaaaataaaattaatcgctcattgcgtggacaaaaaaggtctgtaagtaagaccataagcgataatgatcaaatgcacattactttagatttgtcttggcctgatgaaattttattaagcgatttggctgcattgttgccaatatggcgaatggatcttgaaaggaaaagtgaaaatagttgtaagttaagtaatagctggagtgtaatcaaaaagaaaatattcgattacaagatattgccaatgttagaccttatggagtgggctaaaattaacaatgcaacaatcactaacagagttttatctttggccctgtttcctaatgcagagtatgacgccattggtatcgctcaaacgatcaaaccgttcattagaaatttttccgcagatttttctatagaaatcttaaagcgcaaagctatggattcattttaa

SEQ ID NO: 141590 - DNA, 456 bp, Enterobacter cloacae
atgattaccgaaaaaaataatgttttttattgcgactgcggatttttctttgagagggggcgcagcggcgcgcataactgtgaaactggtttgcgtaagaaacttgccgaatcggaagccaagctctctgcgctggctgctgagaatgcgaattgtcgcaatgcggtgcaggtattctgcgatgtcgttgacgcaaatacagacgccatatgcgaagaggttggtcaggacggagtgaaggccatccttgcagcaatgagtgcgacaggaaacatgccagctaccgacgctttcctggctgaagtgcgggcgcagggtgtggagatgatggcctctgaagccgagcaactgatggatgagtttggagatgacagctacatagtgatggttaccgcagatttacagcgtttcgccaatgcattcgccgcccagcttcgcaaaggagtgcagtcatga

SEQ ID NO: 141591 - DNA, 204 bp, Enterobacter cloacae
atgagcacacaaattaaaccttgcccattctgcggcagcaaagacgtagaggcgttcgcgcagtacgaagaggattgcccttaccagtcggcaattgttcgctgccattcttgcgacgcgcagtctgctcagatggttggcgctaacaaaatcaacatggctattactgcatggaacaaacgtgtcggggaggccgcccaatga

SEQ ID NO: 141592 - DNA, 186 bp, Enterobacter cloacae
atgaaacatttactgatgacgctcttttccagcccggaatccttgttgcaggtcatgagtcaccaggaaattatcgaagccgtagaggatggcgaccgcatcatcatcgatcaggatggaaacgcctcggttaactacaaaaccacgaggtgcggcaggactttctgcgccatgtcaacgcgctga

SEQ ID NO: 141593 - DNA, 1212 bp, Enterobacter cloacae
atgaagaccactttttctgctcgttttgtgcagcgcatggcgctgaccacggccctttgcgctgctgcgttctccgcagctcacgcggatgacctgaacatcaagaccatgatccctggcgttccgcagatcgacgcggaatcctacatcctgattgattacaactccggcaaagttctggcagaacagaacgccgatgcccgccgcgatccggccagcctgaccaaaatgatgaccagctatgtaatcggtcaggccatgaaagcaggcaaattcaaagaaaccgacctggtgactatcggtaacgatgcgtgggcaaccggcaacccggtgttcaaaggttcatcgctgatgttcctgaagcctggcatgcaggttccggtctctcagcttatccgtggcatcaacttgcagtccggtaacgacgcctgcgtggccatggccgattttgccgcaggcagccaggacgcgtttgtgggcctgatgaacagctacgtctccgcgctgggtctgaaaaacagccacttccagaccgttcacggcctggacgccgagggtcagtacagctccgcgcgtgatatggcgctgatcggccaggcgctgatccgcgacgtgccaaacgagtactctatttacaaagagaaagagttcaccttcaacggcattcgtcagaccaaccgtaacggcctgctgtgggacaacagcctgaacgtcgacggtatcaaaaccggccacaccgacaaagccggctataacctggtggcctccgccactgaaggccagatgcgtctgatctctgccgtgatggggggacgtacgtttaaaggtcgcgaaacggaaagcaaaaaactgctgacctggggcttccgcttcttcgaaaccgtgaacccgctgaaagccggtaaagaatttgcctctgaacctgtctggtttggcgataacgaccgcgcttccctgggcgtggacaaagatctctatctgactatcccacgtggtcgtatgaaagatctgaaagccagctacgtgctgaataccaccgagctgcacgccccgctgcaaaagaatcaggtcgtgggtactatcaacttccagctggatggcaaaaccatcgatcagcgcccgctggtggtgctggaggaaattcctgaaggcaatttcttcggcaaaatcattgattacattaagctgatgttccatcactggtttggttaa

SEQ ID NO: 141594 - DNA, 321 bp, Enterobacter cloacae
gtggagcctactaatttaccagccaaacgcctgaatgaaaccagcggcgaagataagccgcaaattttccggactttacgtaatattgatctcaatttattgactatttttgaggcggtatatgtccacaaagggatcgttaatgctgcgaaaattcttaatctcacgccctctgcaattagccagtcaattcaaaaattgcgcgcgatatttcccgatcccttatttattcgtaaaggccagggcgtaacccccaccgcgtacgccacccatctgcatgagtacatcagccagggtgatgctgccaacttactgatttag

SEQ ID NO: 141595 - DNA, 357 bp, Enterobacter cloacae
atggcaacaatgaaacagctcgttgagtcagaaataagtgacttctttgctatttttggcagccccggcgagccggttactattgaggaggcgcagaaaacgcttctctcacggatttcccctatgctcagcaccgatatggcatggatcaaatgcgctgaacgtcttccagaaacacatgaacaggttttggttaacgatctcaatggtgagggggtgcttattgcctggcgagccgaatggcagagcgtttccgcccccacaggaaagtggcagtgggttttccagatcgaaggcattgagcatgatgacgttcgaatcgaagagtggcttccatacccatccccttctgcctga

SEQ ID NO: 141596 - DNA, 315 bp, Enterobacter cloacae
atgttcaggataatccagcctaatacctggtacgccgatccccacggcgcgccatgcaaaatcctccgagctacccacgaagtcatccactacatcagaaacggtcgcatctgcatcgccagcatgggccgctttaaccaggatttcgaaccgctgaccaaagcacaggccgagcggatcgccgaagaaatcgaaacagcagagcacatcgaaaaattaaggagcatgagacgtgatcggaatactcaagccagtaccggaatcgcagtggccggtacgatgccacgacccaaagcggagcaacgtgtgggctaa

SEQ ID NO: 141597 - DNA, 348 bp, Enterobacter cloacae
atggattacaccaaacttagtgacggtgaaatcagtgtcaggctcgcatatttcctgaagccaaagtacagcgccaccatccatccgcatgaaaataccggtgccaatttgtcgtggaactggctcaacacggtacagaacaccggttatttcccgctgcggcgcgccgaagagctttacccggcaatgaagaagcatcgaatcggcctggccccatcagggaagaccgtctggcaggcaactcatgagtctggtatcagctccactcatcgtaaccctctgcgtgctgtggcaatcgtctacctcctattgcaggagcaagccaatgttcaggataatccagcctaa

SEQ ID NO: 141598 - DNA, 975 bp, Enterobacter cloacae
atgacgccagcagcttattacaacgaaatcgacccattcgctgcccagtggctgcgtaacctgatcgccggaggtcatatcgcaactggcgaagttgatgaaaggagtattgaagatgtcacacctgacgacctgcgaggattcacgcagtgccacttcttcgccggaattggcgtctggtctcattccctgcgcctcgccggatggcctgacgataaaccagtctggaccggttcctgcccgtgccagcctttcagcgcggcaggcaaaggagatgggtttgatgacgagcggcacctctggccccacttcttccatctcatcagtgagtgcaggcctcagcatgtctttggcgaacaggttgcaagcggtaacgcaaacacatggttcgaccttgtacaagctgacctggaaggagtgggatacgccttcgggcttgtgccgtttacgtcagcgggcatcggtgcgccgcacatcagagagcgagcttattgggtggcaaactccggtggcgaacgactcaaccggatcgactcattgctacagcggcaggaatcaggacgggtcaccaaaagtgtgcttgaagcttccagggaccgtaatgctggcagcgtggccaacaccaacagcgagcgatcacaaagggagcgggaaaacagtaatcaggagcgatgggaaggatcggacgttcgacagactggattacgctgcggaacagggtttagtagcacccttgaggttaacggtttttggcgagatgcggactggctcttttgtcgagatggcaaatggcgtccagttgaacccggcacattcccgctggttgatggggctgccgcgcgcctgggacgagtcgagcccggggtggcaagagtggcaagcagcaaccgcgtcggcagactcaaaggctacggtaatgccataaacgcacaggctgcggctgaatttatccgggcttatatggagcggttatga

SEQ ID NO: 141599 - DNA, 198 bp, Enterobacter cloacae
atggaaactttattcgctctcgtcctgaccgtggcaatgaccaacggtgattatcaggacgtcattctcggcgtttacgacagccagcaggaatgcagccaggcagctactgagcagaaagtaacagctgaatgctggccggtagaaagcattctccgcaacggcgagttcccggcgaaatccatcgcgcagcactaa

SEQ ID NO: 141600 - DNA, 753 bp, Enterobacter cloacae
atgctaaatactacgcaagcatcatttagcaatttgcacatttatcattttgctaaaagcagtaacaatacagggatggaaaataaagaaatcagaaaagccaacctggaagcgctgtatgagaagcgccagcacgagtctggaatgactaaggcgcagttcgccgagctcatcgagacaagtccggctgcgcttagccagctactgggaccaaaccctcatcgcaatatcggcgataagatggctcgcaaaattgaaactgcgcttgatctgccttttggctggatggatgttttacacgcgagtgaagaaccttctaacgttgcatttcgaggactgaacgagacaaaaggaagttatcctgtaatcagctgggtaagtgcggggcaatggatggaagctgtagaaccttatcaccgaagagcgattgatcgctggtatgacactaccgttgtctgctcagacgattcattctggctggacgttaaaggggattctatgacctccccggccgggctgagcattccagagggggctgcgatacttgttgatcctgaagtcgaacctcgcaacgggaaactggttgtcgcgaagctcgaaggcgataacgaagcgacctttaagaagcttgtaatcgatgcaggcaggcgcttccttaagcctcttaaccccgcatatccaatgatagaggttaatggcaactgcaagattatcggtgttgtggttgatgccaagatactgaacattccataa

SEQ ID NO: 141601 - DNA, 234 bp, Enterobacter cloacae
atgagcaatgaactacaccgctggcgcaaggccgccactaccgacgaatgggcgcagctcgcaaagttggcaaacacgacgccaggttacctggaccagatcgcctacggaaatcgccgggcatctccagaaatggcatctgctatcgagaaaggcacgaagaattttcaccgccaggccccggtcctcaaagaaagcctggtattcgcatcgccgcgtgatactgcggcctaa

SEQ ID NO: 141602 - DNA, 543 bp, Enterobacter cloacae
atgcattcacttgcgtatcaacacaataccggaatacacccgggagcgatgataaaccgcgctcaagctaaggcggcgccggaccacgaaaagatccgcgatgcggtccgggcatggtcgtcggcgctggacaatcaggacgtcgtttcggcactgatcatcaacgaataccgggagcagggcgggaccgccatcagcttcccggaagacatcagcagggcgcgccagaaactttttcgctttctggataaccgtttcgactctgagcagtaccgcgagaacgtgcgccagctgacgcccgcaatcatggcggtcctgcctctggaatttcgcaaccgcctggtgccccagaacgacacgatgtcgctgatcgcctctgcgatgaaagagtgtgccgaggctaaacaggccgtactgctggatgcaccagagcatcagaagctgaaagaggtaagcgagggtatagcgtctctgttccgcctcatgccggagcaggtagggccgctgatgacgatggtcacttcgatgctgggggttatgtga

SEQ ID NO: 141603 - DNA, 351 bp, Enterobacter cloacae
atgattacgagtgctaacgactcaacggcaatgcaaatcatcatgaactcacagtaccgtgagttccctgaaacgcttctgatacttgaactctgccgcgcagcagcccgtgctgacggtcgcaagatcggcgaatctctccgggcctgcgcaaaggttaaagcccgccaagctaagaaccgcaacctgttcaacactctcactgaaatgagccgcagccagttcccggaagtgcagatgacccgcattcgtggatgcgtagagcggatggagaaggcgctggggcgcgagatgcgcgaactggatatcacggcagaagacgttatcgaatttagcgaggaagcagcatga

SEQ ID NO: 141604 - DNA, 354 bp, Enterobacter cloacae
atgagcaacatcgacaaactgaaatcagccgcagcgaaagcggtcgataacttcgacccgaatatgttcgttgaaactcgcgacgtgctggcgctgctggatgagctggaagccaaagacaagcagatcgacgatctgaaagcaacggcggcacattccaatgctggatggacggaggcgcatagacaggaagccagggctgaagccgcagagaaacggattgctgaccagtgcggaatcatcgcatcggcgaggaagttcatcagcgagtacgctggtcttggtgatgttggcgctgctgagttcataaaaataatcgaccgcgccgcagtcggtaaaggagaggcatcatga

SEQ ID NO: 141605 - DNA, 213 bp, Enterobacter cloacae
atgatgctaatgctgaacctgagtatcggttcgagtccgatcgccacacacagaacccactacctgggacccttcggccagagagccgacattgccttaccctcatcttcccggcctgtcgccgggttttttattccaggccccgggaaccatcctcgacatgccttcttgttaaatcgtcccgagggcctgaaccaactacacacggaataa

SEQ ID NO: 141606 - DNA, 921 bp, Enterobacter cloacae
atgacttatcgtctatataggcgcgaaaaagtaaagagcggtaattattatgtagcagtagcatgtcaccgttgtaacaaaagcatttatatattggatgacccttcaaaaggtgctaagggaataccgtcctttggcgatgctgatttttcaatcccatgcggccgttgcgggcacgatgatatttataggcctcaggagttagtggcattagaatcaacagaggatcttccttcaacctatccacctcgagccataatttctaaatcaccaagaaaaccgctaaacaagagctatccaaaagcgaagatagttatgggtgtcggatatattgaagatagacccagagctgctgctcttgttggaaggattattacatcatgggctgatgtagaagtacaatgcgcacttttactctctgctttaatgcatactggcatccctgaatcagcggctgtttttggaagtcttagacgtagtacctttcaatctgatgttttaaatgctgtagctgaagttgcactacagcacaaagacttgatgttgtttaaagcctatctcaagagaaaatctgctttggagaaggaaagaaatgacctagctcacggatgttttggagtttcagtaagcatcccagatcacatagtgtgggtttcacaaacggattttttgaattattcagtcgctcactctgctggaaaagatggtgtgacattaactgataaactatacgtttatgagttagggacacttgaaagaatcgcgtcagagataagcgacttctatcatcaattagggtatttggttggatatatcagggcgcgcaaagaggggcgggatgaattttgcgaggaaagatatcaagatctatgcaaattgccatacttaaaagagtttattaattcagctaaaaaaaaatga

SEQ ID NO: 141607 - DNA, 465 bp, Enterobacter cloacae
atgggcatcaaagtgaagggcgtcggtcaggttgtaaaaaatctgaataagttcatcgatgataccgctggcattaaggctgtaagggcgacttataaggttcttgatgttattggcatagacgcggctgtgatgacgccggtagacagctctaatctcatcaactcccaggctaagaatgtgagtttggatgctggcggggtgagagggaagctgatttattcagcgaaatatgctcttgccgtccacaatgcgtctgggaaattaaaaggccaaccgcgcgcagatttcggaatgacgagtaaccgttccgacgtgggcccgcaaaaaccaaaggcgtttggtggcggtacgaagcagggcaactactgggatccgcatggagaacctcaattcctgcttaaggcattaaagaagaacaaagatgtagcctatgatattttcaaaaaggaacttaaaccatga

SEQ ID NO: 141608 - DNA, 381 bp, Enterobacter cloacae
atgaatcctgacatgtacgagcgagtgcgggatatgtttgcgaatgcaggtttaagtgatggctatatatctcaactgctgttatttgaagacacgggcaaactcagcgacgcattcatggtattcgcacccggcggcggtagcgcactggtagatgatctctcctctgattattatgttgatgtagcggtcattggagccaaagataaaaggcgagctactgctgaacgagttaagttaattaccgcctacgttaaagccaaccaaacgactgacccctgcctgaattatatcgaaatgatgggggttcccggaccaatgccgacgacagagggtcgcatagtttttcagcttagattccgctgcgtatacggcgaataa

SEQ ID NO: 141609 - DNA, 765 bp, Enterobacter cloacae
atgcaaggctgtgctaatgattttggcaagctgatcgggaaagtagctgtgctacgcatggcctttggctgccccgatgcagtgccagcgctttccgagtggaagcgactgggcgcaatgaccacgaaaggcttcgattactcaatgaatacagtcagctctgaggctgatgattcaaagggtctggttgaaaacctggtcaacaacatggacttcacagtctccggtgacggcgagttccgcaagaacgataagtctgtagagattggcgcgatccacatgtcgaaatacattttcgatgaagtgcaggctgggcgtcagccaaccgtctgggttcgttttgatttcaccggggaagacgctggcacttatatcatggggtatttcaacaccacctcgtggtcaggtgacttcggaaccagtgatatttcaactttctccggtgagtggaaagtctacgatgcagacacggttgtgtttgagatcgctggagatgcgctcgccttcacaaccaaccttccttcaacgaaaaccgttgcgactggttcggcgctcaacatgagcgtagctgttacaggcggtacagctccgtatacgtatgtctggaaaaaagatggctcaacagtgagcggtcagactacagcgacgttcaataaggcgagcgcagtctctggtgatgctggttcatatacctgtgaagttaccgactctgctggcacgccagtaaaaatcacttcaaacgcctgcgctgtcactgtcagctaa

SEQ ID NO: 141610 - DNA, 687 bp, Enterobacter cloacae
atgatccctttaacagacattggcgaggttgtgctttcgagtagaaaggatggcgataaagagtaccttctaaggccatcattcgctgcaatgaccagaatcggttcgccggaagagatcgttgctgcatacgcaaccatccatggcagtgatgtgcaagatctcatagccgcatgtgcttctaatcttggacgacttcctgaatggctatcaccacaactttatcgcatggctgaaaagatcctttctgtttccatgcaggtggttcaggcgtgctgtgaagatgatttaaccccgatcataggggagtggaaagggtggtcaagatacatagtttaccggccaggcgcgctaagccgtaacgacattattgtcatcgcccaacacctaattacccacggcgttataggtaaagccaaaatcaggaagttgcagcggcatgaaacaaactcgaccacaacagcattcaacgccattgagtacatcaatgctgcacgcacccatttcgaaatgtcacgtgaagatgccgcacatctgacgatgacagagtttgcgctgctcctgaacgctaagtacccagaccagaaaggtcttaccagagaggaatacgacgcagtaatggatgatgacgagcgtcgctggaaggaaaaaatgatgcgcgaacagcaagaaaggtcaatgaagtag

SEQ ID NO: 141611 - DNA, 498 bp, Enterobacter cloacae
atgccaattatcgactatcccgactggctgcctctggcgcagaaggccagcaaaaacatgactctcgataccgggttccagaccgatcagccagcggtcggcccggctatcttcgagaatcaaaccgacgacttgaaagtgacctggtcactgacgtggttcttcactctggctgaggaaagagcattccagcagtggctacgcagcccaaactatctcaaccgtggcctgaactggttccggatgaatatcaatctgggcggtagtggcctgcaactccaggaacttcacttcacgcagatgccagtgcaaaccagtatcgacggcggagtggtgacctggacaggaaccgttattgccaactatctgtacaacgctgacgacgagttcgacgatatcattgttgaactaccgccgccatgggattcgtggctggatatcgtggttacgggttatccggacgggcgcgatccggaaagtcttccgagggttccctga

SEQ ID NO: 141612 - DNA, 1347 bp, Enterobacter cloacae
atgtctgccaaccacgctgcatttaatctgattttccgcttcgttgaaaattatgtcagccctattgccgggcgcatctcttcccagcgtcacgttatggctattcgtgacggatttatctcagcgatgccgtttatgattgtgggctcgtttttattagtgttcgcttacccgcctttttcgcctgataccacctggggttttgctcgcgcctggctggatatggcgaagcagtttgaaggtcaaattctgacgccgtttgatatgacgatgggggtgatgtccctttatatctgtgcggctatcgcctacaacctcggcaaacattacgttaaaacccatcagctggatccgttcatgtgcgcgatgctgtcgctgatggcgttcctgctggtcgccgcccctaaaaccaaaggcgctttgccggtcgatagcctgggagggaccggtattttcaccgcgattctggtggcgatctattgcgttgagatgatgcgtttcctgaaagcacacaatatcggcatccgcctgccagaccaggtaccgccgatgatcaaaaactcgtttgacctgctgatcccggtgctggtggtggtgctgacgctctatccgctgagtctgctgatccagtcgcagttcggtatgctgatcccacaggccatcatgtcgatattcaaaccgctggtctctgcggctgactcgctgcctgcgatcctgctggcggtgctgattggccacctgctgtggtttgccgggatccacggcgcggcgattgtctccgggatgctgcaaatgttctggctgacaaacctgggggcgaaccagaccgcgctggcggcgagccagcctttgccacacatctttatggaagccttctggacgttctttatcgttatcggcggatcgggggcgacgatggggctggtgttctgctatctgcgtagccgctccgcacacctgcgctccattggacgcctgagcgtggtgccaagcattttcaatatcaatgaaccggtgattttcggtacgccgattgtgatgaacccggtgttctttattcctttcctgctggcgccgatggttaatgccgtgctggcatgggcagcgatgaagtttgatctgattggccgcgtgatttccgtcgtgccgtggacggcaccggctccggttggtgccgcctgggcgctgggctgggatttccgtgcagccattctggtgctggttttggcctgcgtttccgccattatctatttcccgttcttcaaggtgtacgagaaacagttgcttcagcaggaagcggaagaagcacagcgtaatgaggaagaggaaaatcagcaggtcgcttag

SEQ ID NO: 141613 - DNA, 324 bp, Enterobacter cloacae
gtgcgctatccattttcgcgactgaccgtactccacggcttctttcaggatctcaacttccatcgtcttcttgcccagaaggcgctgaagctcccggacctgcttcagagcagcagtaagctcagaagcaggaacgacttcctctccagccgcaacggcggtgaggctgccttcctgatattgcttcttccacttaaacagcaggctgggctggataccatgcaggcgggcgacatgggagacattcatacccggctccatcgtctgctggataatggcgatcttctcctgaggagttttacgtttacggacttcttgccctaa

SEQ ID NO: 141614 - DNA, 1200 bp, Enterobacter cloacae
atgccactgaatgctcgtcaggtcgagactgcaaagcccagagataaagcctataaactcgctgatggcggagggctctatctcatggtcaatactaacggttcaaagtactggcgaatgaagtatcgatttgccggtaaagagaaaaaactctcgttcggaacctatcctgacatctcacttgcggaagcccgcactaagcgcgatgaagcgagaaaaacattggcaaatgataaagatcccggtgaagttaaaaaagccgaactacttgcccaaaaactatcggttacgaatacttttgaagcgatagcggttgagtggtacaacgcaaaagtttctggctggtcaaaaaactacgctgactatgttaaccgggccttcaaaaacaatgtatttccctttgttggatcgcagccggttaatgagataaagccactggagcttctgtctgtattgcagcgtatggaaaagcgaggtgcgccggagcttgccagtaaagtgcgccaacgttgtagcgaagtgttccgttacgctattgttactggccgagccgagtacaaccctgcggctgatcttggtagtgctttacaggggtacgagaaacaacattatccctttcttactgctgctgagctacccgagtttttacaaaagctttcacaatacaccggcagtctagtaacgcttctggcgacccgactactcatgcttacgggcttacgaaccgtcgaattacgtatggcagaatggagtgaaatcgacttcgaaaaccatatctgggaaataccgaaaagtagaatgaagatgaggcgaccccacatagtgcccctttctgctcaatccttagcagcacttcggcaactaaagcaattgaccggtacttaccagtttatctttgcaggtcgaaacgatgttaataaaccaatgagcgaagccagcatcaatatggttattaaaaggattggttacgataagagagcaaccggacatggttttcgtcacaccatgagcacaatcttgcatgaggaaggattcaacactgcttggattgagacccagctcgcgcatgtggacaagaacgcgattcgcgggacctataaccatgcgcagtatcttgaagggaggaaagagatgatgcagtggtatggggactatttggatggattgcgattggatggaaacgttgccagagttagttaa

SEQ ID NO: 141615 - DNA, 630 bp, Enterobacter cloacae
atgagtgagaactcgggagagttctcacctaactttctgatcataaataaagatgggtcggaagcttcaactggtaacgggtctgcaaaagaacttaactctgtaattgagatagcgtctactaaaattgttgacgctatacaaaacccgccaaaggcaccgcttgtatcttcttcgcttataaccgcattaataagcactgtatgtgctgcgacagctgcatttatttacaataaaattcattggcattctgttgttaaacgagagacaaaaacaaaactcttggaaagtatatcagatgtggttaatgagttgcgcaccgatgcgattagttattggttgaaaggctattcaaagaaatctgctaaatctttattagaagaggaaatgagaataaaagccagtttaaatataataaattcgactataactatctatgtctctcaaatttctttgctaaaacgaaaaggaattgagggtaagcttagggcttttcataacgagctttatgacatcattacaggtgatgattttgaaacccaaggaagaaaacaagacaaaggtaaggtttctgccatatcaacgaagtgcgtagcttttcgtgtattactgaatactattaaattttaa

SEQ ID NO: 141616 - DNA, 390 bp, Enterobacter cloacae
atgattacgaaattggttgctagcctcatgaaaacattgaaaattggttcagagttctcaaaagtccctagaggccggtaccgtagcgacgggaccgcaagtggcgagcgttttagagaggatttcttacggaatcgtctcaattcgttgtcttctggtgagaagctacagatagtcatcgatgatgaagttgaaggatacggttcctcatttttggttgagggtttcgctggtatggttaaatatggctatatgcatgccaatgaattgctcggtaaaattgaaataaaatataccaatccagattttgcgttctataagagaaagatagaacaatatatcaacgaggcgcagtttaattcgaaagcatatgaaccgactgtcgaataa

SEQ ID NO: 141617 - DNA, 1131 bp, Enterobacter cloacae
atgagaaaaataaccagaaaagaaagagatagggatgtcttacgtgcctatttgcatcgtacaggtagagacattatggtggcagggtgcaccagcattaaccctatatctaaagcatctaaaattaatcgttggataaataatcaaattaaagatggcttgaattgcgaaattaagaaaaatagagatctttatctgaccttgccagcggtaatgaatttctcgagtaattataatcgtacaatgcaagcgatacaaacaataaggcacctaacaggtcggcggatttttaataatcaatgttatcgactgtgttttgttgatttttcaaaaataaagtacatctctgcctcggctgcacttgtgttgactgcggaattgtctaaatgggatgactcagttcggcagcgcattcgcccgaaagtaaaaacatgggataagaatatactttcacagtttgacgagttaggcttttttgatctatttaggaacaaggatagtttcgagcttgagaaggaaaaagagccaagtaatattcgttttgttaagtatatgaaaggtcacttacatgacgatgagaaaactcagcatttgaaaaaagagatcaagcgcattgttggtgaggatttgggtaaatggacatttttgtatagtggattgtctgaagcaataaccaatgttgtccatcatgcatatccagataataagggatattctgaggaagataaaaaatggtatcttaccgcttcatatgatattgattcaagggttataaaagtagtgttttatgaccaaggtattaccattcccggttccctgccggaatcgaaactccatgagaagattctgagttatctttctaagcttccattggctgagcggaaaagagatgagcagttgttaaaagctgccgttgaaattaaacgctcaagcactggcgaggaagatcgaggtaaaggattacaagacttgttggagtttataaaacaaagaggtgaaggctacctttcaataatgagtggtaaaggactttacaaatattcacagcataataacaaaactgaggtaaaatcagtaagcttcactctacctgtttgtggtacactgatagtatggagtacagagctatga

SEQ ID NO: 141618 - DNA, 369 bp, Enterobacter cloacae
atgaaggcaatatgccactataaaggttgtaacaaaagcctgtcgaactcccgtaataagcgtttttgcagcaatgaatgccgccataaagctcaccgtattattgatgatgacaatatcgttaaactggtgaagcactcctggtggcttaacatcgaatctatgctgaaaaataatcctgccgggttaggaagtattaatgacccggatgatgttgtcgatatactccagttgtaccgggataagtcacatcatcaaagggcttacaatgtactgtatgatgaatgggtgatgggtgatgacgggctgccactctctcgtctgcgcccctggcttgagcttgaagtcagtcatctctatccgaactga

SEQ ID NO: 141619 - DNA, 1062 bp, Enterobacter cloacae
atgcgaaagctcgctagtttgctggttaccctgctgctttcagcgctacctttgaaagacgcgctggcgctcaactgctatctgggtggatcgggcggccccgtcgaggagacaaaaacgatctccccttttgccatacccagcaacgctcaggttggccaaaaaatatgggagtctgatgacattaaaattccggtgacctgcgacaacaacgtcacgagcaattttcagccggaagatgtctttgcgtgggtaaacccttatcctgccgcaaccgatccctattatgaactgggcgtcacctatgaaggcatagattacgatgccacaggccagcccaacggcgtggatacccgccagtgcctggacaacgataacatcaacatttacaccccggatcaaatccgccagatgggttgggagaatcgcatctgctccggcaatccggatgatatccatatttcacgcacgttcgtcgcccgattacgacttttcgtgagaattaaggctatgccgccgcatggctatgtcagttcgctcagcgattacatcgttgtacagtttgacggcaagggcggcgttaatcagatggccgacgcgaagaacctcaagtatcacatcaacgggctgcaaaacattacggtgcttgattgcggggcgacgtttagcattttccctgaaaatcaggagatcgacttcggcaccttcagcgcgcgtgacattgtgaatcagcagacgcgtatgcgcacattttcaatacgaaccaccaaagtgcaggatgcccagtgctcggacggatttaagatggactcgtcgttttacacaaccgaaacgctcagtgcagacgacaccgcagtactgatagggaatgggttaaagctgcgtattcttaacggaacggagccttacaccttcaaccagtacaaggagtacgccgattttacgggcgataagatgaatgttgagcaaaactacacggctgaactttcacgggaggaagggaaagcgattcagtccgggccgtttgaaaccgtggtactgttcaaaattaactaccactag

SEQ ID NO: 141620 - DNA, 246 bp, Enterobacter cloacae
atgaataatactgaacgtatcgtaagggtaatggtgttttacaaaataaatatatttaaagagataatattccgggcgctccatgatcttttacccgattacgtactgaacattactcaggtcgattccactgaacaggcgctggcggcggtggcggataataacgtggatgttttcttcactgaatttaattatctgcttaatcataaagagtggagtgcggaggtcagcagccgttttaggtaa

SEQ ID NO: 141621 - DNA, 192 bp, Enterobacter cloacae
atgctggatcggacagtattagagaaagcaataatggtagcggccgaattgcagggccatgaacttaacgggctggatcgccttatggttcgtaaccgagttgccacttgtctggctgcgaaagagcggcatcagcaaaggatgaatgccaaaccgtatcaatggcggaggccggatagaccaaaacgataa

SEQ ID NO: 141622 - DNA, 600 bp, Enterobacter cloacae
atgaatacagctaacaatgaaacacttgctaccatccgtatgtttggcccgctaggcaagaccttcggtaaaactcaccagcgccttgtaaggactacgcatgaggcttttcgggctctggccgccacaattccgggatttgaaaagtatatgaattgcagtagggcgcgtggcttaacgtatgcgatttttgtcgggaaaaagaacattggagtggatgatctggaatttccgaacaatgggcgcgagattcatatcgtgccggtgattattggcagcaagaaagcaggtgtgctccagactattttaggagtcgcgctagtagctgccgcaatctggatgcctggtattagcattgcagccagtaatatgatgtttgctgctggttcagcaatggcggtaggtggcgtaatgcaaatgatatctccgcaggtgccaggccttgccagtaagcaaagcgccgataacaaggcatcctatgcgtttggcggtgtcacgaacaccgcggctcaaggatatccagtaccgcttctctacggtaagcgtcgcatcggcggtgccattatttctgccggtatctatgttgaggaccagcaatga

SEQ ID NO: 141623 - DNA, 294 bp, Enterobacter cloacae
atgagtgagaagttgaccgataaattcaatgccagtctgggtggatatgtacccgcatcgcctggctggaatttgcgtgaacagaatagtgcaggtgagaatgtttatcatccggtgatggcttggcgggagtgcgccggaacggggttgttgtctgatggagtattggttcctgtgcttccttgcggaatgacggggaaggcatcatccgagattgacggggatgtgatgtatgtatttcacgagtggttaacccctaatggcaatggcacttttcgtgacaggaatttttaa

SEQ ID NO: 141624 - DNA, 327 bp, Enterobacter cloacae
atgaaaactttacctgcaacaactcagcgggcagcgaagccctgcctgtcacccgtggctgtctggcaaatgttactggcgcgtttgctggaacagcactacggtctgacaataaacgacaccccattcagcgatgaagttgttatacagcaacatatcgatgccggtatcaccctgtcagatgccgtgaattttctggtggaaaaatacgaactggtccgtatcgacaggaagggatttcgctggcaggaacaatccccttaccttcgggctgtcgatattctgagggcaagacaggcaataggtcttttacgaggatctcattga

SEQ ID NO: 141625 - DNA, 930 bp, Enterobacter cloacae
atgacgacgaaaaaagcggattacatctggttcaacggtgagatggtacgttgggaagaggcaaaggtgcacgtcatgtcccatgccctgcactacggcacctccgtcttcgaaggcatccgttgctacgactctcacaaaggcccggtcgttttccgtcaccgcgagcacatgcagcgcctgcgtgactccgccaaaatctatcgtttcccggtctctcagagcgttgatgaactgatggaagcctgccgcgccgtgctgcgcaaaaataacctgaccagcgcctatattcgcccgctggtttttgttggtgatgttggtatgggcgtaaacccgccggacggttacagcaccgacgtgatcatcgcggcgttcccgtggggggcttatctgggcgcggaagcgctggatcaggggatcgatgcgatggtttcttcctggaaccgcgccgcgccgaacaccattccaaccgccgcgaaagcgggcggtaactacctctcctcactgctggtcggcagcgaagcgcgccgtcacggctatcaggaagggattgcgctggacgtcaacggctacatctccgaaggcgcgggtgaaaacctgtttgaagtgaaagatggcgtgctgttcactccgccgtttacctcttccgcgctgccgggcattacccgtgacgcgatcatcaagctggcgaaagacctcggtctggaagtccgtgagcaggtactctctcgcgaatccctgtacctggcggacgaagtgttcatgtccggtaccgcggcagaaattaccccggtacgcagcgtcgatggtatccaggtgggcgaaggccactgcggtccggtcaccaaacgtattcagcaagcattctttggcctcttcaccggcgaaaccgaagacaaatggggctggttggatcaggttaatcaataa

SEQ ID NO: 141626 - DNA, 279 bp, Enterobacter cloacae
atgagcggtaagcgttatcctgaagagtttaaaattgaagcagtcaaacaggttgttgatcgcggttattctgttgccagcgttgcaacgcgtctcgatatcaccacccacagcctttacgcctggataaagaactacggtccggattcttccactaataaagaacagtcagatgctcaggccgagatccgccgtcttcagaaagagctgaagcgggttaccgacgaacgggacatattaaaaaaagccgcggcgtacttcgcaaagctgtccgactga

SEQ ID NO: 141627 - DNA, 432 bp, Enterobacter cloacae; identical to SEQ ID NO: 15290

SEQ ID NO: 141628 - DNA, 789 bp, Enterobacter cloacae
atgtatgttgcagtagggcagttcgcggtgacgccggactggaatgaaaacgcggaaaaatgcgtctccctgatgcatcaggcgaagcaaaagggggcgtcgttgctggtacttcccgaggcgttactggcccgtgatgatggcgatccggacctgtcggtaaagtctgcgcaaacgctggaaggggcgtttctgaaacgactgctggccgaaagcgttggcaacacgctcaccacgatattgacggtccatgttccgtccacgccggggcgcgcggtgaacacgctggtggcgatacgtgaaggcgccattgtcgcgagctacgccaaacttcatctgtatgatgcgttcagcgttcaggagtcgcgcctggtcgatccggggagtgtaattccgccgctgattgaggtggagggttttaaggtgggcctgatgacctgctacgacattcgttttcccgagctggcgctgaacctggcattgcagggggccgaggtgctggttctgcctgccgcctgggtcaaaggaccgcttaaggagcatcactgggcgacgctgctggcagcacgcgcgctggataccacctgttacgtggtagccgcgggtgaatgtggtaacaaaaatatcgggcagagcagggttgtcgatccgctgggggtgacggttgttgcggcagcggagacgcctgcgttattgctgacagagataatttcagcccgaatagcgcttgcgcggcagcaattacctgttctgcgcaatcgcaggtttgcgccaccgcaattaatgtga

SEQ ID NO: 141629 - DNA, 1644 bp, Enterobacter cloacae
atgcttggggacgaactcggcccaacgattatctggataattatttatctgctatgtgccgtggcgatacgactattgcaccgacgctatcagcgtgaagcgaaagaaaacggtgaaagggacgttctgcaacgctggcttccgcgtattaataatatcgcctttattcacgggctgggaatttcatcactctatttaattacgccacagacgcagaattttgactttttcctgttacttaatatcagcatcgccgccatcgtcgccgccaatgcgacgcatctgacgcctgtcatcagtacctttacgcgttttttcttcgcctcctggggggtgctgaacctcggtattatctggcggctggatgagttgatgttcatcgtgctcatgctgaatctgctttacggcttcgcgatttaccgccatgcgttaacttcccatgcgttctttattcagcaagcgctgcttgaggaaaaaagctcacgcctggcggaacagtttcgtcaggccaaagaggacgcggagcaggcactgctggataaaaatcagtttctgacaaccgccagccacgatctgcgccagcccgtacacgcaatgggctttctgatcgaagccatcctccaccgaaaccgggacgacagcctgacgccgcagcttcttgaccttcagcagagcgttcgctcggtacatttaatgctcaactctctgctcgatctcagcaaaatagaatccgggaatgtcctctctgccccgaccaaagtggatatcggtgctctgctcgactcggtcatcacgctgtttcgcgaagaggccaacagccgcgcgcttaggctgtgcatccggcggcctaaacgccatatctacgtgatgggcgatccgctgctggtgcgacagtccctgattaacctgattcaaaacgcccttcgctacacgctccagggcggggtgctggtcgccatccgaccgcgcggtgatgagtgtatggtggaggtgtgggacacgggagtcggtatcgccgatgaagagaagggcaaaatcttctcaccttactaccgccccgagctggcatggaagatcgacagcgccggacacgggctgggactggccgtcgttgcccgttgtgccaagctgatgaaggtgaaatacgggatgcaatccattgaaggtaaaggctcacgcttctggatgcgctttacccaatatgctggcgaagacatcgtgctggaccccccgcccgccgctgataacaccgccacgccggtacgctatgcgccgctgcacggttcctgcctggtcgtcgatgacgacccgctggtgacttctgcctgggagagcctgatgagcgtctggggaatcgacgtacgctgtgcggcctccgctgaagaagcgtttgccatcatcgacgacggctttacgccgttcgccgtgctgtgcgaccagcgcctgcgatccggcgaaagcggcttcgatatcctgaaagcgctttttgaacgtctgccggatatgagcggcgcgatagtcagcggcgaatttaattcaccggttctgctggaggcggagcaggaggggtacctggtgctccgcaagcctctggagccggctaaactgcatgcgctgctgacgcagtggtcggggtgtcgttaa

SEQ ID NO: 141630 - DNA, 1050 bp, Enterobacter cloacae
atggcggaagctacaaacacgcatgattactggcagctctcacgccttgcccgctggcatgttgaaagcgaagccatgaaccaggcattggcaattgtggtggccgcgcagggtaaactgccgatgtcacgcgtctgggggatgggcacgtcagcatcgagcgatggtcagtttttcccgacagcgcggcatggcgaagccatgaacatggtcaatgccaaatatggttctgttcccggcctcaaagcgtatactcacgtaagcgaccagttcgcgccattcgcttgtcagtcgatcccggcgaccgtgagcgaggcaccgtatattctcgatggactactgatgaacgaggtcggtcgccatgttcgcgaacagtatgccgatacagcaggattcaccgaccatttgttcggagccagtagcctgctcggctacaatctcgttctgcgaatcagggatctgccatcgaagcggttgtacgtatttaatcccgatacgacccccagggagttacgcaagttggtaggtggaaaagcccgggaggatcttatcgttgcgaactggcctgatattttccgttgtgccgcgacgatgaccgctggcaaaatcaggcccagccaactcctgcgcaagctcgcttcttacccacgacaaaacaaccttgcagttgcgcttcgtgaagttggtcgtattgaacggacccttttcattattgagtggatcctggatacggacatgcagcggcgtgctcagatcggtcttaacaagggagaggcccaccatgcgctcaaaaatgcgctccgtatcgggaggcagggggaaattcgcgatcgcacgacagaggggcagcactaccgaatcgctgggctcaatttattgactgcggtgatcatttactggaataccgtccatcttggtcatgccgtcacggagcggcggaacgaagggttggatgttccccctgaatttcttccccacatatccccattgggctgggcgcacattctactgactggcgaatatctttggcccaaggaaccgaaagcttag

SEQ ID NO: 141631 - DNA, 720 bp, Enterobacter cloacae
atggccgatatctttgaggagaattaccgctgttacggctatcggcgccttcacgcgatgcttcgcggtaacaacagggttatttctgaaaaggttgtccgcagactgatggcagaagagcagctcgttgttaagcgcaccaggcgacgacgatacaactcttactgtggcgaaatcggcccggcaccggaaaatttactcgcccgggattttagttcctgcaggccaaatgagaagtggctgaccgatattacggagttccagcttccggctggaaaagtctatctgtcgccggttatcgactgctttgatggcctggttgtaagctggtcgataggaacacgcccggacgcgacgctggtgaatacgatgctcgatgacgcactcgatacgctcaacgaacatgataaaccagtgatacacagcgatcgtggtggccattaccggtggccgggctggctcgagcgtatcaacacctccggacttataaggtccatgtcgcgcaaaggatgctcgtcggataatgctgcgtgtgaaggcttcttcgggcgtatcaaaaacgaaatgttctatggcagagactgggcgggtatcacgctggaaaaatttatctgcttcctggacaggtacatacgctggtataacgagaaacgtatcaagctatcattaggtgcaatgagtcctgtgaagtaccggcagcatcttgggatcacaacataa

SEQ ID NO: 141632 - DNA, 240 bp, Enterobacter cloacae
atgccccgcaaatcagacattcacagcgcatttgtcgctgcaatacagctaaaccctaagggatatcagtgtttacgcacggatgacttcatccgggagttacgtgcacggaactggcatttcacgccggacgacgccaacgagtggatagagcgctatcaggagttcttcgtcgacaagacgccgaacgacaggccgaacaggttgtggatgatgcgcaacatggagagggtgatctga

SEQ ID NO: 141633 - DNA, 318 bp, Enterobacter cloacae
atgggcttcccttcaccggcgacggattacgtagagcgcaggctttgtcctgaaaccatctgcggaattggcattgacagccgcattctcgaaacgtcatccgggttcgcagttatcgagccagtaaccaggctggtacagaatcaggttctgctgattctgtccggcggtcgaactcagtttgcccgggtcatgggtcgggcgttaatcacggacgatggcgaggcgatagagggcccggcactggaagaggttgaggtaatggggcgggtgacgttcttcatcaacagcgtgatcgaagacgacagggtggtttga

SEQ ID NO: 141634 - DNA, 408 bp, Enterobacter cloacae
atgggcgcggacgtgcttgatgttgagcgtgccgccgatcatcggtttcaacgcctcgtaggtggcatcgcccttcgggatgtagagcttggtgtcgcccaggtcacgaatgcgcggggcgaagcggaagcccagcaggtgcatcaacgcgaagacgtggtccgtgaaccctgccgtgtcggtgtagtgctcctcgatccgcaggtcggattcgtgatacagcaggccgtcgagcacgtaggtcgagtcgcgcacgccgacgttcacgaccttggtgtggaacggcgcgtactggtcggagatatgggtgtagaacgtccgccctgggctgctgccgtatttcggattgatgtggccggtgctctcggccttgctgccggtgcggaagttctggccgtccgacgatga

SEQ ID NO: 141635 - DNA, 708 bp, Enterobacter cloacae
gtgttaaaagataagtcggaacaacagaaagctgatttttttaatcggataacagacattacggtaaaaattaactctgccactgatgatttaacttatctgatgggtagcaatagcacttattttactgaggatgatgctaaaaatattcttgaaatgcttgaaaatataacatcattgacaaccaaagttttagtaagtgcaatagactcaattgcacctggtgatatcgccacagatagcaaagatacaggtgttaatgcgatacaagaagaccctcttgatcctgatttgatatcaaaactccctgatatggtgatagagataatcgctattattggtctcaactctaccatgaaactcattaaatcctttggtggaacaacattcccgattggtaagggaattcgttttcttggtggccctaacgccaaaaggttgagaacaatccttagcgatgctgaaatcaaagagttatcgatttattttgctggagtccccctgtatcttccgaggtgtgaccgtgttttacgtgaaatccgcaatcgtgtatttcttaaggaatatcatgcaatgagacaagctggagcctcgtctttgaaatgtatgcgtgaattaccacctaaatatggggtcacagaccgatacggctgggaccttcttaaaaaacacagggaattagtcaaaagcactggcagcgtcaaataa

SEQ ID NO: 141636 - DNA, 2118 bp, Enterobacter cloacae
atggccagaaatcttgcattagcactgagtcttaccgcaaaagacagtggttctaaagtgctacgcgccgctatgcaggcgatgaaaaaacaaaatgaagagtttgaagcaagcacaaaaagaaccagtgaaacaggtgtcagggcatcaaaacgcctgactgaagaatatcgccgagccagtacagctcgctcaacacttggcattcgttctgaacgtgagattcggcgtgaaattcagcagacgcaagccgcctataatcgactaacccgagcgggtacgatgtcggctaatgaacagaaccgtgcattcagaggcatgactgaacgtgttagcaagttgcgtactgagctagttggtgtcagcgaaacaatgaccaaaatgcaacgtctgcgggcggtggggtctacggttgctgctatagcaggtggagtgacagcagcgacgatgatcattaaagacccagttcagcgtcagatggcatttgaacgtaagaatgccgagctttctaatacagcgtttaatgaattatcggccgacgagagaaaggaaaaaatcccggtaataaataatgctattcgtgaaacagttcgtcgcagtggcgggactccggaagccgctcagttggcgcttggttcattatttggtaaaggacaggtagacagtgataccgccatgaaaatacttccggatattatgaagtatgccaatgcaacaggcgctgacccaaaagaccttgcagaaattgcatctgctggtattgcaaactttggtatcaaaccagaggatttacctgagttttttgataagtctgttcgctccagtgaaaatggcggttttgaattagctgatatggcgaagaaactatcaacgcagatgtcagcagcaagtaagctgggtatgagggggcttcaggattatgataaattactggcaatgaatcaggctaatgtattgacgtccggcacaccagactcagcggcaactaacgttgaaggatatttaaataaaataaccagttctgatactcaaaatgctatgaaagactatcgttttcggggtaagaatggtaaggctgttccttatactgagtacttaacacaacaacgagaaaaaggtataaatatctcagatgcctttatgaatgctgtagatagcattgtttcatccaataaaggtgttaagagattaagggctgagtcaaaacagtatcaagggacagaaagaggtaataatgcagatgctgcgttaaaggttcttatttcttccattacatctaaaatcattgccgacagagaagcaggtgcagcactggcgacaaatattctacaaaaggactatatcaaaaaccagatatcaggaactcggaactcaaaaggcgctggagaggcatcatttgacgtaatttcatcaacgccagattttaaatcccagcaatttgaatctgagaaaatgttttctgaacaggatgcaatgaaacctttggctgatatgtatggcgaccttgcatctaagttaaccaactactctaaagaatatccagaattaaccacagcggtttccggagcaactacggcgattaaagcaatgtcaacagcagctgtggcgtttgccggattaagccttcttacaggcggaggttttaaaatacctggtggcggggctgggcctagtggcgttctggggcgaacctggggagcaatcacaaaaggtggtggccctctaaaatggcgagttgcgggccctctggctgcggcttatgcagcctatgacctcaataatacctatgatgatgcccgagatgatgccggtaatgcaggtatgaatactggtgagtttctcgtcaacaaaatgaaagagcgggataagaataagaagccactcttcgatatcgatccgggtaaagcatttagctcttggtggagctcaccttctactattgggaaggttgacccagcaacaacaggcgtaccatcatatttacttccccagcagcaaaaaaatcaacctgtcacgatcattaccaaagtgatgttggatcagcgggaaattgcacagggagtcaatgagtacaatggtgaacaatccaaccgtggctctatgagtagttcgcagtga

SEQ ID NO: 141637 - DNA, 906 bp, Enterobacter cloacae
atgattgttaacaagcagaatctgaacagcatttatgtaaacgtaaaggccattttcacaaagcgtgctgaggaagcgactccgctttaccctcaaatatcaactaaaatatcctcttcaacaaaaacgactgattatcctttcttggggtattttccgagtttgcgtgaatggattggtgagcgagtaattaaaagccttaccacatataaattctcaattgaaaacaggaaatttgaatcaacgattagtatttcgcgtgaagatattgaagatgataatattggtatggttaaaagcatggtttctgatatggcagaagctgcggcgcaccatccagatgagttgcttttcgaattgattaagaatggtttccacaataagtgctatgacgggaaaccgtttttctctgataaacatccagtcgttattggtacgaatgaatcatttgtgtccaatattcaggttccggctacaagtgctgatgaaaagccgatgtggttactactggacacaacgcgccctatcaatccttttatctggcaagagcgtattccttatcaggttcaacagctgaccagttctgatgatacgggaacatttattaatgacgagtactattatggtgtccgtggtcgtgggaatatgggttacggattctggcagatggcctttgcgagcaagaaagagctgactactgaaaacttcaacgatttgtacaatcgcatgagctcccaaaagaatgacgcgggtcgaccattgcgtgttaaaccaaccattctacttactggcgtgaagaatcgcgaagctgcattcaatattgcaaaagcccagacgctggacaatatgaaaccgaaccctaactatggtctggttgaagtaattgtgactcctttcctcgactga

SEQ ID NO: 141638 - DNA, 315 bp, Enterobacter cloacae
atgtctgttgaaaaagtgaataagtgtgcgccgcaaaccggatgttctaccgtctggaatgtccttcatttagctgccgagaatatcccaactgaaagagagcgcgacaacgtccgttgtgacgctgaggcgcatcgtgacgctttgctatcaggactagaaacgcttggcgtactgctgtcggaatctaatcatggtcatcaatttaacgactatgaaatgatgagtattggtgactttataaaaagctctgctgctcttattaatggaatgaataccctaatcactggatgtgatgaaatgaaaaaaagataa

SEQ ID NO: 141639 - DNA, 195 bp, Enterobacter cloacae
atggctactcgtgcaataaataataaatcagccactaaagggatacgtttccctcacgaaatgattgaagaaattgaatcttacattgagcaggaaaagttaatcaataaaaatgctaacttctcggcgtgggttttagatgcctgtgaacagaaaataaggaaagaaaaacgacgcagaattacaaaggagtaa

SEQ ID NO: 141640 - DNA, 192 bp, Enterobacter cloacae
atgcaaaaaaccagtaaaagaacgcttgtttttttgcttatcggtttattcattgagtcgaatagcaagcaagaagaccaatttttgacaggtaagctggaggatttttttgcatttatttttgcactatacagagggatgattggtatcaagactgcactgacaatgtgtgagtcaatgcagtcagaataa

SEQ ID NO: 141641 - DNA, 918 bp, Enterobacter cloacae
atgaaaagtcacaatcaagaaaaagcaaaaaaagaagttctggaattcattaaaaagaacaaagcactatactccaggcgtatatcaacctataaaaaagaagagttaatgaatgcattctactgcagagagttattctttaactgtgaaagagcaatcaaacgcatggaaataaacagcatggagtttgataataaaaagctttctgacagccaaaagagaactctgcgaaacaaattcatgcaaaacgattcaaataaggaaaagttaaaaacgttgtcaacacgcatcgaaaaccttgatattttaaagcaagacaatgtggatttaattatctggaaacaaaaccccagacaggctgtgcaaaaacttacctttgaaaggatttttaatgaatccagaaatgcacatcccagtataaaggagcacatgcgttttcttgaagcatgccatgcatgcttccccttcactcctaatgattaccctaatgcccgaagcgccaatcctgagttaagctctgtttttaataaaatcaatcatctgaccagccaaatcattccagataattatccttactcaactgaaatggcctctttatctaatttatggattacaattgatcttcgttactctgattatattctctccagccaaattgcaggcatcatcaaactcgaaaggcagtcatatccaaaacaagtgcaaaatgatatagataattggctgagttttgaaacaataaaaaggaaattgctcacacttgacacattcgttatcatcgatgctttaatattgagcgcagctaaaggcgtaatcttaaaaaacactgaaataaacaactcacttaattcctcaggcactgagttgcgtaatatcaagaacgcgatcgattatttggtaatgactccaacttactga

SEQ ID NO: 141642 - DNA, 885 bp, Enterobacter cloacae
atgaaatgcaataaagaattaaatcagctgtattcgccacttagtctgctgcccagcaatgttgcagaggaagtcactaaacgtctgcacgacattattcattaccagcccatcatcggcataatgggaaagactggtgctgggaagtcgagtttgtgtaacgcactgtttcgcagcacggtctcggccgtcagtcataccactgcgtgtacccgtgagccacagcgttttacgctgcaggcaggtgaacgccaggtgacgctgattgatctgcccggggtgggcgaaagcccggagcgggatgaagagtatcaggcactgtatcaacgtatctggccggagctggacctggtgctctggctgattaaagccgatgaccgggcactgacccccgactgtgatttttattttcggatgctgtcaccaggcagtgctgggagggataaggtgctgtttgtcctgacccaagccgataaaatcgagccttcccgtgaatggagcggctttcttaatcaaccttcagagcaacagttaaaacacctgaaggaaaagcagcgcgcggtgtgctcgttattcaaccacccggcactcccggtgatcaccgtatcagcagccactggctggcatctgcctgagctggtggaggtgctgtttcgctcactgcctgcccgcgccagcagtgccgtcagttcggtcatcagaccacaataccgcacgcaaaaaattgaggcgcaggcgcaacaggattttggcgatacggtcagcgacgtgatgacacacaccctgtcggagctgtcccttccctccgcagtgaatgcggtggtcagtaccgtgattagtgcggtggtctctgttgcccgcagtgtctggcggtttttcttctga

SEQ ID NO: 141643 - DNA, 738 bp, Enterobacter cloacae
atgtcacagactgagcaccgctatgaccgactggcggtcagactgtctctcattatcagtcgtctgctggcaggcgaaacactgagcgtgaagacactggcagtcgagtttggtgtctcggtacgcaccctgcgccgcgattttcgtgagcggctgatatatctgaaccttgagtaccgtcatgggcactgccgattgttgtcagatcccggtatggcacagcgtgccccgggaaccctgtgctttatgcgcaatgttgggcttcagcaggtgtttccagaaacggaccttcgcttggtaaacacgctaacggacagtgaggatatctcatcctgtctggtctggcaggaggacgccgaaagcgcccccgtccgccccggtctcttttcccgactggtcgataccatcattcagcagcagtgcatccgggaactggctgacggtgtgcgggctgaacacctggcaccgtaccggcttattttccttgagggagcgttgtatctggtcggtgagcagcacggaaggatcgttgttctgccgctgtccgggatcaccgccatcaccgtcctgagtgagggcttcgagcgtcgtgatacggtatgtcaactcacccgtcaggtggccttcatccgggcgctgcctcatttcccggtcatgcacgacgtgatggctgcatcccattctgcgccacctttaacagaggagaagagccctgctgcaactaacacgacggggtga

SEQ ID NO: 141644 - DNA, 273 bp, Enterobacter cloacae
atgcatccgcgttatcgtcgcatgattgccagcgccctggccctcagcagtgtcagtctttttatccccaccgtagcccaggctggatacagtgattacgaggcattccgtctggtcagaacggagaacagcgccgcgggcggggcacagaaaatctgcacgtatcagagtatggtcacccgaaaatatgtccagttggacatgccctatacctgccaaggcatgatgtttcgcaaccggaacgacgggctgttttacgacagaacaaactaa

SEQ ID NO: 141645 - DNA, 297 bp, Enterobacter cloacae
atgcctttgagcctttgtctcagcctgtcaaccctagtggggctgattatcacggttgttgatacccgtattgtcgggttcgggtattcagcatgggccgccgtgctgcagtgtgtcctgccgggcctgggcgtctggctgggtaatctcatccgaaaatggatcatgccggatgcggtttacggaagtaccggtgccgtcattcaggcccgtctgctctgggcggtattgccccagtttattggctggttcatcggatttatggtcgtcatgagcatactgggtatccgggcctga

SEQ ID NO: 141646 - DNA, 240 bp, Enterobacter cloacae
atgactgaatcgttaaccctgcctcccggttcgttctcacgtcagcaggccgaaacccttatccgtctgtaccgtaatatcaccattgaagacgaccagggcagtcacttccgcctggtggttcgcgacaccgaaggccggacggtctggcgggcatggaactttgaaccggatgccggtgaaggtcttaacggctacatccggcagtatggcatccacaaagacaccgttacccgctga

SEQ ID NO: 141647 - DNA, 459 bp, Enterobacter cloacae
atgacaacgcagacgcagtacgacctcgcacccgctaaccaacccgaatttgaactgaccgtcacgccagtccccgatgaacagcgtatcgatttctggccgcaacacttcggcagcataccgcagtggctaaccttggagccgcatatcttcgcctggatggaccgcttctgtacgacctacggcggtggtatctggtcgttccacaccctgagcaacagcggggcatttatggcccccgagtatgacagtgacgataaatggcatctgtttaactgtctgaatggcaacgatgcagatatgagtgcagaagccgccggtatcgcggtctgcctgattgaatacagccaccatgcctgtcgcaccgaatgcgatgcaatgaccgcacacttctaccgcctgcgggactacgccctgcagcatcctgaagcccacgccattctgcgtatcatcgactga

SEQ ID NO: 141648 - DNA, 201 bp, Enterobacter cloacae
atgggcaatcaactgattctggttgtccagatacagcacccggaacgcttcccgctcaagtgcggccatatgcagtcgcagccattcacggacagcatgggtggaggtgaaggccacgccgggctcatgcaggtgccggtccagcgccctgagcgcccgctggatgagacgccggtcgtgtggcgtcatctcgccgggtaa

SEQ ID NO: 141649 - DNA, 1065 bp, Enterobacter cloacae
  misc_feature (1046)..(1055): n is a, c, g, or t
atgtttctggcaggtgcgattttcatcctgacgctggtactggtcatctggcagccgaaggggctgagcattggctggagtgccgtcatcggtgcggcgctggcgctgctgaccggcgtggtgcacatcggtgatattccggtggtctggcagattgtctggaacgccacgggcacgttcattgcggtcatcattatcagcctgctgctcgatgagtccggcttttttgagtgggccgcgctgcacgtttcccgctggggaggcggcaggggccggctgctgttcacgtatatcgttctgctgggtgccgcagtggcggcgctgtttgccaatgacggagccgcgctaattctgacgccgatcgttattgccatgctgctggcgctgggattcactcccggctccacgctggcgtttgtgatggcagcgggctttatcgctgacacctccagcctgccgctcatcgtatcgaacctggtgaacatcgtaacggctgacttctttacgctgggcttcagcgagtacgcatccgtcatggtgccggtgaacattgcctccattgcggccacgctggtgatgcttcatctctttttccgcagggacatcccggtcacctatgacctggcgaagctgaaggcaccgcgggaagccatccgggatgcacgaacctttaaggctggctgggtggttttggttcttctgctggttggcttttttgctctggagccgctcggcgtgccggtcagcctggtggcggcggtggcggcgtttattctctggctggttgcccgcaaaggacacgtgattgacgccggcagggtgctgaaaggcgcgccctggcagatcgttatcttttcgctgggcatgtatctggtggtatacggactgcgtaacgccggactgactgattacctttccgccgccctgaaccggtttgcagagcacggcgtatggggcgcaacgctcggcaccggcttcctgacggcggcactctcgtccgtcatgaacaacatgcccaccgtgctggttggcgcgttgtcgattgnnnnnnnnnntgtcgattga

SEQ ID NO: 141650 - DNA, 594 bp, Enterobacter cloacae
atgattttattcgccgactataacaccccttatcttttcgctatttcctttgtactgttgatcggcctgttagaaatttttgcgcttatctgcggtcacatgctctccggtgctcttgatgcacatcttgaccattatgattccataaccacaggtcatattagccaggcacttctttatctcaatattggaagattgccagctctcgtcgttctctgcttactggctggtttttttggtcttattggcatcctgttgcagcatgcctgcatcatggtctggcaatcaccactgtcgaacctgttcgtggttcctgtcagtttactgtttacgattattgcggtgcattataccggtaaaatagttgcgccctggattccacgcgaccatagttcagctattacagaagaagaatatattggtagcatggcgttaattaccggtcatcaagccacttcaggtaatccctgcgaaggaaaactcaccgatcaatttggccaaatacattatttactactggagcctgaagaaggaaaaattttcactaaaggagacaaagtgttaattatttgggtgatgctgccaacttactga

SEQ ID NO: 141651 - DNA, 708 bp, Enterobacter cloacae
atgaaacccattattggattcaatcggcatttagagatggattggcttgttcaaaccgcatcctggtcggcgaatgggattcacgggcaggcattaaaaaataaaattgatagtttacttgcccctagttttgacagcaaagtagcacaagataaaaccagaaatcttctttttggcatttgggattcagaatcgaaatcggtgccaaaagcatttcattccgacgcctgtaaattgctcattgaacacagtgaaataaatatagctattcattggggaatgatgcttgttaaataccccttcttttataatatcgtagtacaaattggtagaatgaccaagcatgaaggtctgttcatttacaatcaattagagcaacgcattactgaaagctatggggatacttcaactatcaagcgttgtatgcaatttgttgttcgaaccttaataaatctagaattgttatctaaccctaaatcaggcacataccagttgcgaaaatcaattgcgattaatcacgataacgttatcgcttggctgactgaagtatcagtgagggctcaaggaaactcaagcaaaagtatgactgctattattaatgacccagcttggttccccttcgacataaactttaatgaaaacggattatcgtctaatatacgactagatgttcatcaccaggctaatgatgccattgttttcctatga

SEQ ID NO: 141652 - DNA, 717 bp, Enterobacter cloacae
atggttaaaactccaggtttctgccgccatatcgagaaagaatggcttgaacaaacggtccgttgggttgctagcgaagcagatagtgtgcaattaaataaaaacttggaagtatttcttggtacgtatatagcaactaaagaaaatcggcgcaaagcccgaaatttattaacctcaatttggatgcgaccaaaaaataaagatgttttttttgagacaagcattcaattacatcaaaagattgatgcattttcattacctattcactggggaatgttaattgcaaaaaaacctttctttgctgaagtcgctcgctttatcggccgacaagccaggctaaatgacgcatttaccttttctcaagtatttcgccgaatgagtatgttatatggtgagacacaagcaaccagtagagcgctaagtgctgttttaaggactatgatcgagttaggagtgatagatagaagtaataaaccagcatcatattcggtcgttccaattcaagaaaaagttagcagccatatagcaaattggttaactaccgctgctatgatttcattgaacaaagttagcattagtcttgatgaagtattagctgatcaagtgttctttccatttcaaattgatatcagcttgaatacacttgatgtatcaacatttgaatacttgcagcaaggaaactcaatagtcgttttcaaaaggaatctttactcatga

SEQ ID NO: 141653 - DNA, 1809 bp, Enterobacter cloacae
atgaagacattactaacatcggggtgtactaatcaacggggagcaggtcacctgatacggctgacggttgagcgtgatatttttatacctcatgatattcaacatgagtcaaaagagattgattgtcatctatcagaatttttccaggatattgattcagacatactaagattactaccagccacgttatatcagtcagttatagatgcgctgaaattatttgctccgggtaggctcagccaacagtccagtctagatttcttattgcgccatatatatagaattgcacctgagataatccaatccagtacggaccttgttaggctattgattagaaagcattatattggcattgaaatgccaataccaattgaaacgagactaattcatctactgagtttagtgcctagttttggcttatggaatatcagtcgactgatttccaataaagcttatttttttgattttcttcaaaaacaatgggaaatatacttacaagatgaagaaaagagtcctatctactttgcatctcgaccaaacactcagctaattgttccttttgctgatggtgatgttcgcgtttttattgataatctgtttgctgaaggcattataaagccagtggcgataaaaagcctacctcctgaacactgggcatcatttgctgtactaaaagaaccaaaagtaacagaaaaagaacgaatactacacctacttaataatgcaaaaaaaacattcaaccaatactcaaaagaaagtgcaaatgcagacttttggcttgagcagtcacgttctcttggtatcatgaacgcccttttttatcaaaataaaaatttacctgcagttgaagttttgtttgatgacattaaaaatatcaacactgatgtagatggattatttcaacattggttgctaatcaactatgcaaaaatacaaaccataccaactgttcgttatccatctatgttgcataaagttcctgactggatatcacgcaggatagattctggtaataaagtttgtttgcttgttttagatggtatgggggctcgccaatggccattattacgtaagcaattgcaaatatgcgaaaatatttcaatagaagagcattcttgttttgcttgggtgccgacgataacgtcaatttcacggcaaaccttgttctcagggaagcgtccatttttgtttggcgaatctttactgactacaaataaagaagaacaactgtggcttaattattggatggataaaggtttaaacaaacgagaaattaagtatgcaaagaaaattgagaattattcagtcgatgaatggcaatcactagttgggtcactaccagttaaaattgccggtttagtcataaattttatcgatgaacagatgcacggcatgaaaatgggaatggctggattaaatgtagtagttgatagctggctggccgaatggaaattcaaagataaaatttcagacctactggagaatgggtttgaagttataattacttcagaccatggtaaccaagaggctatcggtatgggatatatcaatgaaggggtaaaagctgagactcggggagaacgagtacgaatttataatgaccccagtttgcgagacagctctgctgcaaactttcaagattctgtgatagtatggccaggtcctgagatgggcctgccaaaagggacataccctttgctagccggctctgataaagcctttaaaagtaaaggggatgtcgttgtagggcatggaggaatcagcctccatgaggcaatagtgcctttcattattgttaacaaaaagtag

SEQ ID NO: 141654 - DNA, 2118 bp, Enterobacter cloacae; identical to SEQ ID NO: 127351

SEQ ID NO: 141655 - DNA, 1698 bp, Enterobacter cloacae
atgttagtagatgagaaagaattaacagataaagacagaggaaggcgagatgaaaattacaatatcattaaagatcttgtagatgacagaatgtttctgttcgactatgcattacataaaaagtcgcaccttttaatggattactcaagaaataaaaaaatatcacaatatactatcagaacgcttctggcgttgtattggcgacatgggcaggatatttatgcattgctacccgcattctcgaactgtggcgccgctgggaaaagtagaatcaaacatgaaattaaacttgggaattccaaaaaaaacagagcattacctaatgaacgatcacgtgttttcattcttaatgaaagagatataaataatattagaaaatctctcattacgtatcattataaagttaacggagatacgataaagaaaacattagagagacatattgatttgtattttagggatgaaattaaaacagcaaacctagaaaatagagctccatatgttccttctttaaaacaattttcatactggaataaaaaactcttcactaaagatttctcgataaataagaagaacacgaaaaaagaaatagacctcaaaatgcgggcgcttttaggtagtgtggctaatacaactgttttgccgggtgatgttttcgaaatagactcaactgtcgctgatgtacatcttatttcgagtttaaacagacgaaaagtcattgggcgtcctactatttatacagtggtggatcgtgcaacaagaatgattgttggccttcatgtttctttataccatgcttcatggcgagccgcccgacaagcgttagcaaattgctttatgccaaaaaaagaatattgtagattatttggaatctctattactgatgatgattggccttgttctcacattccattaacattgatgtgtgacaacggggagatgattggtcttaaacctcaggaagagatgacccccctgacaaaacttgagtttgcgccagtcggtagaggcgacagaaaaagcattgttgaacgctgtttcggcattctgaatgatgaggttattcataggcttattggaacaacacgaaggggaaagattgttaaaggagagccaacaccgcaatccagggcttgtttaacgattcaggaggtcacgtctttactgattcgggagatacttgcacataatcagagaacgtatgaggaactggcttatatcaatcccttactgattgaaaatgatctcgtaatatcaccaaaaaatagttggatgataagcttaaagcacgggagattcagcgcaagagccgttggggccgacgaagtgatcgcacgattgttaatccctgtgaacgctaacattaccgccggtgggattcagtacaataatcttttttatgaatgtgatcctgaaattgcatcaggtgtcagagtatttggaagaaccacttgtgaagcaagaatagatgacaattgcgtagattatatatatgtaagatttgacaaaaatagcattttcaaaaaacattacctacttaagaaaagagatgtatttaaagggaaagctcatcttgatacagatgtaatggctgattgggtagatactcaaaaagaaggtaatgactccaacttactgatagtgttttatgttcagataatgcccgatgaccttgtcatgcagctccaccgattttga

SEQ ID NO: 141656 - DNA, 1212 bp, Enterobacter cloacae
atggcaatatgttgcagaaaagggtgcaaagagaatatagcatctattagctatgaatatggtgtcaggctttgttatatccactttaatagacggaaggaattgagccgaaaaaggaatgtaaagaaagacattcgctgtaaagtttgtggtgctaatttctctgaaacgagaaataataaattttgctcaaataaatgcaaagggattggtatgagaacccttaaggattctgataaaactgaaatccataatcactcgtactggcttaacacagaggggtttattaaaaacaatccattgcaattgaattcaattaacggtcttgaggatatcgccaacatcatttcactataccgaattaaatcccgattacagattccatgtagccattttttgaaaaagaaaatacgaggcaactgcaaaaaaaatgaacacaaactaactccatttattaagctggatttaagtcataagtatccaaattcaaaaggagggatgaatgtaccagagaacattatgattgcaccttcatttataaacaaaatgaataaagataaaatccctgaaaatgatgcttttgagatgtttaatggtcattctctaagtaagaaaaggaaggatatgccgcatagtctcatcaattctatcgttagaaattattcagacgatgaagttaatgcattgttttgtaaaattggcaagctgccaagaataaaaaatggacaaagcagatatttaaatgctgacgcagttttcaaccaggtttttatttttgatctattgaatgcggaactgattcgcttaaaagaaagaaccatcctttattgtctgaaatacatatgtaagctttttcgaaacaaaataattaagtttaaaggtaagcgtgtcacttttattacctgctactttgatatgattgcacttgctttctttcatgcttatttgcgaggcgatcctgaacgctttttatccagaattaagaggttcgtgtgggtaatggaaaatgggaagaaaacaatgttaagggtacgtgcgcttttttcttcactatctctgtttaggcggtattgtaaaaaacacctgtcaatatctgttagcgatcctgcgtctgctaaagagagtatattagacatttatgcgaagttttttgcggttaaaccctcctacatttccgatgagggctatccgaggtggattcgcaaatgctag

SEQ ID NO: 141657 - DNA, 1500 bp, Enterobacter cloacae
atgatgatctcatatcaggaacttgttcgcaccttccttaacaaatcaaaggtgatggagagttacacatcagatcaaagtgaatactgggactggctttatttgttacatcatgatggtgcctatagtttaggaaaatatctcaatggtacacgtgagaaaagtgctgacggcaagaagtgggcgctttatataaataagcatttatcagttgtggaagggttgctaaaaaacactgaagttaatactaaatttaaactatctacgggaaatgatacagcatacaaaaacaaaaattatattgctgcgatctctccatttccaagtttaacatgcccaaacttagtgtcagactatgagaaagctctagtttttatcaaaggcgtgactgatgcaaacgggatgactgaatcagtcaatgctatcgcaggttcagaaattgtgtttactattcttgctgataattacaaagaattagctaaagcacctgttgaaaaaaataataatggaacacataagactctaacttataccgttaagaaaggtgacaccttatcagcaatagcgaagaaatatagtgtgtcagtagagaaattggcaagaattaataagatccataacgtaaacatgttgcgtattggtgcgaaattaaaaatacctgatagtaatcaaaatcatggatatgtcagccgctatgtttcagagcagaccaagaaagagattctcaaaagcgttggggttgaaaatgctaatactaaagcagccatagagtattcaagaggtcatattgtgttgcctaaaggaagtaaatctgcggactcagaaaagaaaaacaatgtaatacatattaaaactacgacgacggataattctgttgctagtagaagcaaaaatgaaccagagaagcatcaaactacttccgaggggaaaactaaaaatgtttctgttgacaaaaattttgagccggtggtggatttttctaaagatatccctctcagcctgaggaatctggtaaccaattattctcttgagattataaaaggaataatgaaatcgtcaggggtgcataaaattacgataactagtacgttacgttctgttgaaaaacaagtgaatgctatgtacgttaatatgcaaagcaaggggatagattcacagttagcatattatgcaaaagctggcagagaagtcattaaagcggccatagatgccggtgggaatgatcgtagcaaaacagctgcagttaaagcagccatgacagaaaaagtaattcaacttcaaagtgaggggcgattagtatcacgtcactgtgtttcagagctaatgtatgcagagagaaatgtgtttgatattagtaaaaacctatcaagtaaacgaagtgtgttattagcctttgataaagctcttacggaatatgctgctaataatgatggctttaaatacattagcccttttttgcatagcggtgagccagcattccatgtggagattgtacaatga

SEQ ID NO: 141658 - DNA, 687 bp, Enterobacter cloacae
atggcgggtcaagatcagcagaatttcatcaccaaatcaggtatgcagcattatgcagcccggcataacgtcatcgttgttgtcccggataccagtccccggggtaataatgtcccggatgccgacagttacgatcttggccagggggccggtttttatctgaacgcgacggaacagccgtggaatgttcattacaggatgtatgactatattctcagagagcttccggatgtcgtcatgaatcattttcctgcaacggcaagaaaatctatatccggtcattctatgggagggctgggtgctctggtgctggctctgcgaaatcctggtgaatatgtgagcgtatcagcattttccccgatagtatcgccttctcaggtgccatgggggcaacaggcatttagcgcttacctgggtgaaaacagaaaaacgtgggaagcctacgatccagtcagcctcattttacagggtgaaaaattaccagaaatcttcattgatcaggggctgagtgacgccttttatgaagagcaactgcgcactaaaatccttgagagagtatgcaatgagatgaacctcaatgcgtcgttccgatatcatactggatacgaccacagctattatttcatttccagctttattggtgagcacattgcttaccatgccaacaggctcaggctgtcagcatga

SEQ ID NO: 141659 - DNA, 153 bp, Enterobacter cloacae; identical to SEQ ID NO: 120277

SEQ ID NO: 141660 - DNA, 357 bp, Enterobacter cloacae
atggcaagaccacccaaaccgcccgcctaccttgatgaaatcgcggcgcagcagtggaaagcaaaggcgaagcagctggcggagcgtggggatctgacgcctgccgactggaacaaccttgagctgtactgcgtcaactactcgatgtaccgcaaagccgtggaagacctttccacgcggggattcagcatagtgaacagccagggcggtgagagccggaatccggcactgagcgcaaaagcggatgccgaaaaaattctcataaaaatgtcgtcactgctgggctttgatccggtaagccgccgccgcaatccggtagaaacggaagaggaggacgatcttgaccgtctgggatga

SEQ ID NO: 141661 - DNA, 357 bp, Enterobacter cloacae
atggcaagaccacccaaaccgcccgcctaccttgatgaaatcgcggcgcagcagtggaaagcaaaggcgaagcagctggcggagcgcggggatctgacgcctgccgactggaacaaccttgagctgtactgcgtcaactactcgatgtaccgcaaagccgtggaagacctttccacgcggggattcagcattgtgaacagccagggcggtgagagccggaatccggcactgagcgcaaaagctgatgccgaaaaaattctcataaaaatgtcgtcgctgctgggctttgatccggtaagccgccgccgtaatccggtagaaacggaagaggaggatgatcttgaccgtctgggatga

SEQ ID NO: 141662 - DNA, 153 bp, Enterobacter cloacae
atgactgagcaggaacagcagcgcctgattagtggactgataaagcagcgcgaggcatggcaaccagccagacagagaacgcatacgaagcccgtagcaaagcgcatgagccagcgtgaccgggagcttatggaatgcttccgcaaccgctga

SEQ ID NO: 141663 - DNA, 837 bp, Enterobacter cloacae; identical to SEQ ID NO: 118201

SEQ ID NO: 141664 - DNA, 294 bp, Enterobacter cloacae
atgacagcagaaatcaccctggatgaagcaaagctgcattgccgtattgatgatgattacgaagatacgttgatacaggcgtacatcgatgcggcgctggaggtttgccagaagcatatcggcaagcggtttgataacgggctggagtttacgccagctatcaagattggctgtctgatgtacgtctctcagctgtacgagtaccgcacgacaattggcgacactgacgccaaagagataccgatggctgtctctgcgttgtggtctgtctatcgtgatgtgggggtgtactga

SEQ ID NO: 141665 - DNA, 294 bp, Enterobacter cloacae
atgacagcagaaatcactctggaagaagcaaagctgcattgccgtattgacgatgattatgaagacacgctgatacaggcgtacatcgaagctgcgctggaggtctgccagaagcatatcggtaagcggtttgataacggtctggagttcacccctgctatcaagattggctgtctgatgtacgtttctcagttgtacgagtaccgcacgatgattggtgacaccgacgccaaagagataccgatggctgtctctgcgttgtggtctgtctaccgagatgtgggggtgtactga

SEQ ID NO: 141666 - DNA, 357 bp, Enterobacter cloacae
atggcaagaccacccaaaccgcccgcctatcttgatgaaatcgcggcgcagcagtggaaagcaaaggcgaagcagctggcggagcgtggggatctgacgcctgccgactggaacaaccttgagctgtactgcgtcaactactcgatgtaccgcaaagccgtggaagacctttccacgcggggattcagcatagtgaacagccagggcggtgagagccggaatccggcactgagcgcaaaagcggatgccgaaaaaattctcataaaaatgtcgtcactgctgggctttgatccggtaagccgccgccgcaatccggtagaaacggaagaggaggacgatcttgaccgtctgggatga

SEQ ID NO: 141667 - DNA, 1077 bp, Enterobacter cloacae
atgaaaaaatacctcactatattagcgttcgcagcgttcgggctgtctggcgcagcacgggctaatttcgaggagtgcaaattttacggtaatgatgacttgcagattatgtctccaggtgcacaaccagttatcactcctctgcctgtgggcacagtaacaactcccatacagatcagtaatacgatcattatggaaacaacgcctgcgttaaaatctcactgtgctgggggaaatgacggtgaaaacacctatcagattaccgacaactcaatgctggcaggctacatagataacaaagccaccttccggacgaatattccgggtattgtctataccctggcgatgtatcccgatggtaacggcgtcaccgcgtggttcccgcccaacgcagggtcctggtatatgaccgcacctaatgacgatcacgaagagttgcttgacgaaaaaacctggcatgtgcgcatggaaatctatcaaaccaatggatttcagggtgttccttcggatgttaattttttaacggccggtgcaggcccgattggtcagatcattctgggcgatccaagcgatccgaagacatccgatcaccctcgtccccatgtgaacatgagcgagaagtcatttagcatgcctttaaatcgcccgacctgtgtcttacgtgcgcccacaacggtaaatcttggtgactggtatcccgcagaagtcgaaaacgggaataccagcaaagtcgagttccatgttacgggtacatgtgtaaatacaaccgctgtttactatacgttatcctccacacataccaccgcagataaaaaatattttaccaataccgtcgagaatactggtggtgttactgcggcaggaggcgtcggcgtcatgattacggattctgaaaatgatcattaccccgtgccggcagacagttaccaacgtgtcattgctataggagaggttgttggggatcctgttagtattattgacagatcactttgggccaggttggtcaaaaccggtagcgatccggtaaccgtcggtgttttcggtaccaccgtgaccattcagaccacgtacgaataa

SEQ ID NO: 141668 - DNA, 960 bp, Enterobacter cloacae
atgaatttactgtatcgttttataaatgaaataaaaaataaatccttggatttatatttgttaattttctttgtaggttgttttgttttgttgaaaataaaagatccagttcgggtttatttgtcatatgcattatttattggccttttagtaatactgtatttaaaaaggcagcgagcccgggaaattattattcattttattcggttcgaaagtggcggtgttgtaaataagttggccggatgggcgtcgctccttgcttgggtggcgtttcttctttttccttttgcaataaatatacagtttggttttcttgcaaaagtactgttagtgatgttctccatttttattgttattagcagcgttttaacaatctttgttctcgagaaaaatggccatgagaaagtaaaaaatatacgggttatgctattttcatttatatcaatttgttatgttgcatctagtgcgttctcggcaagtttatttcttcagttgagtaatatggatttatcatccagtccatggttggagtttacatggaagctcagttcattttttgtattgatattttttatattacagttgactacttacgtaatattcatcgtgactgctgatcatgcaaaaggatatagactttttactattttgggcgctttaatgctaacgagtttaattgtattatttgtctcaagcaggccggatgtagtagcatattatgttttaaaatattctactggcagtgaatggcggagtgattttacatgtgagaatgaaaaaatatcacgccctaatgagagatatttcggttataatactgataagtacacagcttactttttcaatcgtaacggaaagtgggggttcgatgaaataacttgtgttaaaaactcgcaagaggggaaaggatatactgtaaaaaatgtatcgacagaaaatatccctcattgggtgaaataa

SEQ ID NO: 141669 - DNA, 948 bp, Enterobacter cloacae
atgaagattaaattacttgatttatcgagagccgagatgctggattcgcaatatgatgttgcatttctaggattgggttatgaacctcgctgcacctatatttcaaagttgcttaatgtaaagaaaattgcggatgttgtgattctttcttttaatgaaagttcacaaaatagaagccggatacaaagctatgaaaaattgcaaaaaaaatggggctctaaaacaactgttgtaaaccttgaacactcacatactcaacaagtttatgctattctaaataaaaaaatatcggaaataacaaaaaatgaaattagaataattgttgattacagttcaatgtcaaggaattggtatgctgcgatattaaattactgtttaaaagtttgttctaaaaagcttactattgatttggtttatgctactgctgaatatccaaaaaatgacgacttcttaaattttgaattaggtgatgtaaaaatattgcctggttgtgagggttcttcaattactaagaagaaaaaatgtgctatctttatgttaggatttgataaaatagggccacaaagtttcttcaatcttcttgagccagatttaacttttggcgtaattgcttcccctgggtctttaccagattatgaaacacaggctatgttaataaataaagattttattgagcatcaactgtccggaggtcgtaatcttttaaaactacctattgcaagtttatcaattacgtttgaacatttatgccaaataatccaacctttaaaaaatgaatataatattacaattattcagtttgggccaaaaccccatattatttcatccacattggcaggtttatttttcgataatgtaacgtgcatttatagtgaatatagtagatcaaaaccgtttgatatccaacctagtggagagttggtgataagtagaattatgatgaaataa

SEQ ID NO: 141670 - DNA, 1773 bp, Enterobacter cloacae
atgaatttcagtgagctaagtacattatttgaaaattcaaatgcaagaggcttaaataccaaccagcttgcaaatgaatttatttggacagaatcattcgaagcactttttactagtcagaatcaagtaatacttggttccagaggatctggaaaaactgcgctagttaaaatgttagcacatgaaaatttaagtaaactagcctctttttatccaaaagcgaaagctattatcgatgagaaaaatttcatagctacttatgttccattaagagttgaatgggttaactcattaaataactatgaattaaaaaaagaagagtattttatttggagccttaacctttcattatgtgctaaacttcttgacactatcaggagttgtatcgactcttatattgaagatgagatagaacaattatttgtagagcgagatatttgtctagctatttctgaagtttggtttacagatgaaaataactctttaaataatttgaatcttattagaaacgaactcgagaaagtggagtttagaaaaaacttagtatttaataaagaggctatgggaatcgctttgacggtggaggaaaccagaataggcgaagtattccacacaactttatttaaaccttttgaatttgcatctaggataatcaaaaggaaattatctttaccagagaataatcgttgggttgtatgcattgatgaggctgagtttctaacaaaaaatcatcatcaaacgcttaacacatttatgcgatcagcgagtgatttggtctttaaaataacaactatgccttatagacatcatactctagatacaaatgtggccgcaaatattaatataggacacgatcttgagtatatatatatagataaactaggtacatctcaccttaaccagcaagcttcagataaaatcattcaggatttcgctgaaaaattatttgttaatcggctgaaataccatcataaaaattttttgacgcttgaacagttagttggaaaatctatcctaacgcagtcaacacctgatatcgtcgaaaacgaatatgtcattcaattaattgaaaaacattgcaatgctgacacaatcagtcgtgctaagtctttactagctagcgatcccggtaagtttgatgatgctatagttaggaagttgcgagggatgcttctcctgcgtgaagaatataataataagtcaggcaactctgcctcaacattatattctggagttgctattatatcacgctgttcagacggtaatccaaggcgcctctttagactgtttaatcatttgcttggaaatctaaagaatcagtctacgagaattcctgatgcaagccaaagcgaacgtatcaaaagttactcctatagagagcttgaggttgttaaatttgaaaaagatgggattaaagcttttgagtttattaataaaatagggggttattttaaagaaaaaagtttggttgagaagcttggcagtgatacaccacagtcttttaggatagataactctatatcggaagaacaatgggggtgtattaaaacagcagtagatctagggttactatatccttatgtaaaaaaagatagaaatgcaaagtccctattcccatcaaaagaaggccgatttgtaatagccaattgccttactccgaactttaatctgttcccacgtgtaggtcgtcccatccaattacataatatttttaattctaacgctctgttgagtgaagaagatcaaatggagttgttcaaagatgaagattaa

SEQ ID NO: 141671 - DNA, 1233 bp, Enterobacter cloacae
atgaaaatactggtaattagtgatctacatgtgggtactacagcgagagcaaaagatttttgtactgaagtaagtgggacatcagctattactgaaaatttcatacaggactttaaagacttagtaaccgctgagaaaatcacagcaacgcatcttttaattgctggagatatcacaaatcgcgcagaatcatatgagtttgaaattgcagctgaaaggattaaagagataaagaatatattaaacataagtgataacaatattttcttcgtccctggcaatcatgatggaaattggcaacaggaaaaagatgcaagcgaaagatattctgataaaagtaaaatcatcttagcaaaatacgctaatattcggagtaatgattttttttcctctttattatataattcaaccttttcatcctattattctgatccatattcggctatttgggaacatgaggatttaatcgtcgttggtgttaactcttctgcgctagacagctgtgataaagaagtaaaatttggggaggtagaccttagatgtttatcaacgttacaatcaaaattggatgagttaaggacgaaagataaacgtaagtttaggattttactaacacatcaccatcccaaaaattatacagatactacatttccagatcctgatctaagtcaaatgaaaaatgcggaagattttatgcgttttgcaagccacaacgaattcgacttcattgttcatggtcataaacatataccacgatataactttcaaatggattcagagggtttttttgtaaatattttaagtgctggtagttttgctgctcagttaaaagactggcataatggagttgccaacttttttcatttaattgaacatcacgatttttgtcccgagaataatttttcgagggggaaagtaatttcttggtcatattttacaaaccataaatggacgcgttctcttttcgacagagaccatattagccatgaagagtattacggttatatggtttcaaggaatcaactgaagattaaacttcgccatataatacaaagttgcagagaaaaaagtaattacgctaagtggcacgatttagtaaaaatagaaccgaatctaagatattgtaataaacagttattgtctcatgctgttgatgatctttctagtgaattaaagtatgaggtaatgccaagtaaaaatgatagcttcgttttattatgggcggagaattaa

SEQ ID NO: 141672 - DNA, 165 bp, Enterobacter cloacae
atgcgccatttaatctgtatggagtcggcgtgtttatggcgcactccggccagggtacctatcgaaataatagcgcttgtggtggagttagagactcaggccctattccgcttggtaaatactggattgttgatcgtggcactggtggatttttttcttcattaa

SEQ ID NO: 141673 - DNA, 276 bp, Enterobacter cloacae
gtggctataccaatacctgcccgtaaatggggtatcagattgctcaaaacggtctggtacctgctcattagccttgcaactactcgtacgctgggcccaaccgctacctatctggatcacgatgttgcttcagctatatgtaacttcctctatggtgatgtgaacgcagaaacgatgtacgaaacatatacaaacatcgacattttgacagtgctttcactcactacagtgatttatctcttaacaatgaagttatttaacaaaataaggaattaa

SEQ ID NO: 141674 - DNA, 216 bp, Enterobacter cloacae
atggtccgtgggattacaaacagcacgggagacagttcgagagcttcggaaacttccattatggtgctgttggccacgctgcgggaatttccggcgaagtattacttagaggcgcaggatgggcgcaaagccgcgcaggaacaacggatccggcttttggtgattggtttggctcaacgccttacggtgatgatcctaacgaccagtactggataa

SEQ ID NO: 141675 - DNA, 648 bp, Enterobacter cloacae
atggcggtagaaacggtagtacaatgtgattggcttggccttttaacgagtggaacgctcataccagcatctgcctttgttgcaatttgtctttttatcctaagagagtggttggattggcgtcgtaaatccaaaactagaaaaaatgaggttagtgcattgaagaagatctttgcacgagagtgtcagttagcctggaacgtaaatgaacaaattaaaacactatgtgaaaaattcgcaccttacgaagaaaggcctatgcacgagtgccctcttgacttaagcgttacaaaaacggcagctggtaaaactcgttataccatcacagaaaacaacgtcctgcgctcgggtggccctctaagcgaaccatcagtcgcaaccttcacaaagcatttatacgatgtttctaaactcgattctgcattttatgaaaaggttaacctagcttttaccgcagtgattgagctgaagcatttttatgaatcgttggtagataacgaagatacagcaaagctaattggaatcgacaacgtcatgtatggtttctcaggctatgccctcgaagagatgatatggattgaacgggaaattaaagccctttatcaatactgtactggtgaagaactgactgtaggtcttttacgataa

SEQ ID NO: 141676 - DNA, 1356 bp, Enterobacter cloacae
atggcacatttaagagatatggaagagttaataggtacaatcgatgatatcaacatgcagaattatatgcgtgaggcattacgttgctacatgacagatgcacatagggcttgcatcataatgtcttttatcacaatacatgaaaatatttacacgaaattagatagattatcccttgtcaacaaaacagcaaaaaaaatccttgatgaaataagcccattaaaggaaaatcaacaagtttttgagaaggaaatgattgaccggctttcaaaggaaaatatcatctctaaactagatgcttcgttcattgaaatattagggaaattaagaaacaaggctgcgcacccttcaggacattctccatctgccgaagaagcaaggtatatattttctgaatccattactagattcttatctaaacccatattatccgcccaccaagtttcagatgaaattatagaaagcttaggtggcggcaatttattcccgacgttaaaagtttcagattatgcaataatagtccaacatgaactatcaagattaacgattgaagggttgccatatctgttaaataaactaataaaaaacttagatgacacaaatgaatcaataaggatcaatgccctgcgatttattttaggaatgggctccgaaggtgcaaaagaggacgtattatcttccttacgcaaaatcttaatagaaaaacaaattcataaaacagaacgagaaaattgcatcgtattgctaatctcatgtaattacaaactccttgaagggttgaacgatccaacatacctaagaatgaatcagatcataattaataacaatgaacaggttgacccatcaacaccaacattaaaattaaaacatcctttacagagtttaaactcaatatcaaaaatagaccctgccatttcaaaattaaagttacacagtgctacagaagcaataatacaaaagttcaaatataacacggatttatacagaattataaagaaccaagcatggatgatggatatcttttttgatgcattattgaatatggcaagagcttatgactttggcactgcaaatgattttgcaaaattcatagtaaatgcagacgatgagataagtcaacttcttaatgaaaagcaatgctttagcttgcttgcagggatttacaaggctaaaacctatggggcgacccattctgaaagaatagtaaataacaatttcaattccataccaaaaataagagaaaaagctctaaaaggatcacaagatgagaaagagttatgccagaaaattttgaaggatattgttggggatgactatttaaacattgataactttcttcctcatgaaaacgaatga

SEQ ID NO: 141677 - DNA, 573 bp, Enterobacter cloacae
atgattgatgccaattttaataacgaggcgttactaaatagaatttgcgaggtctacggatttactcaaaaaattcaactagctaatcacttcaagattgccgctagctccttacagaatcgctatacgcgaggcaacatttcgtatgattttgcggtgcattgcgccctcgaaaccggcgttagccttaaatggctaatgactggtgagggagataaaaacctatcagatgatgagcctcagcactccgttgaacttcctctattcgaattgagtgaaggtgagactaccaatattggtagcctttcgttagacctgaagctttttactaagccactaaaaaaagggatttcagtcaaaagcgataaccgcacatacgtaattgagaaagagtcctctttatctgatggcctttggttagttgatattgaaggcgcagccagcctacgtgaactaactattctccccggtaaaaaattacacgtagccggtggaaaagtgccgtttgaatgtggaattgatgagataaaaacgattggtcgtgtggtgggtgtttacagcgaggttaattga

SEQ ID NO: 141678 - DNA, 510 bp, Enterobacter cloacae
atgtttgattttcaggtttctaaacatccccattatgacgaagcttgccgggcttttgcacagcgtcacaacatggcgaagctagccgaacgtgcgggaatgaatgtgcagacgttacgtaacaaactcaacccggaacagcctcaccagctcaccccgccggagttttggctgctgacagacctgaccgaagactcaaccctcgttgatggttttctggcgcagattcattgtctgccatgtgtgccggttaacgagctggcaaaagataaattgcagtcttatgtcatgcgcgcaatgcgtgagctcggcgagcttgcgaacggtgcagtatctgaggagcgtctgacctctgcgcgtaaacacaccatgattgaaagcgttaactctggtattcgcatgttgtctttgtcggcactggcgctgcatgcacgtctacagactaacccggcgatgacgagtgtggtcgataccatgagcggtgttggcgcatcgttcggtctgatttga

SEQ ID NO: 141679 - DNA, 222 bp, Enterobacter cloacae
atggccgatgcaatggatttagcacaacagcgcgagcaggaagaccgcgagcgccacatcagcaacgagcgcagccgtatcaccgcgccatcttgtttcctttgtgaagcatgtgaagcaccaatcccggaggctcgtcgtgctgcaattccgggcgtggtcttttgtgtgacctgtcaggaaatctcagaactgaaatataaacattatcgggggatatga

SEQ ID NO: 141680 - DNA, 441 bp, Enterobacter cloacae
gtggatagagaactgagcgagcatgtcatgcttgaaagagtcgagctgatagcccgtctgacaactgagggtgtatgtcaggaaagggatcgtgaaattgcattgaatttaatagctgagctagcgcatgaaaacttgctgaaacgtgattcttattctgtggttgtctccgccagaccatgtaaacaacgattaaaaagagaaaatgaagtgagaatacacatcacgttggataaagcacaaaacatgggacaacagctggttgaggccttcgaaagtgagcttaatcgcagagttaaacgcacatttccttcctcacgaattacggtcaaaaaaggctcaatgactggcgttgagataaaaggcttcccgagcgaatcagaccgtgaacgtttggacggaatcatcaaggaagtgtgggaagacgagagctggcattag

SEQ ID NO: 141681 - DNA, 219 bp, Enterobacter cloacae
atgtccatttcattagcgcttaagcagagtctggcggcacgcagtccacaggatcggctgtccagggtgctgaagaaaaacaaaaatcgctttaacatcaacaatgatgggtttatcaatatgaaccttgataatgaagatgtacaggcagagattgtcaagcaactggataagcttgaaagtattgcacttctggtaaccaagacctcagctaaatga

SEQ ID NO: 141682 - DNA, 816 bp, Enterobacter cloacae
atgaatactttgcttttagtggttatcctgatcagtggttatgtctacgtgatcaggtctctatcagaccgatatcaatttaagcgttccacgggctgggacgcttattttttagtagcggcatggggaacctttttcgtcaccttatcctgggcgatttgctctttcctaagcattactgggtttttaaggtggggtgtcaacggagcaatcgaattctttggtgcagacagtaatgtcatcagccgagttttcccacttagtgcagaagatgccactcgtttcagagatctaaaattcgccttatgtggtttgatgtcattagcgatggcatacactgttggaggattaaaaaagctttggctaaaaaacgctaatcgaaggattgatgcgttagtgaaagcagtaggagataacgcgcttgagaatatgcttatggaagcatccgcgactcaaatgccaattattgccactttgaaatcacgcaaattttatgtcggtttcgttttttgcccggcttttgagcatgggacatttgactaccttgagctgcttccccttctgagtggttatcgtgacaaggataaactgaccataaccatcacaacaaaatacaatgaacactatgaaaaatcagggattttgaacgggaaatctgatcttgaactatctgattttagggttctaataccaaaggcagagattgagaacatttcctttttcgattttgatacctactctgtttttaaatcagaagaggataaagagcagaagtcgaagggacttatggggaaattacgaggtcttaacaaataa

SEQ ID NO: 141683 - DNA, 267 bp, Enterobacter cloacae
gtgcagagtaggcagagcaaagagtttattcagatcgtgggaatgatcggcattgaggtgatgcacgctaccgtgggagtgaaacaacaatggatcgtgctcattcagtggttcatcgctgtcgtgttgatggtcactgatggacgttgtttcctgaacgctgtatgcagcctgtggctttgccataaacgaactgctcagcacggcaacagccatgatgataagcacgattctggaaatgacttcacggctgataaacacagttaa

SEQ ID NO: 141684 - DNA, 861 bp, Enterobacter cloacae
gtggataaagccttttgtactattgatgagcaggaatggacagctgaggcattttacgcgctgcccactgctgaaattcaatcaaaaagacgtagtttactgtgtaccgaatgtagtggagatgcatggtttagacggtctagttatggaaatgatgcaccgcatttttgtgcccatcaccaggaaaactgctcattaggtacttcatatgaagcagtgggcgagggtagcaatgataaggcattaccagtatcagatactgatagtggcttggttatagatctcgatttaactcaaagctatgatattgacgtgaaactggctgaacaaacctccgaagctacacctgtaggacagaggtttaccggtgaacaatctaacgacggtggcagtgtaaaatatccagcacattttactttgaaacgattgctctacaaattagtacaatcaaaagggcaatgttatttagaaaagaagattggcttcaaaggtcaggattttagtgatttaccagagaatggtgctgaactatttgttgaatttgcaaatgtgaagccatggatggatggagcacgcaggatcttttggggattcattagtgatgtcgggcaaacgaatgatgggaaaatttggttaaacgcgggtaatattaaatcaggtttaagtgtttgtattcagcaagatatagctagtgctttcagagaacagtttaaggtagtcaacagtctagacgagttggatggctgtcatgctctaattattggtaaatgtttgtatgcaacaactggtaaaccgattctatggtgcggcgatcttagctatgttgtacttagaaggtataaatctgatcaagaattatag

SEQ ID NO: 141685 - DNA, 939 bp, Enterobacter cloacae
atgcgagtattactagctccgatggaaggtgttctcgactcattagtgcgagagcttttaactgaagtaaacgactacgatcattgcattacggagtttttacgtgtagtcgaccagttattgccagaaaaatccttttatcgcttatgccctgaattacataatcaaagccgcactgaatccggcactttagtccgtatccaactgctagggcagcacccaggatggcttgcggagaatgccgttcgtgctgttgagctgggttcacatggtgtcgaccttaattgcggatgcccttcaaagctcgttaatggcagcggtggtggggctactctccttaaagatccagaactgatctaccgtggcgcaaaagccatgcgtgaagcagtgccagcgcacttacccgtaacagttaaaattcgactcggttgggacagcggtgcgcggcagtttgaaattgccgatgctgtgcagcaggccggtgccactgaacttgttgttcacgggcggacgaaagaagatggctataaagctgaatgcattaactggttggcaattggcgaaatccgcaatagattatcgatcccagtgattgctaacggtgaaatctgggactatcaaagtgcgcaggcctgtcttaacgccaccggctgcgatgcagtgatggtcggccgcggcgcgttgaatatcccgaatttaagccgcgtaattaaatacaacgacacccgtatgccatggccggatgtagtgaagcttctgcaaaaatatagtcaacttgaaaaacagggagatacaggtttgtatcacgttgcgcgcatcaaacaatggctaggatatttgcgtaaagaatatgttgaggccacagaactctttacaacgattcgcacaatgaaacactcagccgatatttctcttgcaattaataagctgggcgtgtaa

SEQ ID NO: 141686 - DNA, 309 bp, Enterobacter cloacae
atgagttctaataatattactcaagatagatacgaaatggtttatattaaacaaaacaatgttgttatagttcatagagaaccttatacggtttcaatattaacaagagagcaggcagaggattttggatataatatctctaaaatgaaggaatatgaaaatatcagtattaatgggataccagaggatggatatgaattggtcgagtattatgatgattatcaggaaccagacataacaagaggggaaattaaccatgacaaccctgaactggataagatgataactgatttcttaaataaaaattaa

SEQ ID NO: 141687 - DNA, 567 bp, Enterobacter cloacae
atgaaggaaattggtaaactcgataaagaattagctaaactaacagctattattgacaaaaaagatgatatcgattctagattgttctcagaaagaaaaaacttaactgaattgtcaggggagctggaagctgagcttaccaatgtagcctctttcgaacaaaaatttattgataatttcaaaaaatacacgcatgatttttatggggttgaatataaattcagcctccatttagatcaagaaaaaggtgaatgtatccctcatgtggatgatgtggagtcaaataacgaaggcggtttaaaaagacttgaggttgttactttcgatctggcatacatcaagaccgtctgtgatttaaaggctttgagacctaattttgtactgcacgactctattgatgaaatcgatattcaacatgtccgcaaagtttttgacgagtctattaaattgcctgggcaacacattgtatctatgctgtctgataaactaaatcatgaagattaccagaaatataagccccacattattctagaattatctcaaagtaataaattttttaaaatataa

SEQ ID NO: 141688 - DNA, 378 bp, Enterobacter cloacae
atgaaaaagaaaatcatgaacgtgttttttcagatcgcatgggtggcgctgttgatggccgcgctgttttatccacgtagcagcgccccggtcctggttgctgccgctgtctgggttatgagccttttaacctgggcgctgaccttatgcggcgtgcttggcgcaattgccggaggtacagcaaagcaatccctcaacgagtcgctcaggaaattctttaccgcgccggataagccgttgctcagttggctgatgaaaatcctgattgttgtctgcctggcgtggtccggctgggtgatcaccctggtgttttatttactgacgctgttggtttaccgggttgcccgttctcagctgtcagagacggcagcagcctga

SEQ ID NO: 141689 - DNA, 444 bp, Enterobacter cloacae
atgggtgatctgcagagggtggatgactggctggcggcgttgctggcaaaactggagcctgccgcgcgcagtcgcatgatgcgtcagctggcgcaggaattgcgccgcagtcagcaacagaatatcaggctgcagcgaaacccggacgggagtggctatgagccgcgccgggtaacggcccgcagcaagaaggggcgcatcaagcgccagatgtttgcaaaacttcgcactaccaaatacctgaaaactgctgccagtgcggattctgccagcgtgcagtttgacggctcagtgcagcgtattgcccgtgttcaccattacggactgcgtgatattgtgagtcgccatagttttaaagtcaaatacgcacaacggcgtcttctaggcgtaaataaagagatagaacttttggttcaaaacacactgatgcactggcttgtttag

SEQ ID NO: 141690 - DNA, 1752 bp, Enterobacter cloacae
atgaaatttagaagactacacaattggaataatattgaacaatgcactgcacttatttatttcaccgaattaatggaagaacttcttttcgattacacccatagcacatataaaccatctataatgaacacaccaagtttatgtatagaagcaatatcaacaatcaatgatattgaaaagggtagcataagccccgcacacatatctcatgtcattgatgaattaaccaaaaatattaagaatgatgacattgcaatcagcctactaaaaacccccttaggttcatttttagaccaactcaacaacaattcattaggaaataaaaacctaaaaataacccttgagttattaaaagttcaacttaatataggtcagtatgaaagcaggcttatcggtgagctttgctctacaatcactacagaatataatcccaataagatccgaaaacttacaagactattgattacccatctaatatcaaaaggcttaagtcaagagtatttgatggaaagtctaaagaaacatttcttccaaagggaacgagaaatcaattcaaatgaagagattattacatttctagagaacatccccacaaagacacaaaaatatttagtttatttcaatgctgacaaatcttttagctacatttctccatgcttatcacaattagaaattgaggttgtactcgaaacacccgaaaacattaatgaacaagatttcttcgatagtcatgagcaacgaactattttagtcaagcaagttaaagcacttgatccatttactgccagaaagaaagctgaaaaaaacttaaagctcgcatcaactttgctttctctttatcatcataagcaagaagcatcatggtctgccgagaatattgtagttagtgagaatggtgaaaaaatcaatattagaaacagcatcaatccaatgcaccgctgcaaggatctggttcaggaacacgcaagcagaagactcgaagaattcatgaacaattttagaatgcgtgaggattctttcaataaatttatcagaagtgcacaattacattcaatggcattacggacaaatgctgtagaaaaccagcttttaaatttatggattgctatagaatcgctcatccctgacgaatccaaaaaagaagatcagtccacaatagaacatatcgttaattcattaataccatttttgaacctgaattacattgaagatctagtaagaaaccttataaaagacttacaacgctggaattatccacgtactatgtcacttctaagactaattgaaaatgacgatgcagctaaatcacttgtgattcttgttgcttcgcaagaacacatccctagcatcaatcagtttaagatagaactatcacaattcccattattgaaagagagattcgaatatgtgagcaatttaatctcctcgactaatactatccatgacgcacttaaaaaccatgcagaaagaattaactggcaaatcaagagaatatatagaactagaaacttgatagttcacactggtcaaacaccatcaaaaacaaatattttagttgagcacgctcatatttacttagacacaatcattaactccttaataaaactttcctctcatcccgtagaaatactttctgttgcacaaggattccgaaacgttgaaatgaaatataaaatgcaccttcaaaaacttgataaaaaaaacacatcactaacccctgaaaatatcatcaattttatattcaaccaataa

SEQ ID NO: 141691 - DNA, 3348 bp, Enterobacter cloacae
atgagtgacactaacctgcgcctgcaggtgattctaaatgcggttgataagctcacccgcccattccgttctgcgcaggccagctcaaaagagctggctactgcggtccagcaaagccgtacccgcctgaaagagttagatacccaggccgccagtcttgaaagttttcgaaagctccaggcggaaaatcaaaaactaggcgatcgtctttactatgcccgccagcgtgcaagtttgctgagtaatgaactgggtgcgatggggccgccatcgcagcggcaaattgttgcgcttggaaggcagcagcttgccacacagcgacttgaagaacgtcagaagaagttgcaacaacaaacggcccttgtccgtgccgaactttatcgggcaggtatttctgcaaaagatggagccagtgcgacctctcgtatagcgcgggaaaccatgcgttataacaagcagctttccgaacaggaaatgaggctgaaacgggtaggtgaacagcagcggaaaatgtacgccgcccgcgctgcttattcacgcagtctggaagtgcgggatcgcattgccggagccggagccacaacctctgcagcagggctggcaatgggcgcgccggtcatggctgccgtgaaaagctatgccagcatggaagatgccatgaaaggcgtggcaaagcaggtcaacggtttgcgggatgataacggcaaccgtactaagcagttttataacatgcaggccgccatcaaggccgccagtgaacagctccctatggagaatggcgctatcgactatgccgccctggtagaaggtggcgcgcgcatgggggtgaccaatcaggacgatccctacgaagaccagaagcgtgacctgctcgcctttgccagtacggcggccaaagcggccacggcgtttgaactgcccgccgatgaactggctgaagggctgggtaaaatcgccagcctttacaaggtgccgacccgcaatattgagcagctgggcgatgcgctgaactacctggacgataacgccatgtctaagggcgcggatattattgacgtgctgcagcgtatggggggcgtggctgaccgcctggacttccgtaaggcggcagcgcttggctccacgttcctgtccctcggtgcggcgccggaagtggcggccagcgcggcaaacgccatggtgcgcgagctgtccattgccaccatgcagagtgaccgctttatggatggcatggatatgctaaagctcaagcccagagagcttgaaaagcagatggcgaaggatgccatgggcaccattctgcgggtaatggagaaggtgcagaagctgccgcaggacaaacgcctgtccgccatgacgatgcttttcggcaaggagtttggcgacgatgccgcgaagctggctaacaacctgcctgagctgcgccgccagctgcagctcacagccggaaatagtgcaaacggctcgatgcagaaagagtccgacattaacaaggattcgctttctgcgcagtggatgctggtaaaagcgggggcgcagaacgccttcagcagcctgggcgaaacgctgcgccagcctctgatggacatcatggattacgtcaaaagcgtaacgggtgggctgcggcgctggatagaaaccaacccggagctggcaggcacgctgatgaaagttgccgccgccaccgccgcaatcacgctggcgctgggcacgctggccgttgcagtggcagcggtgctggggccgattgccgtgatccggtttggtttgtccatgctgggcgtaaaaacgcttccgtccgtattcactgcagttacgcgcaccggcagcgcgctgtcctggctggcaaatgcaccgctttccgtgctacgtcgcgggatggcttcagctggcggtggcgcaagtctgctgactgctccgctgaatgcgctgcggcgctccgccggggtggtgggcaatgcgctgaagacgttagccggtgccccgcttaacctgttacgcgccggaatggcgggtatacgtaacgttgtcggtatggtgatgaaccccctggcagcattacggggcggactatccgccgccggtggcgtgctgcgcttcctggtatccggcccgctggcattacttcgcgttgcgctttatgggatttctggcctgctgggcgcgctgcttagcccgatagggctggttgtggctgcgctggctggtgtggcgctggttgtctggaaatactggcagccgataagcgcatttttaggcggagtggttgaaggattcaaagctgcagctgcgcctatcagtgcggcgtttgagccactgcagccggttttccagtggataggtgacaaggtccaggcgttgtggggctggtttactgatctgcttacgccggttaaatccacctctgcagaactgcaaaacgcggcgtcgatgggacggcagtttggcgaagcgctggcgtcagggttgaacatggtcatgcacccgcttgattcgcttaaatctggcgtgtcgtggctgcttgaaaaactcggcatcgtcagcaaagaagcggcaaaggcgaagctgccggagcaggtggtcaagcagcagcctccgacggtgaacagtgacggaaaagtggtgctgccgcctggcggcttccccatcatggggtttgctggcatgtatgacaacggcggcacgatcccgcgcggccagtttggcatagtcggtgagaatggccccgaaatcgtgaacggtccggcaaacgtgaccagcaggcggcgcacggcggcgctggcttcggttgtggcaggaaccctaggcatcgtcaacaaagagaccgcaatagcgaagctgccggagcaggaggtgaagcagcagcctgccacggtaaatagtgacgggaaggtggtgctgccgcccggcgggttccccatgatggggtttgcaggcatatacgacaacggcggcacgatcccgcgcggccagtttggcatagtcggagagaatggcccagaaattgtgaacggtccggcaaacgtgaccagcaggcggcgcacggcggtgctggcttcggttgtggccggaaccctgggcatggcggcagcgcctgcagaagctgcacccctgcatccgttcagcctgcctgcaatagcatacaaacagagccagcctgggaaggaggaccgcgcaccggcagtgatgcactttgaaacgcacgcgccgatcacgatttatgcgcagccagggcagaacccgcaggatattgcgcgagaagttgcccgccagctagacgaacgcgaacgccgcacccgggctaaggcgcgcagcaattacagtgaccaggggggatatgacgcatga

SEQ ID NO: 141692 - DNA, 321 bp, Enterobacter cloacae
atggtcggtgagtctgagaacgtgctggagctgtcgaccatctacgcgacaaaggcgcaggccatgcgtgcagctcaggcgaagtgggacaaaattcagcgcggagtcgcggagttttcaatctcgctggctattggtagggcagatttatttcctgaaacgccgatagcggtcagaggctttaagcgcgttatagacgagcaggcttggataatcagccgggtggtgcactaccttaacgggagcggctacacgacgggcttagagcttgaggttaaggtttcggatgtagagtatgaaagcgaagaattaacgcactga

SEQ ID NO: 141693 - DNA, 1533 bp, Enterobacter cloacae
atggtcacgccatatatctcgatggcggggatcggcaaatcctttggtccggttcacgcattaaaatcggttgatttaactatataccctcatgagatccacgcgttattaggggaaaatggtgccggtaaatcaaccttaatgaaagtattgtcgggaattcatgaaccgaccaaaggctccattattattaatgaaaagaattacgacaaattggatcataaactggcagcacaactgggcatcggcattatatatcaggaactcagcgttattgatgaattaaccgtgctggaaaatctatatataggccgtcacctgaccaaaaaggtttgtggcatcaggattattgactggaaagagatgcgcattcgcggtgcgatgatgctcttacgcgtcggattaaaagtcgatttagatgaaaaagtagcgaatttatccatcagccataaacagatgctggaaattgcgaaaaccttaatgctcgatgccaaagtgatcattatggatgaacccacatcttcattaaccaataaagaggtggattatcttttcttgatcatgaatcagctgcgtaaagaaggcaccgccattgtctatatctcgcataagctcgcggaaatccgccgcatctgcgaccgctacacggtaatgaaagacggttccagcgtatgcagtggcctggtgagtgacgtttcaaacgacgacattgtgcgcctgatggtcggccgcgaactgcaaaaccgctttaacgccatgaaagagagcaccggcaacatcgaacgcgacacggtgtttgaggtgaacaacgtcaccagccgggacaagaaaaaagtgcgagatatttcgttcagcgtgaaccgcggcgaaatactgggttttgcgggtctggtcggctcgggacgtaccgaactgatggactgtctcttcggcgtggataaacgcgcgagcggtgaaattcgcctcaacggcaaaaccatctccccgcgttcgcctctggatgcgttgaaaaaagggatggcctacatcaccgaaagccgccgcgaaaatggctttttccctaatttctctatcgcccaaaacatggccgtcagccagagcctgaaaaacggtggctataaaggggccatggggctctttcgcgagcatgaagaacgcaagaccgccgaagcacagcgccagttgctggcgttgaagtgccatagcgtagagcaaaacatcaccgaactctccggcggcaatcagcaaaaggtgctgatttctaaatggctgtgttgcaatccggacgtcatcatttttgatgaacccacgcgaggcatcgacgtcggcgcaaaggccgaaatctacaaggtgatgcgccagctggctgacgaaggcaaggtcatcctgatggtgtcgtctgaattacctgaaattatcgccgtctgcgaccgcatcgccgtgttctgcgaaggtcggctgacgcaaatcctgaccaatcgcgacgacatgagcgaagaggagatcatggcatgggcattaccacaagagtga

SEQ ID NO: 141694 - DNA, 1053 bp, Enterobacter cloacae
atgactaacgcagcggtagtaattgatgatgcagaatcattttggtctgaagttgaaagatttttattcatggaagatgttcagcctggtgctgagctaccagtagatctagaatttcggggatggcccaatcttcatatcaatgtgaagggagaaaaattccattcctcactcacaagttcaatggtttacgggctcgcgagtatgcatgagtctttccaaagggcttatgcattggcaaagtacggaacctcaaaccttcaacgtctaactaatgaagataagcagtctctagacgtaatttttcaaataaaggaaggttcgacagactccgagactgattggtcttcaactttcaatcactttctcgcattcctaactggagcatttgacggtatgactggcgtccagaaaatggcaattctcataacacttattgtcgctttgacggcagggacttgcttttatctgcataccaatagccaagaccatgctattgatgttaatgctcaaactcagacaacccaaacggtggttgacggtatgactcgctcattcgagttgggtgcagaagttaagcgcagaggtgaaacttctgttagtcgtgaaattgaagctcacggagaagaaggtaaatcttcgctgcttaaatcagtcgcgcaagacgctgagtctgtgaaacttggtaatcggacttatgacggagctgcgcttcaagattataaaaatcgacaaagcatcgaaagagagagaactgaacgtttcgacaacttttacatcaaaggcatctcacgttctggaatgacgagtactgaactaaatctaagcgtaatcagagttagcaatggagaaagttttactatcaaagttgctgaagacatagctcgaccagaagaacttaaagctcttgcaagcgctatagttactggtgaagttgttagaatcagctacttagaagttacagagaatgggcatgttgctcgaggtcaattcaatttgatcatatcaaatgaccctccatcacaaacagataacgcaccgtcatcaaattaa

SEQ ID NO: 141695 - DNA, 1212 bp, Enterobacter cloacae
atgtctgaagtaaacgaaattctgaaaaaagtcactgccagcattgaagaggcaactggcaaattcaacgcgaaagcagaagacgcactcaaagaggcgcagaagtcaggcaggctgtcagaagaaacaaaagctgccgttgataaaatggcttctgagttcaacgcgctgcgtgaagctgaaaaaaccctgaaggccgcaatgggcgaactggagcaacatgttgcccagatgccgctggcaaacgcgaaacaggttgtcgagtccgttggccaccaggtgatctccgctgaagccctgaaaacctttgcttccagtgtggaaggcggtaagcgcatcagcatcccggttaaggctgccctgacttcggtggatgtgcctgatggtgttgtagagccacagcgcctgccgggtattgatacggcaccgaaacagcgcctgttcatccgcgatctgatcgctccaggccgtacgtcctcctcagctattttctgggtgcagcagacaggctttaccaataacgcgaaagtggttcctgaaaatacgaagaaaccatacagcgaaattgagttcacgccgaaaatcactggcgtcagcaccatcgcgcacctgttcaaagcctcaaagcagatcctggatgacttcgcacagttgcagtccaccgttgatgccgaaatgcgctacggactgaagtatgcagaagagcaggaaattctcttcggtgatggtaccggcgttcatctgcacggcatcgttcctcaggcgtcagctttcaatccggcgttcactgtcgaacagcagagcgggattgacgatctgcgtctggcaatgttgcaggcacagctggcacgattcccggcgtctggtcatgttcttcacttcattgactgggcgcggatcgagctgaccaaagacagcctgggtcgttacattctggcgaaccctgcggcgctgactggtccgactctgtggggcctgccggttgttgcaacggaagcggcagctttccagggtaaattcctgaccggtgcatttaacgctggtgcgcaaatcttcgaccgcgaagatgcgaacgtggttatctccacggagaacgccgacgacttcgagaaaaacatgatcaccatccgttgcgaagaacgtctggcactggctgtgaaacgccctgaggcgttcgtgtacggttcattcagcaccggcgcgggtagctga

SEQ ID NO: 141696 - DNA, 171 bp, Enterobacter cloacae
atgctgaggaggtacgctataacaaacgccgtgtatcagacgcggcagtatgatgtagtcagcctgagtcttatcagcaactatcagccgttcggctatctgcatttggtactgtggtgggcgaccagtgccaaggtagaaactaatcaaggaatcggggaagcgttttag

SEQ ID NO: 141697 - DNA, 240 bp, Enterobacter cloacae
atgactgatgaaagacctgaattttccgctttacaagaacagcgcagtactcagttagagattgagaattttgttcatgcgctattgattaaaatgctgctggcgaaacttccgaaaacagaccaagattcagtccttaaaatcgttaagcacgtagttggccaagctacggaagatcagaaagagtacaaagacctagcgatggcttatcttgataaaacatttcgcatcgctgattag

SEQ ID NO: 141698 - DNA, 639 bp, Enterobacter cloacae
atgtttaagcgtgtaagaagcggtttaaaggagtttgactcctccttttctgtggcagagaaactatatcaaatagctcaatttgttataatttctctaggaggaacgggggttttaggtttgcttgcatggatggacccatactttaaaaaaattggttatcttgcatatggcctagtttttctagtctgcgcctttatatttttttgtatgttatttttttataaaatgtctaagcttttaacaatcaaggaaagatattatgcaaatttatcagagcaaaagacaaacattaatccgctaagcgattcattttctgacgtggttattaatcttgaggatttaagacttccattgaatgaatctcatgttaataaaacattcaggcgctgtaagttgaaaggcccaatggcaatattgattgttggtggggtttttaataggaatgaattcagtgaatgcggagagttcattaaattacctataggtaaaaacagagtagatctcgctggagtactggctttcgggaactgtacttttgtggattgtacattcattgaaacaacattaatagtacctcatgatgttgctgtagcttttcaaaaagatgtacaaggattgaggtttttaaatttataa

SEQ ID NO: 141699 - DNA, 855 bp, Enterobacter cloacae
atggaattgctacccaaaatagaatccgtaacttcttttcttcgctatatttatgaacaaacttcaccaaagcacattagatgctatagggggcaatccaatactcaatggggaatgagaccttcggtgatgcgaggcctacgcactgatgctgaaaaacagatttttagcgaactgatggttgagtccccgatagagtttaatgatgatcgcttgatgtttgacaaacttgtcagggcacagcattacggtcttccaacgcgccttcttgacgtatctctaaatcctcttgtagcgctttactttgcgtgcaacgaagagactcaacataacgcaaatggagtcgtacaccttcttgactttgctaaaaatagagttcgcttttcagacagtgacacaattagtctgataagtaacttggcacgactcaccgatgcagaaaagttagaaattaagcaggaatataggaaagttaaatcttggaatgacaatgcacatgaggagtttcgcaagctggctccgatgaaacgtctttaccagttcattcgtgtcgaaaaaccatacttcacagattcgattatacctgccgatatgttcagatatcagttcgtgtacccagctaaaacaaacagaagggttatcgcgcaatctggtgcgttcttagttgctgggctgcttgaatacagcgcgccaggaaaaactcaaaaaggatttactgctagcaagatcataataccagctgattcaaagcctcaaattctaaaagaccttgatgtattaaatatcaattcaagaaccatgttccctgaggttgagtttgcagctggctatattaaaaggaaatgggagcgatga

SEQ ID NO: 141700 - DNA, 321 bp, Enterobacter cloacae
atgatggaattaacgccgcgtcagaatgaagtgttcgaagctatcaaggttcatatcgaaaaggcaggctttccacctactatgctggagcttgccggattaattggctgcgcatcaccgaacgctgctgtagagcacgtgaagtcgcttaagaaaaaaggttacatcactgttgctcctggcgcagccaggggcattaccgtcgtcaaaatggaatgggatgcagatccagtaacgatcatcaaagacctgctatccggcggagacaaggccagagataacgctgttgaatggctgaaaaaacagggagtgagtttatga

SEQ ID NO: 141701 - DNA, 258 bp, Enterobacter cloacae
atgcaatcaccattgagaaaattgcgcaaatcgcacggtatgaccttgttgcatgttgcaacaggcgtacaggtcgatccggcaacattaagtcgcattgaaagatgcgaacaggttccgtcagtagagcttgcagaacgtcttgccaagttcttcaaaggagagatcagcgaattacatattttgtacccgagccgctaccaagtagctgaagaagtaataggcgaaggcaatcgtaatgtgaaagcagtcatctga

SEQ ID NO: 141702 - DNA, 756 bp, Enterobacter cloacae
atgctggcgaattgcgcaagttgctttgcacgacacgcaaaaaacacatgtaatagacgcatgaatataggatcacgtatcagacagcttcgcttggcgaagaacatgaaaatctcagagcttgcagagtctgtgggggttgatgctgctaacatttcccgccttgaaacaggaaaacaaaagcagttttcagaacaaacacttaaccgacttgctcacgctttaagcgtaaaagtcccagacctatttacctctgtcgaaaatgagtctactgtatgtataaacagtgaaagtgattcatcatcgctaagtattggtgatgtttatagagtcgaggtacttgatgtgagcgcaagcgccggagcaggacacatacagagcagtgatgtcattgatgtcatacatgctattgaatataacaatgaccaagcattaaccatgtttgggggcagatcttcttctggggtcaaagttataaacgttcgtggtgatagcatggcatcaaccatcgagccaggagacctaatttttgtagatgttaacgtgaatgaattcgatggcgatggaatttatgtctttggtttcgatgggaaagtctacgttaagcgattgcagatgatccctgaccaacttttggttatctctgacaatccaaagtatcgtgaatggaatatcactaaagataacgagcataggttcttcatttacggaaaggttttaataagccagtcgcaatcctttaagcggcatggatag

SEQ ID NO: 141703 - DNA, 1299 bp, Enterobacter cloacae
atgatctcacgctggcaatggattctgaagcaggtatttaaaaagttatggttcagggctggattattcgcaattgtagcgataatgacggctcttttatcaattctgtttaaatcaatgatccctgagtcggtatcggtgaaggttggcgcagaagctgtggataacatactaaatatactggcatcgagtatgctagcagttaccacattttcgcttagtatcatggtcacagcgtacggatcagctacaactaatgtgacaccaagagctacacgattagttgttgaagacgtaaccacacaaaatgtactggccacattcatcggttcatttctcttcagcctggtagggatcattgctcttaatatgggagcctacggagaaagggggagagtcattttattcgtcgtcacactggtggtcattggtttaattctcatcacattgcttcgttggatacagcatttgacctccctgggaagggttggtgagacgacagcaaaggtggaacaggcagcaatcgaaacatttgttgaaagagctaaaagtccatatctgggcggatatccatggcttgagaacaatgaacaaccaaacggaacggttgcagtttatccagagataattggctatgttgaatatattgatatgctgaaactcagcaggttgctaactgaggatcctcgacatgtatatcttgtagcacagccaggcagcttcatacacccctcgatgccagttttgtatctgagtcaggggcaggggccattaatcagtaaagacctgcttgatacaatcatcgtctcagatgtacgttcattttctcaggatccccgattttgtcttagcgttatggctgaaatagcctgcagggccctttcaccggcagtgaacgatcctggcaccgcaattgatgtcattggcagaggtgtacgagtactatccgcttatgcgcagaataaatctgatgaaactgaagtgatatatccttcaatacatgttgcgccacttcagaacagggaactactggaagactttttcttacctattgcccgtgatggtgccggtatgagtgagatccaaaggagagtgctcaaagggctatcaatgttaggaagtagttggccgcgcgagtttgaagatgctgcacatattttggcacgtgaaattttagagtatgtaaatcgtgcagctcacaccgattccgataaggctcggattcaattagtctatgaacgtttattttccgacatacaatcaaaaactatcaatgttaaaaccggcaagaagaactaa

SEQ ID NO: 141704 - DNA, 1998 bp, Enterobacter cloacae
atgagtgaaaatgatacaatcccaaagcagtccaaaagccagattaacaaagcggtattctttacatctgctttgttaattttccttcttgtcgcctttgccgctgtattcccggatattgccgacaaaaattttaaacttctacagcagcaaatcttcacgaatgccagctggttctacatccttgcggtggccctcattttactgagcgtcaccttcctgggactctcacgctacggtgatattaagctgggcccggaccatgcgcagcctgatttcagctatcactcctggtttgcgatgcttttctcggcagggatggggatcggcctgatgttctttggcgttgctgaaccggtgatgcattatctttcacctcccgttggcaccccagagacagttgcggcagcgaaggaagcaatgcgcctgacgttcttccactggggcctgcatgcatgggcaatctatgccatcgtggcgttgatcttggccttcttcagttaccgtcacggtctgccattaacgctgcgttccgcactctatcccattattggcgatcgcatatatgggcctataggccatgcggtagatattttcgccgttatcggcacggtctttggcgttgcgacatcgctggggtacggtgttttgcaggtgaatgctggtttgaatcatcttttcggggtgcccatcaatgaaacggtgcaggtcattctgatcgttgtcatcacgggactagcgacgatttcggtggtgtctggcctggacaagggaatacgcatcctgtccgaactcaacctgggcctggcggtgctgctgctggctctggtcctgtgtctgggaccaaccgtgcttctgctgaagtcatttgtggaaaatacgggcggttatctttcggaactggtgagtaaaacgttcaacctttacgcgtatgaacctaagtcgagcaactggctggggggctggacattattgtactggggatggtggctttcatggtcgccgtttgtggggatgttcatcgcaagggtctctcgcggtcgaaccattcgcgagtttgttaccggcgtgctgtttgttcccgctggctttacgctcatgtggatgacggtgtttggtaacagcgcaatctatctcattatgaaccagggggcgactgacctcgccaataccgttcagcaggatgtcgcgctggccctgtttaatttcctggagcatttcccgttctcctccgtactgtcattcattgcaatggcgatggtcatcgtcttcttcgtcacgtctgctgactcgggggcaatggttgtggatacgctggcatcaggtgggatggcaaacacccctgtctggcagcgtatcttctgggcgtcgctcatgggcattgtagcaattgcacttctgattgcgggtgggctaagcgcgctgcaaacggtgacaatagcgagtgcattacccttctcagtgatcttactggtatccatatacggactgttaaaagccctgagacgggatttgacgaagcgtgaaagcctgagcatggcaactattgcgccgacggctgcacgtaacccgattccctggcagagaaggttgcgtaatatcgcctatctgcctaagcgttctcttgtgaaacgctttatggacgacgttatccagcccgccatgacgctggttcaggaagagctcaacaagcagggaacgattagccacattaatgacgctgccgacgatcgtattcgccttgaagtcgatctgggtaacgaattgaactatatttatgaagtgaggcttcgcgggtataactcgccaaccttcgcccttgctgctatggataatgatgagcagcaggctgagcaacatcgatattatcgcgcagaggtttatctcaaagaaggcggtcaaaattatgatgtgatgggctggaaccaggaacagttgattaatgacatactggaccagtacgaaaaacatctgcacttcctgcacctggttcgttaa

SEQ ID NO: 141705 - DNA, 558 bp, Enterobacter cloacae
atgcaaattggctatgtaagggtgtcaacaaatgaccagaatacggatcttcagcggcaagcactcgaacgcgcaggatgtgaacagatttacgaagaaaaaatgagcggaacggtagcgaacaggccagcactaaaaaaacttctcaaggcattaaacgagggggatacgctggtggtctggaagctggatcgccttgggcgcagcatgcgtaatctgatgctgttggtggacgagcttcggcagcgcggtatccactttaagagcctcaccgacagtatagatacatcaagtccgatggggcgtttcatttttcatattatgtcagctctagcagaaatggagagggagttgatagtggaacgcactcgggcgggtttggcggttgcgagggaaaaggggcggataggcggcaggcgtccgaagttaactgctgaacaatgggcgcaggccgggcggctcatttcaaatggtgttgaaagaaagcaggtagcaataatttatgacgtggcagtttgcacgctatataaaaaatttcctgtatctaagctgatttaa

SEQ ID NO: 141706 - DNA, 831 bp, Enterobacter cloacae
atgacagaagatatgcagccacgatctattgagacaaaattcagaaaacttttagggacagtaaacccacatttaattctgattgatgtagcagtaaaggaactcctttgcaaagatgaatctggccgcattaacattaatcgaattgaagacgtaactaaaaagcataaaaatgcaaaactaaaagttgcacatttagagatttacaaaacatctctctacgtaacacaaagtcatattgcatttatatatagctgcctagaatcatttttgaaagactacatttccttgtcaaaaaaaatatatagtgatgaacggtcattcaatattgataatgtagacatactacgtagagcaattcaccatgctcatgtgaacaaaataaatggtaagattacgcatcctaaattaaaccataatgagttgtcaatttacattgatgaacttgatttaaaattattggattactttagacttgttcgtaatattaacgcacatagccgagaaaacactaatctttgggaagaaatgttttcagaatctgacttaattaaaatgagtaaaaaatacaagcatgaagttaataaagaagctgaattaacaatacgtgatgtaattctgtattctcaggtatgccaacaggtcgcccaccatatctgccaaaaaatgttagacattgaaaaaatcgcaaaatcactttgcataaaatataaacaccttactggtcctcgtaaagacaatgcaatcacaaagacattaatcaacaattacttgcaagataaagatgaggttgatagactccggaatgcatttaatggctggttagcttag

SEQ ID NO: 141707 - DNA, 639 bp, Enterobacter cloacae
ttgactgagctaactactaagcgccctgatactgaactagctcatctcgcctggtgcatcatcgtagcggtaaagcttgcacggaaagagggaagatctctcacgtctcttcaaacacacatgttcataatgcagtggctttcaaccgctcagaaacgcaaggtttttcctaaatctctggcgcctgacataatctggttacaggaacaagggaaactgaaagggccatcagcacggctttacagcaaggtggagtatatctggctggcaagctctggtgagttagccaatcagagcacgctgtttagattcacctgcatgattgacacgctacgttcaatgggctggcaggatcacctattatccgataccgagtggcaggatggttggaaatgcggtacagatgtatcggctgtgtatacacagaaatctcaactccatagctcatttacagaatcaggaaatcttatattgccacttgaggtgcgtgtaactggcgttccagacgggatatttccattattggagcagtgcgggctcaaaactgagaaattgcctgtgagtatgggttatactgtcctgattttacagccagagattgatttaagttccgtgaagcaagatatcgttgaatattaa

SEQ ID NO: 141708 - DNA, 1347 bp, Enterobacter cloacae
atgtccaacactaccgaacgccacctcaagaccggaaacgatcctcgcacaatgcctgattattcagcgctacgtgatgagcttgccaaactctcccatcctgcccgtccggatgtgaattgggggaatgttgaaaaactggcattaaaccttttcgataccaatggtgtcgagcttcagacagctgcgtggtataccctggcaagggcacaacaggcgggtatacagggtttcaatgaaggtatggcgattctggatgccctgatacgctaccaatggtcagcaatgtggcccgcttctgcacatgccagaatagaaatacttagcagcctgagtaaacgtcttcagcagctgtaccggactttttcccttcagaaggaggatttaccaggcctgaaccagggcataaggcttttgagctcaacaggtgaagccttgcaacggctcgaactccacaatgcaagcggatttgagccgcttcgtcagatgctgcaaaacacaactatcaggctggagaatagcgatgtcccctcaagccagacagagagcaatctaacagatgtagcactacctgttagggctgaaaggcagaataggcagcgctgggtatatgtggtgaattctgaaccagcagttgaagttgaagtaatcagaaaatcatccaccaggatcactccattagtggcttacttcggcggtattttaacagctgccgtactgggcatactcgcctttatttttactccaatagtattcagccaccccggagaagatgcgttgaacaactctctcgcagctttaccgtccagcatgcctcttccggctgtagataagctacgccaggacgccccgacgtggcttgaatccagtgatacctatgcaaaaaaattaacttcccgtctgaacgaactgagcattcttccaccgtattggccattgcaatacggtaatcagttggtagaacaaacgcgccatctttaccctaacaccaaatttgcagaggaggtgtcggctgactggcggtcaaagctgcaagccaatagtttgcccaatgccaccatttcaggttggtataggggagtatctgagcttcagacgcttcaggacagacttaatcaactcgacgagaagaagggcaaatacctgaccgttagtgagcttaaaactgctgtgttctctatatcaaagtccttaaacgaaagcgtgccagttgaagaattaatccggcaactgcaaaattccccgcaggatcaaccgctgtcccgagacctgctcaaccgggcagatctacagctcaggcaactgaataactcctacatcatggccacgtcaaacaaccaaaaatag

SEQ ID NO: 141709 - DNA, 393 bp, Enterobacter cloacae
atgtttaaggtcagggtttctgtcggtcttgttgcctccgccagcattcgtaccgctttcagtacgctgtatctctgcaatgcgattgcctttggcccattcttttaccagcaggccgcggtctatgtaatcagtcgccgcccagattctggtgaatcggagaaccaaagcgagttcgtgacgcttttcctggctgaacactttgcgaatggcgtcggtatagcgccacaggtctttggtgtcgtaacccttaacctgttcgcagttttctgccgccagcagcaggttctggacatagctattgtcagtgtccatctccagcgcgctgataccttcgtattcatcgcgtgtaatgtggtggcgcagttcgtcggaggtgaactgggcgagtag

SEQ ID NO: 141710 - DNA, 405 bp, Enterobacter cloacae
atgaacttcgaagaaagactgttacgagctcttgatgaagccgggatatctcaatctgagctgggccgcagggtgggggtaaactcacaaacggttagtaactggtgcaatacaggtaatttccctcgcaaggaaaagttggctttattcccggaagcattaggtaagccactgtattggttctttttatctgatgaagaagaggcgcatcttaaggcaaccagcgaaagcaaaacggtattgaacgagaaacaagctgcgttgttggaagtttttgatcagttacctgaagttgaacaaaccaggttcatacagctggccagcgaccgcctcgaagagctcgataaatttatggctgaatttctcagcaaacggaagattgagcccgctccaaccaaagactga

SEQ ID NO: 141711 - DNA, 231 bp, Enterobacter cloacae
atgaaagaacacattcaacaaaaaattatttcgctgtgtggcagccaatcagaactggcacgccgcttaggtaaaaactcgcagactgtatctgtctggtttcgtactcaggtagcaagcacagaggttttaaacgcatgcagagctttggattgggaagtcaccccgcatgaattacgtccagacctctatcccaacgcaacagatggtttacctcagaaggaggcttaa

SEQ ID NO: 141712 - DNA, 690 bp, Enterobacter cloacae
atgtccagatgcacagcgccaagacaaggtcaccgctcagcaagcgcacgagcaaattgccctgcatgcggaggtcgctttagcggctaccgttcctattccactacttcctattcttctgctggaggcaatggaggaggcagtggaactaactcttccggacaaagcagaagtaaacctcgctggtctccggcaggttcatccgtgctatacacaccaaacgagatacgttctcttactcctatacgtgaaaccgttgagactcgagcaacacagcaacccgatcttcgcgatgtctttctatgccacgcatgggatgacaggcaaggcgcggcaaaggaattacatgacttacttgaagcagctggcgtaaaagtctggttcagtgagaaagatctcggactaggggtaccgatgatgcgggccatcgataaggggctggcaaattcacgaatcggacttgtgctggtaacgccggcgttgctcaataggcttcccaaagaaggcgttgcggacaaggagctatcagcacttttagcgggtaaccaacttgtgcccatcgtgcataacactacctatgaagaacttcgtaatgtgagtcctttgcttgcttcgcgtagtggcttagacacgcgcgaagacaccatggccgttgtcgcgtccaaaatcgccgagctggcgaccctgtag

SEQ ID NO: 141713 - DNA, 1788 bp, Enterobacter cloacae
atgaacgatattaatatcagcctcgacgaacttaaaactattgatttatcccccttaatccagagtaagctgccagttacctgctttgatatcacaaagtatctttcgagcctaggggatggaagagcggagataagactgctaacccatatttgcggttttcactttcgtcccgaaaatccacaggtaccatttggtccgagctttcaaagtagccaaggtagatcagcaattccggatgacattaacgggttgtcgctggaggtactttctcaattttgcccgacgatagagctacccgaacttcaagctcgtattgctgatacactttgggttcgtaaaattggtggaatccgttttcctctgctggcggtccgtgcttattatgcgtccagcatggcgattatgacatcgcaagggtcgtgggttagtgctttagaacgcctagagcgtgcgcttaggctgtgttgttttttccgaaagaatactgatttcagggatgaatttgatcagctttcggcacatctactagcagagtatgaacgtaccagtggacaagccgattcaccttatccgctgcgactcctgcaactcgatatcgactgtaaagtgagtgagccatcttttattgcccaagaactcctgtctctgacaaaaaaatatctggctcataaattattttcatttgccgtcgacgcctgtaaaaccgcaatcccgattgcgaatagttgctgtgacagagatacacagtttgagttctggcggcttcttgccgatacacatcttgaagagtcaaaattccaagatggcggcatgatttcggcagcctgcatgcagaatgctattgaagcactgtctaatattccaggaacccgaggagaacgtcttgcgctgtatgaagaaatgcgtgattaccaaatcgaatcccgtcaccagatgtctatccttcagtctccccctcaagacattagtgagattgtccatcaagccaagagtcgggtagtcggaagagatttgtttgatatggttttcagacttgcgatgctggtctgtcggccaaccggcattgagagactcaaggctcaagcaatagaacaaaaggccaacagcatagcttggatgtttggatcaacacatattgatcatgagggaatgacacttgctcgcatacccgcaggattggggattgatgatgcaaatggggcagttatttggcctattatgatgacgagaatgcgtatcgaccatgagttggcagtagccgggcaaattattcctgctacggatgagatcacaatgaaatatccaatctcggaagcgttttttcgcgatatgttcatcaatcatcccttcatcccgtttgggcatgaagagttttttatccagggtatggtttgcggtttcaatggagattttatgacggcatgccacgtattgattccacagatcgaaaatagtctgagatatgtggcgaaaatcaaaggtgaggagccatcgcagcttcacggggacggttcgcaagagcgaaatggactcaagggactactagataatccactgattattgaagctttcggcgtagacataattggcaatcttcaggccttactggtagataaaatctatggtgatttacgaaaccaactagctcacggatatgtgcctgccggttactacaatcaacctccctgcatttttgcatggtggcttgtattgcacattctaatgaaccctacggcgagatactggcaagccacttacggccaagagagtgagactcagacttaa

SEQ ID NO: 141714 - DNA, 2007 bp, Enterobacter cloacae
atgaaaattagaccacagcagcatctcattaacatacttacttcaaccaaacagcatcatccgaattttacgctttttcttggcgctggagccagtatcaccagtggtgttgagagtgcggggggaatggttaagcgctggaggaaggcttatgcatcaatgcatggggaagatgagttgtccaagcaaccctggtttgataaagaaaatgagtattcagaactttttgaggcgttgtatgatcaacctacacagagacgagagtttatagaaagttgtataactggagctaacccgtcttgggggtatgtatatttaactaaccttttagataaaggtcatttcaataccatatttactactaacttcgatgatttagttaatgaagcatgctttacattctctaacaatttgagacctatcgtttgcgcccatgattcgagcattgctagcgtaagacttactacgactcgcccaaaaatcatcaaactgcacggcgactttcttttcgataatataaaaaatactatacgtgaactcgagtcgctcgaagataacatgagggctaaatttagacaattcgctactgagtttggtatgattgttgtcggttattcaggacatgaccgttcaatcatggatacacttaatacgttattgcattctggtacgtgtttccctcatggtatttattggtgtgtaagagatggtattgataatcttcctgaaccgctaaaaaacttagcgcgtttcccacatttccatttaattaaaattgatggctttgatgagtttatggctgaactgcatgaggctttaggttgttctcttcaacaggaagtcgtggagccatattcagcattgtcaaacaagcttgatagatattttttgatttctgaggatgatgatgatgatgattctcaacatacaatcattagacgagatatggacaatcttgcagatcatgtaaggcgtgtaaatacagtaagtcaatttgttaaaaaaattaaaatccttttttctgaaaaagcattctctcttgatgatgattcaattacaaaatcattggaaataatgctcaaagaaactcagtttgcagggtccccagaaaatcttcatttttacaatacaccaaactatcttatagcaaactctgcttttagagcgggggaatataaagagtgtgttgagtatgcgacaaagcatttgtcaaacgggccttcaatcgaaactgaagcattgttgcttcgatcttatattcatcttaaagatgaagagcagattaatgaatctcttaagagattagcaagctataaaaaactaaaagaaggtgaggttacaaaaattgtcaacgccttagtagatttaatggattttgaaaaatactcaatggcaaacggcttgatggaccttttagatacccgtgcaattccagcaaaacataaaagtcttatcactattaacagagctctatgtcaaaagttacaggatcaaacgataaaatctgagctcatgtttgatttggaggaattacttactgaatcaatagataacgacgaagcatggttagccctcggggctgctatacttcttggtaaggatgaggttgctgaagaagtatccaactctttatcggaagcagaggttatagctgtggttacgcaatctatgccgatattccgattgatttctaactctgtttatgaaaaagtcaaggctattgcgatagaaaaaggttacccggtttctttcgatgacagttcggaagatgaggatgatgggtcagaaaaaacgaatccttctgaagaagaagcttctgatcaaccaagccttgacactgatgatgttcatgcttcaagcaacgtggaaagcgctgctgttagcgactcattagggcttgatactggtacgccagcagataacgatgaggcgtatgtgtatgctaatgagcctaatgaaagaacaaaaagtgcgcttgaagatgatctttctgagagacctgcttaa

SEQ ID NO: 141715 - DNA, 201 bp, Enterobacter cloacae
atgaagaaaagctggttcactcacaccgggctgacaaccgaagaagccaatgagctggtggcgcgctataagtctaaaggtgttcctgtcgagaagagtctcgatattgaccctcgcctttggatagtcagcgcacttctgccacagcaaaaatccgcacctaagacgcagcaaagtatgcgttcacgggcatgggggtga

SEQ ID NO: 141716 - DNA, 369 bp, Enterobacter cloacae
atgggggtgattgtgactgcctacaacatcctcccgatgggaaagccgcgcatgacgcgtgcagataaatggaagaagcgcccgcaagttatgcgttatcgggctttctgcgaccatgtccggctcctgggtgccactatgcccgaatctaattcacacattaccttcattcttccaatgccaaaaagctggagtaagaagaagcgccagcagtttgatggtaagccacaccagagtaaacctgacttcgataacctggttaaagcactctccgatgccatttatgaagatgacgctcatatctgggatgcacggattacgaagctatggggtgaagtcggtcagataattatcaggaatatcgactga

SEQ ID NO: 141717 - DNA, 1020 bp, Enterobacter cloacae
atgcgcgcgctccttcaacctgtaatcgccagagagcttggtgtcgtgctgttaaagcccggcagcgaacttatgagcttatttggtggtggtagagtgctgattgagcgacagccagatagcatggctcatctggaaacgggtcgcgttcctgatgcccgccagcctctaggtgatgataaatcgctacgcactttctttctgaatgacaaagtgattcatgccgctggcgggattagtggcctggattactggttgctgcgatacgctggtggacggtgccagtacgagcatagtgattaccactatcacgaactaactattatgcaccatgagcctggctccatcctgctttgtggctattgcgataaccacttgcgagagcagcgtaccgaagcactggcagagttggcacgcagaaatgtaattgcctttgttatggattctgtccgcattcatctttgcctggacaaaagccgggagatctcacttgcagagctctgctggtgggctgttcgtaaagaagttacggatgcacttccagaatcatgcgttcgtgaagctcttcgtctgcgtgaagaaagtccaattggacgagaaagtgacataattcccgaagtaccggccaccagcatccttgagaaattagtgtcagccgttgacctgcctgaagcgctgacagaaccgctggtgggcgtgatggtggatccagttcctcctcagtctttcatgcgtcgaccaaagcgtctgcgctgggaaagtcgcgattatctgaattgggtgaaaacacagccctgcgaatgctgccagcagcaatcagacgacccgcatcacttaatcggatgggggcagggtggcatggcaacaaaagctcacgacatcttcacgattccactttgccgaaaacatcataccgaacttcataacgaccgcctggcattcgagcgcaaatatggctcgcagctggaaatgatcattagagtgctggaccgggcctacgcgctcggcgttctggcgtaa

SEQ ID NO: 141718 - DNA, 216 bp, Enterobacter cloacae
atgtatcgaatggacaaaataactactggcatttcctacggcgcatcgggaggtagtgccatttactggtttagaagacttcttgacggttactccccagagcagtgggcggctataggtgtgatcggtagtttactgttcggcttgctcacctttctcaccaacctctatttccaaatcaaagcagaccgtcgaagagctgcgcgaggtgaatga

SEQ ID NO: 141719 - DNA, 540 bp, Enterobacter cloacae
atgaaaattaatcctggtctggtcgtcattatcattattgctggcctgtcacttgctctcgtaaagagttgtgctgatgtcaaaaatatcaagagtgataacgatgtgcttcgcagtgataacacgctacaggggcaagtgattgccactcaggctttcaatttcagccgatacaatcaggttgcagagcacgccaacaggcttaattcgctgattgatatcagcaccgaagaaactgtaatcgaataccgggagattctccgccgtgaaaaaacctgtgatttgcctgttcctgctgacattgctggtgggctgctcgaatacgcgcacagtttacgtgccagcgccatgtacaccgataccggcagacctaaccaagccgatgatcgtaccgctgccgccagctcaatgacctattgccaggctgtcctgtggattaagccgctgctggcagttattgagaaaggtaacaataactttgctggtgttcgtgagattgagtttcagcgtcaatccagttcactgacctggaatcaataa

SEQ ID NO: 141720 - DNA, 135 bp, Enterobacter cloacae
atgctgattctgtttatcctcctagctatatggctcgatagctgcggggaagagggctggcccgatgttagcccgtctatttctcagctggtgatcctgagagagcgtctggtgcatagcaaggggctatgttga

SEQ ID NO: 141721 - DNA, 438 bp, Enterobacter cloacae
atgttgcaggcgattttgggagcaagttgggcaaacatctgggcatcgatttcggcaatttttacattattggcagttattgttgctgggttggcactgttacgttggaaaaaacaagatgagttgaaggctaagatggcttttaaacaagctattgcagattacctttacgccttactccttcttcctgatgacttaagtgatgagaaggcatacgccgattattacgacttaaggatgagtttgatttcaaaatttaatcaatgccgtaatacttttctttattgcgaaggtttgcttgataaggagatcgatgttctggctcactggaataatatttactcgcatcattcatcttttcttaaaggagaggacggtagcactgttctgcataatgcgtgtgacagcattctgaagataagattcgtctttaagtga

SEQ ID NO: 141722 - DNA, 438 bp, Enterobacter cloacae
atgtggcaaacaatctacgcttggccgtgggcaacaatttgggctgcaatatctgcaatatttacagctgcaaccgtaggtattgcgttttgcgcgatgaaagaatggaaaaaacaggagcagtttaaggcgaaggtaaattttaaatcagccgtcgccaaatacgcctattgcctggttgcgcttccaagccatttgagccctccgggaaccacaagggataatccagcgaagattgatgagctgactgatttattggctgaagccgcttttgcttggtttagcctggagggttcgttggtggacaataagcatgtgacggaatcttggcttttcatcaatgacaatcatattcgatatgtggatggcgagatttcctatcatgaaattcatacgcactgcgctaatatagtcaccaagccaattaacaagaagtaa

SEQ ID NO: 141723 - DNA, 321 bp, Enterobacter cloacae
atgacaactaatcagcaactcagcaccttcgcaattacatcacagaaaaaaccgcatcatccaagtgacaacaaaacatgcatggtgctaatgattgcctttattttcagcattccctacgccgccgcgcttaatgctgcgctgttggaagaaaataatttaaaagtttctttagcgtggattggtatagccttcgctgtcatatggattggatacgacttgagtaagctaaaagaaaaaactaagttccatgtgatttttacaatcgccgccaaagctatacctgcgattttggctttaattggacttaagttttcctaa

SEQ ID NO: 141724 - DNA, 435 bp, Enterobacter cloacae
atgagtaccggagtgagatcgccggggggaggtcgtaagccgaagaagaccggaacgcaggtcagttctctgactcgtgcagtttcaccgccggatgaactgctgggtgagatggcgatcgatgcctggaaacgtacctgcaaaattctgattaaccgtggttcgttcgaaatggaggactgctatctactggtggaatattgcaacacggtgcaactcctttacgacgcgaaccaggaaataaaggctaatgggattggggatgaaactgctgccggtgggcagaaaatgggagccgcagtaaaggcgcgggataagtatatctcacagcttatccgtcttagcgtagttctgaaacttgatcccaacagcagagccagaaaacgcgcgtcgggcgaggaaagtaaatccggcaatgaatttgacgaattttga

SEQ ID NO: 141725 - DNA, 1176 bp, Enterobacter cloacae
atggccgcgtacccgagcgtcaatatggcgaaccagtatgcgcgggatgtgctgaacgggaaaatactcgcctgcaagagcatccagctggcatgccagcgccattttaatgatctgaaaatttctctcgataaggattatccctaccgattcgaccgcgaactggcggaacgcgcctgtcgtttcgttcagctattaccgcactccagcggtgacttagccggtcaaaaacttaagctggaaccctggcaggcgtttgcattcagctcgattttcggctgggttacgaaaaagaccaaaaagcgccgatttcgtgaagcgtatatccgggtggccaggaaaaacgggaaatcgtttttcgcagcaggcataggcacgtacatgttctgcgctgacggagaaaacagtgccgaagtgtactgtggtgccaccacgatggcgcaggcgaaaaaggtcttcaccccagcaaggcagatggcagaccgccttccgtcgctccgctctaaattcaatatttcggtctgggttgacagcctgacccgtccggacggttcgctgttcgcgcccatcgccgggaagcctggcgacggtgacagcccacactgcgcaattattgatgaatatcatgagcacgatacggatcacatgtatgaagccatgacgctgggtatgggcgcacgttcgcagccgctgacgcttatcatcaccacggcaggtacgtcgctggaatcgccatgctacgacaaggataagcaggtcaaggagatgctcaacgggcatgtgcctaacgaccgcctgtttggccttatttatgagctcgatgagggggacgactggactgacccgaccaacttcattaaagcgaacccgaacctcgacgtatcgatatcgtatgacgatctgctggcggagatggaggtcgctaaacaggttccgcgtaaggtcaacgcctttaaaacgaagcgtctgaatatctgggtatccggtaaagcagcgttctacaacatgacgcaatggcatgccgccgccgataaatccctgcgctacgaggactttgccggcgaggattattacctcggtctggaccttgcccagcgcctggatcttaacgccggtgttggcgttttcgtccgcgaaattgagggtaagaaacactactactgcatcaggccgtaa

SEQ ID NO: 141726 - DNA, 459 bp, Enterobacter cloacae
atgggggcgcttgaagcgacagatggggcagaggcggactatcgcgaaatcctggccagcattatcgaccttcaggaaattgataaggtccgcgtcagcgaaatccccatcgaccctagcggagccacggcgctcagccacgagctgcaggaccacgggtttgagcccatttctatccggcaggactacaccaatatgtcgccgccgatgaaggagctggaagcggcgctcgctggcggtcgtttccaccatgacgggaacccggtcctgtcatggtgtatcagcaacgttatcggaaaaaatgtccccggaagcgacgatatcgtccgaccgacgaagggcgacaagcagtcaaaaatcgacggcgcgacagcgctgtttatggctataggccgtgcaatgctgaacggtcgggccagcaatcaatccgtttatgatgaggaagacgtcgcatgttaa

SEQ ID NO: 141727 - DNA, 180 bp, Enterobacter cloacae
atgttaacggcaattattacctttatgatcggcctgttcggcgcggcgcttatctcgtttggcgcgtggatggtgtttccgcctgcaggcgttattgctgcaggcgtgttttgccttctggcatcctattttgctgccagagccgctgcgcctgcgaatgattctccagggggtaactga

SEQ ID NO: 141728 - DNA, 1260 bp, Enterobacter cloacae
atgttcattcctcagttcttccggggcaggtcgcgtccgggaggaagtaactggacaacggttctcgggagcgtcagcgccagcaagagttcatcgggcatgctggttacgccggaaacggcaatggggattggggccatacgcgcctgcgtaacgctccttgccgaatccatcgcccagctgcccgtcgagctttatcagcgcgacgaaaaaggcggtcggcgcagggcaacggatcatcccctgtacgatgtgatccattcgcagccaaacagaaaggacaccagctttgaatattacgaacagcagcagggcgtgctggggcttgaagggaacagctattccctgattgaccggcacggcaacggcgatatcgctgaactgataccgattaaccccaaaaaggttatcgtcctgaaagggccggacgggatgccgtattacgagctgcctgagctgggtgaaacggtgccgatgcgcatgatgcaccacatcaagtatttctcgctcgacggatacatcggcacctcaccgattcagacaaacgcggacgttctcgggctgggcatggcggttgagcagcacgccgcgcaggtgttcgcccgtggcaccacgatgtccggcgtgattgagcgccccaaagaggcgggagccatcaagagccaggcgtcaattgacaagcttctggccaaatggacggaccgctattccggtgtgcgaaacgccttcagcgtggcgctgctgcaggagggcatgagctataagcagctgtcgcaggacaacgaaaaagcgcagctgctgcagtcgcggcagtggacggtaaacgaggtgtgtcggctttacaaaatcccgccgcacatgattcagcttctcgacaaatcgaccaacaacaacatcgagcaccaggggcttcagtacgtgatgtacacgctgctggcctggctgaagcgccatgaagcggcgatgatgcgcgatttgttgttacccagcgagcgtcgcgacttttatatcgagttcaacgtctcgtcgctgctgcgcggcgatcagaaatcgcgttacgagtcctacgcgctgggccgccagtggggctggctgtcggtaaacgatatccggcgcatggagaacatggccccggtagagggcggcgacaagtatctgacgccactgaatatggtcgataccagcaccgttcacgggctggataaagccacccccgcgcagataagcgaaatcagcgcaatcctgcagcgaactgcataa

SEQ ID NO: 141729 - DNA, 918 bp, Enterobacter cloacae
atgtcgaaattaatcaacctgccgcacctggctgaccaggtgttcggggtgcctcactacgccacgcggcaaatcatggactcggtgaagtcgatcctggttccccgcctgcagggcatgaatgtggccccgctggaaatggccctggggccggatgagttacaggaaacgaatgaacctcagcaaagcggcggcggcgtgggcgttattcctgtccacggcatcctggtcccccggcgtggccagatcgtgaatatgtgtacggagctgaacagctacgagcgtattcgcggccagctggcttcccttctgaacgacccgggcattaaagaaatcgtgctcgatattaactcgggcggcggcgcggtatcgggctgtaaggagctggctgactacatttaccagtcgcgcagcgtgaagcccattacggccatcgtgaacttcagcgcgttctctgcggcgtactttatcgcgtcggcctgcagcaaaattatcgtcagcgaaaccagcggcgtgggctccatcggggtcatcctggagcacatggaagcatcgaaatgggaggagagcgtggggctgaaatttaccacgttctcgcgcggcgataacaagaacaacggatccccacatgaaccgctgacggagctggccacgtcccagatacaggcgatgatcgacggtgcataccagacgttcacatcctccgtcgcgcagtatcgcggcatagatatcgacgccgttatcggcacccaggccgcgctgtatttcgggcagaacgccatagcggcagggctggcagatgagatgtccgatcctcagtcagccatcaacgcgattgccgcgaaatacaaaccctcgccccagcaatccagtatccagttacgtgctgctgttatggatcagcaggcccgtatgtaa

SEQ ID NO: 141730 - DNA, 1296 bp, Enterobacter cloacae
atgaacaaaatcgaagaactgcgtcgccagcgtgcgggtattaacactcaggttcaggccctggcacagattgaaatggacggtggcacgctgagcgcggagcagctggagcaattcactggcctgcaggctcagtttgatgagctttcggcgtccattcagcgtctggaagcggcagaacgcctcgctgccaccacggcggttccggtgaaggctgcgcagaacggtcgtaacgcaccggcagtgcatgcgaaagccgaaccgccacagtataaaggtgcaggcatgacccgcatggtgatggccatcgcggcaggtaagggcgacctgcagcaggccgccgcgttcgctgcggaagacctgaacgatcaggggctgtcgatggcgatcagcacagctgccaattccggcggcgcgctcgttccgcagaacatgcagaacgaggtgattgagctcctgcgcgaccgcaccatcgtgcgtaagctcggggcgcgaagcatcccgctgccgaacggtaatctggcgatcccgcgactggccagcggctcaacggcaagctatgtcggtgaaggcaaggatgtgaaggcgagcggtgcgaccttcgatgacgtcaaactgaacgccaaaacgctgatcaccatggtgccaatttccaaccagctgattggacgcggcggcttcaacgtcgagcagctgattttagacgacatcatcagcggcatttccacccgtgaagataaggcgttcctccgcgatgacggcaccaacgacaccccgaaagggatgaaggccgtggccacggcgggtagccgcacgcatgcgtgggttgcagatgacgaagtgaacctgcagaccatcgatacctaccttgatgcgctgatcctcatggcgatggacggtaacagcaacatgctgaagtgcggctggggtatgtccaaccgcacctacatgaagctcttcggtctgcgcgacgggaacggcaacaaggtttatccggaaatggcagcgggtatgctgaaaggctatccgattgagcgcacctcggctattccagcgaacctgggcacgggcggcaaggagtctgagatttactttgctgacttcaacgatgtactgattggtgaagacggcgcaatggtggtcgatttctcccgcgaggcgacctacatcgatgcagatggtaacaccgtttccgcgttcgcgcgtaaccagtccctgatccgcgtcatcatggagcacgatatcggcttccgccatatcgaaggcctggcgctgggtaccggcgttacctggtaa

SEQ ID NO: 141731 - DNA, 453 bp, Enterobacter cloacae
atggctcctaaaaccaaaaacactcagaaagacgataccgccaccgacaccaacgccgagccagcggtaacgactgcagctgcagctgatacttcagcaccgacaccagacgttaacgccggttctgcaggcgaagccggtggtgacggtgatggtaccgaacccggtccggacggcgacgatacggattcaggtggtgatgcaaaacaggacgaaaccccagaggaacgcatgtcaaaactgactggaaaagtcgcttcggtacaaaacgggcgcgtcgcggtgacgttccttggtccgtttagccgctacagccgtggcgatgtagcctgctttgacagcgccgtcgctcaggacatggtggaccgaaatatcgccgtctgggcaaaagatgcagaacgcgcccttcaaccgaataaggacgatgacgcgcatgatactgacattggctga

SEQ ID NO: 141732 - DNA, 324 bp, Enterobacter cloacae
atgatactgacattggctgaagccaaaacccagctgcgcctcgagctggattttgatgagcacgacagcctgctgaccagcctgattgacgcggctcagcgcagcatcgagcgcagctactactgcaggctggtagagaaccaggcgcagcttgacgcactgcctgacggtgagacgggttacatcattgatgaagatatcaagctggccgcgaagatgatggtctcgcagtggtatctgaatcccaccggcacggcagaaggttcgccgtccgatttgggcgttgagtacctgctgttcccgctaatggagcataccgtatga

SEQ ID NO: 141733 - DNA, 342 bp, Enterobacter cloacae
atgagtgaccccctgcgccccggcgagctgaactgccggataacactcagctacgtggaaacagaacgcggcgagctcggcgagacgcttccggcccgtgaggtgagcgccggaaaggcctggtccaaaaaggagctggtctccggtcggaaggtccggacgctggaccagcagcaggtcgtcgaaacgtgcctcttcacgctgtacccgcgtaaggttgacgtggactggaaggtatcgacagcggaccgggtatataccgttcgcaacgtcgagcgcctgacggatcggataatcatcaccggagaggcggattcacgccatgatcgagtcagcaattaa

SEQ ID NO: 141734 - DNA, 381 bp, Enterobacter cloacae
atgatcgagtcagcaattaaaaccgctgtggagcggattaccgggctggatacgtacccgctgctgcttccggatgcggtgcaggaaggcgcgacgttccagcgtatttccgacccgcaggtcggtgacggactgaggcggaccgggttgtccgaggtacggatacagctttcgctttatgttgtcgaccggtacacgtcgctgcttcagttcgacggggcgctctgggctgaatggaaggaaattgttcatggccagctggaaggtcagcccgtccagtacgttgagcgcggaggtatacagcaggggaaaaccacgcttcccaacaaccgcatccagtaccggctggtgcgcgacttcatcttcaccgttccggagtaa

SEQ ID NO: 141735 - DNA, 411 bp, Enterobacter cloacae
atgcagatggacattaaattccccaccgggaaggagtttgaccggctgctggaaagcatcgacaagaaagtcggggtgaaactcctgcgtgatgccggacgcgccgcgcttgcggtcgttgagcaggatatgcggcagcacgccggttttgatgaggaaagcatcgggccgcacatgcgcgactccatcaaaatccgcagcaccaacgtggcagagacctcgcgctataacaccatcgttacgctgcgcgtcggtcccagcaaaattcaccacatgaaagcggtggcgcaggagttcggcaccgtcaaacaggtcgccgaccccttcattcgtccggcgatggactacaacgttcaaaaaatccttaaagtgctggccgcagaaatccggctgggcctcgaagggcgttag

SEQ ID NO: 141736 - DNA, 474 bp, Enterobacter cloacae
atggcagatccagaaatcaaatccccgtcagagtacgcggtactccctgcgggtaccgaggttcgctacggtcagaagggcgcaaccattaccaccgccgcgcttctgcagagcgcgatggggattggggcaacggggaaaaaaggcaccttcctcgaagtgacacgcctcatcgacaaagagccaaaatacatggccgacatgggtgagggcgaggataaaacgctcgtcttcattgatgatccatccgataccgtgcaggaagcgctgctgagcgacgccgatgcgaaaaaaacggtggtcttcttcatgaagttccccaacaagcgcatttcagaagtcgaactggtgctggctggctggagcctgcaggccgttgatacgccgaaaggcaaagtgctgcaggttgaggtctacggcaagcagaacagcgttaaatggtccgttgagcagccagccggtggcggcgagtaa

SEQ ID NO: 141737 - DNA, 345 bp, Enterobacter cloacae
atgaactacaaatcccttatcaacccactgaataccaccgttgaaaaaacgctcctcggccagaaggtgtatcttcgccgcctgaccagcgccgagctggatgactataacgacaaagttgaagccggacgccaggccaggcttccgtcgcgagagctgtccgcgatgggggtaaacctgtttctggcagcgctggtcaatgaagacggcagcaagcccaaagccagcgaactgcccaccgcagaccagctgatggccgcccacgcgaacgccgatcttctcgacgcggtcacgctcgttcagcgccattcttacggcacgctggaggaagccacaaaaaactaa

SEQ ID NO: 141738 - DNA, 210 bp, Enterobacter cloacae
atgctggcagaccgatgggacgagccggacccccgcaaaatagccgaacttccggcgaacatactgacccactggcaggcctattttgatctcctgagaacggaggccgaaacgtcagcgccggtgcattctcctccggtgactgctgcgcaatctgaaagcgaccagcagttcgctgactgcttcaggatattaggacatggctgctga

SEQ ID NO: 141739 - DNA, 2973 bp, Enterobacter cloacae
atggctgctgacgttgcgtcgttggctgtcgcgctgcatctcaactccgccagctttaaatcacagtttgctgatgctatgcgaacggcggacagcagcgcccagcaatttaacaggaaagtccagacggacaatcagaaaacccggcagtcgtttgaagggctgggcaaggggattaccgggctggacgccgactttaacaagcttggcaaaacggtcgacaaacggctgaccgggctggatgaaatgcgcggtctgctggccaacatttcagctggcagcacggttgccggaagttctatcacgacggcgctggtttcggccctcagcgagggtatgagcaccgcgctggataacagtattacgggcctgaaatcacagcgacaggcccagattgagtttacccaggcgcagataagcgccgcgcagggctcgatagagaacgccaggcagctgcgtgctgaagctatcgagaagcagaatatcgcggttaagaccattgaagccgcccgtgccgaccgcgagcgcgcctttgcgctcgatgagcattttgccaaacaggccgaggtgaacaagcagtatgggctggccgtcagctatgaggccgagcacgttaaaaatgccagaaccattcaggaggcgaatcttgctgaagcgaaggcgaagggtagccttgcagaagcgacgaaaacggtgctggcggctgatatcgccgagtctgccgggaagcagcagctggccacctcaacgcgccagctcgccgtggccagccaggagttatctcttggccagcgagctgctgcagccagtgcaggcctgctgcgcggcgcaatggcgatggtcggcggtcctgtcgggctggccgttattgccgtcgccggtgcggtgaccgcgatttactcggcctactccaacagcgaagcggtcattaaagggtatacgcaggcgttacagaaatccggccagcagtccgttatgtcggtgatgtatctgcagaacctgacctccagcctcggtgattcagatcgcgccgttaaggcggttacggcatccgtgtcggcgggtttcggtggcaatatgctggagcaggtcgccagcctcggcacgcgaatggaggaaatcgggcagagctccgacgatctcgtgtcgctgctgtcgagcctgaaaggcgatccgctgcaggcgcttcaaaagctgaccgaccaggggattttgctcaacggcagcatgatagaccagatagtcacgctcgagcgccaggggaaaacctctgaagcaacggcgctgctgcagcaggcggcgatgaatgaccttgataccaaactcaaggagcaggaatcgaacgtaggtgggctgaaaagcgcgtggaaatcgctgaaagattttgtcgcagatgcgtttaaaacgatgggagacgcgcacatagccaccgcgcaggcgatggctgcgggtgcaggtgttgatctcgataccactcctgacccggcaatcaagcagcgtgaagaggcggaaaagcaatatcaggcacagaaaaagcagcgtgaagaaatttcgaagcgtctgaaggacgaaaacacgctttcagggctgctaaaagccgggacatcgcgtgaaaaagagcgggccgatgccgttgcgcttgttaatgccaatttcaccaaaggaacggctgaatacacgcaggcaatgcgcggcatcgacaaaatgtatgccgagcagaaaaaatcccgcgagaaggcgtacagcgacgatgctgcgaccacgcgcctgaatcagcttcgccaggaagaggccgcgctgcggtcccagaacgaacagaccgagacgctgacgcagtcggaaaagaaactggcgcagttcaaccaggaaatcgctgacctcaaggagaagcgtatcctgaccgctggccagcgcagcattctggcgcaggaaacggagctgcgtcaccagctggagattaacgccagcctggataaagccaaccagcagcgcaaactcggccttcagattcaggagcagaaccaggagctttatcgctcaacgctgcagctgcagcaggaatatgctaacagtgtcgcccagatgaccatgagctccgatgcctatgaccagatggtagcagagcagcaggtacgggagcgttttgcaaagctccgggaagagcaggataaaacgatttccgatcacagttccgaactgtaccgaaaacaaactgaggtgctgagggatgaagagcagaagcagctggaaattgtccgtagcggtgcagagcggaaaaagcaggtagaagggtcatcgtttgacgggatgaaaaaagggctgacggactggcgatttaacgctgaaaaccagttcacccaggttcgcgacattgccataaacgcgatggatggcatgggtactgccctctggaatgttgcgtcgaagggaaagggagagttcaaatcgctggccgtatccgttatcgacgatattggcaagatgatcacgaagatgctgatgctgaacgctatcaaatccggtgcttcagcgctgggtgtgagcagctggttcggttgggctgacgggggttataccggcgacggcggcaagcatgacgtcgccggtgtggttcaccgtggcgaatgggtggttccgcaatctgtggtcaagaagcctggcatgctcagtttcctgaatcagcttacttacggcaacggctacgccgaagggggtctggtcggtggcggcgtggcaaaaccatccggagactcgtattcgcagccctctgctggccagggcaacctgcatttctctttaactattccgctgcaggtcattcagcagggcggcgggagccaggaaccttcctcaaaaagccaggagcttctgaccagcgagaccaaagcccgacttaagcagtttgttattgaaacgcttgatcgcgaactggccaacggaggcatgattgacaccaaaatgaggacggcctga

SEQ ID NO: 141740 - DNA, 357 bp, Enterobacter cloacae
atggcattgcagacgtttacctggtctccgcgtaatggccccgtgggagactttaagtaccgaaccagcagcgtacaatacggcgatggctatgaggcagtaaccggagagggcattaacccggagacgcaatcatggccattaacgttcaccggtatgaatgaggatatgaagccggtgctcaagtttttgcgcgagcatggcgaagtcaaagcattcaaatggaccaacccgttgggtgaacttggtctctaccgcgcatcacaactgaaagtcacagttcttgattttgcgcgaatgactatatcagtcactttctcaacggcatatcgggccgagccaatagtgcaaagctaa

SEQ ID NO: 141741 - DNA, 750 bp, Enterobacter cloacae
atgagcattactgctgacgatcaaaaactcgagcccggcaatcagatcaccctgttcgaagttgacggcaccgccttcggtgccgatgttctctatttccacaatcacgcagtagcgtacacggaagaagaagttctcgctgccggtgatgatgaatcgaagctaccgggtaagccgatttactggcagggcatcagatacgatctctggccatgccagattgaggatattgaagccaacggtgacggaacgcctgtgtcgccaaaattatccgttggtaatctggacggttcgatctccgcgctgtgccacctttttcaggatatgaagcaggcaaaggtcaccatccaccgaacgtatgcgcattacctcgatgccagcaacttcccggacgggaactcccaggccgatccgacagccgagcagctggaggtgttttacatcgacagcaaaactgcagataacgaaacggacgttcagttcaagctgagctcgcctgtcgacgtgaccgggcagaaggttccggctaggcaaatgaccagccgctgcgcctggtgcctgcagggccagtatcggggtgcggactgcggttacaccggcacgaagtatttcgacaagttcggcaacccggttgataaccctgcagatgatgtctgctccggaacggtcgcaggctgcaagctgcgctggggggaagatgagcagctgccgtttggcggctttccggcgattgcgatcacgaggatttaa

SEQ ID NO: 141742 - DNA, 717 bp, Enterobacter cloacae
atgctgagccagcgacttattagcgccattgaaaaacacgctgctgcagcctatccccatgaatgctgtggcctgattattcgtgccactcgccagcgccggtacatcccctgcagtaattcacacaaaaatccctctgagcacttcatgatatctgcgcaggcctgggccgatgcggaggatatgggggaggtgctggccatcgttcattcacatccggatgcggggccgcacgcttcctccgacgacctgaagtcgtgccatgactccggattgccctgggtgatcatgtcgtggccaggcggtgagtacacggtgacaacaccggcagatacaccaccgattctcaagcggccctttatacacggcagctgggattgctacgggctcatccgggactggtatcagcaggagcggggcatcgaattgcctgattttcaccgtgacgacaactggtggacgcgcggcgaaaacctttacgtaaaacactatgccgaagcgggattttattctcacgccgacgaactgcaggtaggggatgtgatcctgatgcagtacaaggcagaagaaatcaaccatgcaggcatctatctgggcgacgggaaaatgctgcaccacatgtacggcaaactgagcgaagtcgttccctacggcggcatgtggcgcgagagaacaatgttgacactgaggtaccagaatggcgatgaacacagttga

SEQ ID NO: 141743 - DNA, 603 bp, Enterobacter cloacae
atggcgatgaacacagttgagaaaatcgtgcttgtgcggctctatggcaagctcggcactttatttggacgtgagcaccgcctttccgtttcctcggtgcgggaggctatcagggcgctttgtatcatgctccccggctttgagcgctggctcgatacgagtgaaggacgcggcgtgacctacagcgtgtttaacggctcccgcaacgtgactgcagaagagctgcacctgaacggtgtgcatgaagttatcaggattgcaccggtcattatcggcagtaaaaaggcgggagtgttccagaccatcttcggcgctgtgctggtagctgttggctttgcgctgagctttacgccagcagcagtggcctcgccgttcctctacaaaatgggggcggcgatgatgcttgggggcgttgtccagatgctcacgcccagcggcactcagggcatgacgatggactccggcgattcccggaaaagctattcgtttggctccccaatcaaccagtctgcagcggggaacggcgtcaatcttctcttcggtaagcgtcttgtcgccggtgttcttatcagcggcggcatctacgcagaagaacagcaataa

SEQ ID NO: 141744 - DNA, 396 bp, Enterobacter cloacae
atgaaagaaaaaacgcatcagattaatcacccgcaagtgcagaggctcaatgagatccttgagcttaagaaattgaccaagtcagatatggctcgcatttgcggtgtaagtgctcaatcagtgaacaattggttcgtacgtggcacgattgggaaaagttcggcgataaaactggctgatgcgctaggggtcagccttgagtgggtcctcggacaagaagttaatgaaaaagatgggttgaaagcggatgaacaaagattgcttgagctctatcgtcagttacctgatgatgacgaaaagcaaaactttttgagaatcatatccctccgcctgaaagaacttgatgcaatatatgagaagtatatgaagggacgtatcagatttggcgaggattga

SEQ ID NO: 141745 - DNA, 564 bp, Enterobacter cloacae
gtggctaaaacagacgattaccttccaagccaagctgaggtagatcaagtcctgtactgcgtgaagatagtcaacttctcgggagtaaagtgggggccgaaaccaccgccagacagaccgttgatgtggctacagatgcatgttgtccccactgacacggatggtattcccatccaaggtttgttatttcttctgcaatggaagccagatcatgactcacaagcagacacttcggtaacatttcctaaaatcaatatcgtcgcactttacaataagaaacgtatcttcgccgtagatacttatccttttgataaacataaaaataactacaaaatcgatcgggatgattatcaacccagcatttcgggtccacactatcatgtgtactatgaagaggctggctactatagtgataaaatcggtttcccagttacggagaccataagccctgatgatttggccgggtattggaacttcttttgcgagaaactcaatgtagttcctgtaggaaaaatgcccatgcctttagaggatgaatctggacagttaggacttggaatatga

SEQ ID NO: 141746 - DNA, 753 bp, Enterobacter cloacae
atgatgtgctcaacggtgatctcacaacttggttttgaatgttattcaataggcgaaaccatgagaattatcagtcccttcacatattgtgatgatggggagcatgtcggcgcatttgtccgagaaataagtggtaaatttttagtaagtgatcgatgtgatgctcttatgaacatggaggccagaggaatcactgttactaaaaaacgcttagatgagattcggcgtttgctgcatcgtgagggaacggaattaaatgatcgcggtgagataattcgttgggccactgaaagtgatttaggtgctgtaacatcagatgtcatcagggctggaatattggcatcgactctttctcttgattggtaccagccagtgcaagccgaaaggtttgaaagtatagtaatagactacttataccattctttatctaaggatattatccacctacgggataacgttacgggtatgagcggtcatcaaataacagttccagtaaccctaaaaacagccgttccaaaatacatattcacttcaagcgtaaagagcggcggtagttggaatagcgcgtattcactacttggtaggctcattgatctcaaaaacgcaaacactgtgcttaataacaggtatgttatcgtggatagcgatgcaataggtgaacatatgcagcaactcaccttgcttttcaacgaaactagtcatgtactccccttctctaagcgagaatcttggatcgctaagctagcagcctaa

SEQ ID NO: 141747 - DNA, 1239 bp, Enterobacter cloacae
atggcagctttgcctacaggtgtcgaaatcagaaacaataagatttgtatctggtttatgtaccggggaaagcgttgccgcgaaattctcaaaggttggattaacactccggcgaacatcaaaaaagccgggaatcttcgggctgtgatcgttagtgagatcaaccttggagagtttgattaccaccagcgctttccttcatcgtccagagcaaaaaaaaccgtaaccactgtttcagttcaaaccttttcagaactatgtgaactgtggacgagcataaaagaaaccgaaattagcgcgaacacgatgcgtaagacgcgctcgcaactcggtacgttaatgcacatcattaacggagatacgccggtttcaactatacgccacagcgacattctgaaatacaggaaggagctgttgaacggtgagacactttacctggcaaatccaagaagcaacaaacagggacgcactgtgcgtaccgtgaacaactatatatcgctactgtgctcccttcttcggtttgcacacaaatctggctttatcagtggcaagccctttgaagggatcaagaaactacacaaaggaaaagttaaaccggatcctttaacgaagcaggagtttagtttgcttgcggaatccgagcatggtcaaagcctcaatatgtggacgttcgcagtttatactggtgtccgtcatggagagctcgcagctcttgcttgggaagatatcgactgggaaaaaggtacggctcatatacagcgcaatcttaatgccttgggcatgttcggcccaccaaaaaccgaagcaggtaaccgggttatcacccttttagagccggcacttgaagccttgaaagcacagcgcaaattgacagctctacagcctaaaaccgaaattgtctttaatcatcgcgagtatggcgcagtggaacatcaaagtctgcgattcgttttcataccccggatgcgcaagggagaacagaaagcctactactctttatcgagcataggtgcgagattcaacgcagctgtaaaacgtgcaggtattcgccgccggaatccgtaccatacgcggcatacttttgcttgctggctgttatctgccggcgctaatccgtctttcatagccagccaaatggggcatgaaaacgcgcaaatggtttatgaagtttatgcaacttggattgaagatctaaataatagtcaagttgatgaattgaataaaaagctaaggctatag

SEQ ID NO: 141748 - DNA, 204 bp, Enterobacter cloacae
atgaacctgttcgggaacttgaatgtaagtttgatgataatgggcatccttcctggcgttcatttccctctcataaaaattgccaaatcagaggtgggtgtgatttacctccacatttgcctggaattattattcttgtacatggtgttaactcgtcaggagaatggttttcaattgcttaggacaaaatttgtgaaggcctga

SEQ ID NO: 141749 - DNA, 720 bp, Enterobacter cloacae
atgggagccagttttggggtgggtctgggaggaatgagcggttctcagaaggtagaagagtcacgaaaagttgaaacagatgctcctgctcaaattatttatcgcatagataaaaatcgatacctgacgctggaaaactacatatcctgtgataggggtggacaagtatattacaatgactctcagaggggaataaaaacacacctgggatgggataacgatttttatgatttctcatatcgccggggaaataatattgcggcttatcaaggctctattattaatggggcggataatggttatctggcattccctggcgcatctaccagacaatattgtggtagtggaaggtcagaaacaggttgccctgtgtttttcttcttttcagcagatcatgggaacacatttatatataaaattgtagctatggaatacagcaccccagaacgttttagtcagcttaaagtagtagtggctaatgatggtgtttatctaagggatgagtctaaaacggaggatagctattctcgccctacaggtctcaatgaccttagctcagtgaataaattaaggttttctgacggcaatttaatcagtgtttatgatgactggcagaaaaaaattgatgagttagtgaaagaagaactgataagaaaaaaatgccctatgcaaacgagtatggacctagatttcatatattcgactatctcagaacattaa

SEQ ID NO: 141750 - DNA, 1161 bp, Enterobacter cloacae
atgatgacagaacctttaagttgggagtgctggcgcaaggtttacttgaacaagaaacacaaaaaaagagcctcgcttgaacggtgggggctgcgaaacctacattctgtagaaactcttgatcacattgtttctgaagtaaaaaaaacatacttaaacaacaatccgtacattaatgtcagcgcaaactcagtttgggttgatgggacacctcaggcaaagtttaccgtaagcaagtacgaaaatgagaacaactcttctacgagttatggcaacacgaatcaggtaagtcttaaagctaggaaagatgaagtccttaactgcgaactagcagaccttttgtttatcttcaatgaatttaacagccaaaatggttttaaaaaagtccgtgccgttttattacaaggcaagtgctcagaaaaatacaatttattgcccgatggaccttcaacagaaaaagaaaggaagctacttgaatcagttaaccgcgaagaattgctgaccttatatcctggcactaaagcatcaggtaaagaactagggatgtacaaacttggtggtgatgaaccgggactcgctgattgcgccaagtatctgatgatgccgaaacatgaagcgtggagctataaatctcctgaaaaaacagatccttacgtgatcggttggccagagaattcgtcaagtaaaagtctcggtgtaacaaagaattacttagaagcagtcatcgatgaaatgctcaaatatcaaacaatgggaagagaggttaaattcaaaaatggcaatatagacaggacatgcgaatggtcaaaaatgatagatgacttgcttacaagttatcatggcgtaactatgaagggctatgatcgtcaaaagcgtttctataagtcatctggatatattccttgtcatattaaaggccttggtttgatgatcgatgatgtcagtcttttggacctcttacaaatagattatgatgattttgcctggtattatcgcgctcgttatgattattttctaaaaaaatatggcattcaggttgcaaagtttatacaaaataagtttgggcaatatttaaatttacttatttcagagcgggggcctataatttcgacgataattataaatattgattatcatgaaggtgagtttatccgagattaa

SEQ ID NO: 141751 - DNA, 603 bp, Enterobacter cloacae
atggcgctagaattacaacttataaaacaccactcaggaatactgatcccggctacgcccgagaccagcgatatcctgcaatccaaaacccgactcggcgatgttcttgttgccgagttcaggcgggtacgaaacccggcattccaccggcgctttttcgtgcttctcaatctcggtttcgaatactgggagccgactggcggcgcgatctcctccaacgagcgcaagttggttaccggctacgctaaatttctggcctcctatggtggcaacgaaggagcactgcttgatgccgctgagcactaccttgagcaggtagcaagccgccgcgtcacgaacggtatcagcctctgtaaatccttcgatgcgtaccgcgcctgggtgactattcaggccgggcattacgacgccataaagcttccggatggcacccttcagaaacatcctcgcagcatctcattcgcgaacatggacgaaattgagttccagcagctgtacaaggccgcgcttgatgtcctctggcgctggatattatccaaagcattcagggatcagcgcgaggcggagaatgccgctgcgcaactcatgagctttgcggggtga

SEQ ID NO: 141752 - DNA, 591 bp, Enterobacter cloacae
atgtctaagaaaataacatttacatcaattatgactgccattggtacagtagcgtcagtcttagcgtgcatttacgcgattaaggggtatgaatcgagtaaaaccccgacatttcctttagatgatgcatatacaaattcaattgagatttcttctctgacaaaaaatgcaaatcgctttgaagatttcttagaagcccatgtagggcgagttgtatatctcaatgtgtattttgaccctgattctggtcaaattgatgttgatgaagaacctgagctttcgcaagaagagtatgagtcttatgacaaagatactagagaggaaatagatcagcgaaatgaggctttagatcctgaatcattgacaatctggacagaatgttatgatggatttgacaaaaagcagaggcctagtgtcgagaatcactgtactggattaactattagttttttaaaaaaccctagttcctactcgagccttgagtggtttaggggagcgtattatttaaaaggatattttcaggttgtgctccaccgtgggccgtatcaaggatttaggattgcgacactaagaggcgaaagcgccagatag

SEQ ID NO: 141753 - DNA, 462 bp, Enterobacter cloacae
atgagccgattaaccgcaatcatctgcgctgtcgttatctgcctgctggtctctatgtcttgggcgattaaacactaccgcggtaacgccattacctacaaagaccaacgcgagagagccaccgaacagctcagcttggcgaacgccactatcaaagacatgcagatccgccagcgtgatgtcgctgcgctggatgccaaatacacgaaggaattatccgatgcgaaatctcagcttgaagaactgcagcgttgcgttagcactggcaagtgtgggctgcacgtcaacgccagatgcccagcgaacggaacggccagcgccggcggcctgggcgatgctcccagcccccgacttactgactcctctgaacgggattatttcaccctcagagagcgaatcgtcacagtgacgaagcaggttggttacctgcaggactacgtaatagaacagtgtttaaagtaa

SEQ ID NO: 141754 - DNA, 423 bp, Enterobacter cloacae
atggataacaacgtcctcgcacagtttggcatctgggcaaatgtttgttcagctttcttcgctatgctaacagcaattattgcatgctgtgccctgaatcaatggaaaaaacagtacgaagaaaataaatttctaagatttatagatgcaattattgagtataacaattgtctgattcgtgctcctaagcgaatggaggatgataaagataacgttcaccgaaaagcgctctctgtggctggtaatgaaatgcagatgagatggttaatctgccttggaacaaaaagagggagaaaaaacaagaggttgatagaagcaatgaaaagcatatctatcaagcatatcgccttccttgagggaaatatcactaaacttgaattagctatgggaccaatagtcactattgcgttacattccaaataa

SEQ ID NO: 141755 - DNA, 258 bp, Enterobacter cloacae
atgagtgaagaatataccaatgaggaacaacttgaagctcttgatttgttccttcagactgaaactgaagtcgacgttgaaggagtagacctcggcaaggtttttaattgcgaaaattattcaaaatactaccagccggctcttcaagctattattgagaatggtgacctattgccagcaccttggggcggattggccattcgaggggttaaggccataaaaaaatacttcgattcggtgtgtaacttaaaaaattag

SEQ ID NO: 141756 - DNA, 288 bp, Enterobacter cloacae
gtggaaaagattgaatttaaagtaaaaaatggccgtgacattgcgttcgtagggaaagaggttgcatatgagcacgatcctgtacaggatgtagcctaccgtatttatgagactgaaaaagggaattggatatttgttgcatcctccaatgagggatatcttttacaacaacaggttttcaagaacaaatccattgaagaacttgtaaaattctttggttttacagatattgcaaaatcgatttatcaacaacttgatatcgataccactcaaaacctcgacatctaa

SEQ ID NO: 141757 - DNA, 435 bp, Enterobacter cloacae
atggcactcaccgacaagcaagatatgttgtgtcgcgagtaccgcatctatttaaacgccacgcaagcggctattcgggcggggtaccgcacaaagacagctaaccgcaccgcgtccgaagacctgtcaaaacctgacatccagtacagaattgccgaacttaaagcgcaacgcaatgatctggtttgcataaatgcgacaaatgtcctgaatcgtcttgttgagatagaccaaatggacgagctggacattctgacctctacaggagtgcttatgccggtatctcattggcctaaggtctggaggacaacgctatccgggctgaatgtcgtcgatatgtcagccgagggaacaccgctgcattgctcaagaaaattaagcggcttggtatgggaaggacttctattcgctcgggaagtggcggcacagaagtag

SEQ ID NO: 141758 - DNA, 189 bp, Enterobacter cloacae
atgcctggcgacgatgttgatcgcgagcgtgtgacaactgggtccgtaaggggtgaggtagtgtacacggcttgcgactgggttaaacccatctacggaacggatcacgactgggatgtgctggaccgccagacgaaaaaagacatcctggcgcataacaaagcgtgggcaaaaaattgtaaagactaa

SEQ ID NO: 141759 - DNA, 477 bp, Enterobacter cloacae
atggacgcagatctaatcgcgtacgaggctatgctcgcagcacgcgaatcagctaattgggtatatttggggttatggatatctttatcggcggctgtagctacattcttggcaactgccgcaggggtcgttgtagtgtttggttggcgtaaccaagaggcttttagggataaaaaagcattcgtaatttcagtgcttaaactacagcaaactatagggcttgggcctaacaaatatcagctaacttctgagcccattcctgagacacatcctttttcgaaactaacttttacgttgcatcaggtttatgagaacgtcgtaacaatgacgaaaaaaaaggatcgcgccaaagctaaacaaatctatcttcagcttagtgaggtctatgagtcattaagtaaaggtgaagtggatagagaaagtgcattaagggtgcttttcgaaataaaagccgacccattttttgaaaacttctga

SEQ ID NO: 141760 - DNA, 189 bp, Enterobacter cloacae
atggaacacaatccacttgctgggctggtatttattatttggctaattacctttttcccttgctttcgcatggcacagaaagccggttttggctgggctatggctatcttcctgtcgatgccgggtctgcatttcataatgctgtgggtgtttgcgttaatgaagtggcctaatcttcccaataagtaa

SEQ ID NO: 141761 - DNA, 3006 bp, Enterobacter cloacae; identical to SEQ ID NO: 10984

SEQ ID NO: 141762 - DNA, 144 bp, Enterobacter cloacae
atgaaacaggcgggcctgatatcaggcccgccttcacaggggaaagaggatgacgggtatgaaggtaaaggcgcgttattgcggcgcatccgtcctgataccggtggccagcaggctggcgccaagaatgtagacggggtctga

SEQ ID NO: 141763 - DNA, 885 bp, Enterobacter cloacae
atgaaattttatactccattaagataccccggcgggaaaggtaaattatcttactttctgaaagatgtcattgaacaaaattctttgaatgatggcgcttacgctgaaccctatgctggcggtgcaggagtggctttagaattgctattggaagagtatgttcgtaaaatctacatcaacgatgcagacttggctgtctattctttttggtcatcagtggttgatgatacagataatctttgcagacttattaatgacgcaaaaataaatatggatgagtggcgccatcatcgttatgtgattgcaaatccttctgaatttactaagcttgaaattggttttgctgctttctttttaaatagaactaatcggtctggcattctaaaagctggagttattggtggcaaagagcagaatggcaagtggaagatggatgtgcgttttaacaggaatgatttgatatcaagaattgaggaaatagcgaattacaatgagaggatagttgttacaaatcttgatgcattagattttcttgatgcattaaatttcatggatagtataggcaaagctgataaaaataaaactctcctatacttggatcctccttattatattaaaggtcaagggctgtataggaatttctatgagcacaatgatcatgttcttgtgatggagaaacttaggggaatagatttccctaaatggcttgtgtcttacgataacgcaaaagaaattaaagacatctacaccgaatttactcaagttgaatattcgttgcaatataccgcacaacaaaagaaatctggggaggaagtaatgattttctcttcgggaattgttattcctgatactcttaaaggtgtatcattgccaatctctgcgtga

SEQ ID NO: 141764 - DNA, 1494 bp, Enterobacter cloacae
atgaatcaaataaaatcaatgaatatcaataagctattgttagatgttgataaccctcgtttccctacatcagcagaaaatcagcgtgatgccatagcgaaaatgcttgagctacagtatgaccgtatttatcgcttggccagggatattgttgcaaagggcttggacccatcagaaaacatcttagtttatcccagcgaagaggaagagggatttttcattgttgccgagggtaatcggcgtgttaccgctttaaaacttttattatctccgaagttagcgtcgagtgaaaaagctagaaaagcttttgaaaaattgaaaatcacacaagctaaagacattaaaatcattgataattgcgtgctctttgacgatgatgattatgaacattgggtcaatctcaaacatacaggtcaaaatggtggtgtcggtagggttgagtggactgcaccagaaaaagccaggcatatggctcgcatgggtaagcaatcttttggtaaccaagtgcttactttcctagacttaaatcctgattactacaaagatataatcgataaaaagaaattactgaaaatcacgaacattactcgtctttttggggatttaaaagtacgagactattttaatcttaaaagcatcaatggtgttttatattcatttcaaccttatgaccgatttaaagatcagcttaaaaaaatcttgagtgttatggtcgaagaggacgaaaaaggtaaagcttgttttactgttaatagaattcgtagtcaggatgatagagtcaccttcatcattgaacaaaaaattaaagcatctgaaaaactactcaaaaaaccatggagtttgctcgatccaaatccggcgacttctgaagacgatgataatatagatttagaggaggatgaacctccgaagaaaaaaggtggtggcttttcaggtggtagttccttcggtggggaagaaggtaaagatgagggttattctaaagataaggatgacccagattctgaacctaaacaggaaccgaaacctaaaacaaagggcaagaatccacctaagatggatcgcaataatttgatcccatcatatgtaaaactgaattttagaggccacaaaaaatgttcccgcatatacaatgagcttaaaactcatttgacctttgactcgaccccaaatgcaatatcaattttgttacgcatatttattgatctttctgttagcgctttcattgaagatcataaattagaatctaaggattcaaatagaaatccgggtcttcatgacaaagtgataatgtgtgcccattttcttcgtgataataaaataatgacagggagtcaatgtactgccgtaataacttactcaagtcaaataactaaacacaatggttctttgcaacaatatgtccataatccgcacttgatcctctcaaaagaggctgtaaatacagagtgggataactttgagttgttactcagtcatatctggagtgactga

SEQ ID NO: 141765 - DNA, 1218 bp, Enterobacter cloacae
gtgaagtccgcgccgcgctggccgctgcatccggcacccaaggaaggcgaagccctgtcctcatggctcaaccgggtcgccgcctgctaccagatggacgtgcacgagctgctggcccacgatcttggtcacagccaacttgatgacctggataccgcaccatccttgtcgttgctgacggcgctctgccagcgcagtggcgtcgagctggagcggttgcgcagcatgagtcttgcaggctgggtgccgtggctgctcgacagtctcgacgattcggtaccagcagccttggaaacctatacattccaatgcgcggtgctcctgcccaagcgcacccgcaaggtgcggtccatcactcgctggcgtgcctggctaccgagccagacgattcgccgggcgtgtccgcagtgtctgaacgatccaacgaatcaagctgtgctactcgtctggcagctccccttgatgctgagctgcccgcagcatggctgctggctggagtcctactggggcatgcccggccggtatcttcagtgggaaatcgccgatgctgcgccgcgccctgccgatgacgcaatcgcctgcatggaccggcgcacctggcaggcgctgacgacgggttttgtggagctgccgcgtcggcgtgtccacgccggcttgtggttccggctgctgcgcaccctgcttgatgagctgaacacgccgctctcgcactgcggcagttgctcggcgagcatccgccatgtctgggagcgctgcggccatccgctgcgcgccgggcagagtctgtggcgtccctacgagattctggccccggcggtgcagtggcagatgctggaggcggcggccaccgccatcacgctgatcgagtcaaaggcgctgatcccgcgcggggaacaggccgcgctgtttcagacggagccgtacactggtttcaccaacggcctgccggcgaaggtgccgaagccggaacccatcaaccactggcaacgagcagcccaggccatcgatgaggccatcattgaagcgcgacacaacccggagacggcccgcttgctgttcacactggcgtcctacgggcgacgcgaccccgaatccctggaacgtttgcgcgccacgttcaccaaggagggcatcccgccggagtttttgtcacattacgagcctgaatggccgtttgcaggtcttagactaaatgacgggttaagtgacagtttttga

SEQ ID NO: 141766 - DNA, 267 bp, Enterobacter cloacae; identical to SEQ ID NO: 121816

SEQ ID NO: 141767 - DNA, 507 bp, Enterobacter cloacae
atgacgacgctgattattgagcaaaacaaagagccgcaggatgtgccgggcgtggtgataccgccgccgggcgtgagcgagccggtaatcaaaaataccccgttttttcctgatgttgacccgatgcgcgtgcgtgaggaaatgcgtttagagcagaccgtttcccctgtgcgcctgcgccgggcaattaagaccgccatcgcagagacgaacgcggagctgggcgaatggcgcgagcgtcagctcgatgccggttacgccacgctggctgatgtcccgaccgacaggcttgatggcgaaagcgtgcgcgttttccactacttcaacgccgtgtgtgcaatgacgaccgccacgctttacgagcgttttcgcggcgtggatgcgaccgccggaggtgacaaaaaagccgacagcatcgacagcactatcgatgaaatgtggcgggatatgcgctggtctgtggcgcgcatccaggacaaagcgcgctgcattgtggggcaaatctga

SEQ ID NO: 141768 - DNA, 435 bp, Enterobacter cloacae; identical to SEQ ID NO: 25497

SEQ ID NO: 141769 - DNA, 1110 bp, Enterobacter cloacae; identical to SEQ ID NO: 95539

SEQ ID NO: 141770 - DNA, 1185 bp, Enterobacter cloacae; identical to SEQ ID NO: 16006

SEQ ID NO: 141771 - DNA, 609 bp, Enterobacter cloacae
atggcacggctgaacagagaatcggttattgatgcggcactggaactgctgaatgagacagggattgacgggctgacgacccgcaagctggcgcagaagctgggaatagaacagccgacactttactggcatgtgaaaaataaacgggcgttactggatgcgctggcggtggagatcctggcgcgtcatcatgattattcactgcctgcggcgggggaatcctggcagtcatttctgcgcaataatgcaatgagtttccgccgggcgctgctgcgttaccgtgacggggcaaaagtgcacctcggcacccgccctgatgaaaaacagtatgatacggtggaaacccagttacgctttatgacagaaaacggcttttcactgcgcgacgggttatatgcgatttcagcggtcagtcattttacccttggtgccgtactggagcagcaggagcatactgccgccctgaccgaccgccctgcagcaccggacgaaaacctgccgccgctattgcgggaagcgctgcagattatggacagtgatgatggtgagcaggcctttctgcatggcctggagagcctgatccgggggtttgggcactgttgcaaatag

SEQ ID NO: 141772 - DNA, 1944 bp, Enterobacter cloacae
atgaataatgttaagttatcaccaacccgtaaggttaatgttcatgttacagacaatggcacacccattgctcattctacgacttcccacaaaaatataaaagttaatgctgaagttcagccgccattgcagttgccaggtttaatcatatttgttcatggggttaattctgaaggtgaatggtatacaaatgcggaacaggctttatgtgatggattaaataaacgtctcggtttaaaaaaagctagtggccatagtctcgaagcaaatgaatatgcaaaagcagaatggagcaatgaaaaaataagagaatggattattcctcctcgaaaaattatcaaagagaaattctctccggtgatccgcttctactggggctatcgtgccgctgataatgaaactgataaatacgctattccactgaaaaataaacagggtgataactattacgacctgacgcctgaacaacgaaaaagcaaaggccccttttactggggaggtggtccgttccagaatggttgcaatcaactggtcagtttatggagtgacaaaggtttcgacaactggccttccgcactgggagtgcccattccatttagtacacaattacttaatggagaacgagaccggttattaacacctgctccaccacgccattattatgcccacgcagccggtcgtctggcaaagctcatcaaaaccattcgagataaacatcctgaagatacagtgacagtgctgtcacacagccagggaaccatggttgccctggccgctgctgcaattgaagccccggacgcgctgtttgtgatgaattcgccttatgcgctggataatgaaatgacgacctatatttcatatcccatgaatgaaattatcagtaaagaagccagagaagcaacatttgccgatattgtaaaaaaagtggctgaaaacaaaacacgcttaaaaaagcaagggtgcgaaaaattacttgcaggagccagcagtgatggcgaaagctggtcaccgaccaggaaaacgcacggtggcatgccagaacgcgataaccacggcaccacctggatttactgtaaccctcacgaccgggtaatgggctcagcccctttacgcagtattggctggcagggtttacctaatacggaagacagtcgttttactgaacctcatccattatttaaagccgcgggggagacattatatgttcgtatgcttgggcggaatactccctgtggggatgaacctaacctgcaaacgaactttagcgatctgggcgatggtcatccattctgggacagtacgacctcaataatggaaaaaatgacctggccagaaccgataaaagggcaaaaactggcgattaatgcccccctggtgcccgagccgatgacggcgaaagaactggaaagttttgaccaggattatcgcagcaaagaaaaacaaacaggaaaaattgggtatggttacgggcaaatagatcccgacaagaatatccccgtcgatgttgactatcgctattacatatcgctctacggctattttgagcagaaaatgaagctcaaagcaccctcacgaattcaattgccggggcccggttcaaaagaggatcgtaacagatatgaaaaacaatctagagctgaaatgctcgaagatgttcgtgcctatgtccagcgaccaacagatcacagcacattgccaatggatgaacggtttatgagcagggtagttgcctatgatttaccagttggttattgctggcactcctgggacagagaaagtctggctgaattacgttatcaggctgactggctggaaagcgatgactattactggacaggtaaactgaagatcccagctatgcctgcaattataagaagagacgtggcaagcgatgccgcagaaaagaaatgcgatgaaatggaacggctcaaactcaaaaaataa

SEQ ID NO: 141773 - DNA, 771 bp, Enterobacter cloacae
atgatgaatctgattatgcggatgtgctttatatatagtgtgtttgtcctgagtggttgtgtagctggcccttatggtggtggtgttgcctttgtgaatcctttttctgcaatgaatgatacgcagacagagccgaaaaagaaaaaacagcaacctgaggtatatggtacaccgcagataatttatcgaattgataaagagcgttactttacgcttgaagagtacactcgctgcgaaaatgggaaaacattttataacaatacaaagaaaggaattcatacccagatcgccccctcttcaggttatttatttaaagggcgactgttctggttgtcaaaccgggatgattatttagcctttccaatcacagcaaatgataataaggcggcttgtaagggatctgataaaggctgcctgaatgttatttcggtgacaacagatggtgggaaaacagtgcactcagtgacttacggatcaaatacgcaagatcctaatggtgatacaaaagactatgacatgctggtgacggatgatgggttttatttgattgagttttctggtgatgaaagggttgcggaagatgggactacatggagatgggtatttgatccagatgaggagtccacaaaattgaatggttatccaggtgtgactgggccaaaatatcaagaaaaattaccaatggatgatatctcgaatgtaaaacaaataaaaatgcaatgtgatcgaaatctggaaccaatacaattttcagagagtgaagtcaaatga

SEQ ID NO: 141774 - DNA, 1197 bp, Enterobacter cloacae
atgtttgactcaatcgttttgaaccgttcaattgatggtcctgccattaccattggtgaaatagcagaagcattgcttttctatcaaaatattcatattgtaatggacacatcaaatttattaggactcattcagtcaattggtccccataacattatcagattactttcccatcccgatgtaaaaacaacctacattgaggaaattctcggggttatgagtgatgagactaactttggaattgaatacactcttgcgagtggttatttttcaggaaaccaagagcacggagagattaaaagctggaaaaaacgtcttgaattcatgctaacaaggcagggattgaataaaactcaagccgagaatttcaccgaaagatttagacaatgcgtcacattaaaaagacttactggagaccactttattaatggtggagtgatatctgctgcaaaagaagatttcaatgatcctgaatacgtctcaagtgctgcgcgtattatcctgagaaacctacttccaaaagaaaaatctgaggatgaattctacttcaggatccatccatctcatggaacatttcgcgtttctaccaatattgattttcctgaaattaataggtatcaaaataatgtacttgctaacaatgatgaaactacgccagcgagtatagcttcaagcatacttaactcatcctatggcctcatactggcagctcactatggtggcgactttcacacatcaacaaccgaatccaagataatccagcagaaaaacaaacaaattctaactcgtgctaatgccaaccgtaatgaactaagtaatttttatgaaatagcactcacagggtgtcccgacatagcaacagttataaataaaggggaaagatcttttgaggagttcttagaacttttaacacgtgccaaaaaattcaaaaaatggctaaaaggaaaatcccccgacgagaaacttttatctcaataccttgaggatattacaacctccagttggtttggtagtggttcaggcaaagccttgagatacttagcaagtaatggcctagggcttatagatcctatcacaggtctcctcacatcagccctcgattcttttatactcgataaattaactgctggctggaggcctaatcaatttatcatcaaagaaataaaacctttcgttgatatacatgataattgttga

SEQ ID NO: 141775 - DNA, 447 bp, Enterobacter cloacae
atgagtgactttaaaccctttgataacaagctagccgggctgcttgctgccctgtcacccgcagggcgccggaagcttgccggtgagattgcgaagcaactcagaacggcgcaacagcaacgtattaaacagcaaaaagccccggatggctcaccgtatcaggcgcgaaagcgccagccactgagagccaaacaaggtcgaattaaacgggtgatgtttcaaaaactgcgcactaaccggtacatgaaagccagtggccgtgaaaacggtgctgtggttgaatttaccgggaaagtgcagcgtatcgcgcgtgtccatcagttcggcctcaaagaccggccaaacgcgcacgctcaggatgttcagtatgcagagcgccagttactcggattcagcctggaagacaaaaaattgattacaaatgctataatagagcatttggtttga

SEQ ID NO: 141776 - DNA, 468 bp, Enterobacter cloacae
atgaagaaagcaatcagcctgcgaaaagcactaactgacgccgtcccgcagcttaaaaccaatcccgagatgatgcgcatttttgccgacgaggggaatatcgatgcacggctcgcggcctccctgtcccacgagaaaatttacaccctgaatgtcatcgtgtgtgattttgtgggcgaccctgatttaattttcgtgccggtggccgcgtggctcagggaaaaccagccggatatctgcacgctcgatgaggggcataaaaagggctaccgcttccagatggatttaaacgacgaggatacggttgatatcagtatcagcctccagctcaccgagcgcaccatcatcagggaggagaacggcgcgctgcatgtgagttatgccccggagccgccaccgcctgaacccgtcacgcgtccaaaagagctctatatcaacggcgaactggtgagcaagtgggatgagtga

SEQ ID NO: 141777 - DNA, 159 bp, Enterobacter cloacae
atgccgggaagcgacccggccactaatggcgacctgagtgcagatatccgcaggcttgagcacgcgctcgccgcctgcgcgttacagattgaaaccgtcaaagcctgtcaggataaactcgatgaagaaagcaatcagcctgcgaaaagcactaactga

SEQ ID NO: 141778 - DNA, 426 bp, Enterobacter cloacae
atgaaaatgatgttgtttttactggccgcactgattgctgttgtgctctggcagcgccatgaaaatggcaacctgacgcgctcctttgaccgggcgaataagatcgcgaccgaacagaaaaacgtgatcggaatgctgaaaaatcagctttccgtttcgcagggaattgccaggcgaaatgaaaccgcgcaggtcagcttacgtggtgagctgattgctgccggtgcgatggtcgtgcgccgggaagaaaccattacgagactaatgaatgaaaatgaaacgttacgccgctggtacagcgctgagttgcctgatgttgtgcgcaggatgcacacccgcgccggttgtgcttccgccggtcattgtttacagcgcctgcccgaaagtgagctattgcccgatgccgggaagcgacccggccactaa

SEQ ID NO: 141779 - DNA, 918 bp, Enterobacter cloacae
ttggaaaagatccaggcgactgcggttaaatatatcaagctgggagagggaggcgaatgggaacatgagtgcctgacatctggcattattaagtttgggtaccacaaaacgccccatcagatgtgccttgagggaaagtgggaggatgtgaataaagtctggttagaagaaaggaaaaataaccagtccactgccaccagtgatgtcagacagataaggacgttttacaccgccacccccgatatactcttcattacgttcagccaggggttattgcattggtgccagccttccggagaggtcaccgaactggatgatggcagtaggacccgccccacggtgagcggatggcacagccatagtctggccgggcaccttctatcccacagcgtcctgagcggtgctttactcgctacacagaattaccgggggaccatctgcgatgtgcgtttggccgattacgccctgcgaaaaatcaatgatgagcaatcgccggaaatcatcagcgctgatattgctaaagctcagtacctgaaggctattaccaggctgtgtagtttgcttacctggcaggactttgagttgctcgtagatctgattttctccgccagcggatggagaagaaccgggagccttggcaggacacagaagactgtcgatattgagcttgaactgcccaccaccggagaacgggcatatgtgcaagtgaagtctgttgctgagcagtctgtattctctgactatctgtcacggtttcagaccagtgacagctatgatcggatgttctttgtctggcatcaagggacattgagtgaggatctccgtgctgaaggcgtcactatgattgggcccacgaggcttgcagaactcatactggacaccgggctggcacgatggcttagaaataaggtttcgtaa

SEQ ID NO: 141780 - DNA, 228 bp, Enterobacter cloacae
atgaaaatggtggaatgtttgggaaataaaaaagcaccttcgggtgtaatgccattttttctttgctcgtgtgccattcccaaatcagaaatggatgacagtcaatataattttgtggagggcatggcgggcggcattgacgtttttttaaataacgaccttatggattacaagatagctgggacaggaaaaagttttatcggaaaatacttggacgtgtggaactaa

SEQ ID NO: 141781 - DNA, 597 bp, Enterobacter cloacae
atggataaaaatgagccatcaatatggcctccgtaccaagtcttctatatccaatcgatgttgttcaatacaacatcggctctacaggccgtggatagagcatctaagtacatccaagctatcagtgaagggaagctagggccacaagatcggaaagatgagcttctagactgtctacaaaacttcatcaatcatagtgctgctatagctcggtacttctttccatcaatgattggtggaaaaggtgagaaggttttacataagaaccgtgctgagtttctgaggcaaatttttgatgtgacagaaagcagccctttgcatgataagaaacttagaaatgcaatagagcactttgatgaacgactggatatgtatcttgaaggtggaattgtaggaaatatcttcccaagtctaatcttgaacaagccagaagaaacagatgtgccgcatcacatcttcagagcctactatctaaatgatggaatttatcaagtattgggggaaagacataatgttcaacctattcttgatgaagtcatgagagttcatgaactgttggagatatttgatgaaaatggtggaatgtttgggaaataa

SEQ ID NO: 141782 - DNA, 246 bp, Enterobacter cloacae
atgataaatccggtaaatctgcgtaatcccggcgtgcttgtaaacttcaagcgacccggcaagcgcttccgggtaattcctcccggattgcgcataagcagtcatcggctggaaatacaatccagccgtggtgtaggcgttcaaatccatagcgttgccaatcgccacggcctgcccgttgaaaatatcctgcacgctgatatcaaaatcatcagtcagcgtatgaccattaatcctgcgccctga

SEQ ID NO: 141783 - DNA, 909 bp, Enterobacter cloacae
atggcaattgttgaccttaaccagctcgccgcgcctgatgtcgtggaagtactggactatgagaccatcctcgcagagcgaaaggcgacgctcgtctcgttatacccggaggaacaacaggaggcagtggcgcgcacgctgacgctcgaatcagagccgattgttaagctgctggaggaaaacgcctatcgggaggttatctggcggcagcgcgtcaacgaggccgcgcgtgcggtcatgctggcgtatgcagaagatgccgaccttgaccagataggcggaaattataacgtcgagcgcctcgtcatcaccccggcagacgacacgacgtttccgcccacgccagccgtaatggaatcgaataccgactaccgtctgcgcatccaacaggcttttgaggggctgagtaccgcaggctcaaccggtgcatatcagtttcatggccgcagcgccgacgggcgtgtggcggacatttccgtcatcagtcctgagcctgcgtgtgtgaccgtgtccgtgctgtcgcgtgaaaataacggcgtggcctctgacgagctgctcgccatcgtgcgcgatgcgctgaacgacgaggacgtcaggccggtggccgaccgcgtgaccgtgcagtcagcgaaaatcgtcgactacaaaatcaccgcatcgctttacctttatcccggccccgaaagtgagccggtactcagtgcggcaaaagcaaagttacaggcgtatatcaccgcgcagcaccggctcgggcgtgacatccgtaaatcggccatctatgcggcgctccacgtcgagggcgtgcagcgtgtcgagctggccgcgccggtggctgacatcgttctcgatgacacgcaggcgtcatggtgcagcgagtacagcgtcaccataggaggtaatgatgaatga

SEQ ID NO: 141784 - DNA, 465 bp, Enterobacter cloacae
atgttaatggtactgggtttatttgtatttgagcgccgcacgctgccgcatcagtccatgcaatattcaaaggactaccgctgggcgtcaaatgaccgcatcggtttgccaccggcatatcagtatctcggggagggggaaacctcgcgcacgctctcgggcgtgctgtatcccgaaataaccggcggacgcctgtcactgacggccatcgagctgatggccgacgagggcagggcgtggccgctgattgacggaacgggcatgatccacggtatgtatgtcatcgataaagtgacccacacgcacaccgaattattcagcgacggcgcggccagaaaaatcgagtttagtctctcgctgaaacgggtcgatgactcgcttgcggcgatttacggcgacctgaaaacgcaggctgacaatctggtgacgtctgccggtaactggctgggagggctggcgggatga

SEQ ID NO: 141785 - DNA, 567 bp, Enterobacter cloacae
  misc_feature (231)..(240): n is a, c, g, or t
atgttaaaaacttcaattttacctctggcagtaattttttccgttgtaatgcttaccggttgtaataaggagccaattccagattttgaatgttcttataaacaatccggcacaggtgtaactgacacgcataagtttaaaagccgtaaactgtctgatgatgagaaatacttcatctacgaatcagatgaccaaggatataaaattaaacttgaagtagatcgtcgaacnnnnnnnnnntctgcatattctgtgaatattgaagaactcactaacttcggtaatcaaatgcgtgatcgattttcttcaccgcatgaaatacaaaaagctaataacgcaccaacttgtttcgctatcgtgactaatgaaaaaacaggtaaaataactcgtaccaagttggaattggttggcgagcattcacaaaaaggaacacagcatacctatcatgaagaagataatactggtagcactacagtctggttcgatagtcgtactggcaaagggcagatatcaataatggacagtcaggaagttattgctagtggaacggtgagtaattgtaagtaa

SEQ ID NO: 141786 - DNA, 333 bp, Enterobacter cloacae
atggacacttttttcatcatccagtggtataggctccgggccatcaacatatttttcccatcccaacgctttcccatcatacagaaccttaatttcaccgttaaagctttcgcataccgtgacaaccgaatgccgaagtcgatatccccggccttcactgcgaatctgaaacgcactgcttttgtactggaaagtgagatttttggagagaacgcgcttcgcctggaggctgaagatataacccagttcctcttcagaatggtgtacatcaagatgggcgttatcagcaatacgaggcggcgtagcaaactgttaccaacggtgcaaaactga

SEQ ID NO: 141787 - DNA, 492 bp, Enterobacter cloacae
atgtccacggcgcttcgccacactcccggtatgaaaaaagagaacggttttacgcttatcgaaacgctggtcgccatttcgctggtcgttatcctcagcgcctcaggactgtccggctgggacagctggcaacggcagcagcgactgtggcaaaccgcctgtcaggtgcgagattacctgctgtttctgcgcaaccatgccaaccggcacaaccgcgaccaccaaattacccttctgcgggaggggggaagagactgtctggtgagttctgctgtgcaaggctgtgagaaaggcagcccctttgtgctgatcccactctggcctgacgtcgtggtcagtgagttaacgccgtctctcgggttctatggattaagggatacggcgtgggcagggcggatacgcgttcaaagccgggcaggagaatggctggttattgtctcaaacggagggcgcatcaggatgtgtaaggtctcagagggaggtttatgttga

SEQ ID NO: 141788 - DNA, 477 bp, Enterobacter cloacae
atgacgattttgcctctttacgccgcgcctcagtatgcggagctggtgacagactggatctggcaggcctttggcgaggggcttccccgtgaatttttccacagcatcgttgagcacagccagacgccgggagcattacctttgacctttattgccgttgaaggcgaacgacttctcggcacggtggggctctggcgctgcgatttgatcacccgacaggatctctgcccgtggctggcggcgctgttcgttgacgacgcggcgcgtggaaaagggctggcggggcagcttcagcagtatgttatgacctatgccgcgcaggccgggtacgaggagctccatctgtggtctgcctgccgcgacttctatgaacgttacggctggcagtacgttggcgatgcgctcgaatacccgaacaagacggtacacctttaccgctattcgctctgcgcttctgcaggggatgcaacggagtga

SEQ ID NO: 141789 - DNA, 1131 bp, Enterobacter cloacae
atgcatatgtctgaaatggatatcaaaaaaagcacagatcttgattttccccgttatgccaccccggttgtacacgctaaagagatagatcttttgggactggttcaggtgctattggctgcgaaaaagcgcatcgttgccgttacccttgcgttcaccctggtagggcttgccgtttcatttttgctgccgcagaaatggaccagtaaagccgtgatcacgcaggcagaagagctgcagtggaacccattgcgccagatgctggttgcgttacaggtgcttgacgtggatgcgaaaatttcccgcccggaagtctttgacctgtttatcaaaaagtttcagtctcagtcattgctcgaagagtacatgaaaacctctccttacgtgacgtcgcagctggaaggcgccgaggtggacccgcttgagctgcatcgggcgatagtcaacatctcagaaagaatgaaagcggtgaacgacactcaggcaaaagatgcggataaaatgccgtatgtctcctggacattaagcttcaccgcgccgaccgcgggcgatgcccaatccgtcctgcagggatatatcaattatatcgcagcgattgtcgagaaagagacggtgcagaatatccgcagccagatcgctctgaaaacgaaagccgttgagcagcagctggagctggatcgcgtccgcctgaccaatattcacaataccaacctgcagcgactgaattattcgctgtcagtggcgaatgctgcaggtatcaagaagccggtttacagcaacggccaggcggtgaaggatgatcctgattactctgttgcgctcggcgctgacgggattgcgcaaaaactgcagattgaaaaaaatctgaaggatgtgaccgagctgaatgcggatttccagaaccgggaatactatctggcacagctgaaaaaactctcctttgccgatgtccagcttgagccattcaggtaccagctttctccttctatgccggtgaaaaaagatggcccgggtaaagccctgattgtccttctgtcggcgatcctgggcgggctgtttgcctgcggtagcgttttactgcgcgaagcgatgctcacccgtaatccgctgccggagccggtgacggaataa

SEQ ID NO: 141790 - DNA, 831 bp, Enterobacter cloacae
atgttctggataattaacgacaggataaagttccatccagaaaaaaacacgttagcctcagtaagcaaacccgagctgagcgtaatcattaccgccccggccagccgttgcttaacactattactggaatcctggcccaacgtcgttacgcaaaaagaattattcacctttgtatgggctgaagacggcatgctcgttccgacaaatacgctttatcagaacatatctatcattcgtcgcggacttcgcaccgtagcagaagccgacgaaacgctcgtgtccacggtgccgcgcaagggtttccagattgacagcagcgttaaggtgaccagagtcgctaccgaagaagagacgccggaacagcagtttgttgacccgtcaccggttgaagcattaatacctgagcctgaaatgacggcgaatacattacctgcatccgtagcaaagacaggcacagtaaacaggaaatgggtgcaatactcgcgcattgcccttctgctattgctttcctttggcctcggtttatccatgttccatctgccgtggacgccacattcagaaagggatttttttaacgactataccatcataagaaatgagaatgagtgccattttgtctctcaaaatgatgacatcaaaaaaacgggcggttttaccaaagccaaaaacacgatcctgcagaccggtctggattgtaaaaaatatccgtggatttacttcctctcgtccagtactgctcctgcactttcagcattaatttgcagagaaccttttgaaacctcagaaaactcacggtgcgtcacgctctattttcggtggaaaaatcagtga

SEQ ID NO: 141791 - DNA, 483 bp, Enterobacter cloacae
gtgactaaaaaaacgattgccctcgcctgcctgctgctttttgtctcaggcttattcatctcatggctattgcatctgcgggcagaaaagaggcaaaactctgagatctgttcagcgtccattgttgtctatcacaaaaatgttcgagccaacgtgacgcttgatttcatttacactcttaaaacgcaaaccggcgtggtatcaataaacgggacttatgctcagaatgatacggttctggggggtatccgccgggacgtgtcctatacctggactgaaaacaaagacgcccttcatttttactcggtaaaagtgaataaaatatttaacgatgactccgtctctgatgagaatctgagtgaagtgcttccagatttttatgtatacccagagaaaagtatcacctataccgtcctgccgcagggggagaacagcttcctgtttactgtaggaaagcgtcccgtatttctctgctaccgctga

SEQ ID NO: 141792 - DNA, 267 bp, Enterobacter cloacae
atgaaaaaagttattgctctggtaacggtgtttaccaatagggatattgaacaggctatggacgttacggcctttaaacagacgtgctgtccaatcgccaggacgctgacccagatagatacctatggcgttctcggtcgggacctctccccgggctggcgacgagcaatggttgatttcccggtgccgggcagaccgccaaagatcagtaacatagttatcccattgtggaatgctgagactgctgatttattctgggaaaattga

SEQ ID NO: 141793 - DNA, 888 bp, Enterobacter cloacae
atggatgaattaaataaaataactaaaaaataccaacccgattatatagagagccatttttgcactctcggtgatttacatattttctcgttgcaattttttagagatgtggcggatatttatgatttactctcacgggctcataacatagagcgtaaccctactggtttttcacttaatgatgctcctgtgctcggtctccttgttaaaataacaaagcttttaaaagaatgtatcacttattatgaaaaagataatgctgaaattatctcaatattagaaaggccattgattgaagcaacaactgtagcaagttacttgatgcttaatggcgatgatgcaatagaagactaccgaaaatgttcttacaaagaccgtcttagaattcttcgggacttagaaagtggttcgcctttttatgagacaaaggcaggaaaaagattactcttttctgtgaaagaaaaaatggaatttgaacggttaacaaaaaatgatttttatgagcagaagaaaaataaatggcgacttggtgggaaaagttttcgtgatatattttctgaaatcgaacacgatgcactctacccagctacatatggcatgatgtcagagtcaatacatggttcttggaatgaatctatggactgggatttggttagaaacgaagacgatacattttcagcttttactgactaccatcctgcagacatccggtttctaacgccaacaatcaattttaccattaaaccgtttaggttgtggttacaacgaatagacatatatgaaaatgaatttgaagggacaatggactggattgaacgcgtgaatacccgcttatttcaaacgtttgatggactatatgatggcgagtacgattctaagaaaacttga

SEQ ID NO: 141794 - DNA, 1248 bp, Enterobacter cloacae
ttgagtatcgaaattattaaggaaatgtgtgacgaacatcgtataaagtattcaatggatgatacctcgtccagggggtttaatattcatctccctaaaggtagggattttagccaggtgaatatcaatgaagatatttccgtaatgcttttaaaggatgtccctgatttttataaatataaatttgtcgaagggtacgaggctttatggagtccacaaaatggaacactcgagtgcgaaatagagtctgccaataacaaacttctgctacatcgtatttttaggcaaggggcgttcttagatggtgggttcacatttacggtgccatcccatgaggaaggtgttaatatcgaaatatcaagggcaagtaattccttttcattgttgacatttcttagagttcctttttatagaacatttagggctctcgaaagtataaaggatgccactataacaattaaaatatcaggactggatatatctagacatgagcaggctttagaattagtagagaaagtctgtgctgcaatctgctttcaaattgattgcaaaacagaacagcctgtaatgttaggttttgagagaaaagccaggtctttacggaaacgaagcaagccattagaagaactagattctattaaatatacatatgataaagaagctctttcattatattggtatgcgcaaagtgcttttggaatgcctcttctgaaataccttgcactttatcaagtggttgagttttattatcccgtttattcagaagtagctgcacaaaagaaaataagaaatttactaaaggatcctaagtttaatgcaaataaagataaggatttggcaaaagtaatgaatataataaagtacaatgcatcatctggatcttttggtaatgagttatcacaactaaaagctaccatctttgaatgtgtagacatagatagccttagagcgtggcttaatgaaagccaggagcgatttgaacactttcgctcgaagaatgcgaaaaaattatcagagtatataattaatgtcgatgttggagacgatgctttgctagagcaagtggttcagcgtttttataacatccgatgtaggatagttcatacaaaaggattggacggtaacctggatgtattacatcctcaggcaaaggaaatttcttttattgactatgacatcgaactggcaaattttatttcgcataaagtaatgattgcctcaagtcatccttttatttcaaaaatataa

SEQ ID NO: 141795 - DNA, 618 bp, Enterobacter cloacae
atgacgatcaaaaatgcccgtgccgggcagggttttgctcaccctgaaaacagcagcgatgatatttcggtcattaaatttgaggatgcaaaagtacgaattgttaagatcctgggcgagccatggtttgtagcagcagatgtatgcgcagctctggaaataaccgatcacaaggttgctttgcgacgtctggatgacgatgaaaagggggagtgtttaatacccacccctggcggaaagcagactatgcgaactgtatgcgagtcaggattctacaaactgatctcacgtagtcgtaaggcaactactcccggcacctttgcgcaccatttcagtaattgggtattccgtgaggtcattccctcaattcgtaaaactggcttctatggagtgccgttcgtgttcctgaacgacttcagccggcgcatggctgcttatcagcaggaggccagcaaacgcgggtacaagttgcagcagtgtaagggagtaaaagaggctcttgtgcgggaggagagcctgctatggcgtaagtatcagcccgagctgttaggcgaagatggtcaggagccgtttactgaagttcgccctttaacggatgaaaaaaaattgagttcgtga

SEQ ID NO: 141796 - DNA, 213 bp, Enterobacter cloacae
atgtctcaagtccttatccgtcttcctgaagtgcaacggcgcaccggttatagtaaagcttggatttatcgacttattagtcagaatcgttttccttcctccgttaagattggatcacggtctgtagcttttgttgaaagcgaagtagatgaatggattagccagcgtattgaagagcgtgatgctctaatttccacaaaaccacaactgtaa

SEQ ID NO: 141797 - DNA, 951 bp, Enterobacter cloacae
atggcaacacgagttcaggtaaaagaaattacaagttggatgtcagtagagaaatacgatgttttcgaatcacttactgtcgaagaagtgctgtcggagatagagtttagaaccatttttgcttgtgaatacgatcctaacgacgatgaagaacgtgagcaatggaagcagttacagaaatctcttctccaaaacattcaatctggagctgttgtctcaaaggatatccctgaagatattctaaaagttttccatgatgaatctattgagctaaatgaacctgttgaatttctggtcaatggaatgtctgtaatttccaaggatcaccacctaaagccccattgttctgaactaagcgaagatgaagcaatacaagccttcacaatggcagacttagtaacttattacaggcattttgctaatgctaatatcatccaagttggggaaagacaaccaactatcaaagaagggaaaatcttctcaagcgtcagcgccttagaagagggaagtgagtattttgaaggtgaagtagttataaaggtaaatttagcatcttatacggatgatgaacttttgagtgaattcaaaggattattaaaatcgtggcgctcggaagttggtatggatgaacccgagtcaggaaacttccgaattggcatttctacgctgaaaaaaatcctcctatataaattaataccatttatagatttactactgtgggagaaagtacatgagcgtaaaataagcaatgaacttatcgctcggattttattccctttgaaacctgactctgatgtcattggtggtacacaggtcaaggatactattcggccatttgtagagcgatttgtaaatgataacgcactccagcaggttaaattttacgctaagaaaaacgattatctaaaaaatatgcgactttcagatgtactgaaactctctgaagattag

SEQ ID NO: 141798 - DNA, 1185 bp, Enterobacter cloacae
atgcccctcacagaccttgaaatcaggcgctctaagccgcgtgagaagtcctatacactcaacgatggcaatgggctgtctctgctcatcgagccgaacggatctagagggtggcgttttcgctaccgtttcgatggtaagcccaagatgatttcgttgggcacgtatccggatgtaactctcaatgatgctaggcgcaaacgtgatgatgcccgtaggttggttgctggtggcataaatcccagcgatgtacgcaaagaagataagctggcgaagctgaatcgcaatcaaaataccttcgaggcaattgcccgcgaatggtacgccaagcgcatagaccgttggtctgaatcctacggtgaagaaatgatgaaaaccttcgaggctgatgtatttccgtttatcgggcagcgtcctatcgccgatatcaaaccgatggagctcatgtcagttctttctaagctggatgaaagaggagcgacagaaaagttgagaaaggttaggcagcgttgcggggaggtgtggagatacgcgattgttactggtcgagcagattataacccggcaccggatctggccagcgcgttcgcccctcataagaaagagcattacgcttttctcaccagtgacgaacttcccgaattcttccgtacgctgaacacttacagcggcagttcggttgtaaagttggcgatgcgcttgcagattcttaccggcctacgccctggcgaattacgccagggagagtggattgaaatcgattttgataagcgtctatgggaagtaccacctgcgcgcatgaaaaagcgtcgacctcactgcgtccctttatccgaccaagcgatcgccatcttggagcagttacgcctcgtcaccggcaattatcggttcattttccctggtaggattcagcacagtaaaccaatgagcgaaatggcgatgaacgtcttgatacgtcgaattggatatgcgggaagagtcaccgggcacggtttccggcacaccatgagtaccatcctgcacgaacagggctacaacaccgcgtggatagaaacgcagctggcacacgtcgacaaaaactctattcgaggaacgtacaaccatgcccagtatctggatggccgccgcgaaatgctccagtggtatgccgactatatggaggcgttgaaaacggcgaaaatgtag

SEQ ID NO: 141799 - DNA, 339 bp, Enterobacter cloacae
atggacaaatcaaaacaactccgcaaacaaatgacgcccgaagaattacgcctctggtatttgctcagaggtcgtcgcttctatgggtataagtttcgccgtcagatgccggttggcacatatatcgtcgattttgcctgctttaaggcgaagctgatcgttgagctggatggagggcaacatcaggaaaaagaggcgtatgacttacgaagaaccacgttcttaaacgcaaacggctgggacgttttgcggttctggaataatgaatttagggcaaatgaggaggaagtaatgatggttatactgcaacgactgcagagcctgatgccctcaccctaa

SEQ ID NO: 141800 - DNA, 549 bp, Enterobacter cloacae
atgagcgaacaggcgcaagcgctggaatggggccacggcccgcgaacctttgaagtgttcctggaaccaacctgccccttctcggtgaaggcattcaataagctgaatgcgtttctggaacaggttggggaagacaaggtcacggtcaaaatccgtttacagtcccagccgtggcacctgttttccggggtgattgtgcgctgcattctggcagcatccacgctgccggacggcaaagccgccgcacgtaaagtgatgcaagcggtggccgaccatcgcgaagaatttgaatttaccgaccactgcatcggcccgaatatgcaggccacgcctgacgaaattatcgcccggatcgagggctacagtggggtgcaggttgcaggcgcgtttgcccggccggaactgcaaaatgagatcaaatggcactgcaaatacgcccgccagaacggcattcacgtctcgccgacgtttatggttaacggtcttgtgcaggcggatttaggcagcggcgatgacgtagaggtttgggcgaagcgggtgttgggatag

SEQ ID NO: 141801 - DNA, 210 bp, Enterobacter cloacae
atggtcaatacagccatggctcagagcgttacggtcgatgttccggccgggtataaggtcgttattgttccgcagtccacttcagttccggaggcggtaagcgttgcgcctgcgcctgcacccgctccggtttatcacccgcgtgcgcgccatgtggcgagcgtggcagaagggatggtgattgaacatcagtatgacgatcgtcattga

SEQ ID NO: 141802 - DNA, 255 bp, Enterobacter cloacae
atgaacagatcgttatttgccatctctgtcctttcgttcattttcatggtgctgttcccgatttctgccagcgcgaccgagcaggcgcaggaacgtcgcgtggcgcgtgatgtcaggcaggaaacccgcgatgcgtcacgccaggtgaagcagacctgcgtggcgagcaataaccagagtaatcacgactgccgtcaggacaagcggcagatgaagcaggctggcagacagaaagcgcgggacatcaagtattaa

SEQ ID NO: 141803 - DNA, 1452 bp, Enterobacter cloacae
atggctacgatgacatggctgtatccgcacgcgcctcaaaacgaccagttctcgctttctgcaattcgacgacgcgccgacaggctaatactggggcttatctggtcgatgtggggcatctcgctaggcgtaggttatataaacgagaatattgtgcagggtgcggttgttggcacctcgctggccggtttatcgacactgctaacgctgttgcttcccggcacgctgctgctccgactgagctctgcgtttgtgctaatggcattttccgcgttgctcattcatctgggcgagggggaaaccgaataccatttttctgttttcgtcctgctttccgcgctgcttgcctggcgagactggcggcccctggtgatgggggctgcggtcatcgcgttacatcatctggtatttaactacctacaggaaaacgacctttacggtgtcgtggtgttcatgcacaccggctttcatatggtggtttttcatggtctttttgtggtggtccagaccgcgatcctggtcctgctggcgatacgaatggagcaggacgcccgttcagcgagcgaggtggcaaggctcgcgggcgtgatcaacagcgagccagggtacctcacgcttgccattgatgcggtgccggcagagtccccttttgcccgcacctttagcctgacgcttggcactaagcgtgccacgcttgagcaggtcagcgtcaatatcgggcaactgctggaggcatcccgcgcgttaggacagcgcaacagcgcgctgtcggaacgaaccgatcatcaggcaagctcgctggcaacggcggccagtgcgatggaacagttaagggcagtcgcaaccctgaccagtgaaaaagccagccaggtcagggaggtggcgtttagcaccagtaacgtggcggaacaggggggccataacgtacggcaggcgattgcggcgatggaacacattcgcgaggagtcgcagcgtatttacgccattctggagctgatcgacgggattgcatttcagacaaatatcctgtcgctcaacgcctcggtcgaggctgcaagagcgggcgaacatggcaaaggctttgcggtggttgcctcggaagtgcgcgtattggcccagcgcagcgagggggctgcaaaagagatccgccagcttctgaccgcatcgcaggcgaccacgcagcagggcgtcgagcaggttgagcatgccggtatgacaatgaagtcgatcattgagagtatcgaagggctccgctctctgcttgaagagctgtctcagatgagcgagcagcagcgggcaagcattgcgcagatgaacgacagtattgccagcatcgatgccagcgtgcaggagaatgtgcgacacgttgcgcaaacattgcaggtagccgacgcgcagcgacagcagacgggtcagttaaaagaggcgattgccgtcttcagatttaactag

SEQ ID NO: 141804 - DNA, 2523 bp, Enterobacter cloacae
atgctaaaacactcagcgcatcaactctctcgcctctctgcttttattaagcattcgctgagtgccacactttactcagcattattcgtgttgccagtttccgcggttgaattcaacacagatatgattgacgttgaagaccgaagtaatatcgatatttcccagttcgagaaaaaaggccacatcgcgccgggtagctatctggtccgcattcaggtgaataaaaacacgttgcctcaatccgcaacaatggaatggatcgcaacggaaaacgaaagcggttcgcaaatttgtgtgaatgccggtcaactatccgatttcggactgagcaccgattttatttcgcgactccattattcacaggtcggacgttgccttgatctttcgacttttccggagctgggcttttcccttaataaagggacaatggtgctttccgtcaccgttccccaggcatggatgaagtatcaggcgcaaaactggacgccgccggaattttgggatgaaggtattgcgggcgttttactcgattataatctctatgccagccagtacgatccgcacgggggcgacgacagccagaatgtcagcgcctacggtacgctcgggcttaacctgggtgcctggcgtctacgttcagattatcagtacaatcaaaactttcgacacggcgagtctacgggcagcgacagcagtctggcacggacctatctctaccgccctatcccttcgctgtcatcaaaaatgaagctggggcagtacgacttaagttcagatatttttgataccttccactttacgggcgcatcgctggaaagtgatgaaagtatgctgccgccagatttacaaggctatgctccgcaaattaccggcatcgcgcagaccaatgccaaagtgaccgtctcccagtctggccgcgttctttatcaaacaaccgtcgcgccgggcccgttcacaatttctgacctgggtgaaacctaccagggacagctggacgtaatggtcgaagaggaagatgggcgcaaaaccaccttccaggtgggttcatcctcaattcccttcctgacccgaaaaggccaggtgcgttataaaacgtccgtcggtaaacctaccgctacgggccataacgacatcaataaccctcttttctggacaggagagctctcctggggctggttaagtaacgtttcgctttatggcggtaccatgctcacatctgatgattatcaggccatgaccaccggtatcggcttcaacctggattcgctcggttcgatatcttttgatgtgacgggcgctgaggccacgctgcatcgggaaaaaaatgataaacagcgtggttacagctatcgcgcgaactatgcgaaacgctttgaggcaaccggcagccagattactttcgcaggttatcgattctcggataaagaatatgtctcaatgagcgaatatctcgcctcccgggacggcgatacctcaacgacaaacgaaaaagagagctatgttatctctttcaaccagtacctggattctctggccttaaatacctatttcaacgtcacccgtaacacctactgggacaacagcagcaacacgaactattccttttcggtgagccgcaattttgatattggcaatttaagaggtttatccgcatcgctggcgctaagccgggtccgctgggacgacagcgacgaaaatcaggtctacttctccttcacccttccgctggaacagagtcgcagcattatgtacagctaccagcgatcgggcggcgacagcgcgtctcacatggtttcctactatgacgcctccgatcgcaacaatacgtggaacctctctgcctcgacgacggaagacgatttgcgcgaaggtgaaccgtcattgcgcggcggataccagcactattccccctacggacgtctcaacctttcaggcagcgttcagcctaaccaatatcgttcgatcagcgcgggctggaatggctcgcttaccgccacgcggcatggcgtagccctgcatgattacagcccggccgataacgcccgcatgatgatcgatgccgacggcgttgccggaattgaggtcaatagttcgcgcacgcgtaccaacgcattcggtattgccgtcgtgccttcactcagcaactacaccacctcaacggtgcgtgttaacaacaacacgctgcctgatggcgtagacattgaaacctccgtcattcgcatcacgctgaccgaaggtgccattggttacagtaagctgaacgccaccacgggctaccagattgtcggcatcattcggcaggaaaacggacagttcccgcccctgggcgtcagtatcgtcgacagcgctacgggtaaagaggtcgggctggttgccgaagaaggcttcgcttatctcagcgggattcaggaaaacagcacgctacgtctcacctggtccggcaacgcttgcgaaatcacgccgccgaaccaaagtaaccttagcggtgacgctatatttttaccttgtaaaacagtgcattaa

SEQ ID NO: 141805 - DNA, 735 bp, Enterobacter cloacae
atgaacatgacttttttaacaaaaggacttatctacatgctggccgtgtgcggtattgcacatgccaccgtatcgccagacagaacgcgcatcattttcaacgcctcagcaaaaagcgtgtcggtcagactgacgaaccagagtaaaaccgccccttatctggctcagtcctggattgaggataaagagggaaaaaaaacgcgcgagtttatctcccctattccgccactgttgcgtatcgagcctgacgaacaggcgcaggttcgcctgatggcacagcaaaacctcagcaaactgcccgccgatcgcgagtcgctgttttattacaacatgcgggagatcccgcccaaagccgagcagaagaacgtgatgcaaatcgccatgcaaagccggcttaaactgttctggcggccaaaagccattgagctgaaagagggacaatttgtgccgctggaaaaagtggtcatatcccgctcggctgacggtctgcaactcaaaaattacagcccctattacatcaccgtgggatatatcggactgaatggcaaaacgctgttaccgggtgcagaaagcgtgatggttgaacctttcggccaggcctctcagacgctgcggaatttacctgcagaatttcagataggctatgttggagattacggcgggctggaaatgtttaaagtgaactgtaatgcggtgcaaaacacctgtcagagcaagccggtgaaaaagggataa

SEQ ID NO: 141806 - DNA, 1062 bp, Enterobacter cloacae
atgaaaaggatctgcttcgctgcaatcgcattattttgtttgttctcatcatccgcatgggcgctggaatgctataaaggttcaaaagggggggcaagcctggtgacaaccacgttgccggctttcaccgtgcccgcaaacgcccctgccggccaaaaaatctgggaaagcggcgatttgctggtgacggtgtattgcgataacgctacgcgcgatcacactaagccggtcgaccaggatccatggagtgaaaatatatatgcctatatcctggacagttttcataataccgatagcctgatgaccaacaatccctatctggcatttggggtgacctataacggcgttgactatgatacccctgatatcaaaattgataccggcgcctgtctcgataaaaaagaggacttttacggggaatataaagtcgcagcgtgtaacggtaccacaatacaaaaaaacgtcactttcaccgtgcggtttcgcctctacgtaaagttaaaagcggtaccaaaagagcagtttgacttcacattcccttcggtcaccgtacttacctttgatggtgttggcggaataaatgtcatgcctggtgccaaaaacctgcattacgatatcgccggcctctccaatattcacttcctggactgcggtgtggatatccggatctatcctgaaaatcagattgtgaattttggccagtttacggagagtgcagtcagcaccagcgccctcacctcaccgtttagcatttcgacaatccgggatgccactgcaggctgttcagaacagtttgacgtaacgaccagcttttacaccaccgatacgctctacgatgatacgcatctggacatgggaaatggtttactcatgcgtctcattgataaaaccaacggcgacgtgacgtacaatcagtatcttccttttgcaacctatcaccctgatgatacggtgacgacgctaactcacgattatacggctgaactcacccgcaaaccgggtgaagccattgctctcggacccttcattaaagacattattgtcaaaatcaattatcaataa

SEQ ID NO: 141807 - DNA, 2436 bp, Enterobacter cloacae
atgaaatacagttcaccaggattaatcatcgcaggctttcttatctcacacccgcttctcgccgttgagtttaacattaacgctatcgataaagatcagcgcagcaatattgatttatcacagttcagagataaacgtcatattgctccaggatattatttcgttaccgtttcgataaataaaaccccgcttgccgctggctggcagctgggctggcaaaaaaaaggtgacacaacggaggtctgcattccggcagacctggctgatactttcggcctggatgacaagatccgcggcacgcttgccgataaaacaggctgcgtcgatttttccggtctgccgcaggtgcatttcgagtttatccaggcgacacaaacgctggaggtaaccatacctcaggcctggctaaagtaccgcgccaccgactggatgccgcctgcaacctgggacaacggcgtctccggcgtactgctggattacaatctcttcgccagtcgctaccagccagatgaagggccaggcagcgataacgtgaacacctacgggaccgccggagcgaacctgggcgcctggcggctccggggagattatcagtatgcccttaatcgtaccgatgagggttcgcagagcgaaggccggttgtcccgcgcttacctttttcgccctctgccatcattgggttcaaagctgacgctgggtgagtctgattttcagtccgatattttcgatggtttttcatataccggcgcctcgcttattagcgacgagcgcatgcttccatggtcactgcgcggctacgcgccgcaaatcaccggcatcgcccggaccaatgcaaccgtgaccgtcagccagtctgaccggattatctatcagaccaacgtgccgcccggcccctttgtgattcaggatatcaatcagtccgtacagggcaccctggacgtcaaggtcgctgaagaagatggacgtaccagcacattccaggttgctgcggcgtcagtaccattccttacccgcaaaggccaggttcgctacaaactgtcgggagggaaagcccgtgaggacagctcgcaccgcattgaaggcaatgcgtttctgagcagcgaattttcctggggcatgatgtcccacacctcgctgtacggcggcgtactgaatagcggcaatgattatcgcgcgctggctgcgggcatcggacaaaacctggatgtgctgggcgcgctctcgtttgatgtcacgcaggccaccagccagccagacggtaaagctcaacagacgggatacagctaccgcatcaattacagcaaacggttcgacaccaccggcagccagcttacgcttgcgagctaccgttactccgacagccgatttctcagctacgcccgttttcttgaaaatgagcaggacaataaggagacggaaaagcagaccctgagcgttaccgccagccagtaccttcccgccctgtctttgaacctgtatctcggcatgctgcgccagacatggtgggacagagcctcctccaccacgggaaccctgacggcaggctacagcttcgatctgggtcgctggaaaaatcttgccgtcacggcctcctggagcaaaacctattatcaggaccagggtgatgatacgcaggtttacgtctcgctgagcgtaccgctggcccccgatcgtcgtctgagctacgacctgagaaacggtgacaatacgcgccagacgctctcctggtacgacgcctcggacaggaataacacctgggggatatcggcgagtacggaaagtgaaaagcccgacgccggcgcgcagctcagcggtacctatcagcactatgccgggacgggagatctcaacctttccggaagctataaggccaacgaataccgttcggtcagcgcgagctggaacggctcgttcaccgcgactgcccagggtgccgcactgcatcgccgaagctatggcaacgagccgcgcgtcatggtcagcacggaaagcatcggcaatatcccattaaatatgtcccgtgacgccaccaacgcgtttggcatcggcgtgctaccggctttttcgagctatttacctgccagtgtacaggtcaatctcaatgctctgccggagggtgtggatgtcgacagtcgcattatccgcgccacatggaccgagggggccataggttatcgacaaatcgctacccgtaaggggcaggatgttgttggcattctgcgcacgcccaccggcatgccgccgctcggcgcgcgggttcacgaccaggagaccggcgccgaagtcagcattgttgccgaaaacggccatctctggctgggtgcggtaaaagcagaaaaacattttacggtgacgtggggggacggccagcaatgccgcttctccctgcccgcttctctggaaaacacgacgcagcttatgctgccctgccagtag

SEQ ID NO: 141808 - DNA, 759 bp, Enterobacter cloacae
atgatgaaattacacctgttatcagcaaccctttttctctttggctcctgcgcctcgttcgcggcgatcaatttggatcgcacgcgaattgtctttcccgaaagcgacaaagccagcagcctgacgattgaaaaccagagccatgcgcttccctatctggcgctcgcctggattgaagatggtgaggggcgcaaagaggacagccattttatggtgcttcctcccctgcagcgcattgaaccaggcacctcatcacaggtgcgggtggtaaaacagccggcaacacgcgagctgccgaaagacagggagaccctgttctttttcaacctgcgcgaagtgccgcctaaaagcgagagcccgaaagacgatcgcagcgtgatgcaggttgccatgcaaagccgcatcaagctgttctggcgtccagacgctattcacaaaaagcccggagaggaaacggaaatgcggctcgccatcaccctgtcgggtaaaaccatgacgctgcataaccctacgccgtacttcgtcacgctggcgtggcttagcaacaacggcaaaaccatgctgcctggcttcgacagcctgatgatcgatccgtttgcgacccgcacgctgacgctgagcacggcagaaggaacaggctacaccatcgggtacattgatgattatggcgcgctgcgcaaggtcaatttaacgtgctccgggtcaacccaatgcacgctgacgccgcgcaaggcagggcaacatgcgacatctcgttaa

SEQ ID NO: 141809 - DNA, 675 bp, Enterobacter cloacae
atggacgcttctcgccagcggctgcgcctgatgcagctctccagcagcagcctgccggtcgggtcgtttacctggtcgcaggggctggagtgggccgttgaagccggctgggttgccgacgcaggggactttaagcgctggcaaatccagcagatggagcagagctttttctgcgtcgatctgccgctgtttcaccgtctctgccaggcctgcgtgcaggacgatctgcaggcggccacgcgctggacgtcctggctgctcgcctgccgggaaacgcgcgagctgcgcgacgaggagcgcaaccgcggggcagcctttacgcgcctcatcaagagctgggagcccgactgtccgcccgcgtggctggcgctatgtcagcaaagccagctctgcggcatggcatggctcggcgcgcgctggggcattagcgtacgcgagctggccctgagcctcggatacagctggatggagagcgcggtaatggcgggcgtcaagctggtgccgtttgggcagcaggcggcgcagcaattgattatcgaactgagcgaccattttgctgcccggtttgaacaggcgtttttatgcagtgacgacgagataggcgcggcgacgccgctgtccgcgatcgcctctgcgcggcacgaaacacaatattcacgactattccgttcctga

SEQ ID NO: 141810 - DNA, 1155 bp, Enterobacter cloacae
atgatcgctgaaatgaatatccgggcgggtgggaaaatcgcccctgattttatgcttaagcttgacgatcgcgatatcacgcaaaatttcagccatcgtcttatcagtttgaccatgaccgacaagcgcgggctggaggccgatcagctggatattcagctggatgattccgacgggctgttagacctgcctgcccggggggcaacgctctccttatggctgggatgggcgggaaccccgctcgagcagaaagggaactttacggtcgataccattgagtttcggggcgcgccggacacgctgaccattcggggatgcagcgcggattttcgcggaaagctaaacgtgcggcgcgaacagtcgtggcatgacacgacgatcggcgcgatcgtgaataccattgctcagcgtaaccggctgaccgccagcgtcgcggcggatctttcatccattgctatttctcatatcgatcagtctcaggagacagacgcggcgtttctcacccgcctggccgaacgcaacggtgcctttgtttcaattaaagccggcaaggttatttttatgaaagcgggccaggccgtgacggctggcggcacctcgattcccttgatgatgattgaacgtggggatggcgataagcatcttttttccgtcgcggaccgtgaaaattactccggcgtgacggccaaatggctgcaaacgcgcgaccccaaaaagcaaaatcctcaattgagtattaatcgtttgcctgaggggcaggcggcagaggggctgcagcacccggatgccgctgcgccgattgcgggagcaggggggaaggagcagaagccgcaagagatgctggtgggatcggcggaaaacgtatttgagctcaccacggtgtatgcctcggaagagcaggcgctgagggctgcggaggcgaagtggcgcgcgcttcagcgcggtaccgtgaatttttccatccagctggcgctgggacgcgccgatctgttccccgaaacgccggtgctggtaaacggctttaaacgcgtcattgacgagcaggcctggatcatcagcgaggtggttcataccctcagcgggagtggatacaccacgaagctgaaccttgagcgtaacgtcaccgacgaaaaatttgctgtcgacagtgagtaa

SEQ ID NO: 141811 - DNA, 552 bp, Enterobacter cloacae
atgaaccttcaacgtctggctacgctattgctgcttgccttaccgtgcttttcttatgctgaagagtgccagttaacgctctcccagcaggtcgtggattatcatcagatgcggcgtgacaacattatttccagtcagcaaagctggaacaaaatgccggaaaaagagattaacgtcagcgtctattgccctgaaaaacagcagatggcgacgttaatacagggcgcttccggacagaaagggcgttttcagtttggccagaacggcggtgtggcgattaaagtcagcaacctgacgcttgacggtaaaagctacagcgtgggaaaaacaaccgatcaggtgaactttacgcctgaaagtgatagcggcgcatcactctatgttcgcaataacgaagcggtaatcgcggttgaaaacggtaaggtacccagcggccagcagctaaattttaccgtgacgattttcccggtactgaatgacagcgcgtttaaccatatttctgatcaaactgctctggagagcgatttgtcctggcaacttctcaagaaataa

SEQ ID NO: 141812 - DNA, 243 bp, Enterobacter cloacae
atggacaaacgttttgttcaggcccataaagaagcgcgctgggcgctgtggctgacccttctctatctcgcagcatggttagtgaccgcttacttacctgattccactatcggcataaccggcctgccgcactggtttgaaatggcctgtctgctggtaccgctgattttcattctgctcagctggttgatggtgcgctttatcttccgcgatttcccgctggaggatagcgatgcaaactga

SEQ ID NO: 141813 - DNA, 1452 bp, Enterobacter cloacae
atgcaaactgaaattatcaccgtgctgattgtctatctgatcgtggtgtttggcctctctatctatgccatgcgcaaacgcagcaccggttcgtttctgagcgaatatttcctcggcagccgttccatgggcgggtttgtgctggcgatgacgctgaccgccacctacgtgagcgccagttcgttcataggcggaccgggagcggcatacaaatacgggctcggctgggtattgctggccatgatccaggtgcccactatctggctgtcgctgggcattctgggcaaaaaatttgctattctcgcccgccgctataacgccattacgcttaacgacatgctgcaggcacgctatcagagccgcgcggtggtctggatcgccagtatcagcctgattgttgcctttgtcggcgctattgccgttcagtttattggcggcgcgcgattgctggaaacggcggcgggtatcaagtacgagaccgggttgctcatcttcgggatcacgattgcgctgtacaccgcgtttggcggcttccgggccagcgtgctgaacgacaccatgcagggtatggtgatgctgataggcactcttgtgctgctggttggcgtcatctatgcggccggcggattgcacaatgcggtgcaaacgctggaacagatcgatcctaaactggtcagcccccacggtgcagatgatatcctgacgccggcgtttatgacctccttctgggtgctggtctgctttggcgtaatcggcctgcctcacacggccgtgcgctgtatctcctataaagacagcaaagccgttcaccgggggattgtgattggtaccgtcgttgtcgcgcttctgatgctgggcatgcatctggcgggtgcgctgggacgggcggttttaccccacctgaccgtgccggatcaggtcattcctacgctgatggtgcaggtgctcccgccgtgggccgcaggattgttccttgctgcaccgatggcggccatcatgtccaacgttaacgcccatctgctgcaggcttctgccaccatcatcaaagatctgtggcttagcgcgcgtccggctaaaatgcataatgagcaaaagcttaaacgcatctcgacctggaccacgctggtgctcggcattctgatgatgttagccgcctggcgcccgccggagatgatcatctggctgaatctgctggcgtttggcggccttgaagccgttttcctgtggccgctggtgttagggctctactgggaacgcgcgaacgctgcgggcgcgctgagcggcatgatagtcggcggtgtgctgtatgccgttctcgctacgtttaaaattcagtacctgggcttccatccgattgtgccttcgttactgctaagtttactggcgtttgtggtggggaaccgtttcggtcagcccgcgccacaacccgctatgatttcatctgataaataa

SEQ ID NO: 141814 - DNA, 756 bp, Enterobacter cloacae
atgtcgcccgtcaataagcaggccattgcggcggcgtttggccgtgccgcgcgcagctattcacaacacgatgagcttcagcgccagagcgcagaggggctgctggcgctgcttggcgagacgcgctttacccaggtgcttgacgccgggtgcggtcccggcgggaatagccgctactggcgcgaagcgggaggccaggttacggctctcgacctgtcatccgacatgcttgcggaggcacgtcagcagcaggctgcgcaccgttatctggtcggtgatatcgaagcgattccgctggcggatgcgcaatttgatttggtctggagccatctcgccgtgcagtggtgcagcagcctgccgcaggccttaagcgagctttaccgcgtggcgcgtccgggcgggagcgtggcgtttaccactctgctggaaagctcgttaccggagctgaatcaggcctggagggcggtagatcgccagccgcacgccaaccggtttttatcacacgagcgggtcacgcaggcgctggcaggccggcgctatcgcagcgcggtgcagaccatcaccctcaatttcagcgacgcgctcagcgccatgcgctcgctgaagggcattggcgccacgcatctgcataccggacgcgagaaaaaaccgctcacccggggtcagttgcagcgtctggagctggcctggccgcaggcgcggggacatttcccgctctcttatcaactttttcatggggttatcgaacgtggctga

SEQ ID NO: 141815 - DNA, 1011 bp, Enterobacter cloacae
atgaccctttccgaggaaaaaatgaacatgtttaaatatgcctttgcgctggttgtctttctcacaagcgcgtgcctgataccgcatgctcaggccgcgacaacctgtgatagcaccaatgtgccctatacccttaatgccggtacgctttccgtacccacgaccctcgatatcggcagcgtcatccctggctcggcaaagacacataccatcaacggcagctgttccggaacgatttctagtcataccataatttcctgctactacggaacgggaacggaagtttcaggcatgccgggcgtttactccactgatgtggacggcgtagggattcaactcctgaacagtagtgggcagatcgttcgcggaaaaggttattcatgcgacaccaccgcgacgcccatggggacagtcagcagcgacggcggacagacattttctttcagctataccgaacggttaatcaaaacggcaacacacatcgggagcggaacgatttcaagtgcgcaagatccctttggatttggtgtttttcagtctgtcggtatttctggcgcacgcaataccagccactattccgccacggttgcggaaagaacagccacctgctccattgatccgctgaatctgacggtctcactcggcgatttcccggtttcgcaatttacccacgtgggcagctacacggcatggaagtacttccagatcaccgccacctgtactgaagaggtcaatctcacggcctcagtaaccagcgctaacggcgttaacagccagtatgatgatgtcctgaacctgacgccgggcagcgacagcgccacgggcgtcggcgtaggcatgctgcttgacggcgtcgatctaaaatacaactaccctatcccaatcggcggaacaaccgaacctggcgttcctgacgcggttaattttgccgtacggtattaccagacggatgccaccgtcactgccggaaaagccaacacgattgccaccatcgatatggaatatcagtaa

SEQ ID NO: 141816 - DNA, 609 bp, Enterobacter cloacae
atgtctaccatctgccttgctgcccagcgcagctataccaccggggagccggtctggttctcatggcgtttaccgtcattcagtaaaatcctcagcgtgactgcgctatggtgtcttgggctgtgtgcgctgatcgcggccggcctttatgcgcacgtttactggaatttgcgccacccgacacccgtgataaaaaaggtgagcgcggcgaaaccggaaaccacgctgtctgatatgcattacgtgtacgtgacgaagccgttcccgcatccgcatccaaaaccccagccgctaaaaatgcaggaaaatttgccgccgatggacagtatgcccattaatagcgatgaaaatgactggcagcaggcccccgatggtgcgttaccggatagcccggccacgcaagacacctcgcgcgataccttgccgggcaccgaggcacacgaacaggcgatgaaatcggatgatgacggttcgttaaaagagttgtttatgcaggcgttaaaacagcagcaggatgatatgtcgaagggaaaaatgcccgcgccaccggttgatgaaacgcagaaagcgtctccttctgtcataaaaggagacgccggaggggattaa

SEQ ID NO: 141817 - DNA, 774 bp, Enterobacter cloacae
atgaggaacgcactcctttcccgtgtaatgacaccctgcattatgcttgtcatgctgatattttgcagccagcagggttatgtcgtttataaagattataagaaagttacgaataagttagcgaatgcggataagccggcgctaaaaaaacgtgacgctgaaaaaaactttacccttttcaacgcggcagtgcgtcaaagcgacgcgcctgttgcagcaaaagcgccgttatctgtagaaatcgaaggcattattcgtagcgatgaatcctggctatcgtttgccgtgatcaagaccccagccgggcagcagagctaccgggaaggggagtcgctggtgggtttcgatggcgcttatatagatgaaattaataaagataatgtggttgtgcagtacgagggggcaaaacagatgctggccctcaagaaaccggcttattttaagggcggcgtagacagcggcccggtcaccaaatcgaaaaaagatgccggcgccgacagtctgcatctcgatgattatctggtgttaaaaccgttaatcgataagggccaactggaaggctttaatattaatccacggaatgcgtctcctttttacagcgatacagggctggaaaaaggggatgtggtagtgaaagtcaacgacgtcgatatgacgaaagaagcgcaggcgaaaaatatcatcgccaactggtcgaaaatgaaagaggcggaggtcgttgtaaggcggaacgctcaccttgaaaatattcgggttaatgttttaaacaattaa

SEQ ID NO: 141818 - DNA, 375 bp, Enterobacter cloacae
atgactaaacgtaaagaacgggggatgaccctgctggaagtgatggtcgcactggtcatcttctccaccgccgcgctggcgctgatgaactccgtctcgctgaacgtgcgcttcacccatggcctgggcgattcgctgcaggcgagctgggtagcggaaaaccagctggcggaggcaaaactgaataacgcgccgttccccgatgccctgcaaacgggcacggagacaatgggcggacgacgctggacctggcgcaagcagcgggtcaaaaccgcggaaaatcgctttgccgatgaggtgcaggtatacgccgagggcgaggaagataagccggtgattaccctgcaggtgatggaacccggagaggcgaaatga

SEQ ID NO: 141819 - DNA, 663 bp, Enterobacter cloacae
atgagtaagcacgctcggcgtcagcagggctttacgctgctggagatcatgattgcgctgaccatcttcgcggtcatcagcctgcttgcctggcaaatccttgacggggcgatgcgtacgtcgaacgccaccgacgtggcggcgactcgcttaaaccagcttcagcgcgcctataacctgctggagcgggatttcttccagcttcaggcgcgcgccccgcgcaacgagcctgacgtatttgtccagagcaaagacggcctggagctgaccacgctgaacggcgtgagcggtcaggttcagctggagcgcgtgcgctggcggttaaaagataaaaagctgtggcgggatatctggccggtcatcgacggcccggcggatgcggagccggaagaggtgcccattctcagcgatattaaagagatgtcgtggcgtttctggaaagcgagctggctggacaaatggaccgacacggcgcacctgcccgacggcgtggagctgctgctgacgatggagaacggcgatacctggcgctgggtgtttaccacaccgggggagctgccgattgctccagcggcacccgcagaacaaacgcaggcgccgaccgatgcggcgacgcctgcgcaagcgcagccgacacccgccccgtcaggagaaaacaaatga

SEQ ID NO: 141820 - DNA, 1080 bp, Enterobacter cloacae
atgtggtgcgagtccggtagcgaccaggtgggacaacgccagggactggcgtcactggcggaactcgccggtcacacgctcgctgcacgggtatgtctgttactcccggccagcgaaacgatattccgtcacttcacactgcctaaaaaaagcagcgtcgaattctcctggctggcagaggagacgctgattggcgacgtggacacgcttcactggacggtgctcaacaagaaagggcgggacgttgacgcggtggccattgagtctgcgcgtctgcagtactggcttgaccgctgcgccgatgccggattgacggtagtgcaggtgctgccggatgcgatccttctgccggtggccgagggcgggagcacgctggtttccaccgacagcggctactggatgcgctactcgccgtttggtgcctgtgaaaccgacgccgcgctgctgccgctgctgctgagccagcagcgcacaggtgacattgtctgctacggcgatgcgccagcgggcgtgaaggtggatgagcagctggcctggcagcatccgctggtgctgatccagccgcagtggaagcgctgcaaagccaatctgctgcacggtgaattttcagccaaaggcgagcgcgccggtttccgccatgcgaaatcggccattgccgccgcggcactgctgagcctggggctgctgattggcccccgcgtcggcatggcctggatgctgagcagccaggaaaatctggcccagcagcagatggttgagctggcccagcactacttcccgacgctgcgccagaccaccaacctgaaataccacttcgggcagaacattaagaaagagaagaaaggattctttcttcagctggacgcgctggatcaggttaagcaatcgctcccctctgtcgagctgagcgaagtcgggtacgacgacgcgcagaatcaactcacgctgaacatcagttcgatggatcccacggcgctgcaggcgttcgttaataaggcgagcgacattttcgactttacgctgcagccggtctccagtgaagcgccttataccgctatcatcacagggaaatataaatga

SEQ ID NO: 141821 - DNA, 453 bp, Enterobacter cloacae
atgaaacgattactgttgctgttattaatattaagccaaagcgcattggcgaattgctgggataaagcggcgcattattatcatgttgacccttatttactttatgccattgcgaatgtggaatcaggaatgaatccctacgccgtcgggaccaatcatgacgggacgcatgacgtaggattaatgcaaataaacagctcgcacttttcggagcttgaacgacgcggtatcagcgaacgtagactgatgactgaaccttgtacctccattatggtgggcgcatcgattctgtcaggcatgattaacgtctacggatataactgggaagccgtgggcgcctataacgccggaattaaaaaagaaaattatccaaagcgtatggtctatgcccataaagtctgggcgaagtatcagcaattaaaatctgttgcacgcgaaagaaatgactggtga

SEQ ID NO: 141822 - DNA, 237 bp, Enterobacter cloacae
atggcgtgcgtgatcgaagctcacgcgagcgttaacatcatcactgacgcttttattcgatttacccggattttcttgtccattattttgcttattgccatgggtaccggaatttccgttaccatgattcccggaattgccatgattaccaccattaccttgcccgccaccgtttccgtgaccattgccattcccgtttccgggattagccatgaccggagccgttgcaaacgttaa

SEQ ID NO: 141823 - DNA, 627 bp, Enterobacter cloacae
atggccgttacgctggttgggctggttcagttcgaactgatcggacttgttcagcgtacacgtgttagctatcctgcgtccttcactaaaataaggcttattgagaacatggtagataaacgcgaatcctatacaaaagaagatcttcttgcctctggtcgcggtgaactgtttggcgctaatggcccgcagttaccggccccgaacatgctgatgatggaccgtgtcgtgaaaatgaccgaaaccggcggcaacttcgataagggttacgtagaagcagaactcgatattaatccgaacctgtggttcttcggttgccacttcattggcgatccggtaatgcctggctgtctgggcctcgatgcaatgtggcagctggttggcttctatctgggctggctgggtggtgaaggtaaaggccgcgcgctgggcgtgggcgaagtgaaattcaccggccaggttctgcctactgcgaagaaagtgacctatcgtattcacttcaagcgcatcgttaaccgccgtctgattatgggcctggcggatggcgaagtgctggtagacggtcgtctgatctatagcgcgagcgacctgaaagtgggcctgttccaggacacttccgcgttctga

SEQ ID NO: 141824 - DNA, 1029 bp, Enterobacter cloacae
atgccgccacgtaccgccagcgacctctattcagaaatgaaaaatatgtccgttgaagagcggatccgcttcttctccctttcgctggcggaaatacaccgcgaactgcaggaaagcatcagccagatagagtcgatgaagcaggcgctggaagagagtgaagagtaccatcgccagctggttgagaccgcacaggacgcggtgatcaccatcgatcacgctgggatcgtcgtgaactggaaccaggcagcagaacgcatgttcggctggtcagccgaagaagcgacaggcaacagtcttggcgatatgatcgtgcccgaggaatttcgcgagcagcacgcgcgcggcctgatgcgctttaaggccgcccagccgtcgaatattctcaaccgcactatcgagatcgctgcgctacatcgcaccaagggcgagttccctattgagctgtcgatatggccgcaccagcaagcgggtaagcaaatcttttcggcattcatccgcgatattaccgatcgcaaacagcgtgaacatatcgcctggctgcacgccaactttgatgccctgaccgggttaccgaaccggagattattcgttaaccgtcttgagcaggccatcacacaggctatcgctagcgaccgggaagtggcgctgctgtttatcgacctcgaccggtttaaaccggtgaacgatctccacggccatgccgtcggtgatgaattgctgcggctcgtcgcatttcgtctgcaaagcgtactgcgcgaaggcgacacggttgcccgcctcggcggcgatgagtttgtcgccctgctccccgatttaacgaccagcgatccattacccctgcaaacggcggaaaaggtcagcgctgcactggcacagtcatttttgattaacgagcttgtgattgccatctccggcagtatcggcatcgcacgctttcctcatgacgctgccgatgccgatacgttgctcaatagcgctgacaaggcgatgtatacgcgtaagcggtcatcgccgggggaacgctga

SEQ ID NO: 141825 - DNA, 636 bp, Enterobacter cloacae
atgacaaccgatgtcacgagttgtgcgaagaaaagccgtggccgaccaaaagtgttcgacagggatgcagcgcttgataaggccatgactctcttctggcaacatgggtatgaagcaacctcgctttccgatctggtagaagccaccggagccaaagcgccgacgctgtatgctgaatttaccaataaagaggggctgttccgggcggtgctcgacaggtacatttcgcgctttgcggcgaaacacgaagcccagctattttgtgaagaaaaaagcgttgaacaggcactgcgtgactacttcaccgccgtcgcaacttgcttcaccagtaaagacacccctgcgggctgctttatgattaacacctctgccacccttgcggcatcgtctaaagagatcgccaatacggtgaaatcgcgtcacgccatgcaggaggagacgctgagcgcgtttttggctcagcgccagcagcgcggtgaaatccccgcgcactgcaaccctcaggtgctggcgcagtatctgagctgtattttgcaggggatgtcgatcagcgcccgcgaaggggcttcactggaaaaactgcagactattagcgacaccacgctgcggctgtggcctgagctgctcaaaatctga

SEQ ID NO: 141826 - DNA, 3045 bp, Enterobacter cloacae
atgaaaagatttaaactaagcactactgcggtgttaatcagtagcttattgttcgtgaacaatgctattgcgcaaatcgaagaaatcaataatgccaacggcgttatttccggaagcggcgtgattgccaacggtggcgtttacaaggttatcggtaccgcaggtgaaaatagcgtcatttcagttgcggataacggcagcgttaccgtgaatcacaacggcggctctccgctgatcatgggctggggtgagttcgagaatggcgatcttctgatcaccagcggcagcgttatcgtcgccaacagcggaacgattaatttaggtagtggttcgactattaatacggcgtatggcgatctgatcgagggcacggttcccaaccgaccagatgttcctttggataaagattaccagtttgtgtttgccttaggcgtcaccagggtgggcgcagtcagcgcggctaacctcgcgaaagaagggaaaatcgttgccgataacctgacgatcaatatgagccaccagcgtgacgataagtttgtcgtcgggatccacggtgaaaaggcgaatgcgaacattgatttgacggggttaaccaccgttaatactacggcactcggtaacgaaagcctggcgctgggtatttatgccaaaaacggcacgcgggttaccgctgatgatttgcgcctgaacagcacgggccagatgtatgccgtcgggctctcttcacagtccgttgaagaaaacgcccgctccctcatcacctataacaatgcggtgattacttccgtggccgatgattttgccgatggtatcagcgcctctggcggtaacatagtcgctcagggcgatacgcagatcgatatcaccgtcaataagaccggcgcggtgacctcggggatctgggtgtcggacggactcgacgatatcgatttagactcctacttcaccagccacggtaaaacagcgatcgccctgaacgccggtgcggacgggacggaacttcgcggggcggaatccgttggttcgtcggaactgaccacccaggatttggctgtctcgatagatacgcacgggcatcaacagaccaaaggcacgggcctgtttgcctcacaagacggcgcgcagacgccgggtaaccttgtcgtcaatggcaaactgaacattgacgttgcggatacgacccgcagcggcacatggcactacatccacgcgaacaaaggcggcagcattgcgttgaacggcgacgcgagcctgggcgtgaactacaacgatccggataccattgccattctggcggaaaacgccgattctcgcgtgaccgcggcggggcagaacatgcaggtcgtaggtaccgttgaagcgaaagatgctgggctggtcgatcttagcgccgtaagggcgtcccgtttcgacggcggcttcctgaccagcaccggcggtactaacaacctgtcgctggcagaagactctgtctggaatatgaccaaagattctcagctcactaacctgacgctgaatgaatcgacgctgaactttatgcatacttccgtgcagacgcagcgccagacgcgtgaggcagccacgttcaaaaccctgacggtggacggtgattacgcgggcagcaacggcaacctggtgatgaatacggcgcttggcgatgacaactcccctaccgaccgcatgattgtcaacggtaatacaagcggcaccaccaacgtgatggtgctgaacgcaggcgggacaggcggcctgacgacgaacgggattgagctgatcgccgttaacggtaactctgccggtgagtttaaacagaatggccgtattgttgccggggcgtatgactataccctgcagcgcggcgcgggtcagaacgcggcaaactggtatctgagcagcgcgctgacgcctgaaataccagaaacgccagaacctccagcgccgccggaaccccccgttccgccagaaccgactgaaccaacagaacctccggtgaagcctgagccacctgcgccggtcaatccgcccgatccggtgacgccagcctctccgacaccggtaccggctgttgaacacgcggtgcgtccagaagcaggtctgtatggtgttaacctggctgcggctaacacgctgttcaacacccgtttacatgaccgtctgggtgaaacccactacgttgatgccctgaccggtgaagcacgcgcgaccagcatgtggctgcgtaacgtgggcggccatacccgccagcacgacagcagcggccagctgagcatgcaaaataaccgctatgtaatgcagcttggcggtgacgtggcgcagtggagcagcaataacgctgaccgctaccatctgggcgtgatgggcggctatgccaaccagaagagccgtgcagaaaaccagcgtaacggtaaccgtgctaccagcagcatcgacggatacagcgtcggcgtctacggtacctggctgcaggacaacgaaagtaaagaaggcacgtatgttgatacctgggtgcagtacaactggttcaacaacaccctttctggtgatgacgttgctacggagacgtacaaatcaaaaggcttcaccgcttctgtggaatctggctacacctggaaaatggcggacctcagcgagcgtagcgcgctgtatatccagccgaaagtgcagataacctggatgggcgtgaaggcggactcacacaaagaagtcaacggtacccgtgtagaaggtaacggcgacggcaatattcaaagccgcgttggcgtgcgtctgtacggccatgctcacaacaagctggacgatggcaacgaccgtaacttccagccgttcgtggaagccaactggatccacaatactaaagactttggcgcatcgcttaatggtgaaaaagtgaatctggcgggcaaccgcaacatcggtgaactgaaagcgggtgttgaaggtcagctgtcgaagaatgtctctctgtggggcaacgtagctcagcaggtaagtaccaagggatacagcgatacgcaaggtatgctgggtataaaatacagctggtaa

SEQ ID NO: 141827 - DNA, 966 bp, Enterobacter cloacae
atgatgacctctacgcgttttacccgatggatatgttttttcgcgctggccgcagcggtagcgataacccttcctgcgcgcgccaatacctggcctcttccgcctcccggcagcaatgtggtcgggaaaaaccagtttcacgtggtggaaaataacggcgggtcgctggaagcaattgccaaaaaatataacgtcggctttttggctttgctgcaggccaaccccggcgttgacccttacgtgccgcgcgccggtagcgtgctgacgatccctctgcagaccatactcccggatgcgccgcgtgaagggctggtaataaaccttgccgaactgcgtctttactactatcccccaggcaaaaatgaagtgaccgtctacccgataggcattggccagctgggcggcgacaccctaacgccaacgatggtcacgaccgtatcgcagaagcgggcaaacccaacctggacaccaaccgccaatattcgtgcccgttacaaagcgcagggtatagagctaccggcagttgtccctgcggggccagacaacccgatggggcatcatgcaatccgccttgccgcatacggcggagtgtatttgctgcacggaactaacgctgatttcgggatcggtatgcgcgtcagctccggctgcatccgcctgcgcgatgacgacatcaagaagctgtacaacgtcctggcgctcggcacgaaggtcaatataatcaacaccccgattaaggtctctgaagagcctggcggcgtaaggctggtcgaggtgcatcagccgctgtcgaaaaatattggcgacgatccgcaaacgttgccaattaaccttaatgcagcactgatgagttttaaaaccagtgccagcacggacgagacggtgatggagtccgcgatgacgacgcggtccggcatgccaacggacgtcacgcgacaccacgataacgcacagcagtcgatataa

SEQ ID NO: 141828 - DNA, 240 bp, Enterobacter cloacae
gtgcgtctgattaaccgtagcaagggagacagcatcggcgggccagcatgcaccgccgcgctcaaatgccattttgagaaatatggcgcgcatggtcgcagcgacaagcagactttttacaccatcaagttccaagggagaaaaattacggttgaggttgttaaccgcccccgtagttacgtggccacggcaatgaccggagccaggcatctccggtgcctccctggccttggtcggtga

SEQ ID NO: 141829 - DNA, 273 bp, Enterobacter cloacae
atgaaagtagaagtaacaaccattgaaatgggcctggcaatagttaacaaagaaattgcgacatttaatattaacgggattatttctggcgtggttcatttaccatcctctggccctgtaaccgtcgtgcttgacggtggctacgtgctcggtgaatttcattgcccggtttgcgctgttaagcatattagcttgctgtctgtgaatttcgcagaagcacagaaatcctgtggcatgtcctattacgatcacaaacgccaacaacttaactga

SEQ ID NO: 141830 - DNA, 237 bp, Enterobacter cloacae
atggaagagcgggtcaaagtacttgaggataaggtggcatcattagttactgatattgcagtaattaaatccaactatgctactaaagaggatgccgctggtatcaaaactgagatcgccaatgcgaaggcagagctacataacgccctaagaacccaagtacttacaatcattggctcaatgattgccattgttggcattgcttcaggaatcattattaaattccttcatgcataa

SEQ ID NO: 141831 - DNA, 450 bp, Enterobacter cloacae
atgaaatctgattttttttgcttttgttatccaacgctactcaagccagggatgatgtctggaggtatatacccaccagaaccctgtatcacggatgtaagcaaagatgaaaaccatactgtcattgtcaccgttgccactgcgatcaccgataaaagtaagcttattacggaagtggatatacattacaatggagagtcagttgtaaacggtaatgtcgatgagtttggttactctgaacatccagtgattaaaaaattcccagatggcacgcaaatttttctgacctcactttttgtcaaaaatactgagtttaaagagtctggttgctatgaggtgatagtcaaactctttcaaaaatcccatgataactcagatgaagctgaggaagtgcaactcgacaaagtgacgagtaaatttatcgtcatactcgctggggagggtgtttaa

SEQ ID NO: 141832 - DNA, 252 bp, Enterobacter cloacae
atgactggtttagacaaggccatcaaagcgatggggaatcagcgcaaattagcgcttgcactcaatatgaggccttcatccttgaacaaatgggttaagcaatacatggggcgtgttcctccagagcgcctcatccaaatttacgaactcaccggtataacccctcacgagttacgtccggatttgcatccaacccctaccagcggaattcctgttcagcatatcccacgtgcgcagaaggagtctgagtga

SEQ ID NO: 141833 - DNA, 510 bp, Enterobacter cloacae
atgtctgagcaaacaatcctggatatgtgctgcggttcccgcatgttctggttcaacaaacgcgatacgcgcacgctcttcgccgatattcgcagcgaagagcacgaattatgcgacggccgccgcctggtaatccgtcctgatttgatagctgacttccgcgcgctgccgttcgctgatgcgtcgtttccggttgttgtgtttgatcctccacatcttgagcgtgtcggtcaaacggcatggatggggaaaaaatatggtcgattgaacaaaaatacatggcgttcagacctgcgcgccggtttcaaagaggcgttccgagtgttgcggccacacggtgtgctcattttcaaatggaatgaaacgcagattccggtgagccagattttggcgcttacagacgagaaacctgcgatcggccagcgtaccgggaagaacgacaaaacccactggatcattttcgtgaaggagcctgcaacgcacttgcaggaggtgaaacagtgtatctga

SEQ ID NO: 141834 - DNA, 324 bp, Enterobacter cloacae
atgggttttccatcaccagcagcagactacgcagaacatactctcactatcgccagcctttacggctatgacggcaactgccgaaccatcgaaacatcagccgggtacgcgatcataaacgtcaccagaaatccggaagtgggtgacaccgtcctgatttcgttctgcggcagtctggatttcgcaaaagtccaggggaaagcgctgatcactcaggatggagaggctatcgagggcgatgcgctggacgatgcaaccgtaatgggcgtagtaacgcacctcctgaatcgtgtgacagataccgacaatcggcctgtgatttag

SEQ ID NO: 141835 - DNA, 168 bp, Enterobacter cloacae
atgaatgagcaagaattaatagctgccgttcgccccgctggacgttatgaggtagtgaccaatgacgatggttcttttatcgtgatacctatcccgctcgaagcaatactgattacccgcgaatctctcctgcagcatgctgagcgcttccgcaaccctgacaactga

SEQ ID NO: 141836 - DNA, 294 bp, Enterobacter cloacae
atgaagaaagcagatagcctccatctttcgcgtgtggccgcactgggctgcatcgtgtgcagaaaccagaacctgggcgagacgcccgcggaaattcaccatatccgaaccgggcagggcacaagccagcgcgctgaccatcgaaaatcaattcccctgtgccatatgcatcatcgcaacggcggttatggtgtggcgattcatgctggccgcaagcaatgggagagaaacttcggtaccgagttgcagctgctggagcaggtccagttagagctgggggtgttctatgcctaa

SEQ ID NO: 141837 - DNA, 1962 bp, Enterobacter cloacae
atgaaaatagttatgcaatcatcatatccatacaaagcttttagccttcctgagcctgtagaacttgaaggttttttgagcgtcataactgggaaaaacggctctggtaaaacgaggcttttagaaagcatacaaagcaatcatctacaagtttacattgatggcgaattgctatccccagaaaaaatatctctgatagacattaataattctagtcaatccatacttaccccacattatttagttgacgcatctaaattattagctgcatatgtatacaagttaatacccgattatctttctagtgaatctcttccagaaatcatgcctttttccttctaccctgaatcaagaagagaaaaccaagatcactatcatttaaaaaaaatagttcaaaatgcagagcatcttttcaaaaaagaaatgcataagcttatccatatagagctagagttttcaattttactttacaaggaagtaatcaatagccgcgcacagcgctcacaagccagcctaagtgaattaacagtaatttactatcagacattagataaatatgagtatcttaaatttaaaattgataaagatccgcgtttaaaccagccagacgaagagataatcaaaagattcctttcagaagagagtccaccagagatatttaatagaattatagaccatctttttagaggtaagtatgtagtatcactgcctgacattgatcgcgcacatttaagttacactcccaatctagcgttaaagaatagcaatgaaataataaacaacaccgatctctcatctggtgaaaaaaccatattttggctcgctgaaaaaacattttacgcaacaaatatatctctaagcacaacatttgaaggtaaatcactgattttgatagatgaaccagatgctcatcttcaccctcaaatggtttatgatttttataactgcctaataaatctaaataaagaacttggagttgctttcattttcactacacactcccctaccaccatcgcattatgccctaacgagagtattttcaacttatcttatgatgttacagaaaacaattacagattatttaaaaccgaacgtgatggttcaatctctcagttattagaaggggtatctcagatttcggtaaatccagaaaattgtcggcaagtatatgttgaaaactcaaatgatagctatatttatgaaagattatatacatcaataaaaaatcgttctacattgataaattcagatattaacttatcctttgtaagtgcaggtcctaaaattgcagatagcgaattaattaaacatatcgaatgtgtttatgggaaaaatgatagcgttaaaattctcttagagagaataaatggcgattcaaattgtcaacaggttataggaatggttgagcatttgtcgtcgcgaggtaataaaaccgtgcgagggctaattgactgggataaccagcagcgccaacacaatgataaaattgttgtctttgcacagaattacgcctattcaattgaaaatattgtatatgacccaataagtatttatgtatatttagttactaatgatataaaaaaaccaaatcatttccttgatgtaagcgaagattttttttggagggactctcttgaggacaatgagcagatacaaaccattattgacaaaataactgaggaactgattggtcgacccaataacagggattatgatattgaatacatgaacaattcaattttcaaaggtgatagagaatatttcattcctcaaaaaggtatgaacggacatgatttcgaaaaaatcatacaaaagaaataccctgcaattaatagattaatatcgcaaacaagtggaagaccattaatatatcacttcacaacaaaagtcactttgagttcattaggttgggaattcgttaataaaatatttgaaaaaacatttgttcagcttcaaaagtaa

SEQ ID NO: 141838 - DNA, 561 bp, Enterobacter cloacae
atgattcacacagtgcattttatgacagatgtaagcgttcaatcagttacaaacctgatggacgtttgtttaaaggcagtttctaatacaactcaaccagccacagagctgagaatttacatctcaagtaaaggaggcgataccgtggcgggcttcacggcttataactttcttaaatcccttggagtgaaaattaccactcataacttaagcaatgtcgaatccatagcaaacgtaatatttatggctggatctgagcgttttgctaaccctttatcgagattcctcttacacccgttgcattggggatttgcagccccccaagccgatcacctcagattaaaggaatgggcggcatgtctggatgatgatttgcaacggtttgtacagatcatgaataccgaagctgtgccaggaaacctaagcgaacaaagagattggaagagtttgattacctccgcaacgattctcgacccgaaaagagctactgagctaggtattgtgagccaaacaacaacagcaatcttacctaccaattcgattaggtggtgggttatgtaa

SEQ ID NO: 141839 - DNA, 924 bp, Enterobacter cloacae
atggaaaaaaatggtctgttcagtcagcgcatacgcttgcgccatttgcatacatttgtggccgtcgctcaacagggaacgctggggcgtgcggctgaaactcttaacctgagccagcccgcgctctcgaaaaccctcaacgagctggaacagcttaccggcgcccgactttttgaccgcggtcggctgggggcgcagctaaccctcgtcggcgaacagttcctcacccacgccgtcaaagttctggatgcgctcaataccgcaggccagtccctgcaccgaaaagcagagcaggccagcgaggtcgtgcgcgtgggagcactccctaccgcggcgctgggcattcttccaccggtcatcggccagttccacaagcagcagcggcataccaccattcaggttgccactatgaacaacactatgctgctcgcggggctgaaatcgggcgagctggatctcggtatcggccgaatgtccgacccggaactgatgggcggtctcaattacgaactgctgttcctggaatccctgaagctggtggtgcgtcccgatcaccctcttttgcaggataccgtcacgctaagccgcgtcacggagtggcccgttgtggtttgcccgaaaggaaccgtcccgcgccaggccgccgaaacattgctgcagatgcagggatgtacgctgccttccggctgtatcgaaacgctttcggcctcgctttcacgccagctcacgctggactatgactacgtctggttcgtcccctccggggcggtgaaagacgatttgcgtcagggaacgctgaccgccctgccggtgaccgcccccggcgccggtgaacctatcggcattttgacccgggtggataccccgctttctgttggtgcgcaaacgctgctgagcgccattcgtaaatcgatgccggtctga

SEQ ID NO: 141840 - DNA, 363 bp, Enterobacter cloacae
atgaaaaaaataatgatgcttgcgcttctcgtggtcgccgttggggcaaccgccgggtttcgctatatcaacgatgatgaaccggaatatattcactctgcagaagctcgcgtagggtcttatttaaccagcgattacggtcacgtcgactgtaatagcaccaaaattaatgacgaacgctgggaattaggctgtacccacaaagctcgcggaaaaacattccagtttgccgtatatccgtctgaaaaagcaccgtatggcgtttcgcgctcgttttatcttgaggccatcaatgatgacgccagagagagtgcggagcagggcctgatgcgttatctgcaaattaatacccaggcaggttaa

SEQ ID NO: 141841 - DNA, 471 bp, Enterobacter cloacae
atgattatcggacatctcaacgccctgccgctggcagggctcccgccggcgctgtacgccctgctttcgcgcccggactgcacgcttaaggcgcttatcgaacgcgatgacgggcgctggcaaccagacgatgcaccatggttttgccacgtcggcccggcgcaaacccagccgcgtgccgagcggcacacggagtatcatcatcagtgggcggatatccaaatcgtgttagccggtgaagagcacatatacgctggcgcgcttcccgcaggccggccgggggacgaggagcgcaagccggatctttttattgcttcatccgccgaacacagcgtgaggatccgcctggccgcgggcgactttgcggtgttttgtcccggtgaacctcaccaggcgctgtgcgccgcagaggcaccgatgaccgtgcgcaaagcggtgtttaaaattccgcgcgcgatgctggaggtctga

SEQ ID NO: 141842 - DNA, 885 bp, Enterobacter cloacae
atgcgaaacacaatcaggggcgtgctgacggccatcgtgaccccctttgacgcggaaggcgcgctgaatctgtctggccttaaacgacagatcgaccgtcagctcagcgcgggcaacggcatcttctgcggcggcaccaacggcgagttcttcgtgctgaacgaagaggaaaaaatcgccgtcacccgtacctgtgtcgaaacggtggccgggcgcgccccggtcgtggcgcacattggggagatctcaacccgcgacaccatccgtctggggaaacagatcgccgccctgggcgtcgatgccgtatccgtcattaccccttacttcgtgccgctgaagcaggctgaactcgtcgcgcactacaccgcaatcgccgacgcgctggccgtaccggtatttctgtacaacataccggcgcgtaccggcaacaccatagagcctgccaccgcacgcgcgctggccgaacatcccaacatcatcggcatcaaggacagcgccggaagctacgagagccttcgcggattcctcaatgcggtaagcgacattgacgggttcgacgtgctcaacggtccggactcgctgatccaccagggcttcgttgacggctgttcggcctgcatttccgggctggcgaacgtggcgcctgaggccatcaacgccatctggtcccgctttaacgcgggtgatattgagggttcccgcctggcacaggagagcgtcacgcagctgcgcaccgatctgtacagcgtggcgttttcgcctgccgccgtcaaaaaagcgctgcagctcatgggagaagaggtcggcgaaagccgctatgccgtggcgtttgacgataagcagcttgcagagatacgccgaatagtgacaacgtcacgcatttaa

SEQ ID NO: 141843 - DNA, 1218 bp, Enterobacter cloacae
atgaaagtgaacaatctgtacagagaggtggtagtcgtcgcggatgactttaccggcgctaacgatgccggcgtcagcctggcgctgtgcggcaaaaaagtcagcgtggcgtttcatacgccttttacccagccgaccgatgcgctgatcgtcaacaccgattcccgggcgctgcgggcatcgcaggcggcggaaaaggtggccgcgctcggggcggatatcgcaaatactcgctggctcatcaaaaagatggattccacgctgcgcggcaacgcgggggcggaagcacaggccctgaaggcgttaagcggcaagcgtcaggcgatcgtggccccggcatacccggcggcagggcgcatcacgcggcacggcaggtgtctggtaaacggcattccggtgaatgaaaccgaatttgccagcgatcccaaaacgcccgtcccgtctgccgctatagctgacctgtttagcggcgtgagcgttaaaaacgtgaccgtgaaaacgctgacagccgaactggcgcagggaacggagtggatcatcgttgatgcgcagaccgacgaggagctggacgccattatcaccgccgcgctgggctgcgcgcagaccccgctgctggtgggctcggccgggctgtgcgatgcgctggcccgccatctggccccggcccgacgcaaacagctgctggccgtggtgggctcaatgagtgagatcgctcaacaacaaattacgcgggctaaaggtatgacgggcgtctcgtcgatatttatcgatgtgaatgacgctttgcgcggcgacgcggccagttatatcgaagaaattgcgcgggtgctccaggctgggcatcactgcatcgtacatacctgcgcgggcctcgaggctcgccatcaggtggagcagctctgcctgcagcatcacgtcacccgcgcgggcctgggcgaaaagatctgtacgtttttaggcgagctgacccgacaggtgcttgcggtgcaggagccggacgcgctgtacgtctccggtggcgatgtggcgatggccgtcgcaagggcactggatgcccgcgggtttgaaataaccgggtgcatcgcacggtgcgtaccggtcggacaatttctgggctgtagctggcagcggccggtaatgaccaaagcagggggcttcggaaaggaagagacgctgcttgaggttttgcattttatcgaggagagactgagtgactaa

SEQ ID NO: 141844 - DNA, 588 bp, Enterobacter cloacae
atgagatttctgagatttttaaccggacgtgttttccaggatctcctgcagcatggcaaagagatagaagaggctattgctcatcgtgatacccgtcttttgaaacattccacccccgagatggaacagtatttttctcgtcccctcggcgagcttccgcgtcaaaatccttacccggtagcagcgctgttacctctgtttttagtggcgtttgcgttaaatctgctgccttttctcagcgcgttgcgggggttgtcacctttacaccatgcactgagctttttcgtaccatcattattaatgacaggcgcgctcattgttatcagcgtgcttctggcccgagggaagacgtcgggattgttggggtttatggctgtgttcatcattctgctggtcatgactctcgttcaggcgctgcatctcctgttttctcacgacggaagcctttggccactggccattgcatgcttcgcgctgttactttgtcgggtagtgatgaacagctgcggctttgtgctgtttaccctctactgtcgcactcagcggcttgccagactggcacgtgaaatccggttaaatagccgttaa

SEQ ID NO: 141845 - DNA, 354 bp, Enterobacter cloacae
atgaacaaacttcttatactcttccccgctctgtgcttaagcggctgcgtggatttgggtaaaattggaacgcatccggaagtggcttccttctatatcaatcatccaaaaagccaggttgcagattgcctcatatacgcatcagccagagaacatttatcgctggaatttgatgatatccttcctgacggtagcgaaagatatgatctgcaggatagcaattctaccgatgttgcctgggtcgaagtcagtaaattcagcggaaaacagacttccgttgaattttattatgcgcctcaggatcctgggttgcataaatcaattctgtctatagtggatcagtgtaaaaaatga

SEQ ID NO: 141846 - DNA, 1782 bp, Enterobacter cloacae
atgataccttgcagttcgtcatctattttgatgcagattcagccaaccattcaacgttttgcccgcatgctctccagcgtactccagcttgaagttgagattgtcgataataccctgtgccgcgtggccggtacgggaagctacggtaaattccttggccgaaaattaaatacagactcgcgacttcttcgttacattattgaaacaaaaaaagagaaggtggtgacccattcgcgtttcgaccccttatgcaaagggtgtgagagtaaagaaacctgcaaagaaaaggccttcctgggtacaccggtgatttatcaggaacagtgcgttggcgttattagcctgattgccctgacgcgcgagcagcaggaaagaatcaatgataacatcaccgagttttccgattatgttcgtcacgtctcttcaatatttgtctcccgtttacttgaggatcagagcggcggcgacaatatccagaaaatgtttttaacgatgcttgacaatatggaccagggtgtactggttgtcagtcaggagcagaaagtcaaatttgttaatcaggcagcgttaaaaatccttggtgtgagccaggggaatatggtgggtaaagagattcactttcggcctctgacgttcgcgcaaaactttattcgcggtcacgttcagcacgtcatttctattgatgataagaaagagcttattatcggtcagctgcatgccattcaggatcagtggctgtttctgatggcgtttcatcaatcacactcttcggcagagattaccgcgccgcaggaagggccgcagattgaacagatggtcggcgagtgtcgcccaatgcgtcagttgaaaaagctgattacccgcgtggcgcccagcccatcaagcgtgatgattgccggggaaagcggaaccggtaaagaggtggttgcgcgtgcggtgcacaagctgagcgatcgcaaagataagccgtttattgccatcaactgtgccgccattcccgaacagctactggaaagcgagctgtttggttatgtgaaaggggccttcaccggcgcgtcagccaacggtaaaacggggctgattcaggccgctaaccatgggacgctgtttctcgatgaaattggcgatatgccgctcactctgcaagccaagctgctgcgggccattgaatcgcgcgagatccagccggtcggggctagccatccggtaccggtggatattcgaattatttccgccaccaatcaaaacctcgatcggtttatcgccgacggtaagtttcgtgaggatctctactatcggcttaacgtcattccgttacgcctgccgccgctgcgtgaacgtcaggatgatattgaactgctgattcactatttcctgcatctgcatacccgtcggctggaactggtgtacccgggcgtagcgccggaggtgattacgctgctgaaaagctaccgctggccgggtaacattcgtgagttgagcaacctgatggagtatctggtcaacgtggtcccatccggcgaagtgatcgatatctcgctgctgccaccaaacctggtgagcagcggtaaaaccggcgaacgcgaaggagcggcagggacaacgggaggcagagtcgcaaaagaggaggagggtgtaaccgggcttgaagagatggaacggcagatgatacgcgatgccctaagccgttatagcaacaagaaacaggcggcagacgaattgggtatcgggattgccacgctgtatcgcaagatcaaaaaatacgagctgaccgttagctaa

SEQ ID NO: 141847 - DNA, 1188 bp, Enterobacter cloacae
atgaaaactgttaacgaactgattaaggaaatcaacacgctgaattcgaatctgcatgagaaggattttctgctgacatgggaacagtcgccggatgaactcaagcaggtgctggacgtcgcggaagcgttaaaaacgctgcgtgcggaaaatatcgccaccaacgtgttcaacagcgggctgggaatttcggtattccgcgataactctacccgtacccgcttctcctatgcctcggcgctgaatctgcttgggctggcgcagcaggatctcgacgaaggaaaatcgcagattgcccacggtgaaacggtgcgtgaaaccgcaaatatgatctccttctgcgccgatgctatcggtattcgtgatgacatgtatcttggcgcgggtaatgcttatatgcgtgaggttggcgaagcgctggatgatggctacaagcaaggcgtgctgccgcagcgtccggcgctgattaacctgcaatgcgatattgaccaccctacgcaggcgatggccgatctggcgtggttacgtgaatacttcgggtcgctggagaatcttaaaggcaagaaaattgctatgacctgggcctactccccaagctacggtaagcctctttctgtgccgcagggcattattggcctgatgacccgtttcggtatggacgtcaccctcgcccacccggaaggctacgacctgattcctgacgtgattgaagtggcgaaaaacaacgccaaagcgtccggcggcagcttccgccaggtgacggatatggcggaagcctttaaagatgccgatatcgtctacccgaaatcctgggcgccgtatcaggtcatggagcagcgtactgagctactgcgcgctaacgatcgcgacggcctgaaggcgctggagaaagcctgcctggcgcagaatgcccagcataaagactggcactgcaccgaagagatgatggcaaaaacccgcgacggcgatgcgctgtatatgcactgcctgcccgcagatattaccggcgtctcctgcaatgaaggcgaagtcaccgaagccgtgttcgaaaaataccgtatcgccacctacaaagaggccagctggaagccgtacatcatcgccgccatgatcctctgccgtaaatacgcgaagccgggcatgttgctggagcaactgctggccgaagcgcaaaaacgcatcaaatag

SEQ ID NO: 141848 - DNA, 1200 bp, Enterobacter cloacae
atgtctgctttctcactgaaaatggatattgccgataaccgtttttacaccggcgaaacgtcgccgctgttttctcgccagcctgcgcaacaggcgcgccgttttcatcaaaaaattagcggctatcagccgacgccgctatacgcgcttaatgatctggccgccctgttcggcgtgagcaaaattctggtgaaggatgagtcgcggcgttttggccttaacgccttcaagatgctcggcggttcttacgcgattgcgcaattgctgtgtgaaaagtatcagctggatatcaacgaactgtcgcttgacggcctgaagtcacgcattaaagagaaaatgaccttcgccaccaccaccgacggtaaccacggtcgcggcgtggcgtgggcagcgcagcagcttggccagaacgcggtgatttatatgccgaaaggttcggcgcaggaacgcgtggacgccattttacgcctgggcgcggaatgcatcgtcaccgacatgaactacgacgacaccgtgcgcttcaccatgcagacggcgcagaaaaatggctgggaagtggtccaggacaccgcatgggagggttacaccaaaatccccacctggattatgcagggctacgccacgctggctgatgaagccgtcgaacagatgtcggcaatgggcatcgcccgcccgacgcacgttttcttacagggcggcgtgggtgcgctggccggcggcgtactgggttatctggtcgacgtttacggcgcggataacctgcattccgttatcgttgagcctgaactagccgactgtctctaccgctccggggtgaaggggcaaatcgtcaacgtcggcggcaatatggccaccatcatggcggggcttgcctgcggtgaacccaacccgctcgggtgggacgtcctgcgcaactgcgccagccagtttatctcgtgtcaggacgcggtctccgcactcggtatgcgagtgctgggcaacccgatcggccacgatccgcgcgttatttccggggagtccggcgcggtcggccttggcgtgctcgccgccgttcactaccacccccagcgcgatgcgctgatggacaagctgcagctggatagccgctccgtcgtgctgatcgtcagcacagaaggcgataccgacgtgaagcattaccgggaaatcgtctgggaaggcaagcatccggctgcgcaataa

SEQ ID NO: 141849 - DNA, 1218 bp, Enterobacter cloacae
atggctaagcatattccttttaaactgattgttgataaagccaaccactaccagcaggacatgacccgctttctgcgcgatatgatcgccatcccaagcgaaagctgcgacgaaaaacgcgtggtgcaccgcatcaaagaagagatggagaaagtcggcttcgataaagtggaaatcgaccctatgggcaacgtgctgggctatattggccacggcccgcgcctggtggcgatggatgcgcatattgataccgtaggcatcggtaatatcaaaaactggagcttcgacccgtatcagggcatggaaaccgacgaacttatcggcgggcgcggcgcgtcggaccaggaaggcgggatggcgtccatggtctacgccggaaaaattatcaaagatctggggctggaagatgaatacaccctgctggtgaccggtacggtgcaggaagaagactgcgacgggctgtgctggcagtatattatcgaacagtccggtattcgtccggagtttgtggtcagtactgaacccaccgactgtcagatttaccgcggccagcgcgggcgtatggaaattcgcgtggatgtttctggcgttagctgccacggctccgcgccggaacgcggcgacaacgccatcttcaaaatggggccgattctcaacgagctgcaggatctctcccacaggctgggcaacgacgaattcctgggtaaaggcaccctcaccgtctcggaaatcttcttcacctcgccaagccgctgtgcggttgccgacagctgcgccgtttccatcgaccgtcgtctgacctggggtgaaacctgggaaggcgcgctggacgaaattcgcgccctgcctgcggtgcaaaaagccggtgcggttgtctccatgtacaactatgaccgcccatcgtggaccggtctggtatatccaaccgaatgctacttcccgacctggaaagtggaagagaatcacttcaccgtgcgcgcgctgagcaacgcgtatgaaggactcttcggcaaggctccggtagtggataagtggaccttctccaccaacggcgtctcaatcatgggccgtcacggcattccggtgattggttttggcccgggtaaagaacccgaagcccacgcgccaaacgaaaaaacctggaagtctcacctggtcacctgcgccgcaatgtatgccgctattccgctgagctggctggccaccgagtcactgtag

SEQ ID NO: 141850 - DNA, 1407 bp, Enterobacter cloacae
atgcgcgtactgattaaaaacggcaccgtcgtcaacgccgacggacgagccagacaggacctgctgattgaaaacggcctcgttagccagctggccgataacatcaccgttgaacaaccctgtgaaacgatcgacgccagcggttgctacgtaatgcccggcggcgttgatgttcatacccatttcaatattgataccggcctggcccgcagctgtgacgatttctttaccggcacccgcgcggcagcctgcggcggtacgaccaccatcgtcgatcatatgggatttggcccggcaggctgccgattacgtcaccaactggaaacctatcgcggctacgccgcctacaaagcggtgattgactacagctttcacggcgtcattcagcacatcaaccacgccattctcgatgaaattccgatgatggtcgatgcggggatcagcagctttaagctctatttaacctaccagtacaaactgagcgacgacgatgtgctgcaggcgatgcgtcatctgcacgccgcgggcgcgctcaccaccgtacacccggaaaacgacgcggccattgcccttaaacgctctgagtttctggctcagggaaaaaccgcgccccgctatcacgccctgagtcggccgctggagtgcgaggcggaagctatcgcccgcatgattaacctcgcgcagctcgccggtaacgcgccgctgtacattgtgcacctgtcgaacgggctggggctggaatatctgaagctggcgcgttcacgtcatcagccggtatgggttgaaacctgcccgcagtatctgctactcgatgagcgctgctatgaacgcgaggatgcgctgaagtacctgctcagcccgccgctgcgcaacgccagtaacaatgacgcgctgtggtgcggggtgagcgacggttcgatcgacgtgatggccaccgaccactgtgccttttcgatggcccagcgtcagcatttatcgaacggcgattttagccgctgcccgaacggcctgccgggggtagaaaaccgtctgctgctgctgttctcccacggggtaatgaccggacgcatcacgcccgagcattttgtggcgcttaccagcgccaacccggcgaagctgttcggcctgtggccgcaaaaaggcgtgctggcgccgggcgcggacggcgacgtggtgattatcgacccgcgccgcaccaccaccattcgtcacgaaatgctgcacgacaacgccgactattcaccgtgggaagggtttatctgtcagggctccattcgccagacgctgtcgcacggccgggtgattttcagcaacgggacctttagcggcgtcgccggacagggccgtttcctgcgtcgcgcccctttttcttccgctccgatccccatgagcggaatatcatcttaa

SEQ ID NO: 141851 - DNA, 933 bp, Enterobacter cloacae
atgagtaaaaaaattgtactcgcgcttggcggaaacgcgctgggcgacgacctggccgggcaaatgcaggcggttaaacaaaccgcgcaggccatcgtcgacctgattgctcacggccaccaggtggtggtgacgcacggcaacggcccgcaggtagggatgatcaacctggcctttgaagcggccgccaaaaccgatgcccataccccgatgctgccgatgtcggtgtgcgtggcgctgagccagggctatatcggttatgacctgcaaaatgcgctgcgcgaggaactgttgtcgcgcaatatgcatattccggtcgccacgctgattacccaggtggaagtcgacgccaacgatccggcgttcagcaacccaaccaagcctatcggctccttctttagcaaagaagaagcggaacagctggccctgaaaggcgatatcctgaaagaggacgcagggcgcggatatcgtcgcgtggtcgcctcgccgcagcctgtcgatattattgaaaaagagacggtgaaggcgttgatagatgcctgccatgtggtgatcgccgccggcggcggtgggatcccggtgatccgcgaggggaatcatcttcgcggcgccagcgcggtcattgataaagactgggctagcgcgaagctggcggcgatgattgatgccgatatgctcatcattttgaccgctgtggagaaagtggcgattaactttggtaaacccaacgaacagtggctggataaactcaccttaggcgatgccgaccgttttattgccgagggccactttgccaaaggctctatgctgccgaaagtggaggccgcagcctcctttgcccgctctcgtccggggcgtaaagcattgattaccgtattgagcaaagcgaaagaaggtattgaaggaaaaaccggcacgattatcgaagggtaa

SEQ ID NO: 141852 - DNA, 1626 bp, Enterobacter cloacae
atgaatattttctcagaagcggcaagactcgaagcacaaaaccgcccgttcgcgctggcacagatcgtcgacagccgtggttccactccccgacattccgcacagatgctggttcgtgatgatggcagcattgtcggcaccatcggcggcggcatggtcgaacgccgggtgattgatgaagcgcttgatgccctgcgtgaaaaggcctcgcgcatgtttcatggccgaatgacgcgcaccggggccgatgcggtaggctcggactgcggcggcgcgatgtcggtgtatatcagcgttcacgggctgcgtcccaggctggtgttgattggtggcgggcacgtgaatcgcgccgtagcgcacagcgctgcgctgctcggttttgagctcgcggtagcggatatttatccggaaagcctcaatcctgaacgtttcccgccgttcacccagctggtacacgccgagagctttggcgcggccgtcgataagctggccgttcagcctgataactatgtcctgatcgccaccaataaccaggatcgcgaagcgctggataagctggccgtactgcctaccgcctggctggggctgctggccagccgtcgcaaggtacaggtgtttttacgccagctgcgcgaaaacggcgtcgcggaggagcatatcgcccggctgcacgcgccggtgggctacaacattggcgctgagacgccgaatgagatcgccatcagcgtgctggcggagatcttacaggtcaaaaataacgcgccgggcgggctgatgatggccagcgactctcccacgcagccgctaagggtagccattcgcggggcgggggatattgcgacgggcgtggcgctgcggctgtggcacgccgggtttaaagtggtgatgctggaggtggagaaaccgacggtgatccgccgtaccgtggcctttgcccaggcggtttttgacggagaaatgacggtagagggcgtgaccgcgctccgcgtcgattccgtccaggaggcgattcaggtagcggataacggtgtgattcccgtgttggttgatccgctctgtgaatcgctgcgcgagctgaatcctggctgcgtggtcgatgccatcctcgcgaaagaaaacctgggtacccactgcgggctggcgccgtcggtcattgcgctggggccgggcttttgcgcgggtatcgactgccatgcggtgattgaaaccaaccgtgggcactggctgggtcaggttatctatcagggccgcgcgcaggacaacactggcgtaccgggtaacattatggggcatactgcaaaacgggtgatccgcgcgcctggcgcgggggtgatgcgctcgcgcgtgaagttgggcgatatcgtcgaagagggcgaggtgattgccaccgtcggcgagacggagattcgggcaccgctcagcggcatggtgcgcgggctgctgaacgacggtctggtggtagatagtggttttaaaatcagcgatattgacccacgcggcgataaggctgactacaccagcgtatcggataaggcgagggcgattggcggtggcgtgctggaggcgctgatgatgctgacaaaccagcgtattaaacagcaaaatcgtcgcccggttgaggcgtaa

SEQ ID NO: 141853 - DNA, 768 bp, Enterobacter cloacae
atgcgcaacatggaaaatataccgcacgctgacgagctgttatgtgatttaaacgccactgccggccctttgctgatcgccgccgtgggagcaggcggcaaaaccagcaccttgttctggatggcagagctgtttcagcaggcggggaggcgcgtgttgctgaccaccaccacccacatgtttgtcccccacacgctgcctgtgaccctctgtcgcgacccgcaggcgctgcccgccgcgttctggcagcggccgctgcaggcgtgtttttccgcctggctgccggaagcgggaaaggtcagaggcttcacgccagcgcagctggatacgctcatggcgagcggccagccggacatcgtgctggtagaagctgacggcgctcacggttttgcacttaaagcgccggatgtgcacgaaccttgcatcccttattcctgttgttgcgtagttgccgttaccggagctgagatgctcgggaaagcaattgggccagccgccgtccaccgctggccacttttttcccgcatcaccggcgccacggcgcatgacgcgctgacgtggccgatgctgcatcgcctggttcagcatccggaaggggcgtttaaaggcgcgccgacgggctgtcggcgtatctggctgctcaaccggctttctcaaaatgagaatttgcagcctggcaatttgataatgagaaacgacgtcgacgctatctgggccggttcggtccagtcgcgtccggctattacgcgcagacgagtgagaaagtga

SEQ ID NO: 141854 - DNA, 585 bp, Enterobacter cloacae
atgcaggtcgattgtattattaccgccgcggggttgtcctcccggatggggcaatggaaaatgatgttaccctggcaaggtggcacaatacttgatacaagtattaaaaatgcgcgacgctgctgctcgcatattattttagtgaccggatttcgccatcaagagttaatggcgcgttattcatcggtcccgaacatgacgctcgtttataatcctgacttccgccaggggctatattcttcggtaaaagcgggtcttcaggcattacgtcatgattattgttttatcacccacggagacctgccgtgccttgacgatgctattttttatggcctgtgggaacagcgcttcgaaggcacgctgatgccctattacggagggattccggggcacccgatcctcacatccaccagcaatttgcggcgctgtttaagcggagaacagcagacatcggtacgccagtcgctgcttaccggcctctgccgacagatcccgctcaataatccagcgatcgttctcgatattgatacgccggaagattatagccgactcaataagggtgaaaataaagatttgcgcaaatga

SEQ ID NO: 141855 - DNA, 3072 bp, Enterobacter cloacae
atgggcgatatcatgcgtcccgttccgtttgaggaactcttaacgcgtattgttgatgaataccagaatcatcgttccatctttggtattccggagcagcagttttattcagcgcacgccccgcataaggtgagcgtatttggtgaaacctgcgccacgccgattggcccggctgcgggtccgcatacccagctggcgcaaaacattattacctcctggctcaccggcgggcggtttatcgaactgaaaacggtacaaatcctcgatcgcctggagctggaaaagccctgtattgatgccgaagacgaatgcttcaacaccgaatggtccaccgaatttaccctgctgaaagcctgggatgagtacctgaaggcgtggtttattctacacctgctggaggagatcctgccgctaacgccggtcaaaaacggtaagtcgtttatcttcaatatgagcgttggctataacctcgagggcattaaagagccgccaatgcagcagtttatcgacaacatgatgaacgcgggttcgcagccgaaatttgcccggtatcgggacacgctggaccgctggctgcgactgcatcacccagaaaaagccgcgctggcgagccgcattccggcaaaactggttcagggcgtgacgctctctacgatgcacggctgccccccggatgaaattgaagcgatctgccgctatatgctggaagaaaagcagctgaatacctttgtgaaactcaacccgacgctgttgggcttcaagcgggttcgtgaaattctcgatacctgcggctttggctatattggtctgaacgaagcgtcgtttgaccacgacctgaaaatcgaccaggcgctggcgatgctcaagcgcctgatgtcgctcgctaaaagcaagaatctgggcttcggcgtgaagttaactaacacccttggtacggtgaacaacaaaggcgcgctgccaggcgacgaaatgtacatgtccgggcgcgcgctgttcccgctgtcgatcaacgtcgccgccctgctgtcgcgcgagtttgacggcaagctgccgatttcttattccggcggcgcgagccagctcaacatccgcgatattttcgagaccggcattcgcccgatcaccatggcaaccgatctgctgaaacccggcggctacctgcgcttaagcgaatgcatgcgtgagctggaacaggccgacggctggcagatgacgcaggtcgacgttaagcgcctgaacgcgctggcggaaaaagcggtcagcatggcctatacccagaagcactggaaaccggacgaccggattgatgtgggtgaaacgctgccgttgaccgactgctacgtcgctccctgcgtcagcgcgtgtgctatcaagcaggatatccccgagtacattcggctgatgggcgaacagcgctacgttgacgcgctggagcttatctatcagcgcaacgcgctgccggcgattaccggccatatctgcgaccatcagtgccagtacaactgtacgcgcctcgactacgacagcgcgctgaacattcgtgaactgaagaaaatcgctctcgaaaaaggctgggatgaatatcagcgtcgctggcataaacccgccggttcaggcacccagcacccggttgcggtgattggcgcgggacccgcaggtctggccgcggggtatttcctggcgcgcgaaggttacagcgtcacgttattcgagcgcgaagctaacgccggcggcgttgtgcgtaacattattcctcagttccgtatccccggagagcttatccagcaggatatcgactttgtagtgagtcacggcgtcaatattgtctacggctgcgacccacacctgacggtggaaaagctccagcagcagggattccgctacgttctggtcggcaccggcaccgataaaaacagcggcgtgaagctccagggtgataacccgaacgtgcgtaaatcgttgtccttcctgcgtgaatataaccggggcgataacctgcagttaggtaagcacgtggctatcgttggcgcggggaataccgcaatggactgcgcccgtgcggccttacgcgtaccgggcgttgagcaagcgaccgtcatctaccgccgttcacagcaggagatgccagcctggcgtgaagagtatgaagaagccgtacacgatggtgtcaccttccgcttcctgaataatccagagcgattcgatgccgacggtacgttaaccgtacgcgtaatggcgctgggcgatatcgatgaaaaaggccgtcgccgccccgtagagacagcagaaacctgtacgctacatgtcgacacgttgattaccgccattggtgaacaacaggatggagaagcgctggccgcgatgggcattccgctggacgcgcgcggctggccggaggcgaacgccgagggtgaaacccgcaaaccgggtgtattcctgattggcgacgtacagcgcggaccgtcttcaattgtttccgccatcagcaacgcacgtcaggcaacggagacgattctggcccgggaaaatatccgcatccatcatagcgacaagcactggaacaaggttgatcccgctgaagtgtaccggcgtaaaggcgccattgtgatcgccagcgtaggcaaagacgatcgcgacgcgttcgtcgctcaggaagccgcacgctgcctggaatgcaactatgtgtgcagtaaatgcgtggacgtttgcccgaaccgcgccaacgtgtcgattgccgtccccggattcgaaaaccgctttcagacgttgcacctcgacgcctactgcaacgaatgcggcaactgcgcccagttctgcccatggcagggcaaaccgtataaagacaaaattaccgtcttcagcctgccgcaggatttcagcaacagcagcaatccgggcttcctggtcgaggggaaccgcgtccatattcgccagaacgctcaaacctggctgctgacgctcgacgacggcgggcagttcaatcagataccaccgcagctggaagccatgtgccgcatcatcagccatgtctatcgccatcatcattatcttctgggggccgttgaagtatga

SEQ ID NO: 141856 - DNA, 1335 bp, Enterobacter cloacae
atgagtcagctactgctaaaaaacgccactatcgcccaactctacccggcgatggtgcaggaaaatgtcgacatcgtaatcgaaaacacggacatcgtcgccgtcggacacgatcttggccatcaatacccgcaggcaaaaatcaaggagatgcacggcaggctggtgatgccgggaatggtctgttcccataaccacttctattcgggattatcgcgcggcattcaggccaatatcgccccgagcccggactttatctccacgctgaaaaacctatggtggcggctcgaccgcgcgctggacgaagagtcgctgtactatagcgggcttatctgcgccatggaggcgattcgcagcggctgtacggcggtcatcgatcatcatgcctcgccgaactacattgccggctcgctgagccagctgcgtaacgctttcgtgaaggtgggcctgcgcggcatgacctgctttgaaaccaccgatcgtaacggcggacagcaggagctccaggccagtgtcgaagaaaatatccgctttgcgcgcgaaattgaccgcgcgcgcgaagcggggaatgcgccatacctggtcgaggcgcatatcggcgcgcatgcgccgtttaccgtcaccgatgcaggtttatcgatgctaagcgaagcggtgaaggcgaccggtcgcgggctgcatatccacgcggcggaggacagctatgacgtctcgcatagccatcatcactacgctaaggatctgctggttcgcctggcggagtttgacctgatcggccctaagacgctgatcgcgcatggcctgtatctctccgacgccgatatcgccttactgaacgaacgcgacggtttcctggtgcataacgcgcgctctaatatgaataaccacgtgggctataaccacaagctcaccgcctaccgcaacctggcgctgggcaccgacggcatcggttccgatatgtttgaagagctgaagttcgcgttcttcaagcaccgcgacgccggtggcccgctctggccagacggctttgccagggcgctgagcaacggtaataccctgctcagccgcaacttcaacgcgcactttggccgtattgctgtgggatataaagcggatctcaccgtctgcgattatctgccgcctaccccgttagtggcggagaacatcgccgggcatatcgcctttggcatgagttcgggcaacgtgcacagcgtgatggtcaacggcgtaatggtctatgaaaaccgccagttcaccttcgactgcgagccgatttttgccgaagcgcgtaaggtggcggcgaagatgtggaaacggatggatgggctagactga

SEQ ID NO: 141857 - DNA, 465 bp, Enterobacter cloacae
atgaccagctttatcatggccaacccggcgtcctgcattggctgtcgcacctgcgagatagcctgcgcgctggaacatgccacagaacatgcggcgttcgcgccgcgcctgacggtgctgcgtctgaatacgcttagcgtgccggtaatgtgccatcagtgtgaaaatgccccctgcgtgggggcgtgcccggtgggcgcattaaccatgggggacgagcgggtggaagccggtgccgcccgctgtatcggctgtcagagctgcatggtggcctgtccgtttggcgtgattagcatcgaggtagccaaaaatcagtcagcgacgattgtgaagtgcgatctctgccacgggcgcgagcgcggcccggcctgtattgacgtctgcccaacggcagcattaagtaaaatcaccggcgaggcgctggcggaaatgcaaaagcagcgcaagataaccaccgcattctga

SEQ ID NO: 141858 - DNA, 1941 bp, Enterobacter cloacae
atgaaccgatttattgtggctgatgccacccgctgtattggttgtcatgcctgtgaggttgcctgcgtgaccgcccatcatcaggataactggccgctgcagcgccgcgatttcacgccgcgcattcaggtcgttttccaccgtaaagagagccgtaccgccacttgccaccactgtaacgacgcgccctgcgtggcgtcctgcccaacggaggcgctctatttcgctaacaacagcattcagctgaaccaggaaaaatgtattggctgtaagaactgcgtcatcagctgtccgttcggggctatcgaaatggtcgctgccaatgaagacgcgccgcagctggcgcagaaatgcgatctgtgcagcgaacaccccagcgggcaaccggcctgcgtggccacctgcccaacgcaggcgctgcgcctgatggatgagcaacagcttgaaaatatccgccgcgagcgccagacgcgtaccgtactcgggcagccggtgcagccgcgccagccgcggcttcgtgacatattcctcgctaaaccccctcgcgtcggggcgaaaaaggtcgacgccgcgctgcgcaaaacgcatttcgaggagatttactacggtctgggctgctcagaagcggaatatgagagcgaacgctgcctgagctgcgcgcagaaagcatggtgcaactggacctgcccactgcataaccacattcccgatttcattcgcctggttaacgaaggaaaaatcattgaagcggcggagctgtgccatcagagcagctcattgccggaaatttgtggccgcgtttgcccgcaggatcgcttatgcgaaggagcctgcacgctgaaaaacgaggggggcgcggtggcgattggcaatctcgaacgctacatcaccgacaccgcgctggcgatgggctggcgtccgcaggtggctggcgtgacgccgcgcaaggaacgggttgccattattggcgcggggcctgcggggctgggctgcgccgatgttctggtgcgtgcaggggtgcaggtggatgtctttgataagcatccggagattggcggtctgctgacgtttggcatcccgcccttcaagctggataaagggatccttggcatgcgccggacgatcttcagcgaaatgggcattcaatttcatttaaaccaggaagttgggcgtgatatcgactttaacgatttggtcgccaattacgatgcggtattcctcggcgtcggcacctatggcctgatggccgcgggactggaaggtgaagacgcacctggcgtgatccaggcgctgccgttcctgatcgccagcacccgcgaggtgatggggcttgaagagagcgcggagtacccgcttattgatattcaggacaagcacgtggtggtgctgggcggcggcgataccgcgatggattgcctgcgtacggcggtgcggcgcggggccgcgagcgtgacctgcgcctatcgtcgcgacgagctgagcatgcccggctctataaaagaggtggtcaacgcgcgggaggaaggtgtggaattccagttcaacgttcagccgcagtatatccagcgcaaccgtaaggggcaggtcagcgcggtcggcatgattcgcaccgacatgggagagcccgggccggatggccgccgccgtccaaggccgattgtgggctccggctttgagctacaggcggatgtgctgatcatggcatttggtttccaggcccacgatatgccgtggctacgcggccacggcgtacagctggaccgctgggggcaaatccgtaccggcggcagcggtcgcggcaccacgcaaaccagcaacgacaagatttttgccggcggtgacgcggtgcacggcgctgacctggtggtcacggcgatggtggcggggcgtcaggccgccagtgaaatgctggcgctgtttaacagcaaggagggggcatga

SEQ ID NO: 141859 - DNA, 1473 bp, Enterobacter cloacae
atgaaagattctgccattcctgcctcacgctcgacggcttcaacggcgccggtcgatgaggttttgccgataacgcaaatgattctctacggactgcagcacgtgctggtgatgtacgccggcgcggtggccgttcctctggtggtcggcaacgccgttggcctgcccgccgagcacatcattctattgattagcgccgatctgtttatctgcggcgcggcaaccatcgtccagtcgatggggattcgtccctggctcggctgccgtttgccgctgattcagggctgcaccttcgccgcgctgatcccgatggtgctgattggcaaagagtacggtatcggtgccatttccggctcggtaattgtctcggggatctttatcctctgctgcgcgccgtggattagtcgcctgattcgtttctttcccagggtggtgatgggcagtattgtcacgctgattggcctgtcgatcatgccggtggccggcgggtggataggcggcgggagcacggaaatgcaaggcttcggcgacctgttttccctgctgatggccgcgattacgctggtcatcattctcaacctgtacaccttcgccaccggagtggttaaaaacacggcggtgctgatcgggctgattattggcacaatcctctggagcttcttcaagccgctcgaccttcacctggtgaacgccaccccgtggctgcatctgccgacggtcatgcagtttgcccgccctgagtttcatatcgttcccgtcgccctgctgtccatggtcatggtcgtggtgatggtggaaaccatgtcctcgattatggccaccggcgatatcgtcggtaagaaagtggatgccaccatgttgcgcaacggcctgaacacctgcgggctggccaccaccatttgcggcttcttcaaccttttcccctatgccgcctttgcgcagaacgtcggcctgatcggcctgacaggcgtacgcagccgctttgtggtatcggtctctggggcgattctcattttgatgggcctgttctcgaaaatggccgcgctggtcgtgctgatcccaaagccgatcctcggcggcgccgggatcgtgatgtttggcatggtcgccgtctccggtattcgtacccttggccaggtcgactaccgtaacaataacaatggcatggtggtagcactgacgctgggtctgggcatgatgccggtcctggtaccgaacctgtttgcccagttcccgccgatgatgcagctgttcctccacagcggtatcaccatcgggacgctcacggcaatcgtcgccaacctgacgctcaacggcagcgtgccgctgcgtatctctcacgatattccggaacccgatccgctgccgccgagcgccgcggcgcgaaatatggcggtacgcaccgttcgtatgtggctgctgctgcgcaaggtccagaagggccaacagccacaacacagcgggggggaataa

SEQ ID NO: 141860 - DNA, 420 bp, Enterobacter cloacae
atgaaaaaagtgaccaccgtctgcccttactgtgccgctggctgcaagctgcagctggtggttgaggacaggcggatcgttcgcgccgaggcggcaatgggcaaaaacaaccagggtacgctgtgcctgaaaggctattacggctgggattttgtccacgatacccgcattctgacgcctcgcctgcaaacgccgatgatacgccgccggcgcggcggcaagctggaagcggtctcgtgggatgaagcgctggattacgtcgccacgcggcttagcgaaatcaaagcgaaatatggccctgatgccattcaaaccaccggttcttcgcggggtaccggcaacgaaaccaactatgtgatgcaaaaattcgcccgcgtggttatcggtaccaataacgtcgactgctgcgcgcgcgtctga

SEQ ID NO: 141861 - DNA, 1686 bp, Enterobacter cloacae
atgagcaatgccatcactgaaattgataacagcgaactggtgtttatcttcggctacaacccggcagattctcaccctatcgtcgccaaccatgtgcttaatgcgaagcgaaatggcgcaaaaattatcgtttgcgatccacggcgtattgaaaccgcccgcatcgccgatatgcacctggcgctcaaaaacggctctaatatcgcgctgttgaacgccattggccacgtcattattgcggaggatctttacgacaaatcatttgttgcccggcgttctgaaggctttgaggagtaccgtaacattgtcgaaggctatccgccggaatcggttgaagagattaccggcattagcgcacaggacattcgcgcctgcgcccgactgtacgccagcgcgggaacggccacgattttgtggggcatgggcgtcacccagttctatcagggagtcgaaacggtacgcgcactgaccagcctggcgattctgaccggcaatcttggcaaagcgagcgtcggcgtcaacccggttcgcgggcaaaataacgtacagggagcctgcgatatgggggccctaccggacacctatccgggctatcagttcgtaaaagtggccgaaaaccgcgagaagttcgcgaaagcctggggggttgagagcctgccggcgcataccggctatcgcatcagcgagctgccgcaccgcgcggcacagggcgaagtccgtgcggcgtacatcatgggggaagacccgctgcaaaccgacgccgagctgtcggcggtgcgcaaggcgtttgagacgctggagctggtaattgtgcaggacattttcatgaccaaaaccgcggctgcggcagacgtcatcctgccctccacatcgtggggtgagcatgaaggcgtttataccgccgccgaccgtgggttccagcgcttctataaagcggtggagccacagtgggatctgaaaaccgactggcagattatcagcgaaatcgccacccgcatgggttatccgatgcactaccgtaacacgcaggaaatctgggatgaactgcgccatctgtgtccggatttcttcggtgccacctatgagaaaatgggcgagctggggtacgtgcagtggccgtgtcgcgatgaatctccagcggataagggaacctcatggctgttcaaagatcgtttctccacgccagacgggctggcgcactttttcacctgcgattgggtagcgccgatcgacaaattgaccgaggaatttcccatggtgctctccacggtgcgcgaggtgggccactactcgtgccgctcgatgaccgggaactgttcggcgctctctgcgctggcggatgagccggggtatgcgcagatcaacaccgccgacgcggcgcgtttaggcattgtcgatgaggcgctggtgtgggtgaactcgcgtaaggggcggattattacccgggcgaacgtgagcgaacggccaaacaaaggagccatttacatgacctaccagtggtggattggcgcctgtaacgagctggtcacggaaaacctcagccccatcactaagaccccggagtacaagtactgtgcggtacgggtagaggcgattaccgatcaggcggcggcagagcgctacgttgcagaagagtatgcgaagctcaaagcgcggctgcgtgaatgcagcgagggtcacgcgtaa

SEQ ID NO: 141862 - DNA, 459 bp, Enterobacter cloacae
atgagtgtcattaaagtgaaggtcaacggcaaactggtagaagccaaaatcgaaggccatatgcgtctgctggatttggtccgcaacacgctgaagttaaccgcaacgaaggaaggctgttctattggtgaatgcggcgcctgtacggtgatgatggacggcaaagcggtctgttcctgtctggtgctggccgaacagtgcgatgaagcggaaatcaccaccctggaagggctgaacgacaacccgattacgcaaaaattacagcatgcttttgtggagaaaggcggcgtacagtgcggcttctgcacgccgggcgtgctggtcagtacgaccgcgctgctgcaggaagtgccacagccgagtgacgaacagttgaaagacgtgctggaggggaatatctgtcgctgcaccggctaccagccgattcttgattctatccgccacgcgttaaagtcataa

SEQ ID NO: 141863 - DNA, 3207 bp, Enterobacter cloacae
atgagtgctttgcgttcagcgtcgccagggcgcgtggatgggttggcgaaagtcaaaggaaccgccatatatggcgatgatataacactgccggatatgctctacggcgtttgtcgctatgcggatattcccgcaggaaaaatcgacgagctggatcttagcgacgcgctggcggtagacggcgtggtgaggattgccacctggcaggatatttccggcacgccggtggtgggcgttatcgttaaagattacctgccgatagtcaaagacgaggtggtctttcacggcgacgttatcgccgttgtcgccgcaaccacctatgaagcggcgtgcgaagcagccgataaaatccacgtgcgctacacgccgtatgcgccgctcaccgacgtggaagcggcgctggcgcccaatgcacggcgaattcacccggagcgcgacgacaatattgccgcgcatcaccacaccattaaaggcgatatcgaaaagggatttgctgactccctgcatatccttgaacgcgaatatgaggtcggcttccaggaacatgcctatattgaaccggaagtggtgctgacctggctggatcctactgacggcagcctgattatttccggctctattcagaacccgcaccgggtgcgcggctttgtggccaaatttatgggctgcccgcagagccaaatcaacgtcaagcgcgcggtcatgggcggttcgtttggcggtaaggatgacgttatcgatcatcttgcctgccgctcggcgcttctgacgcgcctgaccgggaagccggtcaagttcgcctatacccgcgaacagtccatcattgaaagctgcaaacgccacccctacaaaatgaaatacaaggtagggctgaacgacgccggacgtatccaggcaatgaaaatcgatattctggccgacagcggcggctatgcggcctcatcgccgtttgtcacctggcgatcttccgtacaggcggctggcccgtacgcgatccccaacgttcacatcgatgtaaaggcggtgtacaccaataacagctatacctctgcgatgcgcggttttggctcgccgcaggtggtttatgctaatgaatcattgatggatgaaatcgccgagtatctcaatatctcaccggttgaaattcgtgaaatcaatgcattacgtcagggcgatacgtccgtgactggccaggttttcgatcagcatacggtgtcggcatgcgaggtgctgaaaaaggcggccgcctcggcggaatttatggcgaagcgtaagcattaccacgcgctgaacgagcaaggcggcgtgtatcgctacggcattgggttggcgctcagctatcgcggttgctccattggcgcggaaggggttgatacctcaacggcgctgattcaggtcaacgaggatggcagcgttaatctctctacgtcggtatcggaaaacggtcagggcctacaaaccacgatgtcgcttatcgcggctgaagctttcgggataacgatgaccgacatccacttcagcgaaccgcccacctcagtgattggcgacggcggctcgaccgccgccacgcgcgggacgatggttggcggcggggcgattctggatgccgcggagaaaattaagcggcgcattctgagcgtggtgggcgagagcatcggcgcgacatgccttgaagatacctgctggcaggacggttttatcatcaataaacaggatgatagccggcgcatagcgtttaaagatgcggtcaataaaaccaaatgggccagcgtcagcctcaccgagtacggctggtttgtgccgccgccgatccactgggatgaagaaaaaggctgcggcagcccgtatttcacctgggtatatggctgccaggttgcggaagtgcgggtcaacaccagcaccggtaagaccgacctgctgcacgtgaccgccgcgcatgacgtgggccaggtgctgaacccggtcggctttgagggccaggtatgcggcggcattgcacagggctttggctacgcgctgctggaagattttaatattgaacacgggcaggtgaagtccgagaactttgacagctacctgctgccgaccatcaaggacattccctccattacggtgatcggggtggaaaacccggataaagcgggtccgctgggggcgaaaggcattggcgaaccggcaaccgaactggcggccgccgccatcaacaacgccgtgagctttgcgctgggcacgcgttttaaccacctgccgctgacgctggagcaggtgattctcggctataacctgaaaaaaccggcgcgccagagcgagctgatgattgagcaggaaaataaaaagcaggtgctgcggcttaccgacgtcacggtgacgcggccgaagagtctggatgaggcgctggcactgctgaaaagtgacggtgtcaccgcaattgcgggcgggacagatgtcatcgtgcaggggcggctgcaaaccaaaccggtgaggctggtcgatatttcccgcctcagcgagctgacaggagtgacggaagatccgcaaagccatgaggtgtccatcggcgcagcggtcacctttaaccgtattaccgaccatccgctgctgcgcgaacgctacccgctgctggtgcaggcctgccatacggtcggttctcaccagatccgtaaccgcgcaaccatcggcggcaatatcgtcaacgccgcgccgtgcggcgactcgattccgccgtcgattctttacgatgccagcatcgaactgcgttcccacaccgccgcccgccgcatgtcgctggccgagtttctgctctcgggctacaaaacgcaacgccagccggatgagctgctcactcgcgtgattctcccggctccggcgcaccctaaagcgaaggggttttaccatcagttggggcggcgaaacgcgctgaacattacccgtcagagcttaaccgcgctgctggagttcgctgctgacggtaccgtcagctactgtcggctggtcgacggcgcgttgttcagcaaaccgcagcgtctgcttgacgttgagcgctgtctgctggggcagcgcatcacgccgcaaaccattgatagcgcctgcgaggtgctggacaagctgatttatgccgccatcggcaaacgttggtccgccgcctataagcagccggtttttgtcagcatgttccgcgacatgatggcgcaggcatccgctcaataa

SEQ ID NO: 141864 - DNA, 780 bp, Enterobacter cloacae
atggtacaggaaattgagcttggggattgggttgaattcagagaaacagttggacaaatgttcggtggggtgagccgatatatttttagaggtcaatcagatcgagagtggaaactcgaaagcactttaactcggttagtgcagcaaatctcaagggattttaattcacatgccttggaggaaatgcagaaagataattttcgcatgaggattagagggttaagggggagtaatccttctaaattaagtgatgaggaaatatggtgtcttggacaacattatggcctatgtacacctcttttggactggagtgaatcaccttatattgcagcatattttgcgtatgaaaaggtcaatacatgttcaagtggttggcgtactatttttgctttagatagattaaatcttgagaaaaaaattcaagaaatggacctgtctgatgagtttaagtttattcaaccattgcaagatgataataatcgaatcattgcgcaggcaggtttgtttacaaaaacaccaactaatactgatctggaggcttggttaatagataaggaattagaaagctaccttataaaattgcatgttgaggatgattacagattagatgcaattaatgatctgaaacttatgaacataatcggctctactatctatcctgacttacatggtgcctctgttgcatgtaatatgttgatcgaaaatatttctgataatcatgagttgaggaagaatgttaatgcaactttgaaggcgctttttccagagaaatatagttag

SEQ ID NO: 141865 - DNA, 3741 bp, Enterobacter cloacae
atgagcaaactgttggaccgcttccgctacttcaaaacaaaaggcgacagtttcgccgatgggcacgggcaggtgtatcacaccaaccgcgactgggaggacagctaccgccagcgctggcagtacgacaagattgtgcgctcgacccacggcgtgaactgtaccggctcctgtagctggaaaatttacgtcaaaaacggtctggtgacctgggagacgcagcaaaccgactatccccgcacccgccccgacctgcccaaccatgaaccgcgcggctgcccgcgcggggcgagctactcctggtatctctacagcgccaaccgtctcaaatacccgctggtgcgccgcaagttaattgagctctggcgcgaggcgctggcgcagcataccgatccggtgctggcctgggacgccatccagagcgatccgcaaaaggcgcagagctacaggcgcgcgcgcggtcacggcgggtttatccgctcgaactggaaggagctgaaccagctgatcgccgccgccaacgtctggaccatcaaaaattatggcccggaccgcgtcgccggtttttcccctatcccggcgatgtcgatggtctcctacgccgctggcacgcgctatctttccctgctgggcgggacctgcctgagcttctatgactggtactgcgatctcccccctgcctcccccatgacctggggcgaacagaccgacgtgccggaatccgccgactggtacaactccagctatatcatcgcctggggctccaacgtgccgcagacccgcacgccagacgcccacttcttcaccgaggtgcgctacaaaggcaccaaaaccgtcgccatcacgccggacttctcggaggtcgcgaagctgagcgaccagtggctggcccccaaacagggcaccgacagcgccctcgcgatggcgatgggccacgtgatcctcaaagagtttcacctcgataaccccagcgactacttcctcaactactgccgccgctacaccgacatgccgatgctggtgctgctggacgagcaggcggacggccgcgtcgtgccgggccgcatgctgcgcgcctcggacctggttgacgggctgggggaagccaataacccggaatggaagaccgtcgcctttgatattgccgggaacctggtggtgccaaacggatcgattggcttccgctggggagaaaaaggcaaatggaacctggagccgcaggccgcgggccatgaaaccgagctgactctctccctgctgattacccacgatagcgttgccgatgtggcgttcccctactttggcggcaacgaaaacccgcatttccgcagcgtgaagcaggagccggtgctgacgcgccgcgtgccgagcaaaaccctgacgctcgccgacggcagccagaaacgggtggtcagcgtttacgatctggtgctggctaactacggtctcgatcgcggcctggaagacagtaacgccgcagaaagctatgaccagattaaggcctatacgcccgcctggggcgagcagattaccggcgtgcccgcttatctgatagaaaaaatcgcccgcgagtttgccgatacggcgcacaaaacgcacggtcgttcgatgatcattctgggtgccggggtcaaccactggtaccacatggacatgaactaccgcgggatgatcaacatgctggtcttctgcggctgcgtcgggcagagcggcggcggctggtcccactacgtgggccaggagaagctgcgcccgcaaaccggctggctgccgctggccttcgcgctggactggaaccgcccgccgcgccagatgaacagcacttcattcttttacaaccacgccagccagtggcgctatgagaagctgaccgcgcaggagctgctctccccgctggcggacgccacgaaattcaccggccacctgatcgacttcaacgtccgcgcggagcgtatgggctggctgccgtcggccccgcagctcaacctgaacccgctgcacattaaagcccgcgcggaggcggcaggcatgacgccgcaggagtacaccgtgcaggggctgaaatcgggtgacgtgcgtttcgcctgcgagcagcctgacaacggtaaaaaccatccccgcaacctgttcgtctggcgctctaacctcctcggctcgtccggaaaaggccacgagtacatgctgaaatacctgctcggcaccgagagcggcattcagggcgaggatctcggctctacagatgacgtgaagcccgaagaggtggagtggcagaccgccgccatcgagggcaagctcgacctgctggtgacgctcgacttccgcatgtccagcacctgtctgttctcggatatcgtcctgcccaccgccacctggtatgaaaaagacgacatgaatacctcggatatgcatccgtttattcatccgctctccgccgccgtcgacccggcgtgggagtcccgcagcgactgggagatctataaaggcatcgccaaagtcttctccgaggtctgcgtcgggcatctgggcaccgaaaccgacgtggtgctgcagccgctgcagcacgactcgccagcggagctctcccagccgtttgatattcaggactggcgcaaaggcgaatgcgatctgatccccggcaaaacctcgccgaacattgcggtggtcgagcgtaactacccggaaacctacgaacgcttcacctctctcggtccgctgatggacaagctcggcaacggcggaaaaggcatatcgtggaacacgcagaacgaggtcgatttcctcggcaagctgaactacgtcaagcccgacggcccggcgaaaggtcgcccgctgattgaaacggcgatcgacgcctccgaggtgatcctcgccctggcgccggaaaccaacggtcaggtggcggtgaaggcctgggaagcgctcggcgaactgaccgggcgcgaccacacccacctggcgctgaataaagaagacgagaagatccgcttccgcgatattcaggcgcagccgcgcaaaatcatctccagcccgacctggtccggtcttgagagcgagcacgtctcctacaacgcgggctataccaacgtccacgagctaatcccgtggcgtaccctttcgggccgccagcagctgtatcaggatcatccgtggatgcgcgccttcggggaaagtctggtggcctaccgtccgccgattgatacccgcagcgtcagccacatgcgcgagatcccgccgaacggcttcccggaaaaagcgctcaacttcctgacgccgcaccagaaatggggcatccactccacctacagcgaaaacctgctgatgcagaccctgtcgcgcggcgggccgattgtctggatcagcgaaaccgacgcccgcgagctgggcattgaggacaacgactggatcgaagccttcaacgccaacggcgccctcaccgcccgcgcggtggtcagccagcgcgtaccgccgggcatgaccatgatgtatcacgctcaggagcgcatcctgaacattccaggttcagaggtgaccggacggcgcggcgggatccacaactcggtgacccgcgtctgcccgaaaccgacgcacatgatcggcggctacgcccagctggcgtacagctttaactattacggcaccgtcggctctaaccgcgacgagttcatcatgatccgcaaaatgaaaaacatcaactggctggatggcgaaggtcgggatcaggtacaggaggcgaaaaaatga

SEQ ID NO: 141866 - DNA, 876 bp, Enterobacter cloacae
atgactacttcgcttgccagatgtaatgcgccagacgttcagcaacccttcgcggagctggcggccgaggccctgtaccgggaaattcgcttgaccccgaaaccgggtctggtggatcgcatcaacagcggggcgcataaggatatggatttcgccctgttcatgagcagtatcgcggcgattgccccctggttctcgacgttctttaacgttggcagagagacggctcgtcttgctggtccgcaaacgctgcgggcgataaggccaaccggtctggcctgcgaacaggcgatgtttaacgccaccggcggggtgaatacccataaaggcgggattttctctctggggctgctgtgtgccgcggcggggcgtctgacgcaaaagcaagaaaacctcacgcagcgcagcctgtgcgaggagtgcagcgcaatctgcacgggaatcgttgagcgggagctgaataatcgcggcgtggcgaagacgaagggcgagcagcagttcaaagcgtacggtttcaccggtgccagaggtgaagcggaaagcggttttgccaccgtccgccacgctggccttcctcactttaaaaccgcactgcgccggggagcctctgaggacgaggcgctgctgaggatgctgctcgggctgatggcgtcgaatccggacaccaatcttgtttcacgtggtggaacgaaagggctgaattatgccagacgctatgccagacgaatattatccgtgaaacatctgacgctggaaaaattaattaacgccttatccagcatggacgttcagtttattcgccggaacttaagcccgggagggagcgcagatcttatcgccgtcggatggttattgtcgcagttcccgtccgaataa

SEQ ID NO: 141867 - DNA, 345 bp, Enterobacter cloacae
atgactctcaatcgcttttgttatgtactcctgattttcgccgccgtcagtagccttctgacccagaatccgttgatcgtctggtttctactggtcaacgtgctgacgatgagtatgtatggcgtcgataaaatggctgcgcgcaaaggcctgcgcagggtcccggaagccacgctgctggtcttcggcgcgacgggcggctggcctggcgccattgtgggccagcaactctttcgccataaaacccaaaagcagcccttcaaaacctactttttcatcagcgtcgtcgtcagcatcgctgtgatggcggcagtttacgctttcttgcctgtttctcctttgtga

SEQ ID NO: 141868 - DNA, 1524 bp, Enterobacter cloacae
atgcgccacgcatctatccccttagctgcagccacgacaatttttatgctgggcgtttttatcatcaatttacaggtttggtattcggcacgtgctgacagtcttgcaggggcacactttgttgtaagaaacctgaacgtcatgcttaaagaagcccagcatgctacccagttagcgatgcagcttgctgataatgagtgtgatactgaaggacaatatcggctgggtaccgaagcggcattacagccacacctgagaaccatcgttattctcaaaagatatgcggtctggtgctcttcgttgccgggtaatcgcgtattgttggtcaacagctctgcgctaccggaatcatcattgttgcttgtcccttcgggaagtacggtaaacgggctgccggttctcttataccagacaaactatgccggaagccgaatcatagtaagtattagcgacagccatatccgggatgctctggacgtaccattaaatggcgttaagtactcactcagagtaggcgatcgtattttaagcctgtcaggcgatgtggtaacgggagtcgattcaagcaaaaaggtattaacggttaaagcccctgattatcctttcgcaattcaatttaactctccacccctttttagcctgacgagattatttaaccgtgccggaggcctgttgttattcctgcttatcatttcttcgcttcctgcgtatattcttcagagatatctttccagggatatttcgccggaagagtcgctgcgcaccgccatttacagaaatgacattattccctattaccaacccgtagtgagcggtaaagagggatcgttgcgcggggtagaagttctggccagatggaagcatccacagtcagggtttatctcccccgcgtcgttcattcctctcgctgagaaatccggcttaatcattccattaacccagaacttgatgcgtcaggttgcggcgcatatgaattctatctctacgttgctgccagaagggttccacgtcggcattaacttcagcgcgtcccatatcgatgcctccacctttgttgaagagtgtctccgctacaagcgcagttttattcgacaggatcttaaccttgttattgaggtgaccgagcgtgaaccccttcatatcgatgaacatctcgtaaagacgctgaatgagctacatgagattggctttgccattgctctggatgattttggaacgggatattctggtctgtcctacctgcaggctttgcacattgattacatcaaaatcgaccaaagctttgttgccagggttaatgccagtgaggattcaaccgttatacttgattcggtactggaactggcaaaaaaattgtcaatcagtattgtggctgaaggggttgaaacacaagagcagcttgattatctcacccgcaaccacatcaagtttttacagggtttttacttctacaaacccacaccgtttaaagaactggtaaaagtccttttgtcgaagccaaagattaaagtgagggtggagtaa

SEQ ID NO: 141869 - DNA, 1734 bp, Enterobacter cloacae
atgcctgtatttgattatcagggcgagaaaaacacgcagcttattaaggaagcgctgactattgaaagtatcaattttggtgcggcgacctatgctgattatatctatacggaagaaaatggctggaatgtactagacggtgcgacgctcaactatagtggttgtactaatccctatggtgctttttatggcgaaagtcttcttgagtcgagcgccgaatgcaacgtcatggggaaatatgatgctaatggtaagctggtgaacataggaattagcttctgggggacgggcacttacgcggccgcgccttcacttcagcataccgttaacacagcgatggataccgtcagcgatgtattctctgcgctaatcgacggctatgcagataactatgttctcaatgcttataaaaacctcatgagttcagtggctgcgtttgccaccgcaaacggcctcaccggtaatgacgtcatcgtcaccgggcatagtctcggtggactggctgttaacagcatggcgaccctttccgcgcagggccaatgggatagtttttttgaggacgcgagctatgtcgcttttgcctctccgactcagaaccttgccgatgataaggttcttaacattggttatgaaaacgaccccgtgtttcgtgttttaactggccatagcctgtctctggacagtttatttaatcatgacactccgcttgagacctgtaccaacaaccttgtctcttttaatgattactatgcaggcctgaccagcgattgtcagttcttttcgatcgcgaatatggcgtcgtgggccgggcattcaggccagggatatacggacggcgcgttgcgaattatggattctgaaatctatgatttcacgcatcaaaactccaatattattgtttccaacctttctgaggcgtatcgctcgacaacctgggtttctgatcttaataaatccgtaacccatgttggttcgacgtttattattggtacagagtcgaatgatttattacagggtggaaagggcaacgattatctttgcgggggtgggggcgatgatagtttcaaagaccacagtggctataacgttatttatggcggcgcgggaagcaatacctacgtaacggaatgtaatatcgccgattttaccttcagccacgacaccgagggaacgctgtactttaagtattccaccggggatgttactcgggcagaagatatccattacgttaatgctgaccacacgttgttcagcctgtttggcattaacttcaaccagaacgctacatggcaggtcaccggttatgggttagaaggcgatagcggctcaatcgcctatgcgaaaagctattatgctgatacatctaacagtttcactatctcgaccgccagtaatgacagctggttctattcaggggcaaatgacagcgatatcaacattgccggtaacaataataatgttgtttccgggtttgcagatgacgccattcacctcaacggcagcgaaaacacgcttctcttctatggtgattttggtcacgacactgtctataacctctcaaccagcgacagcctgatctttatggctaaccagagtattgcagacaatgacagttatcttagccatctgtcgtttgacggtgataatgcgttactgacctatggtgagagcagtgtcacgctagtgggtgttaataccgatatgctttcacaaatgcacatagcggtagcatga

SEQ ID NO: 141870 - DNA, 1725 bp, Enterobacter cloacae
atgagtaaacccttgcaggtatttaagaattttacacatgcgcgcttgcggttgtttgtgattattgcttttttctcttcagtaataaatgtgctgatgcttacgccttcaatttatatgctgcaggtctacgatcgcgcgctgtcatccgggaatacgacaaccctctttatgttgaccttgttggtgttatttatgttcaccatcatggcactcatggattatgcccggggcatcatcattatcagattaggtaatcagtttgataatgctctttcgcctgtactgtataccgcagcatgtgaaagcaatctcattaagcgtagccctaatgccgggcaggctatcagcgacctcgccgtcatacgccagtttgttaccggtccagcgttattcgccgtttttgattcgatctggtttccagtctacataggcgtcatttttctttttaatacctggctcggattgttctctctttcaggcgcgtttgtgctgctggctctggcttttattaatgaaaaaataacgcgtcagcttttaaatgaagcgggtggttatgtcctggtgtctaatcatcaagctaacagcaccttgcaatgtgctgagacgctgcaggcgctggggatgactgaaaacgtcaaggcgcgctggtggcgagcacatcgacagttcctttactgccagagtgcggccagtgaacgtgctgtttttatgtctgccatcaccaaaacggtacgtatggctctccagtcgctcatgctggggcttggctgctggctggcgattctgggggatatctcgccgggcatgatgatcgcaggctctattttgcttggaagagcgttggcaccggttgaacaactcatcagcgtggcgaaagggtaccggtcagctcgccaggcatgggggcgcatggttcatttgacaagcgagtttccaccggcgctggagagcattcgtctgccggagccacaagggctgctcacggtggagaatgtcaccgttttcccgccgggaaactcccggcagcccatactgcacaatatcaatctgcgggtagaaccgggtgaggtgctgggaattgtgggggccagtgcatcgggaaaatcctgtctcgctagagtgttatgcggtgtctggcccgccggagaaggggatgtcaggctggatggggcagatatttatcaatggcagaagcagaagccaagtcccggaatcggttacctgccgcaggatgttgcgctcttcacgggaaccatcgctgagaatattgcgcattttggtgagatcgattcaacgcaactgatcgccactgcaaagatggccggcattcatgaaatgattttgcgcatgcctgaaggctataacaccctgaccggcgagcagggtacggccctttcgggcggacaaaaacaacgcattggtctggctcgtgcgctgtacggcaacccggcgctggtgatccttgatgagcccaacgctaacctggatgaatcgggcgaaaaggccttacagcaggtcatccggcagcttaaacagcagaagaaaagcgtcgtcatcatttctcatcgtccgggtattttgccgctgaccagtcacctgctcgttctggagggcgggaaatcaaagctttatggcccgacagaacaactcttacagcagtcaactcgcccggtgaatcagaccaaaagcgtccccgtagaacaaggaaaagtccatgcatga

SEQ ID NO: 141871 - DNA, 306 bp, Enterobacter cloacae
atgtcagtcataagattacaggaagaaatctttagttatttttttcagctaagccatacggtgactgactggatggcgtctgccggggcgaaaccttcgtttatagcgagtcagatgggccgtgaaaatgctaagatggtgtatgaggtatattcaaagtggatagttggtatgaacgccgatcaggcaggcatgctgaatgagcgactgcaaacgctcctgccccaggatgccctcagggataaacgacactggataatgtcgtttaaaattagtaagatagccacttcatataaaataccttaa

SEQ ID NO: 141872 - DNA, 393 bp, Enterobacter cloacae
atgaacatggaactttctaaatatctctctcctaaaaaaatcggcgtatattctctgttcctgctgctctcgtggggattactttatgcctggctggtgctaatacacagaatggatgaacaagtcacctcgacgatgccctcttcacccataatctacggctgcatcgccttgtcagttgtcaccctggtaatacagcataaagccggtgcgctcacagagttatttgttatcgccttctggctgatggtgattttcgtttatctcatcatcacgtttaccgtgctgttaaacgcgatacctgatatcgacgatctggtcttttactacgaatgctatttgatcatcttttttggcggttcaccgctgtacctcatgatgaggatgatttaa

SEQ ID NO: 141873 - DNA, 366 bp, Enterobacter cloacae
atgatcgctgacttcaggtttattaaagaaaatagcgtgctcgaatggatgcgctgtacaaaaaatgtacgcttaaatatatcttgcttagacctcgcaatggtcgactcaactcgccagttagtctttacgttaagcgagccaaggccactaccaaccgttttgaccatcttcaatgcgcagggagaaaaactattttggtctgcacctcctgaaggcgcatttttctattacttaactttcaacctgtcaaaggaagtggttgtggtctgtagctatgcggaaaagcaaaacggctggcatgattggttttattcctgggatatgaagcgtaacgcgttgtctcaattgggccctgcgtattaa

SEQ ID NO: 141874 - DNA, 531 bp, Enterobacter cloacae
atgggttcactggtagccggtaatgacctttcgtggcatctgcatatggtgggtagcggaggccaggacgttaactttaaatgggacgttaatggaaacttttccgcgccggggcaaatatacccaggaaacttcgcgaactttgacagccgctattatactaaggcgcaatctgacgcgggatatatgcctaaaactggcgcttataccaaagcggaaagtgacgggcgatttcagccgaaagggagttacgctgcacctaacacagccgccattggtaccaattcctggttcaaagacaccggaactggatatatgcatcaatctggattgtcagggactgtctcaagcggaggaacaatcacattccccgttcctttcacgtcgaaatgcactgcggttaatgctaatacatacaacgcgtcagggtccggtgcggtaatgatccaatcgatgagcaatacagggtttacatttgcggtgtcaggtggttatacggggcagttagtatggacagccatgggtaaataa

SEQ ID NO: 141875 - DNA, 582 bp, Enterobacter cloacae
atgaaaaatttaaacattgatcgtgaatttttaagtgttgagtattactttgcatacaaacacttaacagaatgtttaaaagaagaggtacagaaaggtgacgagcctttttcttggggtaaaaccatacacagagccatcaagtgcagagatcgtcgtttctatttctggttcagaatttggcgttatttttacgctaccaacaaattcaagctgtactctctggcaaaaagaaaagctattaaccttaatcgtgaatacaatatcgatattaatcctcgttcgacaattggccccggtttaaaaatcgtgcactttactggaattgtcatcagagggaattgcaatattggtaagaacgtagtcattcgtcagaacgtcaccatcggtgacagacatgatgatgatgttgggttaagctacatcggtgataacgttgaaattggtgctaactcttgcattatcggaaatattcggattggtgcgaatgtcactatcggtgccatgtcgctaattaacaaaagcattcccgaaaacagcgtggtcttctcagccaatcagattgttatgcgaaaaaaataa

SEQ ID NO: 141876 - DNA, 273 bp, Enterobacter cloacae
atggttttgttaactgactacatccccccaaaagcttctgatttagccaaattgaaagctgagcttggttttactggcgctcaaatggctgatcttgcaggtgtttccagtaacagccagtggcgtaagtatacctgtggcgaatccccgcgtccaatatcctctcacattctgttttttactgcagcgcagttagccttaagcgattcagaaatggataaggttttaacaaaaatgaaaaaaattggggctaatttcagggatttcaaatga

SEQ ID NO: 141877 - DNA, 1113 bp, Enterobacter cloacae
atgtcagataacagccagaaaaaagtaatcgtcggcatgtccggcggtgtcgattcctccgtttccgcctacctgttacagcaacagggctataaggtggagggcctgttcatgaagaactgggaggaagatgatggcgaggaatattgcactgccgcagcggatcttgccgacgcgcaggccgtttgcgataagctcggcattgaactgcacaccgttaactttgccgcagaatactgggacaacgtttttgaactgttccttgaagagtacaaagccggccgcacgccaaacccggatattctgtgcaacaaagagatcaaatttaaagccttcctggaattcgccgcggaagatctgggcgcagactttattgcgaccggtcactacgtgcgtcgtgcagatgtgaatggcaaaagccagctgctgcgcggcctggacggcaacaaagatcaaagctacttcctctatacgctgagccacgagcaaatcgcccagagcctgttcccggtcggcgagctggaaaagccgcaggtgcgtaaaatcgctgaagagctggacctgatcaccgcgaagaagaaagactctaccggtatctgcttcatcggcgaacgtaagttccgcgatttcctgggtcgttacctgcctgcacagccgggtaaaattgttaccgtcgacggcgaagagattggccagcatcaggggctgatgtaccacaccttaggccagcgtaaaggtctgggtatcggcgggaccaaagaaggtagcgaagatccgtggtacgtcgtcgacaaagatgtcgaaaacaatattctggttgttgctcagggtcacgaccatccgcgtctgatgtccgttggccttatcgcgcagcagctgcactgggtcgatcgtgagccgctaaaaggcacgctgcgctgcacggtgaaaacacgttaccgtcagactgacattccttgcaccattaccgcgctcgatgacgatcgcattgacgtgcgtttcgacgagccggtcgccgccgttactccgggtcagtctgctgtcttctacagcggtgaaatctgcctgggcggcgggatcattgaacagcgtctgccgctgcccgctgtttaa

SEQ ID NO: 141878 - DNA, 1446 bp, Enterobacter cloacae
atgaagcttgaggctgttttattcgatcttgataacactttagcatcaactaataaactgagagatattagagaaagaggggcatataatgaaataacgcctgaattacttagaacaattaaaccttataacaatactaaagatttgctttcaggcttaatttctaagggcataaaagtcggaatagtgactaattcaggtcgtcaatatgccgatattgtcctcaagcagctcgatttaccgaaatttgatactatcgtgacatatactgatgtcggtagttcaggaatgaaacctaatccgaaaggcattcatcttgctttaagcaacttaggaataactcatcctgaaagggtcatatatgtgggtgacgactatacagatataatagcaagttactacgctggagtaataccaattgtgccctcttgggcatcaagaacaccagtttcacaggtcccggcagcagtgctgagtagtgagtttcttttagatgagtgtgaaacactagaaaatatcatacttatggccgaaaagagtgctcagcataagaacttctcatttgaacgtaagcgtttttatttcgttcctttagatgaatctgctaatgttattcctgcaagtgatactctctcgacaatttgtcttggccgttacttctctcaaaaaagtttggttactactaaacttcatgattctcaccctctttcaattgaaattgcgagtaaggaacatgatgaaaactatactccacctgattattggggagatattcttgctcatgctaatgataaattgccggaattttttaaatccaaaaaaggatttgatatagcaacagtaataccatcaaaaaaagaaaaaaaacagagattggaacttgtattagataatgcagcccaaaaaagtcagtctaatacatgttttatcaacgatttatttgtgtttgaggaaggagcgaaatcacttaaagctcttccaagagaccaaagagcaattgaaattgaatcatctctgcatttaaatgaaaaatatagaaatcgcctgcaaggtaagtctattttgatttttgatgatgttattactacaggtgcaactctaaagcgtgcatatgagctcctacgcgctgaaaatgttaagcatgtcttaggaatttgcttggctaaaacggtatcgatttctgaagaagaacgtctttgtccgaaatgccagtctcacgtactaagaataagacgaaatcagcaaagtggtatacatttctggggatgttcgggttataatgatacgtctgataaatgtgaatatactgaaagctttgttgaaaaaacatgtccaaaatgcggtagagatatggtgaaaaaattcaataaaaaacaaggggttaggttcttgtcttgtacgggttggaatcaagaaccaaaatgctattacactgagaatgagtga

SEQ ID NO: 141879 - DNA, 984 bp, Enterobacter cloacae
atgtcgaacatttcagataacactgttaagttgttgactctgagtgccctacagggagtgggcactaagactctttcaaatttagagaagttaaaagacttatcttctttttcagtagaagaattagtcggtatattagctcttaaagaaatttcgcaaaaagatattgttttggctaaagaatttgccaataaaaacatagaaatatcacagaataaaaaccactcaataatttcaatcttcgatgacagctatcctggaattcttaaagccacagaagaccgcccagttattttatactgtgccggtgatgtaaaaattctaaatcaaaaatcacttgctgtgattggtacccgtgaacccactgaacacggacaaataattgcttccaatataactaagtggttctctgataaaggttggaatattatcagtggattggctaaaggtattgattcaattgcacatcgcactgccattgaaaatcatgggaaaactgtagctgttatggctcaaggtctcgagaaaatatatcctgctgaaaataaaaaactagccctggatataattgataatggtgggttgttaatatctgaatatagttacggtagtcatacctttcgtaataattttgttcaaagagatagaatacaggctgggttatcggcggctgtattaatggtccagtctgacttaaaaggcggaagtcttcatgcctctaggtccgcaataaactatgggcggtatttgattataccaaatcaatctaatcgtgatatcataaacaatgaacctaaaatacaggcaaacttaacattcatgaatggtgattcttacgcaatacgcaatctcttgaaggttaataattttatgactgatagattgttgattatgaaaaacagcaatgattatacttttattgagggaatgcttgttaattccttacaaaggtatcagataagctcgaatggctttgatttctaa

SEQ ID NO: 141880 - DNA, 2142 bp, Enterobacter cloacae
atggaaaacgcactgttaattcaaagcgagcggccctcaacctttcacatgagtattcattcaggcatgcttgaaacgatgggccataatatgtactcatctgtagctaaatgccttgcagagtttgtcgcgaatgcatacgatgccgatgcagacaatgttaacataacaatggattttgcaagtattgaagcagccaaaaaaattgttagagaaaatgcgcgcaacgaaaaagagcaaaagaagcgaaaggatatttcagcaatctatgatccacttcccagtgatattactataataataagggatgatggtcatggtatgtcggcaaggcagattcaagactactttcttgccgtaactcgaaatagaagggaagatgaagagggacgcccgactcgtatatttactgagtctaataggcgaaaggtaatgggaaggaagggggtgggaaaattagcaggattcggtgccgcagagcatattaaaattacgagtaagcgtgacggcgaaagttattcaacaacttttgaaatggactacggactaataaagaacaataatgatattaccgaatcaaaatttgaagcgatatataaagaaggtttgcccttaaatgagcattatactgaaatagtattgagccaactgcgatgtgattcaatgaaatccagtgctgaggctattaataatacactgtcacgcacatttggcgcactagataaatcatttaagataatgataaatggtgaggaagtaacggaacaagatattgaatgggaatttacatatcctcgtgatgcaacaattgataatttagcttctgatacaatacttgttgatccaaatgatccagatagtaagtttgaatttcaatatattattcgttttagagcgagaccttcagattcagataagcaagctaaaaaaagaacaagccttccagccgaaagacgaggagcgagaatttacgctcatggtcgcttgacccatggacctagcctacttgaacttcattctggggttcacaactttcacgcacaagattatatggaatgtattgtaattgcggatgcaatagacgaattcgataatgattttattgtaacaagtcgcgaagggttgaacaatgataacccagttgtgatcgctttgttcaaacgtgtaacagagttaatgaaaacagctttagctgaacattacaaatttagagatgaatatatttcgcaggctattacagaagatgcatttagtcagtctatgcttacaccaatacaaaatgttaaccaaaaatcaaggaaagctgctacagaaatattaaagatcattggcaaagagcatggtataaaaagtgaggcatatattaatatggcgccgatagtacttcaggctgtaaatgctggagaagtacttactaaattaattgaactagaaacagatccgaaaagcgttcaagttctcgcacattctatggcggaactcactcgcatggagcgaggtgatctactgaaactataccgaggacgtaatagagcaataggtgctttacaaaaattgcatgaggatggcaatacaattaggaaaggaaaaggattcgaaaaagaattgcattccttactaaaagagaacccttggttagtaaatgccacatattctaactttttaacaagcgacagacctatgggtgatgtttgtcgtgaattgaatagaaccctacaaatagatgatcaagtagaaaatgatcaagacgcaactcggccagatttagtttatgttgccactaatagttccacttgcgagcatgttgtcattgtcgaattaaagtccccaggcattgaaatggagcatgatcattttcaccagcttaagcgttatatgagaaaagccgaacaacatttggcaaataaaatgggggggcggaccgttcagatatcaggatatcttatcggaaaaataccgcctgctgataccaaagcggatgggaaattagatcttctgcatgaaataaagcaaatcggccctaaggataatatcttagtgctcgatttgcttacattagtaacctcagcaaagcaagcacatgaagcaggaattcaggcgcttgaaaaagaggaaaaggaattggaagaggatcttagttaa

SEQ ID NO: 141881 - DNA, 990 bp, Enterobacter cloacae
atgaaaaattatcgcgtagctgagctctttgctggtgcgggactgatgggaggaggcttcaaggccgctggttttaaaagtattttcgccgctgagcttgatgagcgcgccgtcgagacttacaacacaaacttagaaccagtagcaaaaattcatgatgcgacatgtgttgaagctgatctccagtatgatgtacttgtagctggccccccctgccaaggatttagtactttaggtcgtagagatccgcttgatgtaagaaattcactttcattaagtgtttatgaatgggctaaacaacacaaaccaaaagtggttgtaatcgagaatgtaccgcaatttcttgaatcagaatattggcaaattcttcacagtaagttcacatcagatggttatagatgtgtgacttggattctcaatgcacatgattatggcgttgctcaaatacgcaggagaagttttaccatattctcattagtaaaattgcctgaactgccaacgccaactttaatcaagcaatctgttcgggatgctttcgaaggtttgagtgatatacctgatggtaaaaattatcatgtttcgccgaaacctacagaactagctctttctcgaatgagaataataccgcctgccggggataaaagagacgttatgactcttgcaccagaactttgccctcctagttggctgaaaatgggaaatcaggctgttgatgtttggggaagaatggactggaataagccagctaatactataaggtgttcctttcaatctgcttcaaaaggacgctatcttcaccctacgcaaaatcgggttatctcaattagagagggggctcggctacaaggtatacctgataattggcacttttgcggagacaggacatccattgcaaggcagatcggcaatggagtcccagttcctttagctgaagctgttgcgaggtctatttatagagctctcgaaacaagcgaggaagaggttaactaa

SEQ ID NO: 141882 - DNA, 390 bp, Enterobacter cloacae
atgagtaattaccaactaactagcaaagacattagcgagcttgtaaactatcgtttagcctcacgtaaaattaccattagagaatgtgtaaataattacaataaacaaagagttaaagatcaaaacctgcaaaaagcaccagaattaaacaaagattttttgctacgtattaaaaataataaatttgaagtcattaatgagcgtgtatcaaaattatgcgactatctcgaaatcccaattaacaaaacaagccccagaaaaattttccaaaaagaatttgagaaagttgaagctctggttgaaggaaatccacaattacgagagcatgtggggaacttgttaagcaacattgttgattttgcaaccaagataaatagggcaaagcaatga

SEQ ID NO: 141883 - DNA, 537 bp, Enterobacter cloacae
atgattagcgagtcggttaagacctggtggaaagccgccacggtttcagcgcttgtcattgcctcattcgccgcaggtagtgtgtggacggaacgagcatgggaaaagaaatgggcggatcgtaatagtgaggagtcttctcaagcagagaacgctcaaacggctgcccgtatgattgaacaagggcgagtgatcgctcgcgatgaggctgttaaaaatgcacaagaacaggctgcaaaagcggctgcgaatgctgctggcctgtctgccactgttagccagctgcgcaccgaagcaacaaaacttgccacccgcctggacgccgcaaagcacacctcaggtcttgccgctgccgtcggaagcaaaacaaccagcgctaacgccgcaatgctcgccgacatgctcggaagcattgcagaagaagctagatactatgctgggcgatctgatgaaagctaccgggcaggaatgacctgtgaaaggatttacgactcggtcagagattcaagccggtcagctatccccggaaagggataa

SEQ ID NO: 141884 - DNA, 489 bp, Enterobacter cloacae
atggaccaggaaattgccactttaaaactcaatatcaaccagctggcagggataaccggcgtacaccgtcagacggttgccgcgagactgaaaaatgttgaacctgctccaggcagcaacagcaagttaaagctctatctggtgaccgacattctgaccgaactgatgatccctaccgtttcggccaacatcgatgatatgcccccctccgacaggctgtcccactggaaagcagagaatgagaggctgaagttcgaacaggatacggggcagttaatacctgcagatgaagtggcgcgagaattctcattgatggcaaaagccgtcgtcatggtacttgaaaccctcccggatgtgctcgagcgcgactgtgctttaacgcctgctgcggtagttcgtgtgcaaagcgttattgatgatctgcgcgaccagatggcggagagggtgcaggacgctgaaaaagaggaggaagagcctgaggaggactga

SEQ ID NO: 141885 - DNA, 2103 bp, Enterobacter cloacae
atggcaaagcgggcatccgccagggacatccgccgcgatgtctccggtattttacgagccccgcgtcgtatgccggtggccgatgcggtcagtacttatatgcgcgtgccaatgggggcgggaaactcagttccatgggatccggatctggcaccctatgtgattgagccgatgaactgcctggcatcgcgtgaatacgatgcggtggtgtttgtgggcccggcgcgaacgggtaaaaccatcgggctgattgacggctggattgtttataacattgtctgcgatccggcagatatgcttgtgattcaggtatctgaggaaaaagcgcgcgagcattccaaaaaacgcctggaccgtacttttcgctgtagccctgaagttaaaacccggctaagcccaagacgtaacgataacaacgtctacgaccgtacattccgcgccggtaactatctgaagcttggctggccatccgtcaatatcatgtcgtcctcggactataagagtgtggcgctgacggattatgaccgctttccggaagatatcgacggggagggggatgctttttcactggcatcgaagcgtaccacgacattcatgtcctccgggatgacgctggttgagagctcgcccgggagggatatcagagacacaaaatggcggcgctccacgccccatgaagcccctccgaccaccggaattttatcgctctataaccgtggtgaccgccgtcgtctttactggccatgcccgcattgcggcgaatatttccagccggaaatggacaatatgaccggataccgcgacagcagcgatcctgtgcttgccagcgaagcggcgtttcttcagtgccctgcctgtaaaggcaggatcacaccggacatgaagcgtgcgctgaacatgaaatgtgtctggctccgggacgggcaaaccatcgacagtaaaggccaggttagcggtgatggccgtcgttcccgtattgcctccttctggatggaaggtccagcagctgcttaccagacctgggcgcaacttatttataagttcctgaccgccgagcaagaatatgaatccacgcgcagcgaagaaaccctgaagacggtgatcaacaccgatttcggcaggccctatttgccgcgggccagcatggagcagcgtaaaagtgaattgctcgagcagcgtgccgaagaagtcccaaaacgttcggtacccgatggcgtgcagtttctcactgcgaccgtggacgtgcaggccgggcgcaaccggcgctttgttgtgcagattacgggttatggaagtatgggtgagcgctggatagttgaccgttacaacatccggcattcgctgcgctgcgatggcaacggggaaagcattcaggtggatccggcgagctatccggaggactgggatcttttactcaccgacgtctttgataaaacgtggccactctcaactgacccgtcaaagggcatgcggctgatgtcgatggccgtggactcagggggggaagatggcgtgacggataatgcctacaaattctggcgcagatgtcgccgtgaggggctgggtaagcgtatctatctcttcaagggtgacagcgtcaggcgcagcaaacttatccagcgaacgtttcccgacaacacgggcagatcaacgcgccgcgcacaggcgacgggtgatgtgcctctttatcttctccagaccgatgcccttaaagaccgggtgaataatgcgctgtggcgtgattcacccggccctggctatgtgcatttccccgcctggctgggcagctggttctatgacgaactgacgtatgaggaacgctcgaatgaagggaaatggagtaagcccggccggggcgcaaacgaagcatttgacctgctcgtttatgccgacgcgctcgccatccttagtggttacgaaaaaatcaaatggccgtcagctcctgagtgggcacggcgggaaacgtggatcgaggacacgcagacggaaactggcgaaatgccatccccgccgcctgcgccgaaatctaaatcaaaaccaaaacgtgagaagcccgtaaccgagcaggctaatccgtggtcttcgtcaggaggttgggtgtga

SEQ ID NO: 141886 - DNA, 345 bp, Enterobacter cloacae
atgattcagtgcaaacgcgtatacgaacaggtaggtccggacgacggttatcgggttctggtggataaactgtggccgcgcggcgttaaaaaaacggacctcgcctatgatgaatggtgtaaagcactcacgccttcgaatgaattacgcaaggcttttcacagcgaaaccattgatttcgccgccttcagtcaggcctatcgggaagagctggcgcagcatgcggacgagggaatgcgcctggcggcgcgggcaaaaaaacagaccgtcaccctgctctacggcgcaaaaaacacggagcaaaatcacgccctggtattagccgactggctgcgccatctgtaa

SEQ ID NO: 141887 - DNA, 2541 bp, Enterobacter cloacae
atgaaagtaataaacaggatgcggcctgcgcgcctggcgacctttatcgccctggcgtttgccggatcctctccgtcgctctgtgccagtgttgcatttaacacggatctgattgagctggacaatcccggcatggataaagccgatttgtcggcttttgaatcaggctctcaggcgccgggaaactaccatgtcgatattatcgttgacgacgcattagtggagacgggggatattcgcttttccgcgggcaaaaacgcgaacggcgatgagatattgcagccgtgcctgagtattgaacaattaaaacggtggggggtaaaaaccgcattatttcccgcactcagcacggaacagggcgaatgtgtcaatcttcaggcgataccgcaggccagttcggatttccagtttagcgccctgcgcctggtgctcagcatccctcaggcagccatcgatctgccggcgagaggctatgtaccgccgcagatgtgggatgaagggataaccgcagccatgcttaattacagcctgagcggggcgaccagccgggcgaaaacgggggagcgggccagcagcaatagccaatatgcgaacctgcgtccggggatcaatgtcgggccatggcgtttacgcaactacactacctggtcgcgggatgcttccgaaaaagatcgatgggacacggtctacagctacctgcaacgcgccgtgatcccgctgaaagcgcagctgaccgtcggggacagttccgcgccggcggatgtctttgacagcatgccgtttcgcggcgtccagctggcgtcggacgatgacatgctgccggattccctgaagggctatgcgcctgtggttcgcgggattgcccgtaccaatgcgcaggtggtgattcgccagaatggctaccagatctaccaaagctacgtggcaccgggcgcgtttgatattaccgatatgtaccccaccggcggtgcgggcgacttagacgtgaccatcaaagaggcggatggcagcgagcagcatttcacgctgccgtatgcctcggtaccggtattgcagcgcgaagggcgactgaaatacgccctctccgcgggacagtatcgctcttataacagcagcgtggagaaaaccccgttcgggcagatcgccgcgatttatggcctgcaggatggcatcacgctctatggcggcgtgcagggctccggcaagtatcggtcgcttgcgctcggggtagggaaaaacatgggtgatttcggtgcgctttccgcagatatcacccaggcctggtcgtcaccggagggtaccgcaaagacgcaggggcagtccttgcgcgcgcgttacagcaagaacctgctgaataccggcacgaatttttcgattgcaggataccggtattcaacccgtggctattacgggatgcaggaagtgctggattctttcggggacagcagcgcgcttcaggaaagacggcgcaatcgcgttgagctgacgatgagccagacgctgggtggcgacctgggcgcgctgacgcttagcgccgcacgggaagattactggaatgctgccagatcaatggcgtcctggagcgttggttacaacaactactggcacaacatcagctatggcgtgacctggacatacagtaaaaatggtaccccggcgtcttcccctggtggaagtacaaatgcctacgatcgcgaccagcttctggcgtttaccgtcagcgtgccgctgggcacatttctgccgcaggcgtgggccaactatggcctgaacgtcagtcagaataatggcacaacgcacagtctcggcatgaacggggttgctctcgaaaacagcgccctgaactggaatatccagcagggttacggcacagatggcgtgggttataccggcaatatgaacggcgactataaaggcacatacggcgaggtcacggcgggctatggctacgacagcagtagcgagcgcctgaattatggtttacagggcggcatcctcgcgcatgctgacggcattacgctgtctcagccgctgggcgaaaccaacgcgttaatcaaagctcctggcgcgcatggcgtcaatattcgcaatcaggctggcgtgcgtacggattaccggggctatacggtggtaaataacctctccgtgtaccggaaaaacgatctcgccctcgatcctgagaatatgcctgatgatgtggagctggagatcaacacgcgcacggtcacgccgacacgcggtgcggtcgtgaaagcggattatctctccaaagtggggcgtcgggcgttgatgaccttaacggacaataaccgttttgtgccgtttggcgcggtggtcacgctggagggcgatgccagcagcagttttatcgtcggcgatcgcggtcaggtgtatttaaccggcctgcgtgaacagggcaccgttctggcgacatgggggacgcaatcccaccagcagtgtcgggcggattttaatctgccgcaaggatctcaatatggtggcatcgctgacattagcgccacgtgtcgccaggagcattaa

SEQ ID NO: 141888 - DNA, 378 bp, Enterobacter cloacae
atggatattaacctcgggaatatacaggccaccaatatggcgacgccggggtcatcatccgatccggtgccttttaacctgctgtttactcagtgtccggcgggaacccgcagcgtcacggtctcgtttaccggaagccccgatccggttgccggggcagactactatatgaacagcggatcggcgacaaatgtggcggttgctatgcgtgaggccggaacgggaacgctaaagggaacgggttccagcataacgcaaactattgcagcagacagaaccgccaccatggccatgcaggctgcggttgaatcggttagcggtggtgcgacgccagggagtatcagtgcagttgttgtcatgacgatgcaatacaactaa

SEQ ID NO: 141889 - DNA, 579 bp, Enterobacter cloacae
atggaattcttctggcgcaattttaagcgggaaatccactttggcgttgagcttagccacgataacgtcagtacggcggatattatcgttattacgctatgtcagggagagacgctcacctgttttcctgaattgcaggcgcgacagaaaggtatcgtgataggtctggttgaggatgccctgcgtttttcagcgttgccgtcctgttttcaggatattatttttattccccgcagcgcctcgctcgattatctaagccaggtgctgtttattgcctggcatagcgtgcagtcacccggttatatctggaagaaaattagctgtttcgaatgtcagtataaaatactatcaccgcagcaaattcgcattatgggcaatttctacaggggattatcagtggtgcagatcgcccgcgtgctgaagatgagcgataaaaccgtttttacgcataagtatatgatgatgcagaaattcaatctgcgaagtgattttgaactgattgctctgattcgcaaaatggtggagaagaacaatcgcccgaacatgctgcgtgactttctggtcaataactccgggtaa

SEQ ID NO: 141890 - DNA, 261 bp, Enterobacter cloacae
atgtatagctacagtcaggtagaagctatcaaaaccagtcttgaatggattgttaatcaggcaacgcttggccattccactccctcacgcgccgatcaaaaagcgctctttgatctccttgaactcatccagtcttacgaaattctcctggatttaattaacgaattcgggaccgatgtgatcgatacgcacattgcggaaggcctggacgtaactgaaaaactcatcgccaaggtaaaaaacagcgcgaaagccatgtaa

SEQ ID NO: 141891 - DNA, 888 bp, Enterobacter cloacae
atgaataataagctcaacgccatttccacgtttctctgcgttgccgaagcgggctcattttctgctgccgcccgccagagcgggatgaaacagtccgccgttagccagcagatcgccgctcttgagcaggagctcggcgtggtgctactgcatcgtacaacgcgcaccatgaagctgaccgagcagggagaacgttaccgccgcgacatgcagctgctgctggacgccatgcgggaagcggaaagacggctgaatcccgttgaccacaaatttcagggaagcgtgcatatccagctgccgagcggcctgggccagatcgtcttgccccatttactggcgctgcaacgcctgcatccggaactgcatctgatgatttcccttgatgaccgcattgccgatctggtgacggagggcgtggatgtcgcgatacggctgagcagcgagcccccgcaggcgcatgcggctcgcgtgctgacgcgcattgagaccgcgctgtttgccgcccccggctttcaggcggtgcacgacgtcagcgagctcgcgacgctgccgcacgtgcgatttagcggcatcccgccagatgttccgctgaagctaatatcagatgaggaaaccctcgacgtgaaggtgaataccgttttccgggccaataccagcgacgcgctgctgcaggcgctggaggcaggcatcggggtcggcggcatgcagcgacctcttgcggcccgcgcgctgcaggccggcacgctggtgccggtattgcccggctggcggttacccgatcgcgttctctatgccgtctaccctgacgcccgctttattccgcaccgcgtccgcagcgtcgtgggcgtgattgagcaattactgcctgaaataataaagaaaagctga

SEQ ID NO: 141892 - DNA, 1056 bp, Enterobacter cloacae
atggataaaaggcagcaacacaacgtcgctctggtcgcgggggccagcggcattgtcggcagacagcttgtcaacacgctcctgcatcatcagtgggaggttatcggccttagccgccgcgcggtaacccatccggacggcattccgatggtgaacgtcgatttactggacgcgcaggacagcgcacgggagctcagtaacctgaacggtatcacccatctcttttacagcgcctgggcgaacgcggcgagctggacggacatggttgagccaaacgtcaccatgctgtgcaatcttgtcagcacgcttgaaaaaacggcaccgttgcagacggtaagcctgatgcaggggtacaaagtctatggcgcgcatctggggccgtttaaaaccccggcgcgggaaagcgatcccggcgtgccgggggccgagtttaacgccgcgcagctcacgtggctcagccagtttcagcgggggaaacgctggcactggaacgccatcaggccgggcgtcgtgggaagcccggtgccgggcaataccatgaaccttgcgctgagcatcgccctgtacgcctcgctgtgtaaggctcagggattaccgctgcgttttcccggttcggaacaggcctggcacagcatcgtcgatcatactgacgccggtctgctggccgaagccacgctgtgggccgccgcgtcacctgcggcacagaatcaggcgttcaacgtgaacaatggcgatatctggcgctggagcgagctgtggccgcgcatcgcacgctggtttgagctggacactgcgccgccggtgaagctgtcatttcatcagttgtttacggactatcgcggcgtatggcgcgagcttgccggggagcggctggtggaagcggatattctgcagctgagcgacgggcattttgccgatttcgtctttagctggaattacgacatgttcggtgacgggagcaagctccggcggtcgggcttcgcgcgaatgcaggcgaccgatgagatgttcttcagcctgttcgcgcagctgagagctgcgcggattattccctga

SEQ ID NO: 141893 - DNA, 981 bp, Enterobacter cloacae
atgaaaaataaccgtatctgtcagatcctgggtatcgaaaaacctgttattcagggaccactgtcctggctcactgacgcccgcttagtcgctgcggtcagcaatgccggcgggcttggcgtgctgggccccaacgcgggcttaaccgccgacactgcggtctccacgccggaagagaccgccgaaaaaatgcgggaagaaattcgtaaaacgaagcggctgaccgaaaagccctttggcgtgaacctgatccccacggccgttaacgacgtctggacagggcctatccttcaggtggtgaaagaggaaggcgtcagggccgtggtgtatacgggctatggggaaggcagcattattccggcgctgttcagtgagctaaaagaggcgggcatcgccatcatctaccgcgacatcaaccccaccccggaaaacacccgcctcgcggaagacctgggcgcagacattatcgttgccaccggttttgacgagggcggaaccttacccgccacggcgcttggcaccttttccatcgtgccgctgattgccgatgccgtgaagcacattccggtgatggcggcgggcggcataaccgataatcgcaccgccagagcggcgcacgccttaggcgctgaaggcgtgtttgccggttcggtctttatcagtacggaagaaagccgcgtgccgcagagcgtcaaagagaaaattgttgccgccaacggcctcgatttgctgcttttccgcaccgtgccccattactaccgcgctcttcccggcaggctggcggaaaaactggcggcgatggataaagctggcgcaagcaacgacgcgctgggcaaggcgatgggaggattacggggcctgcgcctgggcatgctggaagataacaccgatgagggctatatcgcgctcggcacggggattgggaatattcacagcgtgaaaagcgtagctgaggtggttaatgcgttaacggttgagtaa

SEQ ID NO: 141894 - DNA, 270 bp, Enterobacter cloacae
atggacaccctccgctgctactgggatacgttttataccgcctacggtttacttttcacgagaataattatcctcatacttctggtctggctgtgtcatgattttctgcgccgcataaggaaaaatgccgcggacgccacaggcccgatcgcagaagccgatgcccgggagcgttatcaatggcgttttcagctgtggtcattgcgaacggtacagatcctctgcctgctctctcttttctggatgcttattaagggactctttgcctga

SEQ ID NO: 141895 - DNA, 345 bp, Enterobacter cloacae
atgctttttagcagcctgcgctttctgttctacagctggtttggtcgcttttttgtgtttgtggtgctttttagcagcctgcgctttctgctctacagccggtttagcggcttttttgtggtgctttttggcagcctgcgctttttgctcggttggcgctgcggttgctggtgcagcggcttcttttttcgctgcggctttgtggtgtttcttatggtgaaccgcttttgctggcgcagcggtggtggttgcagcaggcgcggcagccggggcagcagttgcggtagtgtcagcagcaaatgcagcagaagacagacccatagcagcggcaacaaccagagctaa

SEQ ID NO: 141896 - DNA, 948 bp, Enterobacter cloacae
atgcaaactattctcggcgccagcgggcaaattgcccgtgaactgacccgcgagcttaaacgccaatacaccgatgatatcaggctggtcagccgccatccgcagaaagtcaacgccagcgatatcacggtggcggccgatctcctggatgcgcagcagacgcagaaggcggttagcggcagcgacacggtctactttaccgccggtctgccgcctgactccgccctgtgggagcgtcagttccccaccatgctggacaatgcgctggaggccacgcgaaaggcgggcgcaagattcgtctattttgacaatacctacatgtacccccagagcgacgcgccgcaaactgaagagacgcgctttacgccccgggggcggaaaggcaacgtgcgtgcgctgatggccaaccgggtgcttgccgaaatgcagcggggcgacatttccgtcctcatcggtcgggcaccggagttttacgggcctgagagaacgcagagcttcacgaatacgctcattatcgacaggctgaagcagcacaaacgcccgcgcgttccggtccgtgacgatacgcttcgtacgctcatctggacgccggatgccagccgcgcgctcgccctgctgggcaatacgcctgaggtctacgggcagacgtggcatttgccgtgctgggacgaaaggctaacgtatcaacaatttgtgaccctcgcctgtgacatcttcggccaaaaggcggattacgtcgtgctcggcaagctggccttcgccgcgacggcgctgttttcacagggggcccgtgaaatgcgggagctgttgcccaggtacgacgttgacaacctgtttgattcaacgaaatttaagcgccgcttccctgattttgccgtcacctcctaccggcaagggctggaggtaatctggcaggaatggagagcaggagacgctaaaaccgcataa

SEQ ID NO: 141897 - DNA, 450 bp, Enterobacter cloacae
atgaaaattggcgagctgtcgaaaattacgggaattaccccgtctcgcattcggttttatgaggcggaaggtttactgccgcgaccggtcaggcaggggaacggataccgttcgtattccaccgatgcggcagcgctgctgaacatcatcgacaatgcgcagcgtgcggggttcacccttgagcaaatacgccgcttcctgccgcagccgcagcagcgctgggatcatgagggactggtcaagtcccttaagacgcgcattgctgaaatagaggcgatgcagaagcagcttgaggaaaaccgtagagagctgctgacgctggtcgcaagcatcaccagcaggccggatgggatctcctgtgacgacaacatgcagcgcctgctggggcagttgcagcgctcagacggcagcacggactcgtcgcacccgcgtagagacggtgataattga

SEQ ID NO: 141898 - DNA, 237 bp, Enterobacter cloacae
atgaagcatgagctatggacaaacgaagatggtttagatttgttttgtcttgccggtccaaggggtgactctgctcgtaaattgctggatccggactacagattagtgtggacctgtgacgcagattcccacctagaagcaatgaaaagatattacgagttccgtagctggggagaatatcaaactgattttcctgaacaggatagtaagacctacaaagaaatgggatgggagtaa

SEQ ID NO: 141899 - DNA, 924 bp, Enterobacter cloacae
atgaatagtttgttatcgagatcactttcaattgtgtttacaactctgctactgacggcctgctctggcgttcgcgacaattctgcaaagtcgtacacataccacactgaacatagcatcgcctggaatatcagcaatgcatcgggtatggatccttttagcgatgcccaggtcagccactctcaaagcgaaatgttcagccgcacggattacgattttacttttccgatagtggaaaatgataaattgaatgaagcgtcattgcctttaaccccgttactgcagtatcgaccaacaggtatgggcgtggaagagtggcaaaccgatggaattctggcgtggatccctactgaactggcccctacccccgaggcggcatctctggtgctctcagataaaattgaatctgctgtgctagcgaccttaaaagaatctaaacgcaaacatggcgatgtccgtaagggagagggatataataactggttaggaaaatatgtgtttcagaccaatgaatcccgctatctggtcgttaaatttgcagataaagatgcgggatgtgagcttccaaaaaatggatattatgatcctgcaagccagaatagtccgacctgcggcttttacaccagcttccacgacgcagaaaaaattgttcgtactcctgacttcataagtgcgaatgcgaccgggaaaagttatctcgtaaggcacgatgggttaaatggaagtcacctcagcccggtatttataaacagcgccggtcaatcggatgcaaaaaatcagcgtatgaattacgccttcatgcaacaagttagccgccatcttccagcgtgggtaattatctacctctcacccaaagaagataagggtttacctgccgttgtattacagcaagggaaagtgcattttttctttcgcgaaaaataa

SEQ ID NO: 141900 - DNA, 561 bp, Enterobacter cloacae
gtgacattgcaagcaacctggcttgaacagcctaagcctagtgatgaaagggaaggtgtttcgatcatcgacgtcaatccctttggcgctaatggagaaaaggatcgacgactgttaatcagtaagggcggtgagcccaatgtgcttttacagttatatatacatgccaatgaggatggctgcctgatttccagcgccttttgtgatttcctactgaatgaatcccaggtggcaatcatttgtggcgaccactttcatgttgttgagatgaccacacactcgttcagtagccatccactaggtgattacgttggccatatttattcagttcctgacatccattctgacaggctacataatcgggttctggtcaccacttactgccacgtttttctgatggatattgctgcgggcattctctggaaatccaggcagtgcgccattgatggcgtgatcattacatcgatagagaatgagacggtgctgggcctgggagagtgggacccgccaggaggttgggaaccttttaagctcgatcttaaaacgggtatcccgatttga

SEQ ID NO: 141901 - DNA, 387 bp, Enterobacter cloacae
atgtttacccatatgcgtattgccaaacccgtcacaaatctcgaaaggtcttttcagatgtacagccaaggactgggtctgcataaaattgctgaattcaacgatcatgacggtttcaatggaataatgttaggacggggagacttacaatggcatatagagttcaccttttgccataaccatcccgttcaacccttgcacactgaagaggatttactcgttctttattattcggatgaaaatgaatggatgcgtgcctgcaaaagaatgctcgaggctggtttcagagtgtcaacgtcgttcaacccctattgggatgttaacggaaagacacttgttgaccgcgacggatatagagtggtcatgcaaaacaaggcatgggcataa

SEQ ID NO: 141902 - DNA, 1041 bp, Enterobacter cloacae
gtgaaccataaaaaaaggatcgttgtcgtaggtgctgggatcactggtgtatccatcgcatggcatctcgcccacggtgaatttgacgtcacccttgttgaacaggctatgcctgcctcaggtgcgacaggtagcgcgtttggctggctgaccggtgtggtgaaggatgacgcggccgacgtgtttatccggcgcatcgcacttgcggactggcataggctggaagaatacataccggaacttcacattcaatggggtggttcgttaagctacggcgcggcatccgggtcctgctggcagggcgaacgtctcatcgataaggctgaaattacccgtcttgtgcccgccctgataaatcctccctcacaggcccgctatgctgcaaaagatggtgccattgatgccgccagcgcaacgcgactattgctcgaaaaagcctgtgaaaaaggcatcgtgctaaatacgcaaacaaccgttacggatctttgcatgacggaggggagggtgacaggcgtcctgacctctcggggaaaactggacgcagattgcgtcgtgctggcctgtgggacaggtattccagcgctgactgagcaggtgggtatccatgttccggttctgtcatcatcggctatattactgcgctttacggtcccccagcgcgtggtcaatacgatcgtctcaggtgatgatattgaggttcggcaagcgcgcaacggtgagttattagccgcagaagattacccggcaagcggcaacgccagagaaacggtggaggctgcacaaagtgcggtaagaagcaggctcacgggcgcagagtcggctgctctcattcagtactcaacaggagagcgtcctgttattcaggatgggtatcccgttcttggttttacggatgagagcaggagcgtttacgttgcttcaatgcacccagccgtgacgtgcgcagcgacgattggcagagtggtttcagaggagttacgcgaggggcagagcaatgcaatcccgcaatgttaccggccatcacgctttataaataaatag

SEQ ID NO: 141903 - DNA, 183 bp, Enterobacter cloacae
atggggtttatagccaaccgcgccaaggagcgcggctgtttgcaactcgactggttatcggtggcggcagatccgttggcacagaagttttatgaatctctcggtgcgcagattatcaagagcgttaactatcacagggtttatgatcaaacattaaatgagcttgcccgcagcgccgactaa

SEQ ID NO: 141904 - DNA, 1335 bp, Enterobacter cloacae
atggtgagttcagttgatgtaaaaaatgaagtggataacacccctgttatcaagcgcgtggcgaccgcttcggcgattggtaccgcggccgagtattacgacttctttgcctacggcacggccgcggtgctgtttttcggtcatctattttttccgagcagcgacccgctgattagcacgcttgccgccttcgctacctatgcagtgggcttcctggctcgtcctgtcggcggcattgtgtttggtcatattggcgacaaagtcggacgtaaaaaagcgctggtaatgactatcctgatcgtcgggctagggacattttgtatcggccttctgcctacgtatgaaaaaattggcatctgggcgccggtgttactgattttgatccgcatactgcagggatttggcgtgggcggcgaacaggctggcgcggtcctgatgacggcagaatactccacgcccaaacgacgcggattctttgccagctgggtacaggtgggggcgccggcgggtttcttgctgccgatggccttgtttgccttgctcaacatcgtcctgacgcctgaagagatgatgagctacggctggcgcattcctttcctgctcagcgcggtactggtgctggttggtttgtttattcgcctgcgcattgatgagtctccggtatttgccaaaatccgtgagaccaaagccgtagagtctcgcccggtgatagaagtggtacgagattatccgggcattgtggcaaaaggcgtttgtgccaagctaattgaagcctgcacgttcgcgatgtttacggttatcgtgctggcctacgggaaagccaacggtctcagcgccacgatcctgatggaaacgatgatcgtcgctgttctgctggagatttttgcgattccgctcatgggtgcgctcagcgacaggattggccgcaagccggtttacattatgggtgcacttctgcaggtagtggctatcgtgccgttctttatggctatcaatcaggacagctactggctgacgcaaatagcgatgattgccgtgattaccttcggccacagcatgtgctatgccccgcaggcatcctattttccggaactgttcccgacccatatccgctgtagcggcattgcgctgatctggcaggtgggctcgctgattggcagcggcgttctcggcctggtggcggttaaaatattgcaaatgacgcacggccactactatggcatggcggcctacgtgattgtccttggcgcgatctcggtggtgggcctgttgaccctgcctgaaactgcgcctcgtcggcgcgagagcgagtatcaggagtggggaaaacattaa

SEQ ID NO: 141905 - DNA, 492 bp, Enterobacter cloacae
atgaacgcactcactaaaaaaacaaggttgattgctatacttctactcgttgtgctggcgttatctgtttggttctatgtacacaaacggcagaatcaaaattttctaaaagttaactgctcaacgattctacgctataaccatcaggatcctgatttcgttgcgacgttggacctggtctttcgtttagacgaaaaccatgatggccaagctgtgttgtcaggaaatattcactctgaaaaaggggcgaaaattatctcaagaacagtattgttcagttatgaaatgaacaggcccggcgagatctccataatggatacacgctacgtgaaaactcaccgcgacacggccgatgaggagaatttcaaaagcagtttcttttatgttccggatggaacggtacgccagctgagagttgagccttccagtaatggttggttgataggaaacttacagtcacctttcgctctgtgcgtgaacagggaaggttaa

SEQ ID NO: 141906 - DNA, 615 bp, Enterobacter cloacae
atgaagatcctgcatatagattcaagcattaacggcgagttctcactttcacgtcagctgacggcagaggtggttcgccagctcgcgtcagacaaggtggtctatcgtgacgtcgttaagacgcccgttgcccacctgaccggcgccgttgccgccggcttccggccgctgcggatagccacggacgcgacggcggaagacgtccgcgaacaccggctgtccggggagttggtgaacgagtttctcgacagcgacattatcgtgatcggtgcgcctatgtataacttctccgtctcaacgcagcttaaagcgtggttagatcgactggcccagccgggaaaaaccttcagctataccccgacgggcccggtgggacatgcgaccggcaagaagattattgtcgtctccacccgaggggggatctatcacggtacgccaatcgcggacatggattttcaggagcgatacctgcagaagttttttggctttctgggcatcgacagcgtggaattcgtgcgtgctgaaggggcaacgcgcggtgaggagatccgcgctaaaggcattgcgcaggcgtttgacgctattccgtccgtcatcgccgcctcgctaaaatag

SEQ ID NO: 141907 - DNA, 765 bp, Enterobacter cloacae
atgaaaccgacacgcttgcccgctcttctcactttgctgtgcctggccgcgtcgcagccagtgcaggcgcggattaataacatcgtcctcgtgcacggagcctttaccgatggttccgtctggcaggcggtaatcggccgcttgcagtcccggggctaccgcgtcacggcggtgcagaaccccctgacctcgctgaaggatgacgtcgccgccacggagcgcgtcatcgatcgccagcaaggggatgtcgtccttgtcgggcactcctgggccggcgcggcgatcgcccaggcgggcaataacccgaaggtgaagaagctggttttcctttccgcccttgcccccgacagcggagaatcggtcgactctcttctgacccgacttaacgcgccgatggcggacatgcgcccggataagcagggattcatctggctggacgatcccgtcgcttatcagcgcgtgatggccaacgacctgcctctaaaacgcgtaaaagtgcttacggctacccagcagcctatcgccgcaggcgcctttagcgagaaggttgagctcgccgcctggcgtgaaaagccctcatggtatctgctgaccgaagacgatcgcgccctctctcccggcgtccagcaacagcttgctggtgccatgcacgccaccgtcatgcggattaagagcagccatatgtcgatgatttcccatccggatgccgtcagcaagcttatcgaacaagcaacccagcccgacgtaaaggaaatgaaaaaatga

SEQ ID NO: 141908 - DNA, 987 bp, Enterobacter cloacae
atgaaaattggcattttagcgttacccggcagcatgaagtcagccgtggctgggctctgcgatatgttctggctggccaatgaggtgattgcccagcagccggacggcgagggcatttctgcttttgaagcggccatcatcacggcggaggggacgccggttccggacgcacagggccggctgattgacgccgacgggagttttaccaccgggggaaacttcgatctcgtgattgtcagcgggatgaagcttgacgagcaaaagcgcccggtctcgccagcggcggtccacgaggcgggagaatggctgcggggcctgcatagtcaaggcgcgatgctggcgggagcctgtgccggcgggctggttctcgccgaggcgggggtgctaaatggtcggacatgcaccacgacctggtggctttaccacacttttcgccagcgttatccgctcagcaaaccggtgtggggtaaggcgctggtgcaggacgcgcggattatcacctccggaggtccgctctcgtgggttgatctggcgctgcacatcattcgtctgcacgcggggcagaagctggcgcgcctgacggccgatatggccgtggctgacagccagccgatgtctcagcaggtttacgcgccggctggttttttaaactcagtacacccgatgattatgaaagcggaacacatcgtccggtatgaaaatccggcgattaccgtggagcagcttgcgcgggtgctgaatatgaccacccgcaccctgcaccgaaaaatggcggaagagatgaatgaaagccccaaaaactttttgacgcgcatgcgaattgaaaaggcgatgcggctcctggagcagccggggaacgtgatagggcagattgctgaggcttgcggttacgctgacgacacggcattcagacgcgcatttaccggcgtgacgggaatgtcgcccgggcaataccgcaagtggatcgccgagcggcatacggaatag

SEQ ID NO: 141909 - DNA, 2274 bp, Enterobacter cloacae
atgggaagcaattcttctttttctgcccgtagaacggcgctggccatggccgttgcgctgtgttgcgcctggcaatcccctgttttcgcccacggcagcgaggcgcatatggtcccgatggacaaaacgctgcaggacttcggcgcggacgttcagtgggatgattacgcacagatgttcaccattgcgaaagacggtgcctttgtgaaggtcaaaccgggcgcgaaaaccgccatcgtcaacggcaaaaccctcaagcttgaggtgccggtggtcatgaaaggcaacaaggcctttatctctgacagcttcatcaacgatgttttccagtcaggtcttgaccagacattccaggtcgaaaaaagcccccacccgttaaacgcgctaacggcggacgaaattaagcaggccgttgaaattgttaaagcctcagcggattttaagccgaatacccgcttcacccagattgcccttgccgagccagagaaagccaaagtgtgggactttgtgcttaacggtacgcctgtggattccccccgccaggcgaagatcgtgatgctcgatggaaagcacgttatcgaaagcgtggtggatctgaaggataaaaaaatcctgcgctgggaaccggtgaaagacgcgcacggcatggtcctgctggatgatttcaccgcggtgcagcagattatcaacgagagcacagagtttgccgaggtgcttaaaaagcacggcatcaccgacccgaaaaaagtgataaccacgccgctgaccgtcggctattttgacggtaaagacggcctgaagcaggaagatcgcctgctgaaggtggtgagctacctcgacgttggcgacggaaactactgggcgcacccgatagagaacctggtcgccgtggtggatcttgagcagaagaaaatccagaaaattgaagaaggcgccgttgttccggtgcccatgactccgcgcccctatgatggccgcgaccgcgtagatacgccgaaaaagccgctcgacatcaccgaaccggaaggcaagaactacaccattaccggcgaccggatccactggcagaactgggatttccacctgagcctggactcccgcgtcggcccgatgatttcgaccgtgacctataacgacaacggcaaaaagcgccagattatgtatcagggctccttaggcgggatgatcgtcccttacggcgacccggacgtaggctggtactttaaagcctatcttgattccggcgactacggcatgggcaccctgacctccccgctggtgcgcgggaaagacgtgccgtctaacgccgtgatgctcaatgaaaccatcccggattacaccggcgcgccgatggagatcccgcgcgcgatcgccattttcgaacgctacgccgggccggagtacaagcatcaggagatgggccagcctaacgtcagcaccgagcgccgcgagctggtggtgcgctgggtgagtaccgttggcaactacgattacatcttcgactgggtgttccatgaaaacggcaccatcggcattgacgccggcgcgacgggtatcgaagcggtgaaaggcgtgcaggcgaaaaccatgcacgatgccaccgccaaagacgacactaaatacggtacgctgatcgaccacaacatcgtcggcactacgcaccagcacatctacaacttccgcctggatatggacgtggacggcatcaacaacaagctggtggccatggacccggaagtgaagccgaataccgccggcgggccgcgcaccagcaccatgcagatcaatcagtacgatattgataccgagcagcaggcggcgcagaaatttgacccgggcactattcgcctgctgagcaacacccgcaaagagaaccgcatgggcaacccggtctcgtaccagataatcccgtacgcgggcggtacgcacccggtagcgaccggcgcgaaatttgccccggacgagtggatctaccatcgcctgagctttatggacaaacagctgtgggtgacccgctaccacccggatgaactctacccggaaggtaagttccctaaccgctcaatccacgacacgggcctggggcagtacagcaaggataacgagtcgctgaacgaccaggatgacgtggtctggatgaccaccggcaccacccacgtggcgcgcgcggaggagtggccgatcatgccgacggaatgggtgcataccctgcttaaaccgtggaacttcttcgacgagacgccaacgctcgggaagaaaaaagacgataaataa

SEQ ID NO: 141910 - DNA, 801 bp, Enterobacter cloacae
atgtccataacaatcagtgtcctgctggagaatcggcctaaccataacgctaaaagctcactgcgggccaaagcagggctcagcctgtttatacaggatgaaaatgattccattctctttgataccggtcctgatgatagcttcctgcataacgcaggtctgatgggggtcgatttaacctgcctgaccgcagcggtactgtctcacgggcactatgaccattgcggcggcgttccgtggttaccggataattgccggatcgtatgccatccccacgtggcccgcgagcgttattcggcaatacggttttcggggtataccgccagactaaaaaaactgtcgctgaataatgattattcacgctatcgcatggaatacagccgtaccccgctccagcttggggagcgctttatgtggtcaggggagatccctgtcgccaaaccgcacgcatacggtgttatcggcagcaaaaatgcgaatgcggattatgtaaaagatgaaggggttctgatttataagtctgaccgtggcctggtcattttcatcggctgcgggcaccgagggctgattgatattgtgcgttactgccagaaaataaccggtatcaatcacatccatgcaattttcggcggtttccatcttcgctgtgcgtcaccgcgtaagctctgggcagtcaggcagtttctgcgcgtcctgcagcccgacaaaataatgggctgccattgtacgggtaaatggggcaatttgtggttgccggacgcagtcaccccgtcaactggggatatttttgttctggggtag

SEQ ID NO: 141911 - DNA, 681 bp, Enterobacter cloacae
atgtacaccgttctaccctctcccatgctgcataccattacggggctgcggtttcagcctttagtggattttcattccggccaggccgtggcgcatgaggttcttgtggagatccacaacgtcaatctggaggtgttcttcgcttcgctgcccgcccgctgtgcgctgcaaatctttttctggcaggcaaacacgctgttacggaggccggacaaaggccagtactggctaaattttccggccgatcggctgcttgaccccaaagccatcgagctgttactggccctacgccatcagcagcgcttaacgattgagattcaggacccgctaaccctgacccgcatgagtaccgcggagcaacgcgacatccacaaaaacctgcaccggcttaaggcggcgggctggaaaatctggctggacgacctgacgtacgagctggccgacgactatgcgcgacttgccctgccggttgacggcatcaagcttgaccgctcagagctcaacgccgctgcccggtttgacgcattcgttcacttcgtcagagataacattgccagagctgtcgtggttgaagggattgaaaccgcgcaggatttacagcgagcccgcgcgtcgggagcccggttcggccagggttttctctggccggaaagccggatagacgccagcgtgacggcgtaa

SEQ ID NO: 141912 - DNA, 633 bp, Enterobacter cloacae
gtgttttatcgggtcaatattctgcaggagatgataagcgatgcgctgcagaaattactgcctgaatattccctgcgcatatcgatagttgaatcaacagagcagctctttgatgcgattatcgatcgccaggtcgatatggtgataaccgagttcagctatctgtttaatcataacgcctggggagtgcaaaccagtaacaggcttaatatgttgtgtcatacgcataacgtaaagcgcgtgctttttgttccggaattacagtacgggttattaaaaaaagtgctggagatgaagtacgagctgacgctttctctgcaggacgagcccggggagctgaaaacggaattacgggcgctgctgacgacagaggacgttaagccgcggatctcatcctttttgaaggggatgatgcgcgccggcgcgcgatcgcgctcggtgctttccgcccgggaatgggaggttcttcatcttattgtggaaggctacacggtgacggaaattgcccagctgcgaagccgctctgccagtaccatcgccacccaaaagcacaatgcgatgaagaagctcaacctcgccaaccacagtgaactgatcaggtacctgcagatggcggggaaaatcgggaactaa

SEQ ID NO: 141913 - DNA, 486 bp, Enterobacter cloacae
gtgtcgaagttaaatctgagcatagtattaggcgtggtcgtgctcctttctggtatcgcctttcttctgtttcaccctgaaagaacgcaggaagagggatttggctgtcagtcagatacggtttcctggaaaaaatactccacgggagaatcagcagacatgtccttaacgacgctgtttctttttaacagcaacgatattgtcacggtgatccacaagggggattttacccgtggtgacaagcgctatttgatagatcgaaactacgtgctcaatgttgagaaagtggccggcagcgatattttctatattaaaggaaagaaactgaataaatctgaagatgatgttgcaccggacggcatcgtcaatgagttactgctggacaatatcgacttcttttatgttacccgggttaaaagtcatgcctggctaattaaaggactggtattgcctataatgatgtgcgtggccgtgccgacatcctga

SEQ ID NO: 141914 - DNA, 678 bp, Enterobacter cloacae
atgcgcgtaaacacatggatttgcctggctgccacagtatgttcaaccgccgcgtacgccggcggcgtggggttaggcgcaacgcgaatggtctactccagcgccaccaaccagtccatgctgcaggtcaggaacacgcatcccgacgccacgttcctgatccagtcatggatggaaaacgagaaagggcaaaaaaccaacgatttcgttatcacgccaccgctgtacgtcatgaaacccgccagcgaaagcgcggtaaaaattatgtttaacggcaaagccctgccagaagatcgcgaaacgctctactggatgacggtcaaagccattccgcagcagtccaaaagcggttccggcaattcgctgcagtttgcgtcggcaaaccgcatcaaggtcttttatcgcccggagagcctcggacaaggcgcaggcgaggcatggaaaagcctttcgggcgtgtatcgcgccgggaaagtgacactcacgaacccaacgccgtactacctcaccactatcaacgtgaaaattgatggtatgccggtgcagccggtgatggtgccgccgaaatccagcgtggcgctggccgaaaccttcagccatgcgaacaccatgagctatcagaccattaacgattacggggcatggacccccgccacgcgcgcgtcgttatcccaataa

SEQ ID NO: 141915 - DNA, 603 bp, Enterobacter cloacae
atggcgaataagaatgaaacacaacaacatttacgcatcgcgttaatgggtggcgaccattatgcgcgaaagggcatcatcacaatattaaggagcattacgccagaatctcagattgaaatgacagccggggattttcagcagcttgataacgtattgtcgactacgccaattgatattctcctgttatcaggttctgacaagtatcacaccggatatgattatcttaatgggttgaaaagaatcaaagcgaaatatcccggcgtgattgtttgtatgtattccgcccctgcgcattcatcgcaatggatcagaggcgatatcgatgcctatatctcgctgcatgagtcggtttattgctggcggacgaaattattaaaaatggtcgatagccgctatcgcccacaaaagaaaccaacggcgttatcgctgacgccaggagagtggagggtcttgaaggaactcaggaacggactggatatgagttacatcgcagaaacagagaagctttcatatcgccgggtaagcgctttaaaaaactccgcgatacgaaaactcgggctcaggaataagacagatttgctggtctttttaaccagttag

SEQ ID NO: 141916 - DNA, 849 bp, Enterobacter cloacae
gtgaaaaacggcgcaattgaacggagaacactcaccaacgctatgcataagcattacatcatcaataatatggttgagtttcatcccgcgaccagcacgctgagggatatcgccagccccgatcgggttgtggttttaaattctccggcaggccgatgtctgttgttattaatagaaagagccggaactattgtcacgcaacaggagtttctggatattgtctggcagcgccgcggtatgctggtctcgcccaatacttattatcaaaacatctctattctgcgaaaggggctgaaaaagattggttttgaggttgaccccatcgtcaccattccgcgcatcgggttaacgctggcgagcgatacgcaaatcgtgatcaaagacgcccatccccgcgcagcggagcttcctgaggaagatatgcctgagccacgcgtcatggccttgcctgccgcgctgccaccgctgtcggcggaaccggtagccgtaacccgcgcagccgggcatcgctcccggtggcttcctggcatgctgatcgcgctgctggtgctggttggagcaagcatcgcaactcacagcagcgcgcgtgaaaaccgttttatcgatgactataggtttactgctttggtcggggcgtgtcacgtctacctggctcaggatattcagacccaggacgagcggtcgaaagccctggcatacgtgacgccgtttaaggacgcctgcacgagctatccgtgggtgtacatcagctggtactccctgctgccgcgcgcgtccgtgattcggtgtgacagatcgatgaaggagccgaatcgctgcatctctgactattttattgaggagcgctag

SEQ ID NO: 141917 - DNA, 480 bp, Enterobacter cloacae
atgacccgttttcgtcagctgctgtatctgttcaccgcatgtctgctggtgggggtaatgctgtcgggttattacctgtggcaccggtattacgtgcagcctttttcgtgtcaggcgaacctggtacagcatcatcccgaagagaaactcaccctgtggctgaattacatctttgacggcaacagcgggacgctcagtatgaatggcagcgttgatagcgatccgacaaaaaatattgaccggaaaatattttttcaggttgagcgcaaggataatgtctttttactgacttccttacggcatatgaaattcccggacgataatgttaccgataactggcttgaaaaatatgagccgcagttcttcgtataccccggaaaaagtatttatattcggatcaatgaacaacaaaatgataactatattttcacgttaggaacattaccgacatatgtatgccgcagttcaaaaaatggatga

SEQ ID NO: 141918 - DNA, 1671 bp, Enterobacter cloacae
atgtggcgatggattagcgggttaatgctgttgtggtgtggctatggcgcggcagtgtgtccggtgtggtcgcaggccaaagcagagaaagaaatcgcgtcgttaagcgcgcaaatcaaacgctgggatgaggcttactggaagcagggcgtgagcgaggtcaatgacgaggtttatgaccagcttaacgggcggctaacgcagtggcagcactgctttggtaccgatcttcctgaggacacccttcctgcgctgacgggcaacgtaaaacaccctgtcgcccatacgggagttcataaagctgccagcaaagaagcacttgcccagtggatgcgcggccggaacaatctctggatgcagcctaaagtcgacggcgtagcggtaactttggtgtatcgcgacggaaagctaactcaggccattagccgtggaaatgggctaaaaggcgaggactggactgcgcaagcgcgtttaattccttcagtgccccaagaggtgtccggcttgctggcaaacagcgtcctgcagggggagcttttttggttgcgtgacaaccacattcagcggcagatgggtggcatgaatgcgcgcgcaaaagtagcgggtgcgatgatgcgacaaaaggacaacacgcttctgagccagacagggatatttatctgggcctggccggacgggccgaaaggaatgcagaaccggttatctgagctttccagggccggattctctctgacggcacgctataccctgccggttgaaaccgttgatgccgtcgaaaaacagcgttcggcatggcaaaacaccgtattaccctttgccacggatggcattgtggtccggtcagcagacgccccttcgggtgaaaattggttgcccggagaaggcaactgggtcgtcgcgtggaaatatccccctgcagcacgggtcgctgaggtcagcgatattcattttaccgtgggtcgaacgggcaaaatttccgttgttgcggcactggagcctatgcagctggatgataaacaggtgcagcgggtgagtctgggctcggtggggcgctggcagaggctggatattgccccgggcgatcagatacaggtcagcctggccgggcagggtattccccggtttgatagggtggtctggcgggggatggacaggcaaaaacccgagcctccggcctcgcgttatcacgctcttagctgtttttatgcttcgccggagtgcatggagcagttctttgccaggctgacgtggctcagctcaaagcaggtattcaatattgaaggattaggcgagtcaggatggcgaaccctctggcaggcgcatcgttttgaacatctcttctcatggctgttattaacccagtctcaactgcaggctacaccggggttttcttcagcacgcgggctggcgctctggcatcgatttaatctggtgcgcgagcagccatttatccgctggctcatggcactcggcgttccgctgacgcaggcttcactgagggcgttgggagacatatcgtggcaggagatgagcgggcgtaacgcaaaggactggcagaccttgccgggaacgggagaagagaaggccaggcaaattgttaactggatacacgcgccagaaattgatgtgctggtcaggtggcttgctcagcagcacatcaacgggttctga

SEQ ID NO: 141919 - DNA, 990 bp, Enterobacter cloacae
atgattaagtgtctgattaagttatttattattacagcggcattaaccagcaccagcgtttttgccgtcaattgccagcgcgccgcaacgccgctgcagaatacaatttgtaataatgccaatctgcactggctggatgacaccatgacgaacgtctaccgggcgatgctggtttatcgtgatgccgggcaggtgcatcaggagtttgaggcatgggagaaatcgctcagtgagtgtgcctcggacgactgtattgagcgcgcttactacaccggcatcagcaggattgctgacgtgccgtctgacttctcctgggaggggcgctggtggaataccagtgccgccaacgtcagcggcggtgtgatccagttcagccacagtgcggactggtcaatcattgctgatattcgtatctgggcgggattgaataaagatgaattcaccgcagaggcccgaaaattaaacggtatggtgctgatcgataatatggtcgacagcaagcattgtaaggtgctgtttattccgcggataagcggcgccatccaggcatacagcaatgcggactggggttgccgtctgttaatgcccagcggcgcgtttattgatggccgctatgtgaagtctgaccaggatccgcggccaaaagcgaccctgcagtcgctggagatcttccgggatgcgaaggtagacgaacgctttcgcgcgctggtgggtgacgaataccaaaagtttgtagataccgccaatatttatatctatcaggacgatattgataacatcggcgcaacggtcgtatcaatgtgggttcgcggcgccgccaatacgcgtacggcgattattatgtacaccgctaacgacatttgggcggcacggattgagcctgacgataagggcaagctggcgttttcctacttcagtacccagggtaacgatacggctaaaatgccgcgtaccctggcggaatggaaattgcgctacctgtctcaataa

SEQ ID NO: 141920 - DNA, 1134 bp, Enterobacter cloacae
atggcctcaagcggcgataaaagcgaaaaacccacccccgggaagctgcgcaaagcgcgggaaaagggggatatcccccgttcaaaagatctaaccatggccgtcgggctggtggcgtcctttttcactctggcgacgtttttgccctattaccggcagctgatcggcgagtcgttcgccgccgccggcacgatggcgcaggaccttgataaccccaccattctgaaccagttcctgatgctcaacctgagcgtgctgctgcgctttatcgctacgttaaccccgattcccctggcctgcatcatggccagcctggtgccgggcggctggatatttaccccgacgaagctcaagccggactttaaaaagctcagcccgataagcggcatcaagcgcgttttttccgccagccattacacggaagtcggcaaaatgctgctcaaatgcgcgaccatcctcgccgtgctttacacgatggtacatagccagatgggcgatcttctgcacctgcagcggctctacctgaaccaggcgattacgcacggtttttctattttccatcatgttgtcagctacttcgtcgccgttatcgttattttcgccctgcttgacgtgccgctgagcaagtttatgttcaccaaaaagatgcgcatgaccaagcaggaggtgaaagaagagtacaaaaacaacgacggtaatccgcagattaaagggcgcattcgccagctacagcgccagatggcgatggggcagatctcgcgaaccgtacccaccgccgacgtcatcatcactaacccaacccactacgcggtggcgctgaagtacgacccgcagaaggcggaagcgccgtatatcgttgcgaaaggcatcgacgacgtggcgctgtggatccgtgaagtgggcgccagccacagcatcgaagtggtggaattcccgccgctggcgcgcgcggtgtactacaccacccgcgttaatcaacaaattccggcgcagctgtttcgcgccatcgctcacgtgctgacctacgtcatgcagctcaaatcctggcgcgaaggtcgcgttgagcaaaaaccccgcctgaacaggcacattgatattcctcaagaggtattaaaagccaatggcgaacagtaa

SEQ ID NO: 141921 - DNA, 774 bp, Enterobacter cloacae
atgggaatcgatattcaggcgctgtggacgcccattatggcgctggtgctgcccttcctgcgcatccttgcctttctaaagtttgcgccggtgctcgataaccgcgtcttttcgcggcgcatcaaaatcggcaccgcgctggcgctggctatcatcattacgccgatgctgacgcataacgtggtgcttaacgaactgatttccctgcgcagtattttgctgattggtgaacagctgctgtgggggtttatcttcgccaccgcgctgcagctggcgttcgtcgcgctgcaaacggccgggcatattctgtcgatgaacatggggctcgggatggcgatgatgaacgacccggtcaacggcagctccactacggttatctctcagattatctatatcttctgcggcctgctgtttttcattatggacgggcatttgctgctggtgaccattctgttcaagggtttcagctactggcccatcgggcaggccattaaccagccgtcgctcatgctggtcgttcagggtctgggctggattatggcctccgcaacgctgattgcgctgccgaccacattcgtgatgctgatcgttcagggcggcttcggcctgcttaaccgggtctccccgacgctgaacctgttctcgctcgggttccctatcagcatgctgtttgggctgctgtgtatttcaatgctggtgaccaacattccggatcactacctcaatctgaccaatgaaatcctggcgaaacttgacgccataagggtgcagtga

SEQ ID NO: 141922 - DNA, 273 bp, Enterobacter cloacae
atgatgaacatggacacggcgggcgacatcatggcctccggtattcatctggtgctggtgatctccgccgtggcgattatccccagccttatcgtcggcctgtgcgtcagtattttccaggccaccacgcagattaacgaacagacgctgagcttcctgccgcgcctggtcgtgacgctgggcgtactgatattcgccggaaaatggatgctgacgcagctggtggatttcaccgtccagatttttcatcaggcggcggcactggtgggctaa

SEQ ID NO: 141923 - DNA, 399 bp, Enterobacter cloacae
atgagtgatttgcaacatgagctgagccagtctctggatctggacgacctgaacctgagcgatatgccgcaggaagagaccgttgaaggcaatatccgcctcgatatgcagcctgaaattcgtcatgcgccgcaaaccgacgaacgccgcatggcgctgttcagccgtattccggtgacgctgaccctggaagtgtcctccgtggatatctcgctggccgagctgatgtcggtaaacagcgattccgtgattgagctggacaaaatggccggcgagccgctggatatcaaagtgaacggcattcccttcggcaaagcggaagtggtcgtcctgaacgacaaatacggcctgcgcattatcgagttcaacgcaaaagaactgggcgagctcacccgatga

SEQ ID NO: 141924 - DNA, 876 bp, Enterobacter cloacae
atgtaccctgcttcagaacgaatcagaatccaccagcagaataaccttcctgaactggtaaaacttgatgtcagtaaactcggtcgcccatggcataagctacctaaattaatgaatgatagctttgatatcctggatgcacgcctgagcatttactttctgaaaaaattacgggtcaacgccgcgttagaatccatgacgtttgtcattgataagcattataagaatgcgcaaatattctctacgccttacgggaatattggttttgttattgaccgtattttattactcaacgtcctacatgattattatgggctgagtaaagacaccaaccatatagcgcctgatgaatctttaccggtaaccaaaacggaagagcgccttaaaagcaagctggggcaagaactcacgtcgctgattatttgcaaagaaacgtttggcgaggagctggatatcagggttgattattcctcggtcattaatcagtgggtctggggcatcacctttaccctggccgggtatagccacggcagtttcaccgtgctgctcgacaatcatcatgtcgaccagatgctggcgacgctgcgcgcgccggacggcagcgctcgggccgttgagcagagcatgagcttaagcccggcgcagattgaacgcctgttcgacagcctgccgctgaagctgaccggccgcctcgccagccttaacctgaccgttgcccagattgccgacatcaaacccgggaacatcattcccatcgcgttaaatgaaccggtaccggtgtttatcggtaaagaacagatttttgaagccgcaatcgccgaagatcgcagcaagcttttcttatgcgatatccacgacaagacaaccgagaagtaa

SEQ ID NO: 141925 - DNA, 1029 bp, Enterobacter cloacae
atgagcattatcattgaacgtgaagaccgtaatggagagggctttattgccgcctcccctgccagcgtgggtgtgatgtcattagcccgccgcgttgctaaatataatgtatcagtattggtcaccggcgagacgggaacaggaaaagagtgtattgctaaatatattcatgaacatgcctgcacccgcggtgcgccgtatgttggcgttaattgtgcggcgatcccggaaagcatgctggaagccattttatttggctacgaaaaaggggcatttaccggtgcggtcgccagcgtggccggaaaatttgagcaggccaacggcggaacgttactactggatgaaattggcgatatgccgctgtcactgcaggcaaaattattacgcgtcttgcaggagcaggaagtcgaacgactgggaagccacaagcgtattccgctcgatattcgtctgattgcctcgacgaataaagatctgcagcaggaaattgcggaagggcgttttcgccaggatctgttttaccgtatttccgtggtgcctattcatatcacgccgctgcgcgagcgcaagcaggatattttgccgctggttcagcaatttattgcgaaataccgcgcctttcacaaaggcgacgtgcgtctgagcgacgacgcccgtaacgcgctgctgagctatgactggccgggcaacgtgcgtgagctggagaacgtaattcagcggggcatgatcctcggcaacggtgacgaaatcaaagccgccgatcttggcctggtagcgcgcgtaccgctgccggaaaacccggcagtcggcatgatgcccgcctaccgggagcaggacagcagctcggccattcgcgacgtcaagctgcatggccgcatggcggagtaccagtacatcatcgacctgttaaaacgccataaaggcaacaaatcgaaaacggcggcgttcctgggcattacccctcgcgcgctgcgctatcgccttgcgtcgatgcgcgacgaaggcattgatattgaatgttattcctga

SEQ ID NO: 141926 - DNA, 369 bp, Enterobacter cloacae
atggacaaaatagctgccgcaggtattaacaccgcgcaacaggcgctgctggaacgtatgcagcgcacggcctcgctggcgtctgccggtgcggtaaacctctccccgacgatagcgccagcgaatgacgcgtttacccgtacggatccggtctctttctcgcgcgtgctgaacagcgctatcgacaacgtcgatgcgttgcagcacagcgccagcgcaaagcaaaccgcgatcgatatgggacaaagcgacgatttagccggtgccatgattgagagccagaaagccagcgtggccttttcggccatgatgcaggtgcgcaataagctcaatagcgcgctggacgaagtgatgaatatttcgctgtaa

SEQ ID NO: 141927 - DNA, 1692 bp, Enterobacter cloacae
gtgttaaacaaaatcaaagctcgtctccccgcgctctctctgccctctggcgtcaacaaccgcaaactgctggcgattgccggcggcgcggcgctggcgctcgggatcgtcgcctcgctgtggaaccacaatcagggttacgttgccctttacggcacccaggaacagatcccggtttcacaggtggtggaggtactgggcgcggaaaatattgcctaccgcgttaaccccgataacggccagattctggtcagcgaaagcaaactaccgcaggcacgcatggcgctggcggcaaaaggcatcagcgccgcgacgccggacggctacgagctgatggataaagaagagatgctcggcagcagccagttcatccagaacgtgcgctacaagcgcagcctggaaggcgagctggcgaaaagcatcatggcgctggatcccgtggagcacgcccgcgtgcatcttggcctgagcgagtccagctcgttcgtcctgaccaacaaaccgagcagcagcgcgtcggtgatcgtgcagttgcgctacggcaaacggctggatgaccagcaggtggcctctatcgtgcagctggtttccggttcggtgccgggcatggcccccggcagcgttcgcgtggtcgatcaggcgggcaacctgctttcagacggtattgaaggcccggatggaaaactcacggggtcgcgcgccggcaacgacgtcgtgcagcgcattcgcgaagatacccgcaagaacatcaccacgctgctgacctccctggtgggcgaggggaacttccgcatcagcgttgcgccgaccgtggacttaagccgcgtggaggagacgcaggagcggctgggcaaagacccgcgcgtgagcgacgagcagataagccaggaaaacagcaccaacgaaatggcgtttggtattcccggctcgttaagcaaccgcccggtgaatcagaacccgcaggcggccgcagctcaggccaccggccaggcagcgcctgccgccgcggctaacaccagcacgaccaccggcgatcctcgctccctgagcaaccgcagccaggagcagcgcaagtatgcgttcgaccgcgatatccgtcatatccgctatcccggttataagctggagaagctgagcgtggccgtggcgcttaatcagaccgcccccgcgctggcaaaaatcacccccgaacagttgacctctattacccgcctggtggaaagcgccgccgggatcgataaacagcgcggtgatgcgttaacgctggacgtgctggcctttagcgcgcctcagagcgacggcccgctggccgaaaaatggtggagggatccggatatgcagtactgggggcagaacggcggtattggcctgctgcttctgctgacgctgttcttcggcgtccgcccgctggctcagcgtatggggcgccgcgagcgcgtcgtgaaagacgtcgcacaggacgacgcggcgctgctgacggacgaggcgtatgtggctgaaaacgggctttccacgctgtcgaaagcgggcttcaacaataatgacgatttgctgccgccgcaaagctctggcctggaaaccaaagtcgagtatctccaggttctggcccagagcgaaacggagcgggtagcagaagttctgaaacaatggattaacagcaatgaccgaagcaatagcaaaccggaccagtaa

SEQ ID NO: 141928 - DNA, 1026 bp, Enterobacter cloacae
atgaccgaagcaatagcaaaccggaccagtaacgccaaagggcgtagccgcctggagcaggcggcgatcttgctgatgagcgtgggcgaagaagcggctgcgcaggtgatgcagaaactcacccgcgaagaggtggtgctgcttagcgaaaccatggcgcgcctgcacgacgtgaaggtcagccacgcgcgccaggcgatgaacaacttcttttccgactacagcgagcagagcggcatcaacggcgcgtcgcgctcctacctgcgcagcattctggaaaaagcgctgggcggtgaaattgcccgcagcgtgataaacggtatttatggcgatgagatccgctaccgcatggcgcgcctgcagtgggtcgatattccccagctggccgcgctgattgagcaagagcacctgcagctgcaggcggtttttctggccttcctgccgccggacattgccgccagcgtgctgagcgtgctgccgcgcgagcgccaggatgaaattatctaccgcgtcgcccgcctggacgacgtgaaccgcgacgtgatcgacgagctggatcgcctgatcgaccgcggcatcgcggtgctctctgagcatggctcaaaggtggcgggcatcaagcacgcggccaatatcgtcaaccgtattccctccaatcagcagcagctgctggagcagctgcgcgagcgcgatgaaagcgttgtcgacgatctgcaggacgaaatgtacgaattctttattctcagccgccagacgccagcaacgctgcagcgcctgatggacgaagtgccgatcgaagagtgggccgtggcgctgaaggggaccgagccggtgctgcgtcaggccattttcaacgtgatgccgaagcgccaggtgaccttgctgcaaagcaccaccagccgcatggggcctgtgccggtcagccgtattgagcaggtgcgaaaagagattatgcagaccctgcgccagctggtggaagagggggagatccaggtgcagctcttcgcagaacagacggtggaataa

SEQ ID NO: 141929 - DNA, 759 bp, Enterobacter cloacae
atgttcaagaaaaggagccccgcgctggaggcgctgacctcccgacgccaggcggtggttaagccgcgtctgcataaattcccgccgttacgcaaacgctgggcggcatcgcaggcgtcggccgagggcgatgcagcggttatgcaggacccgggtgagcatcagcggcagatggaagaaggcttccgcgacggtatgaaccgcggctttgcgcagggaatggaagagggcaagcaggaaggctaccaggaaggggcacgactcggctttgacgaggggatgcgtagagggctggcggaaggcaaacagcaggctcgccagcagtttctggaggccgccgcgccgtttgaacgtatgaccgccgacgttcagcgtttcctcgagagctatgaacagcgtcgccgtgaagagttaatgcagctggtggagaaagtgacccgccaggtgatccgctgcgagctggcgctgcaaccgacccagctgctcgcgctggtggacgaggcgctgaccagcctgccgcagccgccggagcagatccgcgtggtgctgaacagcgaagagttccgccgcatcagcgaagcggagccggaaaaagcccgggagtgggggctgagcgccgatccggcgctggagccgggggaatgccgcgtgatcaccgataccaccgaaatcgatgtgggttgtcagcaccggttcgaccagtgcgtggcggtgctgaaggacaacctgctgccggacgcgacccatgagcagccttga

SEQ ID NO: 141930 - DNA, 447 bp, Enterobacter cloacae
atgagcaaactcatttctaccctggaacagctgcagcaaatgcgcacccgcgccgtggacgatcttacgctgaagctggcctcgcaaaagcagctctgccagcgctttgagaagaacattgatgcgctgaccacgctggcatcggacacgatgatgcagagcgcgaacagcgccgcgatgatgatcaaccagtcaaaatataagcaaaatattcagcgggttatcgactggcagaagcaagagcaggcgctggcctcactcgaagcggaaaagatccagggtaacctgctggccgaagcaaagcgggaaaaaagcctggcgatcgtgctggatgctaaacgcagcgaccgacggatggagatagccagtcgagaacaaaaaatgaccgattctgtttctgttcagtgctggcttcgccaacggcaggccgccgctcgccaacgataa

SEQ ID NO: 141931 - DNA, 1386 bp, Enterobacter cloacae
atgaacgccctgctggaacgccagaagcgtacgcagccgctgccgacgccgtttgtcagcgtcatctgtccgacctacaaccgccgcgagtttttgccctatctgctctatatctggcagtaccaggactacccggcggacaggcgtgagctgattattctcgacgactcgcccaccagcaatgccgatctcattgagatgatgagcgacccgtcgcagccgaacgtgcggtatatccacagcccggagcggctgacgctgggcaataagcgtaaccggctcaacgcgctggcgacgggtgagtacattatctgcttcgatgacgatgactattacgcgccggataagatttcgcatcaggtggcgcagatgcagacccaccgcgcgctgttttccggcagcgaccagatttatatctggtacagccatctggataaaatctacctgacccatcccttcggggcccgtcacgcgctcaacggcacctttggctatcaccgtaacctgctgaaaaaccatcgttatgacgatgaggcgatgaaggcggaggaggtgggcttcctgaataactttacgacgccggtgcagcagattgacccgaagcgaaccatcctctgcatctcgcacagcagcaatacctacgataaagatttcattctggacagctcaacgccggtcgatctgacgctggaagattttgtcagcgatcccaacctgctggcccattaccgtcgcctgagcaccgcgccgctcgcgacccgggtcaactggtcggcgtttgagaaaatcgccgtactgtatgacccgcagcaggaagacccgcttccggcgtgccgtgaagccctgatggcgctgggcgcagaggcgggacagctctggccggtggcaaaagcccgggcagaaacggcagaagccgccgagcgggcgacccactccgaggtgatttcccatgcaaagcagcagggctggaaaaacgtcgtgctgctggacgtggagctgcgctttgtcagaaaagagaacgcgatccacaacgtcaacaaactcctcaacggactcgaccaggtggactggcagatgctgctcctgggcggccgttatgaaaacttcacgccaacccagtcactgccgggagtggcacgaatctttaatgcgggctgcgcgtgcgcctatgcggtaaatgccggctactacgatgcgctgctggatgcctatcgccaggcgacggaacagcaggtcagcctcgaccgctgctgggctgcgctaatgagcagaaacgcgctgtggctgggcttcagcccgagctttgccttcctgcagcattaccccgatcccaaaagcggcgagcctgtcgactgcacgcactggttcttccgtaaacaccgttaa

SEQ ID NO: 141932 - DNA, 942 bp, Enterobacter cloacae
atggaactgattgaacactacctacctgaatttgtgtcgcgttttgacgcgcgggaagccgcatgcgaatgtccggcctgccagcgcggcggcgagggctggccgcatatcagcgtgaagctgaaaaaccagcagcgcgagagtctggatatcggctgtgcaacggcggccagcgagatgctgttcagtccggacgcgtttgttttgcataccgctcagcgggaatcgcagagtgaagagatgctctctccctggagcgcggcgctcaatcagcagtgcgttaacctcgccatacacccggcgctgacgctggaagcgagcctgtacggcattggcgtgctgctcagtaaagcccagcagtatctggataacggcgacagtgacccggcgcagctggtgagcatgggagagcagctggctacgcttgcggaacagggcgtattaacgcagcagtttgcgatgctgccgccgattgccgtgaaccgaacggctgcgctcaatgcgatgggcacgatgcgcctcaacctgaacctgccaatggtggagaagatggggatggcgctcaagctgagcgagctgtcgatcatgcagcctgcgcgcctcgcggagcgtctgcagacgctggaagccgagtgggcgagtatcgcgctgttgcatgagcatccctatatcctgcgcaatatgttgatttatacgttgtataacgatgttttccctggcgtgaactgcgccaactgcggcgaagcgctgctggggctggcgcggcagttcttccacatcaaaatgctgtgcgccatgcgcagcgagcagggcgcgttaacccaggacgacgtggcgctgctgattagcgcgcttcgcggctggcagcaggagaatccttttgttgccgacgaagataatacggcggattacagcctgctgtgcgggctgtcgctgttgtaa

SEQ ID NO: 141933 - DNA, 1218 bp, Enterobacter cloacae
atgaatatggaattgccttctcgcttacatcgactctcggaaaaagtgcctaaagaaagaatagtgcttttttttgggcgtgaagagtttagtgataatactaaatatctttatttaaaggctctggaacagaagggaaactttcgttgtatatggtgtagctgtcaggaaacattaattgcagagctgcagaaaaaagggttgccttgccagttgatttcgcaggatacgctatcggaaacgattcggttattcctctctgccgcggttgccgtgttttcggttaacccttcgcaaagcctgaatggcagcgaagagctattttcctgccttcagggggccagacaaattcagctatggcacggcgtatcggtcaaacaccttcttttagaattagtgcagcatctggacgtcggtgactatgatttcagaaggcccctggattttgcaacccgcgccgattgtgtcgtgagcacatccccgcacctggacgcttttttccgccgcgcctttggctgtaagcgaatcattcgagcggggtatccacgtaatgaggtattggttcgtcctgcaacggaaaatgagtatataggcgctgatattccgggcagtattcttagcgaattattgaatccgcagcgtaagaaagtgtttttcgcacccacatggcagcgtagtgagaacaccctgatcaccaatagcatggcattcatcacgcaattagcaaaagcctgtaaggtaaataatgcatcgctttttattaagagccatccgctctatataaacgatcaggaatgtaaggcgcttagtcagaactgcttctacattaatccaggtctcgatctttacccggtgatgcgtcacttcgatgtgcttgttacagattattcatcaatcatgtttgactttcttctgacaggaaaaccggtgatgcgcttagactttaacggtcagacgcatcgctcgtttgagcctgattttacgctgattcctgaagttgatttcgcctggttgtttacggatgaaaacgtagaagacgttctcaataacgcactgtatcgtgatgataaacaggctctgagaaagaaaatggcggatttactgtttccgggagataatgcagacgcgtgttctggcctaattaatcttcttaacagtgaggtggattcagtcatggcaaataactcttattatagcgttgaggaatatgatggatga

SEQ ID NO: 141934 - DNA, 405 bp, Enterobacter cloacae
atgaaaaatataatcacgtttggcacttttgacgtttttcacgttggccatctgaatattctcaggcgagcaaaggcgctgggcgatcgtctgatcgttggcgtttcttcagatgcgttaaatgttaaaaagaaaggccgctttccaatttatagtgaaggtgacaggttatctattattcagggcatcagatatgttgacgatgttttcctggaggagtcactggagctaaaggctgaatatattaaggaacattctgccggcgtgctggtcatgggcgacgactgggaggggagatttgattatctttccgacatcgttaaggttgtgtatctggcacgaacgccttccgtgtcgacaacgtcggtcattgaaatcatccaggacaccagagccgcctgttga

SEQ ID NO: 141935 - DNA, 1068 bp, Enterobacter cloacae
atgataaaaatgcctattattagcaaagatatttgcattggtttcttcatggaaacgtcgtttcactttgaagtttaccgtaatattattgccgcattgctgaagcaaaacatccgctgtgaacttgtcattaatgacgtaatcgagccggaatttgttagcgaaatgctgacatcgctggagaagataaagattgccggactcgactgtactctattgtcggcagccttaaatcactcaaaaacctacagctgtatggtcactccctactatctgcaatatctggagggtatcgcgaatgttcatgtacgaacgctgtatgggttagcgaaaaaccagtggaaccatgcaccctggaatgaaaaatacagtgctatattatgttatagccactatacaaaaaaatcactgtcgctggacgataaaacgtatattgttggtaatccgaggtttgatgactggcacaataataattacgccaacacgttaccggaaaatatcagcattcagcctgagaagaagactattctctatgcaccgacttacggtgagctaagctcaattatcccctgggccgaaaagctaagccggttaagccatgaatataatataattacaaaattacatcatggtacgttgtgtaaaaaatctgaagcaatcgcccttaaaaccgtcagacgacacatcaagaacattgtcaccgacaacaatgtgaccttttccctgctcgaaaaagccgattacgttatcaccgataatagcggttttatctttgatgctatcaatgctgataaaaagataattctgctggactggccaggcatggagacgctgctcgcggagggaaaatcattcagctccgttgatagccccgaacagcaggtacgagcgtttatgcccgtcgctcgcgatatggtcgatcttcgtcgctaccttgccgatgactacccctggcaggagcacgccggccaacttcagcatattaaaacagagtactgtgacgcctttaatgacgggatggcgggtcagagagccgcgcaggtgattatcgattcgatatatagctag

SEQ ID NO: 141936 - DNA, 462 bp, Enterobacter cloacae
atgacttacgccgcccagcgcgttaaaaccctgattcaggatatggctgaagatcgtaagcactaccatgccctgaccgccctgcttgaaacacagcgccgccatattgtcgcccacgacgctgcggcgctggaaacgctcaacgcgcaggtgatggcgctgtaccagcagctctcaaaaaatagccggcagcgccacacgctgctgaacgaactgggcatcagcccgaatgccgaaggcatgaagctgctgatcgcccgtctgccggccgcccaccggtcaaccgtgtcggccctctggtatggactccagcagcaggccaccgcctgccagcgcgccaacgactacaacggtgcgctgatgagtatgcaacaggagatcctggggaatttgctgaacagcagcgcgccggagaattggttgtatcaggatgtactatcgccgaccgcccccgctaaataa

SEQ ID NO: 141937 - DNA, 273 bp, Enterobacter cloacae
atgaaagtagcagcaacacagtacaacctggccaccgcgatcaataacgccagcagtgcagaacagacgcgcaccgtggcgcaggaagggtcccgcgtgacgcgcagcgccgctatcgatccggtactgggtgacgcacaaaaacagctaaacgcgctgcctgacgtggacatggcgcgtgtcgccgaaatgaaagacgccatcagcagcggcaaaatcagcatcaatattgattcgctggccgatgcaatgcagaagtatttccagaggtaa

SEQ ID NO: 141938 - DNA, 786 bp, Enterobacter cloacae
atgatttataatgatattcctcttttttttagcctcagggtgaaacggtatttccgcttcctcgtggcgctttccctgctgtcgttttctggccttgccgcagccgaggggggtcaacccgtcagcgcacgcaagcagatatttgccaccgtccagcagcacgcgacggacatcattcgccaggaagccaaacgccgtcggtggcctgactaccaggcgaagatgaatctgtttatcccttcggaagccacgcagtacgccgcatgcccggcaaaactagccgtctctctgcctgccggcgaccgtcttgacatcaaccgcctgcgctttgacgtacgctgtgagggccccggcggctgggatattcccgttaccgtgaagccggatatttatctgccggtgctcgtggctaaaagcccgctcgaacgcggccaggtggtcaacgccgacagcatcacgatcaaaaagctcaacgtcagcagcctgcgcggggagtatgtgaccgagccgaacgacatcatcggcatgaccgccaaacgccgcatccgtgaccgacagccgattacgctttcacagctggaatcaccgctgctggttgaacgcggccagcgcgtgctgatgatcgccgcgcaaaacggcgtggaggcccgaacgatgggtgaagccatgaagaaggggcgcaaaggcgaaatcattaaggtaaaaaatgaggctagcggacgcgtggtgagcgccattgtgtcggacagtggcgtagtgacgatggtgtatgccagcggcaggtaa

SEQ ID NO: 141939 - DNA, 387 bp, Enterobacter cloacae
atgacggcgcaaaccgttcgtcttaacaccatcgccagtaatctcgccaacgcagaaaccgcctctgctaccgaagacggcacctataaggcgcgtcgcccggtgtttgcggcggtttataaaaatgacgagttaatgaatcaccaggcgttaaccggtgcccgcgtgcaggtaatggatgtcgtggaaaccggtaatgcggtgcagcgttacgaaccgcacaacccgatggccaaccccgacggctatgtctactacccggacgtcaacgtggtggaagagatggcggacatgatgtcggcatcgcgcggttttgaaaccaacgtcgatgttcttaacagcgtgaaaagcatgcagcaaagcctgctgcgacttggagaagcataa

SEQ ID NO: 141940 - DNA, 681 bp, Enterobacter cloacae
atggacatgaacgtagacagcgcgtacgccagcagccgttccggcagcacgacggacggcattgccagcaacagcaccgcctccggcatgaacaccatgtttatgcagctgctggtcgcgcagatccagaatcaggacccgctcaaccccaccgacggcaccgagtacgtcagccagctggcgcaactgacccaggtgcagtcaatggagacgatgtcgcagctgatggcgaacaactccgtgctgatggacaacctgcaaaccctcaccaccggcaatctggttgggcagcacgtcatggtgcagaccgactcggtgaacagcgatggtgaaagcacgctggacgggcgcctgacgctggaacatgccgctggcgtggtcaccgtggtcgtgaaagacgccgctggcgttgaacataaaatcgagctgggcaagcaggaagcgggccaggtggatttcaccttcaatcctgaagagctggggctgagcgaaggcaaatacaccctgagcgtggtgaccgacaccggtgaagagaaggtaccgatcgaaatgggcggcgtagtcaacaacgtgcgtatcccgctcgacggcagcccgaccgtgctgaatatcgacggtcttggcgaggtcgcctacaacaacattagccagtttggcactgcctctaagaacaaagcctga

SEQ ID NO: 141941 - DNA, 1203 bp, Enterobacter cloacae
atgagctttagtattgcaactaccggtctgaatgccattaccgagcagctgaatgccatctccaacaacatcgcgaactccggcaccgtggggtttaagtcgggtcgtgcggaattctccgcgctgtacgccgaaagccagccgctgggggttggcgtctccgccgtgacccagagcattaccaaagggggaagcattacttccaccggcaccgcgctggatctggcgatcaacggcaatggcttctttatggttcgcgacagcgcgggcaccaccgcctatacccgcgcgggctacttcgggaccgacagcagcggccacctggtaaataataacggaatgtatcttcagggctatcccgtggatgccagcggaaagctccaggtgggtaccatcggtaacctgaccatcagcagcggctctattccggcgaaggccaccgggagtattgatttcacggctaatatggacgcgcgtgcggaaatcccggaaaccacgccgttcaacccgaaggacaacacctcctacaacaactcctacaccactcaggtctatgactcgctgggccgcgagcacactctgaatcagtacttcgtcaaaacgggcgaaaacgcctgggaagttcactactacatggacgacgcgccggtgaccagcggcggcgcggagcaggtgcagaagctgaccttcaacagccagggcgttctgaccgacccaagcggggcggtagggctgaccgcagatattgcgggcgcgaacgccatcactatcgacatgacctacagcggcaccagccagtacggttccgacttctccgtcagcaaaaacaaaggcgacggttatgcctccggcgagcgcaccggccaggctatcgatcaggacggctgcgtgtatgcgaccttctccaacggcgaacgcctgctgcaggggcagctggtgctggcgaacttcgctaacccgaacggcctagccgcgcaggacggcaccacctgggcacaaaccgccagctccggcgcgccgctgaccggcacgccgggcaccggcctgctgggttctgtcgtttccggggcgctggagtcgtcaaacgtggatctgacctccgaactggtcgggctgatgacggcccagcgtaactaccaggcgaataccaaggtgatcagcaccaacgacaacatgatgaattcgctcttccaggcggtgtaa

SEQ ID NO: 141942 - DNA, 732 bp, Enterobacter cloacae
atggatcgtctacttttcaccgccgtcagcggcgcgtcgcgcagcctgacccagcaggaaatccacgcgaataacctggcgaacgtgaacacccaggggtttcgcagcgatctcgacaacgcgctcacgcagcagattaacggcgagggatatgcctcgcgttatctggtgcagcccacgcagggcggcgtggatatgacgccgggagcgatgcgtgaaaccggccgcgatctggatattgccgtgaagggtgacggcctcattgcgctgcgcagcggcacccgcgaggtctatacccgcaacgggcaaattgacattaacgccgacggcgagctgtcggtgaacggtctgccgctggaaggcgataacgggccgatcgtgctgccgccttactcctccgtctctatcgctgaggacggggtgattaccatcatgccggaggatggggatatcgccgcgccgatggatattgaccgcgtgaagctggtgaacattccggccagcgagctcagcaaaaacgaggccggttttctggtcaccaacgcggcgtttaacccgcgcgatgaagaggtaacggtggccgccgggcatcttgaatccgctaacgtgtcggccatcagcgagatggtctccagcatcgcgctcaaccgtcagtttgaagcgcagatcaagatgatgaaagcggcggaagatctcgctaacgccggtaaccgcctgattcgcggcacctga

SEQ ID NO: 141943 - DNA, 390 bp, Enterobacter cloacae
atgctgaatgcgatcaaccgacaaaccgccattctgccgggtgatatcaccgggcaggcgaagccgcaaaccctcgagcaggccgccgagcagttcgaggcgctgatgctgcgcgccatgctgtcgcagatgcgtaaagcctccgacgtgctgggggaagacaacccgttcaacagcaagcagcagcgcatgatgcgtgatttctatgatgacaaaatggcctctgaactggcgtcccagcgcagcaccggcattgcgcagatgatcgttaaccagctttctccgcaggcgaaggccccgcttaagaatgaggtgaaagcggccgctttacatggacaatcgcaggaacgtcatacggtgtcgttccgcagaaacgaaggacaggagtaa

SEQ ID NO: 141944 - DNA, 1368 bp, Enterobacter cloacae
atgagtatgtttgatatcgcctacagcggactgcaggcggctaacatggggatgctcgtcacgtcgatgaatacgaataatttgctgacgccgggctatacccgtcagggaattgttcagagcgccatcggcccgatgggcgaagccgggctctcgccgggcaacggcgtacaggtgaacagcatccgccgtatctccagccagtacctggtgaatcaggtctggcagaccaacaccaaagccagctacttcagcatgggtaatgagtacatcagttctctggagaaggtgatcggtaccgactcgacgagcctcggcaatggtcttgacgattttgtgagtgcactaagcgccctgacgcaggagccagaatctccggcgctgcgccagcagctgttgaaccaggcgaagacgctgtcaacccgcttcaacagcatgaacaattttatctccagccagaaagagtccatcaacacgcagcgcggggcgatggttgatcagatcaacactctgagtagcaacattgccgagtacaacaagaagattgttgcgctggattccacgggcggtaacagcagcgtactgcgcgatcagcgtgacgagctggtgaagacgctgagctcgatggcggacatcaaagtgactgacgacagcagcggctataccgtctcgttaagtaacggtcagccgctggtgagcggtaagacggcgggcacgctgagcaccggtaaggacagcaacggcaataccacgctgacgctgaaattttcgaccagcgagttttccctgaacccgtcaactggcggtcagctgggtgcgctctacgactatgaaaccggtacgctggggcagatgagtgacgccgtacagggtatggcgcaggcggtggcggatcttttcaacaaccagctggcgcagggatacgatctcaatggccagcaggggaagccgctgttcaccttcgatgcgaccaacccggcgggcatccttcaggtaaacgatttgtctcccgacgagctggcgctctcaggcgatccgaaagagccgggcaatggcgacaacctcaacgccctgcttgaactgaaaaatcagaaaaccgatatcccgggcctgggcaatatgagcctgaacgaaggggctgcggccattatctcgaccatcggtattgccagcaaacagagcaaaacggagatggaggcggccgtcgcggtaagggatgatgcacaaacgcagcgcgataacataagtggcgtgaatcaggatcaggaggcgatgaacctgtcgacctacatgcaggcgtatcaggcgagcatgaaggtgatttccaccggcaaccaggtgtttagcgatctgttaagcatgttttaa

SEQ ID NO: 141945 - DNA, 915 bp, Enterobacter cloacae
atgcgagtaagcagcctttatctctataacgccatggcgtcgcagatgggtattaatagcacccagatgggtaagctgatggaacagctgtcgacgcaaaagcgcgttaacgtgccgtctgacgacccggtaaccgccagccgcctggtgcagcttaaccgcgagcagtcggccattaagcagtaccagagcaatatcacccgcctgagcggtgcgctgtcggtgcaggaatcccatattaccgccctcagcaaccaggtgctgtccgtcagcgacaagctgaagctggcgaacaacagttccctgagccagaaagatctggcgggctacggcgcggagctgggctccatgctggactcgctggtggcgacgatgaacagtaaaaacgagaacggcagctacctgttctccgggaccatgaccgacagcaaaaccgtgacgctggacgacaacggccagtatgtgtttggcggcaatgagaagacccgtgaaactacggtggccaacggcgtgagcattaccgaaaacaccaatatttcgcacgccttttccagcgcgggtaacgatctggatatgctgaacaagctcaaagcgttgagcgaaaagatgcaggatccaaacgccagctatgcagattacaaggacgatttatccgcgatgatcgacatgacccagtcgaccagcgatagcctgggcgcgctgtttaccgatctcgggggccgtcagaaccgcctgacgctgattaacgatgcccataccgacgtcagcctgtctaacggccagctagagactgaccttaatgaggctcctgtggcggagtcatacacgaaactacagctgtataacacctcgattcagatctcatataaggcctacagcatggtcagcaatctcaatcttttcagtatgttgtaa

SEQ ID NO: 141946 - DNA, 1011 bp, Enterobacter cloacae
atgcaagtcggtttaaaaacatcctcatcgattgcgaccactccgggcaccaccgggcgcgggagtattgatgctccgcagaccgtcgggcgggtcaatgcgcccgacgccgggttaacccgtcattcgttccccgagtccgcgctgctgtcgcgccgtccgatgcgctataacgtgcagctgaatcagcagcttaccgctgttcagcaggccgatagctatctggcaaaaacggaaacgcagctgcttcagctgcgccacgcgtccggacgcagcggggatgccggcgcgcagacagcggcgctgcaaaaacacctttcgcgccgtacgcagctttccggcggcacggtggatcgccaccttaacgtgtcgctggagcagaagaacacggttaatttcaccctgccgggcagcgagaagctcctgtatgcgtcaggcggggaaacgctgattttctccctgggaggcggtccgagggaaatggcagccgtcgcgctgccggaagaggcgacgccgcgacagacgttaataaagctgaacgtcgggctggggcgcttagggatccatgccagccagacgggcagcggccagctgcttttcagcgttgatgaaagccagtgggagcgggtgaagcaacactttaccgtacgcggtgaaggcaatctctacccggcggacgcctttaccgtgctggtgcctcaggcggaaaacgccagcagcgacgaggtgatgacgctgtccacgcgccgggagcgagaggggcaaataaagctgcaggagactcttaaccacatcaccggccagcgcggaaaattgcgccagcagcaggatcgcgtcagcgcccgcatcaacgatatggcgacggtattcagttcccagcaggcgctggaagcctcgcgtaacctgggggcggggctggccggcagcgccagcagttttagcaagatgtcgcaggcgctgggcgctcaggccaacgtgcggctggcgacggtgaaaaacctgctgggataa

SEQ ID NO: 141947 - DNA, 468 bp, Enterobacter cloacae
atgaactggctacatgcaaaacgccgtaatcaggcgatcgccatcgccgttctggcggcactcgtcgctatggcatttaactatttcaccacgacgtcgacgctgcagtacggcaacgtgaaggatgactttcagatggggttctacgacctgatgtcgcagcaaaaagagatctacgacgtgagccttaaaaccacgcgcggcgtgctgatgacgaacatcaccagcccggatgataaccgctttgtgctcaaggggaagtttacgccgacgcagaaaaaaaacggccggatctactttaccctcacccccatttattacagcaccgagcagaaggggctgatgatagacggccttgtcgaccagctgatgtactccaactactggatggagcccatctcttttaatcaacagtctctggttgtcgggcaaaacggcgcgatcttcctctaccctgtctcccggtaa

SEQ ID NO: 141948 - DNA, 942 bp, Enterobacter cloacae
atgaataaacgttattgctccgtaaacaactggctggttgacgtcacctcaggatcgattctccatttaaccaccggggaacgaaagcgcctgggggaatatcagctcaagctgctggatattttggttcaggaacccggtaaaatatttacccgcgaagagttaaccactctggtctgggaacgccgggtcatcggcaataatagtttgccaaatgccattcacgcattgcgtaccgcattagaagatgatggtaaaaaccagcgcatcatcaaaacgatcccgcgcaaaggctatctgatcgaagccgagtattgctgctttgtcgaaaaagacgatgccaccgttaaggaagacgagacggaggctgaaacagcacctgccgaagcgccgctcaatgctgcctctctggttgaaccggagcagcctgacgcaggcgaggaacccgcgcctgcggttagcgccgagccggtggcggtggcggcacctgaaaaacgccgtcacagcattttcagctttctgctggtgatgttcgtcaccgccatcgttacggctggggcctgctggcatctgcttggcggatacagcgagcacctggtttcccgggagatccaggccggcgtttacagcaacattcatatttatgccgtcgagacggcaggcgatccgccctatatttccgtgaatctgtacggcaagttaaaggactcgctgtatgccatcaaccagcagatccagatgcagtccgccacgatgcagatcttctttcatagcaccaatgcgacgctgaactacagcttcacgctggccaataaatgcgacagcaagcagctggcgatggccatttatcactggcgtaccgatacggtgcagctgaataacctgatcctgcgagaaacccgaaggaagcttcatgaactggctacatgcaaaacgccgtaa

SEQ ID NO: 141949 - DNA, 885 bp, Enterobacter cloacae
atgtcattctctatcttcaccagcgcttcctccatgtcatccatcaatgcgatgaacaaatccaacaacatgctgtccaccgcaatggaacgtctgggtaccggtaaacgcattaactccgctgctgacgatgcggcaggtctgcagatcgcaacccgcctgcagggccagagcaacggcatgaacgtggcaaaacgtaacatctctgatgcgaccgccctgctgcaaacctctgaaggcgcgttcgatgaggtgagcaacatcatgtaccgcatgaaagacctcgccacgcaggcagcgaacgacaccaacacccagaaagaccgcgatgccatcaactccgagctgaacgacctgaactctgagctgggcaacatcatgaacaacacctcttacgcgggtgacaaactgttcggcgcctccggcaaattcgcgaaagcgctgaacttccagatcggttcttctactgatgaaaccatgaaggttgacctgtctaaagagctgagcggcggcacaggcgcgctgactaacgccagcggccagttcagcaaaattcaggcgctggctaccggtagcggcggcaagctgaacctgacttccgccagcgatgcaaaagcgttgatgaccgcgctggaaggttctctggatgacgtgggttcagtacgttccaaaatgggtgcaagcattaaccgcctgagccacaccgcggcgaacctcgcgaacatgaaagacaacaccgatctggcgctgagcaacatccaggatgcggactacgccaccgaagcgtcaagcatgacccgtaaccagatgctggcacaaaccggtatgtccatgctgaagcagtccaacagcatgtccggcatggttatgaacctgctgggctaa

SEQ ID NO: 141950 - DNA, 1335 bp, Enterobacter cloacae
atgtctgatttcgatccctctcagatggctacaacattagcaggctacgatatccttgcactgcaaaacgcaatcaaaacgcagaaaacgacctatgacgcgcagacgaaagcgctcgcgtcactgcgtacggccctgacaaccttccgtagctcgattaccgccctgaactccagcagcgccagcgtcctgaaaaatatcgccaccatgaaccaggaaggcattgcgacgatcagcgccagcgccagcgcgcgtaaagggacctacagcctgaacgtcacacagctggcgaccgcccagcaaaaaagcttcgcagggctggacgatgacgccatcaaaaacgcgagcggtacgctgaagatcaacctcaacggtgaaagcattgaggttgatatggacggcctgaacagcctcgctgattttgccgatgcgattaataaaaccgacttcccgagcgcgtcggataattcctctaccacggcgaccagcgcgcagaatggcgtcactgcctcgctgatgcgcatcgacggcaacgtttcgctgatgctaagcagcgaccagagcggcgcgaagtacgatatccagctggacaccagcgggatgacggccgggcagaacattttcgatagcccccagacgatcacaaacgggaaagatgcgctgtttacgctgggagattcgccgacacaatattccagcagctccaatacgctggacgatctggttgacggcgtctccattaagctgaccggcaccacggaggcgaataagccgctggtgatctctatcgataccgataccaccgaaacaaagaatcagatccaggcgtttctcgacgcctacaacgccctgcgcgacaccctcacggacatgacgaaaagcggtaccagcgcggatacgcgaggcgctttcgcgggcgatgccagcatgtcctcgcttagcagcagcctgggtaatttgctgcgcggcacgtttggcgaccagaacatgagtaagttcggcatagccgcagataaagacggcaagctcaccctcgattctgacgtgctggaaaagcagctcaaaaatgacccgcagacggtcgcgcagttctttaacggcaacgacggcctgattaaggcgatggacaagtcgttggataaatacctcagcaccagcagcggcctgctgaagagtcgccaggacaccctggaccgccagaagacggaaatcgataacaaaaccgaaaaaatgaatacgcgttatgaatcctcctacaaccgctatctcaagcagtttacgcagctgcagaagatcatgacgcagatgaacaacaccatgagcatgtttgtttaa

SEQ ID NO: 141951 - DNA, 306 bp, Enterobacter cloacae
atgagcatgcaacacgtcattcaggtcttaacgcgcgggttacgccaggcgacggaagatcacaactggtccgccgtgatgaacgtggatgccaaaatcgccgagctgctgaccgcgatccggggaaaaacgctgacagcagacgagcgtcaggcgctggacgagctgaaaaaggttcatcggcaggcgcgcgagtattgccagggcgagagcgataaggttgaggccaaacttaacctcgcgatgcgcaatcgtgaaggggcggcggcctacgctctgttttctaacgatggaggcgtgcgctga

SEQ ID NO: 141952 - DNA, 1068 bp, Enterobacter cloacae
atggatatcctcaacctggcgcagggaatggtcaacggttccggcctgcccatgcaggcagaaccgattgccggcccgaaagcggtggagacctccgcgcagacgccggcggcgtttaacgacgcgctgctgaacgtgattaattctctcatgatcgggcagaccaaaacgacgcgcgacaccaccgtgagtgcggtgccgcttccacaacgcagcgacgatgatgacgatgagaccgccgacgcgccggcgccgggcgattccctgctgaaagccgatgccccgcagcagctgctggaagcgctgctgatgaccagccagatgccggtgcagccttcttccggctaccttgcgaaggcgcagcccgccgctgacgccgtgatgcaaaacctgcagccgcagctggcggcgcaggtgctgccgataggcatttctccctcgctttcaccatcacatcaggcaacgccggtgagccctgtcgaccccgcggcgagcccgctgcctgccgtgcagtccgtcgccccgacgctgatggcggcgatggcaccggtagcccagacgaccctcattaccccgcagccgggaagcgacattgccgccgctcaggcatccgcaccgtcgccggtaccgaccacaacattgaaaatggatcccgagcccgggcgctggggagaacagctgcagcgcgcgctgggcgaacgtttgcaggtgcaggtgaagcagcaaatccagcatgccactatccgccttgacccgccggatatggggaaaatcgatatttctatgcaggtcgataacgggcgcgtgcaggtgcagatcaacgccagccatgccgaggtgtatcgcgccctgcagcagacgagcaacgaccttcgtcagagcctgacggagcagaattttgtccaggttaacgtgcaggtgtcatcccagtccggggggcagcagcagggccgaggacaatcattcaccgggcagcacaacgccatcctggcgggagcggaaatcgcggccaatacagcggattcgccggacctccgacgcgatgactcggtactactaacggtttaa

SEQ ID NO: 141953 - DNA, 471 bp, Enterobacter cloacae
atgaatgtaaaaacactctctttcggcctcgttatcgccctcttcaccgccatgctggcggcggggatgacggtagtgggtactcatttgctgcgcatggatgaagcgacgggcagcagtttcttatccgggatattcagcagctctggcaagggaaccgtggagtttgtagagattaaaaacgtcgtgattaccctgaagggaaacggggagacggagcgctacctgctgctggagctgaacctggcgaccaatggcccggaagaggcagcgaaagcgaaggatatgatcccggcggtgcgtggcgcaacggttagcctgctctccgatctcgactatgacgaagtgcgcgccatgagcgtgaaccagctgcacgataagctgcaggccgcctaccgcgagcggttcaagagcctgaagatggacgtcccttttaacgacgtcatcatcagcaaaatggtcttccagtga

SEQ ID NO: 141954 - DNA, 693 bp, Enterobacter cloacae
atggattttattgcgagtgacaccctgacggccgcagatgaagcgcgctacgtcagcgcctatttgccgctggtgaacaaggtggtgaagcagctcgcctatcagaccagcagcgtgatcgatcgcgaagatatggagcagatcgccctgatggggctactgacctctttgcgccgctatgggcacccggacgcgcagtttgccgcctacgccgtgcagcgtatccgcggggcggtgctggatgaactgcgtctgctggactggcgccctcgccgcttgcggcaaaagacccacaagctgaacgacagtatccgcgacatggcgcgccagctcgggcggacgcccacgtttgaggatcttaaccgccatctgtccatctcggcggaggagtatcaggaatatttattgctggactgcgccaaaacgatagagagcctggatgaactactgggcaatgacgcccacaccggggcgctgaatagccgacagctggaagacgaagtcgtcaccagccggacgctgcgcagcgcgctggcctcgctggacgagcgtgagcaactgatcgtgacgctctattaccagcatgagatgagcctgaaagagatcgctctggtacttgatttaacggaagccagggtgtgtcagctcaataaaaaaatcgctcaaaaaattcagtcttttttccagaagtga

SEQ ID NO: 141955 - DNA, 930 bp, Enterobacter cloacae
atgcgcagccgcaacaaagaacataccaccatcatcaaacgctcctcgcgcaaaagccatgacacctttcatggcggcgcgtggaaagtcgccttcgccgattttacgctggcgatgatggcgctgtttatggtgctgtggattatgggcgcggtaacggaagaggaacgtaaagagattgtctcgctgctgaacggcgagtctatttttgaaggcaattcgatgacgcctgttacccacaaagaggggaacggcggccagctcgcgctgcttgatacgcgtcacgccaggaaaaaagagcaccctaaagagcaggcgaagaaagaggccgcgcttgctggtcagaataaaaagacggagagcctggaagaggtcagtgcgcgttctcaaaacgagattgaagacctggcgcgcatcatcatgaaaatcacgtcagcctacgacgcgcaggccaacctgaagatggaaatcgtgccgcaggggctgcgtattctgatcaccgacgatcggaaacgggagatgttccagcgcagcagcgcgatcctgacgccgttcttcaagcgcctgctcaccgagtttgcccccgagctgaacaaaatcaataacaaaatcatcatcacgggccataccgatgctacccgctttcgcgatcaggagctttacaacaactggaacctctccggcgagcgcgcaatgcaggcgcgttcggtgctgacccgaagtggcctggatcccaacaaagttctgcaggttagcggtatggccgatcagatgctgcttgacccggagcacccgctcagttcggccaaccgccggattgaaatcatggtgctgacgcactcggccagcgattcgctgtatcagttttttggccagcacggtgagaaggtgattaagccgctgaccgaaaaactcgctcaaaacccttaa

SEQ ID NO: 141956 - DNA, 789 bp, Enterobacter cloacae
gtgaacctgttcctcatcatcacctttgtacctgtccggactgtcacccggcaggtacgcttttttttcctcttcctgatgctgatggtaacgacaggctacgtcagcgcagcgccagtaccggtaaaaacaccggaggccaaaaccgtcagcgatgcgaaaaagcgcgaacagaaccgccagcgtctgctggcgaaggcaaaaaagcgggttgccgcggcgccacccgcgccggagcagaagcgccaggaaatggcgcaacggctggccgaacgcgccagaaaccgggaaaggctggcgatgcatgctcgctggtcacccggtagcctgggccgctctgaagcattgtggcgcgacgtgcaggatgacgccgctatcgcgacgcgccgtacacaaaagtccgtcagcaagctccgaaccgtgatccatcgcctggagagccagctcggcaagccctatctgtggggaggaaacagccccagcgacggcttcgactgtagcgggctggtgttctacgcctttaatgatgtgctggaccgcaagctgccgcgcacggccaacggaatgtttcaggacaataccctgaagcccgttcaccaggaaaaactgcggcggggcgatctggtctttttcaatatcaaccagcgccctggcgcggaccacgtgggtgtttatctcggcgatggacgctttattgaagcaccgcgaaccggactgacgatccgtatcagccaactttctgacaatttctggcaatcacattatctgggtgcccggcgcgtgctttag

SEQ ID NO: 141957 - DNA, 651 bp, Enterobacter cloacae
atgagtaacaggcgcattcgccgcgttgatttatcgctgcatttgtcgcctgagcaaacgcgcgcggatctgcgcgcgatgctggagcttaaaaagtggcatcaggcgctgagccaggcgggcagcaatccgggtgatgtcagcatggaaatgcgtcgcttccatcgcaacgtttaccttgccggattacagctccagctgatgagcccgccgctgtgcagccatattgccgagtcgctggggcgtgacgcattgacccttgatgagctgtgcggcgagctggcgagcgccgggctcctgccggtagccacggccccgtcaacgccgcctgtgccagaacagcccgcgacgggcggggattttagcaagcagcagttaagacagatgcgcgcgctgatgtcggatgcgctacagcgacaggccacgccggacgacacctcccgccaggcgctgaatgacctgcaaagcgaggtagcgaagcttaaggtcctgcttgaacagcaaaatctgctactgcagcagttgcgcacgtctggccgcgccgttgagcctgaaagtaccaaaaaagggcaggcggaagcgctggacgtgagcgcgcttaatgcgccaacggagaaaatgaaggaaattcgcaagaaggggattttttag

SEQ ID NO: 141958 - DNA, 1257 bp, Enterobacter cloacae
atgattaatatagagcgaaataaggtccagtttgttttgatgcaattactctttggactgtgtgcaattgcttttggctgcgtagttatttctcctaatctgtctgctaagattttgggcctggcgggtattaccgcattcgttattttcatgttggatattaaaaacttcagaaagaatgatgcattctggctttgtctggtgctgctgatcatcggggtttgcgatctgatctggtaccggatgtataagattgatagtgccgcgatcaactcctatcgcgcttatcttgaagtcgggaagatctgcctgtttggggcattctccatttttgtgtttgtgagcaggcaccagctcaaaattggcagcaataagattcatatgctgctgattattgcactgcaggtgatgattattggctacgcgggataccagcacctgtttcttgaaaagcaaagggtaacgctctctcttgccggtggggctgatgcgactggggctgcctataccatagcatttatctcgttttacacgattctggtgcttcaacacagttcaagcagatggaaagagctttttatactcgggcacttttttattaccttcctgatactggtggcaacagaaacgcgggcagccattctcacctatccggttattttcttcggcttgctggtggtgaagctgtacaaggaaaagcatattccgtggaagggggtttctgttttcctgattgctttgctggctggcgcatttatgatgaaagacaatctgataaagcgttataatgactttaaccatgatattgtttcctatgataaagcgaacagtgtgacttcggttggtgcccgtttagcgatgtggaagacggggctgattgcgtctaaaaataattatttatggcagtctacagacgagcgtaacatcataatccgagaagaaataaaaaaggatccaagcctgtcaggcgcgctgggcttcattcgcggacatcttcataatgaaatcgttgaaacgctttctgtaaaaggcccttcaggtcttattctttatattctgtttgtaatatcacttggttggtatgcactgcgtaaaagaaaaagtattattctattcgctttcctggtctcgattgttatgttcggcgtgggtggcgtgatgttctattcaaaaacaacccctgttgcctggatgttaacgctgataatgtcggttgttttcctggaacagaacaaacatcgtacggtcattaagtaa

SEQ ID NO: 141959 - DNA, 909 bp, Enterobacter cloacae
atgaatctcaatgtaacgaataagctcatcaagaaaacccgacgctggcacaaaaaaacgggtttctctctcttccagcgtgcggccagccattttgagcggaagaaaaaagagacgatttttagcgttattgatgacctgaaggttcagcctgacgattcgtacgcaacggaaccgatgcaatcacgcattatctggatctgctggttccagggactggatagcgcacctgagttggtgaaacgctgcattgcctccgtacaacgtaacacgcctgatgcgcaggtcatcatcctgacggatgagaatatcccggactaccttattctccctgaacacatcaaaacgaaataccacgccgggcttatcagtaaggcgcaatactcggatattgttcgctgttcgctgctgtatcaatacggcgggatctggatggatgcgacggtgttcatgacgaagccggtaccggaaacattttttgagaatagtttttcatcgctgcgttttgattcgtctgaaaacgcattgagccagggctactggacggcctattttctagccgcccaaaagggaagctcactggtgaagatgatacgggatattctgtattgctactggcagcaccacgatactctaattgagtacttcctgatcgattacagtttcttatatgcgcgcgagcgctatccgcagtttcgtcaggtcatggatcaacaaccggtcaccgggaataatcgttttttgattcgccagttcatctcagaaaaacctgatttggcggcattgatgacgctaaataatgatcccgtgggcatttataagctctcacacaaagagcaatatcgaactacagataacggcctgccgacgatatacagtcagatcctcgagggttctttccacctttag

SEQ ID NO: 141960 - DNA, 582 bp, Enterobacter cloacae
atgaaacttaaaaaagcggcgttggcccttgcagcgacgggcctgcttttatctgcccagccggttctggcaaacggtgattcaggagttgatacctcgctgaataccgatgctggttcgcaaagtaccggtggcgtaatcaatttcaccggaaagattacccttatttcttgtgatattactccggcatccaaaagcaaaacggtagacctcggtgcatgggcggcaaactacttcgacgagcatagcgaaacgacgccgcgtgaattcaaaatcaacgtagaaaattgtccgcctgcggttcaatccgttgcggtactgtttgacggtacaaaagatacgtctaacgataccctgctgcaggtcactcccggtgacggcatggcgacgggggttggcgttaagctgtacaacagcaatcgcagcacgtctattaagccgggtacggtatcagaaacaactaaaccagatgatgaaggcaatgcagaattaaccttctatgcctccctgactaaagatggaactgacattgcggccggtgatgttaatgccgtttccaacttcctgatggtttataactga

SEQ ID NO: 141961 - DNA, 672 bp, Enterobacter cloacae
atgaagcgtttgtcgtatattatgctcactgcattaatgtttagctctgcgtcagcttctgcaggcgtggtcatgggcggtacacggatcgtatacccacaaaatagtaaggaggtggcattttctgttgcaaataaggaaagtgcgaccccttatcttattcaatcgtgggttgaaggtgatatacaagccaagaatcacgcgacgccttttatcgttacgccaccgctgttcaggatcgatcctgaccaaactaatacgctgcgtattcaatataccggtgcgccgctgcccgccgatcgtgagtctgtattttggttgaatataaaagctatttcgccaaagccaaaagagagcagcaacgaattacaaattaacgtcaaatcgaagtttaaaattttttatcgcccttccaatctgaagggtgatgcagcaaccgcctggcagaaagtcacgttttcacgcacggacaaagggctcaaggccgttaatccgacaccgtactatgtttcgtttttccagctgagcgtggcagggcataagattgatcagccgggcatgatcggcccgggggaaacccgtgaatggccggtggccgcctccggcagcgtcatctggtcggcgattaatgattttggtgccattacctccacccagtcacaaccgctttaa

SEQ ID NO: 141962 - DNA, 1095 bp, Enterobacter cloacae
atgcgtcatatgatgaaatggtttatctatctcggcctgctttcgctgtttggcatgctgagttttcacgctcatgcagacacgtcatcctgccgcaccacgcgcgatcagtgggttgttcaggtaccttatgccattggatttgcccccggcacggcggactggacgcctgtctctgcgccaatacagtccaccggggaagatttttacagctgcgatggcgggagtgatgcatggcgcagcattggatttgtcgaaatggataacgccgtcggtactgtggttggtgaagacggtgcgccacgccacgtctataaaacccagatcgacggcatcggctacgcgctgggatttcgcgagcaacaatattgtggcgcggacgcggtgcgctatattgacggcaccagtccggtgagcggcaatgagtcgcggcgcatttgcgatgcgtcacaaaaccccgcttttgccagcgcctcatcgtacaaactgcagttctacattgtgttttacaaaattccgacgaccggcgccatgcccgacgacaatgctaattcacaggaacaaccggtcggatcgctggtgctgcaggcgggagacagcgaggccagcgcggccaacgtggccacgccggtgcagatccatcttgccagtttcacggtcaggcgcaccagctgcacggttggcacgcgcagcattcttgttcctatgggtaccgtaagccaaaatgagtttcacggcatcggctcacgagcggggggcggacacttcagcatcccggtcacctgcgaaaataatacggcggttaagataggcttcttcggtgataccgcacccgccaatacgcaagcgctggcactcaccaaacagcaggatggcgccagcggcgtcgggattgagctggtttatggcgataataccggttcggttcaggggcaaacggttcagtggaatacgccgcaggtgccggtaatggggcaggtgggcgacaatcagacgcagatattctggtttgatgcgcactatatccagacggaagataagatcacggcgggaaaagcggacgcgatggcgacctttaacctgatttacaactga

SEQ ID NO: 141963 - DNA, 222 bp, Enterobacter cloacae
gtggaggaactcccgtcacgtcttccggctttcgaacccgaatgcgatcagctggggcgctactgtcaggagattacgcagttgctgatgaacggctcactgccgcgacaatctgcaatcgtgatggaagatttgctgtgcgaactggtcagctactttgccgatacgctgaaggcaccacgctggctgaaaacggatgaaggcacagtcgcgatcggctaa

SEQ ID NO: 141964 - DNA, 465 bp, Enterobacter cloacae
atgaagctgaatagtcaggttgtacgctgggggattattagtctgactattgctgcacctttattctatgcagcctaccttcattatcagcgaaataattttacctgcgagagtcatttgacgatagtcgatggcgattcaagagtcgattctctcatgaccttttcttttcatcatggctcgggcacgtacgattcaaccggtgaatatagtcaggcaggtcagcagcctcttatcattagcaacaagattaactttaaatattggtatgaggaggatcgggtcattttggtttccagcgagacgaacgcgctacccaaaaaagatgaaccctttcgtcattatattcccgattttttctattatcgcgaccgcggtatcagtcttggcattgttccggtgaacgcttctggctacctgtttagcttcggaaattcgccagcgttttactgttcaaaaagctga

SEQ ID NO: 141965 - DNA, 792 bp, Enterobacter cloacae
atgaaacccgttttcctgattaatcactcggtccttttcgagccggaaaagcgccggctttatctgctggccaattatcccgagcgtgccgtcgtcttgcatgctcccgttagcgagtgcctgctgcagctgctcgagcacaatgggcaggtgatgtcacaacgtgacctttttgctgctgtatgggaaaaacagggcgctgtcgttacaaccaatgcgctttatcagaccatagcctctatccgtaaagcgctaaagacggttggtctggcagaaaatatggtccagacggtgccaaaggaggggtttaagtcggtcgctcatattgagacgggtacgctcgatgattttattacgcccgcggccttagagcctgttgaaacgttccctgatgccgggcgcgaattttcaccttcggttaatcatggcgttcttttttttcgcagtaaaatcgccggggctctggtggggttattatttattgtttcttgtctggcgctcattcatgaaattaacgcccggagcgctgggctggaagaatatctttccattggcaaaattaacggctgtgatgtctattcgtcctggcatgataagaataaaagccagcgtatttatacaggcctggacaaacgttatcccgttcagtgtagtcccgggggcgttgctctgatgacgttaaatcgttttcagaatggtatttcggtacttgtgtgtgacaggctacccaacgttgccggtgcgcgctgtgattccatcatgtacctggagcaatatcatgaagctgaatag

SEQ ID NO: 141966 - DNA, 441 bp, Enterobacter cloacae
atgggttatcgtctatacggatttatgatcggtaatgacattcatttcgatattaccaatcggaggctgtatcggcttaccggcagtcttaatgataacagcatcgcttttgcatcaatttatttcaatgaaacgatgctaagactttttctatatttgatgattaatggtcgaaaagcgcccattacgaaagaagagttgtttgaagaaatctgggaggcccataacctgagcccttccacacagcgattatggcaggtcctgcacaatctcaagaataagctgaagcttttaggcttacccgacgattttattcgcaatattaaagggtgcggttacattattacttatcagaatgtaatccccgtttattgcaggataagtgaactccccgctcatcctgttaaaaaagaggagaagacagataccctgagtgagtga

SEQ ID NO: 141967 - DNA, 864 bp, Enterobacter cloacae
atgacaacacctaaacgccccccaggattcctctccggcatacgctcactgatgacgccgtttttcgcacacgtcacggcaagaacgctggttgaggctatcgctcagcaccagatcgtgccggtttatcagcccttttacgacagccagacggggcggatggcgggaattgaggtactcgccagatggaagcacccgctttacggcaacgtcgcgccggataccttcattcccctcgcggagaagcacagcctcattgctttgctgacgcatcatctgattcagcaggtcattaccgatcttcagcaccagatccatctttttcctgaggggctttacgtcagcctgaacctgagcccctctaactgtctcgatccccattttgaatcagacaccgtggcgcttttacaaaagcttgccacccgccatgtgcggctgataatcgagattactgaaaaacacccgctgcatgtcacaccgcagttaagcgagtggtttgcggcgctgcggcgattgcccatttcacttgcgctggacgactttggaacagggtattccaatcttgcctatatccacgctctggatcctgagtacatcaaaatagacaggctgtttgtcagccagataggagaacatggcgatacacgtcttatggagagcctgattgaactggctaaaaagatggatctgcgtattatcgccgagggtgttgaaacccaacatcaggcggactatctacggctcaacaggtgtgatttcttacagggatactacttctgccgtccggttcaagctgatgagctcatcaggatagctaaccaggaggagcgaacaaccaccccaaccgaggggtggatgcaatga

SEQ ID NO: 141968 - DNA, 1182 bp, Enterobacter cloacae
ttgaacattgtaaaaaacacatccgtcgaagggattcgtggtttagcttgtctgttagttattgcatcacatctttcccttattttattaccgtatttacatggcgaaaatcctgcgttgataaaaggttcttttgacgctctcatttatagttatcctgtgggctttctttattctggtacttctgctgtatacatattttttgcgttaagtggttttattcttacttatgcatgtctaacgaaagataatgttcttaacagttgcatcaatatggccttaaagcgttacattaggcttatgcttcctgtacttgcttcagttattatttgttttattattttgagtttttttgagaataaaactgacggtttgccatggataaaaagttatggcgtaggggcgaagcttgactttggtagtgctatttataatggcgttttcggtgcaattttcttgggggataatatctataactgggtgacgtggacaatgaaagttgaattttatggttcattgttagtctttgcatcgcttccttttattaattccttaagttataaaggtctgattgctgcgataattgctcttttatttatgttgtgcatgccaggtaaagaaggatatggatactcagcgttctattttggtgtggcgatattctatatgaaggacattcgacacggagtgtcgtcattagtgttatttatgtcaggtttatatcttgctgggtatcatccacgtcaaccctcataccacttactttcctccatgataacatttgatatgcctgggggcagttttcagcattattatttctttaatatgatatctggtgttttgattgtggtttccttattgaaatcagattgcatttcttttttggttaataacaggatgagtgtatggttaggaaaagtttccttctctgcctacttaattcaaatgcctgtattttatgttgtgactactagagttttttattatttaaaaagtcaagggcattcctatgcatttaatgcagttatggcggcgttaattacttttgtagctgtatatttgctggcttacattttttggtgggccattgacgctcgcagtattgcactctcaaaatatggattgttgattaaagacgacagtgctcaaaaaatttcagcctctggtagtcaattaaactaa

SEQ ID NO: 141969 - DNA, 699 bp, Enterobacter cloacae
gtgacagcgcaaaacccgatagattcgcccccccggttacagtacgtttctcaggacatcgtcggcattaagcttgagcccatcgtcgccctcgcctccttgcgtcaggtgggtgtagaggttctcagcgtcctgtccgcgtcgcggcacgctgaggactttttttacgatcgctctgcactctggtccataacgctgcttgaagcgcagctagccgcgttaaaaaatacgccgcgcagtcataacctttttattaatctgccgataaccgtcctgacggagcctgcgtcttttcagcggcttatcaggttgccagccgcaccgctcaatattgagattgtcgaccccgcggcttttttggcgctgtccgtcgcgcagaagcagcgcgtcattcagaatctgctgctgctcagaaaacaggggcacgcaatctggctggatgacgtggatgatatcttagtgcagtcgtttttagcctgccgactcccgttaagcggcatcaaaatagataaggaagcattctggcgtttacgcgatacccctgcgctgaggcaactggtttccctttgctttcagcttgccgggaaagtgcttatcgaaggtattgagactgaacgcgatcgcacctgggcactgcaggcaggcgcagatctcggccaggggtattactggccgtcctggacatggccggaggattaa

SEQ ID NO: 141970 - DNA, 1800 bp, Enterobacter cloacae
atgaataagtctaactttataagtcttgataagaagattgaagaactaaaatcacttacggcaaagcttgatatttataaggttgccaatagtttatttcatgagcttatgatgtttggtcaaatggggagtagggtgaaactcaattctcctgctcgacaaagtctgtatctgttgggggtaatgtcttcccaaaatatttgtaagaccgaagagctttctgatgaaaagctgaataaaatatactctcttcttaatgacatatacagtaagtatctaagtgtttattttcctgataaaaaagatttagagcaaggaatagataactcttggttaaaaactcgccatgcatctatgccagcatttttgggatatttttttgaaagcaaaaaaatagcaactgatgaactaaaaaaagatcttttaaaaacttatgatcaatttgaagatattatttctgctcattttggtttatcgcacaaagatatgattgaaattacagatcgcattggtaatattcttcaaaaaagaattgattatatcaccaaaatatttggtgacattgatgcaaaaagattagagttcgccagttcagatgttaatgaatattatgaaaaccttaaagctttacaagaaagttgcggaccattaatgtcagagttcatgaggttatctgaggaactttgcatcttcaaatttgatgaaattgatgacatcgaccctgaaaaactcgaacaattcaaacagcattttgttttgaagaaaggcagcgcaaacgatatcaagtatattactgatgagaattctttagaaacaaatcctattataactgttgatgaaaagaattatgctatttgctcaataaattttttgttgcttgccgttcagaataaaatagatcagtatttcaaaggcagtaagtttaatgatcgcttcagaaaagctagggatattaaactagagcaagatgccaaggaagcgttcactgaattacttccagaaaattcgattgtattagaaagtgtttttgaaaacaataaatcttctaatgagcatgatcttgtaataatcaccggcaggactatgttgattgttgaagcaaaagctgcaccaaggcgcgaaccattaagagatccttctagagcatttacaagaataaaagatgattttaaaaagaaatctgggattcaaagcggctgtgatcaagcattgaatctaaaaacactcatagaaaaaaatgaaatcaccatcttgtatgataaaaaaggaaatgtgctgcatactatttcaaaacaagattttgatgagatatattgcatatgcgtgacaaaggatgattttggtttattggctactgacttaacaatcttattagaaaaacctgatggtgtgaaatatccttgggtgattaatattgatgatttgaggtttttaatttcatgcttgaaatatattggtaaagattggttatatttcattgattatttatcccaaagagttaatttaatggggaaaataattgccgctgatgaattagagatcgctggagcatttttgaaatataatggttttaaaagcataaataaagatagtcctcaattattccttgatattagtgaatcaaatgtctttgatgaaatccatttagccaagtctgagggtaaaccttacactctgaaaataaccgagcctgattttgttgaaattgataggcgaaaaatattctcaataaaaaataaaaagacaaaggacaagaaaaacagagagcaaaaaaaagcaagaagaagaaatagaaagtaa

SEQ ID NO: 141971 - DNA, 1353 bp, Enterobacter cloacae
atgcgattgaccgcacctgtgaagaagttttcagatggttttagtgaatgtgatgacatttttaggcgaaaaaagctacatgatacaatcatgagggtagtaacaaatgcaccagataaaagtttagtcctcgctctcaatgacgaatggggaaatggaaaaacttcatttgttaaaatgatgtcctcggaaataaataataatgcctcagataaatttgacgtaatctattttgatgcttttgaaaatgactatcagtcagatccgtttgtctctctaacatcaaaaatttattcactcgtaaaaaaagaagaaggtaagttaaaaagtcttggtcaagatttattagcaattggtaagaaattaggagcctcttttgcgctaaatggtgccaagtttgctgtaagcacactcacaagtggcctagtttctggaagcactttagaaaaaactagtgatgttataagtgactctctctcgtcacctatagaagaatatattgaggagaagataaagaaaagtgaaagtgaattggccacaattgaacagtttagagaactgttaaccagaattcacaaaagtagtgacaaaaaaataatttttattatagatgaactagatagagcacgccccgacttcgcccttgatttgttagagaaaataaagcatattttctcagttgaaggttttgttttcctcttggtgattaatcgcgtacaatttgaaaagagtatcgaatgcagatatgggaatattaatacaagactatatctcaataaattcattcattactggttcactctccccaaaaaaagcattttttctgatggatgcaaagaaggttatgatcgctcaacactaacacaataccttcttactctcgatcaaggaaacaatttacttacaagtaatggttccctcgtaaaaactttagcttatctcttggaggcaaataactgttcgctacgtgaagcagagcgttgttattctaccttcgctgttatgatagaaccgcgtgaaataaatttctttagacatgacattttctgtgtggcttttgggctggtagcttttattaaagtattcgatcaagctcttctaatcgagattagtaggaaaagtattactctggaaggtattttagcccgactctctatatcaacaagtatcatgagtactgtagagattaattatattttaatgttgctgaattatcatttctctacggatgaacagctttcaaaaaatgaaatgaaagaacgttacgcattcatgacagatatgacaggaagaagagttaaatggtttgaaacaatgtctgaaaaggtagagggttttactgttagtcggtaa

SEQ ID NO: 141972 - DNA, 1011 bp, Enterobacter cloacae
gtggcgactaaatattttgccctgttaaccaatatcggggcggcaaaactggcaaacgccacggcattgggtgcgcaggttgagatcacccagatggccgtgggtgatggcaatggtgtgttgccgacgccgaatccgtcacaaacggcgctggttcatgagttgcgccgcaagccgttaaactccctgagcgtagacccggccaacgacagccagattattgccgagcaggtgatccccgaaaatgagggcgggtggtggatccgtgaaatcggtttattcgataaagacggcgatatgattgccgtcgcaaactgtgcggaaacctataagccgcagttacaggagggaagcgggcgcgtgcaggtcgtgcgcatgatcctgattgttagcagcaccgccgccgtaacgctgaaaatagacccttcggtagtgctggcaactcgccagtatgttgatgatcagataatccaggtgaaagcctatgttgatcagcaactggcggtgcatgttgctgcggctgatccccatacgcaatatttgcttgagtcggatattgataaatatatccctgtgggtttcccgcttccgtggccgcaggcaacgccgccaggggggtggctgaagtgcaatggtgcaacgttcgataaagcaaaatatccgaaactggcggcggcatatccttcgggtgctttacctgatctccgtggggagtttttacgcggctgggatgatgggcgtggcgtggatagtggacgggcattgttaacggcacaagatgctacgggaatcactgattatcacggggatggtaatgtacaaggtgctacgaatgcgcccgcaaggaactattaccgcaatgcagatagtgtggtaagtgctggtactggtttcactgcatttggtgtagcgaatggaggatctacgaccattagagctaacgggataaccagctatatcaatgtacgaccgcgtaacgtttcattcagctacatcgtgagggcagcataa

SEQ ID NO: 141973 - DNA, 594 bp, Enterobacter cloacae
atggcgcaggcaaaattaaacagtgaatttattgccacgacggcaggtgatatcactgtgtttaattacgatggagagacacgcgaatacctttcttcatccgtggaatatctgccgattggcgtcggcattcctgcaaattctagtactgaggcaccaggcgaagctaaagctggttcggccatttgccggacaaaagattttaccgcctgggaatacgtcgccgatcatcgtggtgaaacggtatacagcactgaaacaggtgatgcgatgatggtttctttgcctggcgattaccccgagggcaccaccacgctggcaccttcgacgccttatgatacgtggaacggtagcgagtgggtgacggatacggaagcgcagcaagctgcggacgtggaagcggcggagcaaaagaaatctgcgctactccttgaggcgcaggcaacgatcagtctctggcagacggagctacagttaggcattatcagcgatgaagataaagccagcctgatcgcctggatgaactacatcaaagacgtgcaggcggtggatacctcgaaagcgtcggatatcatctggccggataaaccgtaa

SEQ ID NO: 141974 - DNA, 354 bp, Enterobacter cloacae
atggacagggactacgttgttgaacgttaccgaacccgtgacggaaaagtgccgtttgaggagtgggtagccagaatgaatcgaaaggatccggatatggttttccggatccttatgcggattaaccgtgcgataaaacgtaattttggcgattacaggtatctcagggaaggtgtttgggagatgcgagtcgatagtggccccggctacagaatctatttttcagtagagaatcggcaggttttattgttactgatcggtggtgacaaaaagagccaaaaagcagatatcaaactggcaatagattactggaaagatcatcaaacaaaaggacattccaatgagcgccgctga

SEQ ID NO: 141975 - DNA, 132 bp, Enterobacter cloacae
atgcgaaacggcgctacgaagatcccgacaaaacctgacagttttcctaaacgctccaatatcgtgcctgaatcacactttttactcaccgagaaagttaagccggagttaatatttagttattacaagtaa

SEQ ID NO: 141976 - DNA, 1104 bp, Enterobacter cloacae
atgatgaatgatgaaacctattacaacaaaaagcgcattcgggaagagtggaatttaaccctttctcaggatgaccctcaccgcgccggcattcagtttgcccggcgagttcggctggcacgcgcagccgggctggcggcaatgtttttccccatcgccgggatgctggtcacccattttttacccggcggttggtggcttatactggtggggtggtcgttcatctggcctcatttcgcctggcaattatcctaccgcgccacgtcgcctcatcagcaggaaatcttcaatcttaagatcgatgccattattgccgggctctggatcggcgtgatggggatgaatgcgttacctaccgcagcgctggtgatgatggtggggatgaatatgatgggttccggcggctgccgcctgtttatcccggggataatgttgaccctgctctctgcgctggtgacgttgccattcttcgggagggtggctgccttcaaccccgaccccgtggagtggggcttcacgcttcccgtactcgtactttatcccatgctctttgcctggctcagccaccgaacggccgtcaggcttgcggagcataagcggcggctggaaatgatgagcacccgcgacggaatgaccggggtctttaatcgccggcactgggaaatgctgctgcgaaatgaatttgagcagtgccgacgaagccacatcaccgccacgatactgctgattgatatcgatcactttaaaaacatcaacgatacctggggacatgatgtgggcgacgaggcgatcatcgccattacgcgccagctccagatgtcggtgcgttcaggcgatgctatcggccggtttggcggggatgagtttgcggtgattatgtcgcagaccgcggcggaaagcgccatcgccgtgatgtcacgggtgcacgagcggctggagaaattgtcgctaccgtgcgcgccaaaagaagcgctgcgcataagcgtgggcgttgccccctgggggccgcagtttgggcattatcgggaatggctgaaggcggctgacgtggcgctgtacagggcgaaaaatgccgggcgcagccgcaccgaagtggccgcataa

SEQ ID NO: 141977 - DNA, 1302 bp, Enterobacter cloacae
atgcacgcactgtctgctgaagaggtttcacaacgttaccgggcgctgcgccccagactgctcctttgtatggtgattggctacgccgcgttttacctgacgcgaaaaagcctgaacaccgttttacccgcgctgcagctggatttggggctcagcaagggcgatatcgggcttatcggctcgctgttttatctcagctacgggctgtccaaatttgccgccggactctggcacgacagccacggacagcgcgcgtttatgggcatcgggctgctggcaacgggcgtgctgaacgtgctgttcagcttttgcgatgcgttcccgctgctgctgtttatctggacgctgaacggcttctttcagggctggggctggccgccctgcgccaggctgctgacccactggtattcgcgcaacgagcgcggcttctggtggggctgctggaatacctctatcaatataggtggcgcgattattccgttgatttgcgccgttgccgcccaccgatggggctggcaggcggcgatgctgacaccggggatcatcagcatcgtgctcggtctgtggctgaccacacagctgcggggcacaccgcaggaagagggtctgcccacggtcggggagtggcggagcgatccgctggagctgcgccagcagcagcaaagcccgccgatggggctatggcagatgttgcgcaccaccatgctgcaaaacccgatgatctggctgctcggggcgtcgtatgtgctggtgtatctcatccgcatcgccctgaacgactggggcaacatctggctggcagaaagccacggcgtgaatctgctcagcgccaacgccacggtgatgctcttcgaagtgggcggcttactgggcgcgctgtttgccggatggggatcagacctgctgttcagcggccagcgtgcaccgatgattttgctgttcacgctggggctgatggtgtctgtcgccgcgctgtggctggcaccggttcaccactacgccctgctggcgatgtgcttttttacggtcggatttttcgtcttcggtccgcagatgctcattggccttgccgccgttgagtgtggacataaacaggcggcaggctcgattaccggctttctcggcgtatttgcctatctgggcgcatcgctggccgggtggccgctgtcacaggtgattgaacgctacggctggtcggggatgttcagtttgctctcgattgcggccgtcctgatgggtttattactgatgcccttgctgatggcgggcatcaccgcttctcgcagtcacataacgtcataa

SEQ ID NO: 141978 - DNA, 1932 bp, Enterobacter cloacae
atgaacaggatactggttggtatcattttttctctttttatcacgacaggatatattgcataccttgtttacgatcgtcagcaagagttgcaaaaactgactcaatacactgagtcctggtccgtggcacaactggtatcagagtactaccgatttgaatcatggcttggtctatacgcaaccgataccgacgacgttacgatagaccaggtccgcatgcgcctcgaaattatgttaagccaaagtgacttaatgaaagggggagatttaggtcgctatattgacagcgataaactgcaccaggcgctcgcttcacgcttagagcaaatactggcctatctggatgctaatcttgaaaaaatgagccattcagagttacaggcatacctgacaaatatgcacgaactcgatgcgccgctaagccaactttctgcaacggcattaacaaaagatattaataccgttaatgaatccaataataaaatacagattctttattatatttattcggcactttcgttacttctggtaatactaagtttcatccttggtttcttaatgatctaccagaataaaaatattctcaaagcgcacatgcaggttaaaagtcttgctgacgagcttcagatatcaaaagaaacgctgcaaatccagaatgcgaagctggaatatgatgtttaccatgattccctcaccggcatgaaaaaccgccttttcttctgggacgacctcaacaaaattaatcttcaggccgataaaaaccacatccccgtcacggtgatgttatttgatctggaccgcttcaaagaggtcaacgatacctatggccatgatgccggtgatttgctgttgaatcaggtttcccggcgactgacctcgatgagcagtgcttccgatacgttttaccgtttggggggagacgagtttgcccttctgtccagcggcttgaccgaaagcgcggcagttacgcgcgcaaaagaaatcagcgatcaaatcagccagccctatacgattaataaccagctgataaaaattgccacctgcgtgggtatcgttttgtctgataatgaacgacgctctgattatctttataaatttgccgatctggccctctacgaagccaaaaaagaaggctcacagcagataaaagtcttccgtcagtggatgctgcaaaagctgcaggaaagccgaactcttgaacatgatatggcattggcgctggataaccatgagttcgttgtttattaccagccgattgtcgattcattcagtagtgaaatttacggctacgaagcgcttattcgctggatgcacccggtgaagggaatgctgtcgccggattactttatttctgttgctgaaaaaacagggatgatcaatgagattggtaaaacggtgcttgagctcgcctgccgggaagcggtttcctgggcggttccggcaaggatctctgtgaacgtctcacctattcagttgggtaacaaattgtttacgacgatggtgcagtccatcctgaaagagacagggctgcctgctagccgacttgagttagaggtgacggagtcttcgctcttcagcgacagcaacacgccgcttactattctcaaaaagctacgagcgctgggtgtgaaaatttccatcgatgatttcggtaccggatattcgtcgctctcaagattgagcgagcttaattttgataaaattaagatagacaaatccttcgtgaacccgatatccacgcaagatgatgcgcttaatatcgttaaattgattaccggtatggccaagagcctcaatatgagagtcattgcagaaggcgttgaaaccgaagcgcagcttgaacgtctacaggtgcttggctgcgatctcgtacagggttaccttttcggaaaaccgcagcctgaggttgaaaggaagatcagatacggttga

SEQ ID NO: 141979 - DNA, 423 bp, Enterobacter cloacae
atgaaacggaaaacgatgcttcttgctttatctggattattagttctgacgtcacctgcttatgcaacggaaggggcttattcaagcacaacgaatgctcctgatatcacacttaagaatcaatggtatcaaaaaaactttccggtaatttctggaacgccatccaccggaaaaattggtgtcgtttattataactgggctttcagtcgcactcagcaggggcttaaggtttccttgtgcacaagtgccaatacaatgtgcgtcaatattggcaactcaaattcaggttcagttgatctttccacttataacctggcaccaaaccaagtactcagcatgaaagccattgtcgaaggaacgggaactatggtcccagtttatggttatcagagccagattattgttaattataagttcaattaa

SEQ ID NO: 141980 - DNA, 750 bp, Enterobacter cloacae
atgatgagatgtttattctgcgtggttgagaaaaaaaaacttgggtggaaaatgaacacttctgctgctgagttggttcgactggagtccgtctcccattcgtatggggcgggggactcccatcataaggcactacgtaatgtttcattgtcaatcccgtcaggacaaacctgcgctatcgtcggatcctcgggctctgggaaaagtacgcttctcaatctgatcggtttacttgataccccaacaacgggacatcttttcctgaacggaaagaatatgtctctgtgcagcgctgaagcgctggcaattgcccgtaatcatactatcggttttatctttcagagtttcaatctgctaccgggattaagtgtcctggacaatgttgccctgccgttattatatcgtggggtaaagcgtcatcatgctcaggaaatagcccgttattacgtagggtgcgtggggttaggtgacagaataaaacaccttccggctgatttgtcgggtggtcagcgccagcgtgtcgctattgcgcgcgcgctggttgcccaaccagcgctacttcttgctgatgaaccgacgggaaatctcgatagccagaatgtcgccagtattattgaactgcttatgactctaaatgatgattttggcaccacgttaatcgtggtgactcacgatacgtcgatagcaagaaaaatgtctcgctgcatcaatgtttgcgatggaaaaattaacgaggtattgaatgactga

SEQ ID NO: 141981 - DNA, 1254 bp, Enterobacter cloacae
atgactgaatcacgttattccgtgccgcagccatcttctcattcggtacgctatggaatgccattttctcagcaaatacttgagtcactcgaaaatctgcatttgctgggacggcgtgcaatattagcgctattgggcattgctgttggctgcgctgccgtagtcgcattactgaatattggccgtaatgccgaaaatgaagcgatgcgcatatttcaggggatggggagcgaaattatggtggcgaatatacaacgcctgatgaatggaaaaatgaatccactcctcccgtcacccaatcttgatataagtgcattgcataaaacgatacccgaaataaacgcggcatcggttctcatccctgccagcgttcaggtgcgcatgaatggccggacggacagcgcgacggtggtagggagtagtgctgaacttccctctgtgctgggattaacgttagcgcagggccggtttttaagtgattttgatggatatagcacctatgtcgttttaggtgcaaatgttgctgagcaattgacacaaattaacggtcacgctattcaacccggtacggtgatccagttaggggattatctgtatcagattgtcgggatccttgcctccacgggacccaatccgattatccccctctcaattgatgacgttatcctcatgtcggacagagggatgcggcgagtgatcgggttaccacagattggcaatgtagttatacgaagccaaaacagtgacggacaggaacacatttcttccagactgcaagcctggttagctgaacaaatgccaggttttgacattcacgtacagctcccacgccagttaattgaggggatggaacaacaatcacgtctgttttcatggctcctgacgggattgggaggaatctctctgctggtgggcggtgtaggagtgatgaatgttatggttatgaacgtttcagaaaggcgcagagagatcggtgtgcgtatggcccttggcgcgcgtccgcgagatattgcgacactttttctccttgaggcgctggttctcgcatctgtcggcgcgttgcttggggctgtggtggggatgttttcagcctggctctttgtctactttgcgggctggtctgattttgtcttttcactgaccgcgttgcagttgggaaccggtagtgcaatcgcgattgggctgttctttgggctctctcccgccctttcggcggcccgtcttgaacctgtggatgcgttgcgtgatgtgtag

SEQ ID NO: 141982 - DNA, 1398 bp, Enterobacter cloacae
atggttccgctcgaagggttgtcggcggcctggcagagctcctctccggaggataacagtactatcagtttaaccctgagcgatgcggtatatctgggccttcgggataatcgcaatatccgtagcgcttacctaaatcgtattgctcaaaaattcgatctgtatgtggcagaggatcgcttcacacccaaactcgtcatttcaggcaattatcttgtgcaacaaaatcaggataatcgctccggacagaccacgctcacgccaacaaccacgcttttaactccttatggaacgcggatgagtcttggatggacgtatcaaaataccgatgcaaaatccgggaatggtacacaaagcgatggggcaaactttacggtcattcagcctttgctgcgcggggcgggtaaggatatcgcgactgctccggtacatctggctcaactcacagagcaagtgaatcgtttgaatttaaaaacgtcaatttcccggactattacccagattatcagagcctatcgcgatctcttactggcacaggagcagttaaaaatcgctcagaattcattagtaagggcgaaaaaactgatcgagattaaccgaacgatgattgctgctggacgcatggctgaatttgacatcgtgcagacagaagcggatgaggcctctcaggagcttgctcaggaagaagccttaaacaggctcgatattgcccgtctcgcattattacaactgttggctgtagatctccattccccggtagttgcaacggagtcattaaatgcacatcgggtggttatccgggccgatgaggcatttcagcaggctaaaaattcccagccggagtatctggcccagcttatccagggcgatcaggcaaccattaatcttgctgttgcccgcaatcagcgcctttgggacgtctcactcgttggaggcgccgcgcagcaaaacaaccgtataaatggtggcgcaaatgcacatacctgggataactatgtagggattgccgtcgaagttcccatcggtgagttgaatacgcgtcaggctgaagtacaggcccaggtgaatgtaaaaaatcagcagctgcaggtggaggaatttaggcagaaacttgaaagggatgttaccaacgccgtacgggatattgacacacgatggcgacaatttgagatatcccagcgtgccagggatctgtcacgtcgaaagcttgagattgagcgagaaaaattgacgcttggccgctccagtaatttccaggttctgagttatgaaaatgatttgcggaatgcagaaaacacgagactcaatgcccttattgcatatctgaacgcgcaggcagacctcgatcaaattctgggaacaacactgcaaagctgggatatcacacttaatgactag

SEQ ID NO: 141983 - DNA, 1020 bp, Enterobacter cloacae
ttgtatgtgactgaggggcaacgcgttgaaaaggggcaaaaactgataacccttgataatgggctggttgaaatacagttgcggcaggctcagacagagctgctcaaagcgcaaaaagaagcggacaactatcacaactggcatcgtagccctgacgtcgcccgggcacggcgaggagtacaatctgcgcagtttacgctcactaacagcaaaaaaaatcttcgcgatacaagattgctttttgaacgagggattgttgcccgaatggaggtcgaggctcttgagcagcttgttgctgcgcagcagcaggcgctggattctgctctggatgatttgtacgctgttgaggcgcagggaggaagcaactatctaaaaattgcagaaatggcgctggctaatgccagaactcgttacgatatcctgcttgcgcagtcaaaaaaacagacgctttacgccccattttctggcgttgttgcgcgtccgcaaagttctgacgtcgggcggaccgccgcactccacgtgggaacaccagtcagccagggaacagagttactgactgtggttggccttgatacgctccaggttgtttcacgtgtggaggagattgatttacaccagttaagggaaggaatgcctgtacgtattactggcgatggttttagcagcaaaacgctttcggggcgcgtcaaagccataggtatgcaggataatgcgagcgattcacagggcgcctactatgacgtgattgtctccattgattcccccgtggccgaccttcaaccggatatacggttggggatgagcgctcgcctcgacgtgattacctatcgtaacgatcgcgctaccaccgtccctgttgcgtctttacagaccgatgataaaactggcgagaggtttgttgtttaccgccagtcacctgccgctccgcatcaaaaaatcacggtatcgattgaggaaaccgttgtgcaaggggctgtcgtgaagggcatttctgcaggagaagtgcgcattgcgcagtaa

SEQ ID NO: 141984 - DNA, 1671 bp, Enterobacter cloacae
atggtgaatgaaaataccacaggtcataacagtagccgctctataacctgtataaaaccagaatgggatgacagtggaaaggtctactggcccgacatacagaatcaaaaaaaatcagagaatgctaaagccgttttgcttcagccgcctgtcaaagcgatccccgttatcttccttcccggggtgatggggactaatttgatgtcaaacaaagcctctcaaaccgaagatatttggcgtggcgatagtatgggaggagtatttcttaaatgggcgggaaaagacggagatcgtagaagaaaattacttaatcccgacaccacaaaggtggataaccgtggggatattaaccagaccatctattctccgatttccgatgatgggaaattatttacaacccgccgggatcggggctggggggaggttttatccttcagctacggtaaatttttgagtgttttacaaggtgcactgttggatgactggcagcaggatcttgttaactacggcaaatcagcgcctgataaaaagggtgtactaagccagctagtcggcaaatctttgtctgggggaaaagatgccgaaattaccggtgaatctgtcctgacccaggaagaactgaaccattttcagaactttttaatcccggttcacgtttatggctataactggctgcaggataataaaacctcggcggaagggctggtcgcctttatcgacaggacgataaagctctataacaattactgcggacacggcatgccttttcctcccggacaggaaaaagtcattatcgtcacccattccatgggcgggctggtggcgcgctatgcgtcccaggtcagcggagcaaaagataaaattctgggaatagttcatggggtgatccccgaccttggctcgccggcggcgtaccgccgcatgaaggttggcgcaaaacaggaaggcatggccggggccgtgctgggcaatacggcagaagagctgatgccggtcctggccagggctcccgcaccgcttcagctcttgccctcggcgaaataccttgccgggactccctggctgaccgtggaaggggctggcgaagacggcagtgatattaaattgccgcagacccgggatcctttcggtgaaatttatctgaataaaactctctggtaccgcctgtatgagtccgacattatagatatggatgaggcagttagtcagagtaactggactaactatgtacgtttagttgataagcctgtccgcaagtttatttctctcatggatagtagaggctatcacccaaatacttatgctttttacggccataaaatcgcctccgacggcaccctggcgtggcgaaaaacctcgatcacctatccgaaaaatatacatgagagtgacaggcaattgcctaataattaccgggagatccctctaccttttaatcgttctcaaatgtatgaggttacctcatcaaaaacgccgggtgatggcacagtcccggtagagtcgctgagctctatatgtcgtaacagcgaaatcaaaagcgttctggcgaccagtgtggaccaccagggggcctacgacgtcagcagcctaaaggatataaaagacaggccagccctgcagtttaccctcagggccattgtgaaaatggttcaggagatccctatcccatga

SEQ ID NO: 141985 - DNA, 519 bp, Enterobacter cloacae
atgcaatgtatttgtgtacgtatggccttagcgtttgtggctgccgggatgctttgtattacccctgtaacggcaaccacgccagtccagaaggacagtccagtgataaataatttatttgcgcaaaccaaaccgcagtgtatcgggcgctacgtgattgatgttcccgagtcgtttaataatcagcttcacgatatgatttttatcgatgattttaaaattgaaagtaaacatctttatccgcctgcatttaaacagcggatgcagctaagagagcaggcgctgcgtgatgccacgaataaaccaggtaacagacctgaaaacgccccttttttaaaagaggttattcttctttctgatggaaagggagcaatttttgatcataatgagtcgggtgctcctgatatatacaggcaactggaggcccatgtttattcaggcatgatagcctttgtgattactacagatatccgtgatttttcagacaagaagcaccgcgaaaaaaaaccaaatatctag

SEQ ID NO: 141986 - DNA, 357 bp, Enterobacter cloacae
atggataacacaattaagggggcgggagacaccctgtttaaccgtagtgcgcaaattaatgaggcacttaaaacatcaaatcagtacaccattaagaaagtggcgctctcaccgaacggtattccggcggagtcatggctatttggtggtgcccaaatcatcagaaatctggcgacggggcaggatgagaagaatacattttatgattttgattttaaagccaatgagcgtgatgctacagcagataagccaaggtttggtattggactcaccagcgactataaaaaaacgcgttacagcgaagcgcagatgattgaaatctgggataggctagtgaattcccttcgttataagtag

SEQ ID NO: 141987 - DNA, 570 bp, Enterobacter cloacae
atgagtgtcggttattttttaagagtcggtgatagcaccacctgtggtgggaagatccttaccggcgatccaacatttcaatggtatggcgtttctgctgccagagaaggagatatggttaactgcggtaagcacccgggaacgtacaaaatcttaggcggagctgcggatacattcgatggaggccaggttctggcggggtcacttgatagctttagttcctgcccatgtcacgcgaaatttatccccggtattccggatagctactccagggatgatgcagggggattggaaaaaacaatctccactgttacagagactaattctgtagtggataatttatggataagctttgctttgccaaaaactgaaaattattcaggccttaattatcgtttgacaatggatgatggcagcgtacataaagggatgttcgatgaaaataacaaggtatatattccttctgtttctgccagatcctgtatttctgttgaaattgaaagtccgggtaatgataacagcgtttgtgaaagtttgaccagccaactattgaagaatattatggggtga

SEQ ID NO: 141988 - DNA, 771 bp, Enterobacter cloacae
atgatcattaaaggtctgtatgaggccgggcaagagcatgagttggaatcccctgtgttggataatgcaattgcggctcttgagggcgccgctatcaagttttctactgatactatcaacgatgccaatgtcaggaccagttacacatcaaatattaaaagagttacattagaagtaaaggaaatggttaaagccaggaaaataacggtaaaagaagcttctgaattttgctatgagatgagaaacaaaattcttgaggagcacagaaaatacacctcatcaacaggattgtcatttgctgaaaagcataaaaaaactcccccaaaattagatgacctatacgataagtatgcttttaaaaaattcgaacgttcttttaaagagttaactgcacagcagagaaattctattcattacgaaattattgagtcatctgcacgaggcaatcctaaatttaatgcatcaaacaaaagactaaaggtaatgggaaaggttggtgttttaataacggcgtcactggcaacctatgaaatactaaatgctgaaaataaacctaaagaagcgataaaacagggggtgcaaattggtggtggtgtcgctggtgggtggttagcagggctcgccgtagcgccactttgcgggccgggagctccggtctgtgcaattgcactagttttattaggtagcgctgcaggtggtatagttggttcggtagtcgctgatagtctggatgaggaaattgaggagttcacaacgtggaagataaactag

SEQ ID NO: 141989 - DNA, 351 bp, Enterobacter cloacae
gtggaagataaactagtttacttcaatttgtgtggcgtactatcagatatatttgtagataacgaagttgatttcaaatatatctcctcaatagcaaaaaaattccctgtcgctatagttgaagaaattttgtttgaatgggttgcccctgtttgttacaccaacctcctgacgcctgcaccttctgtatggagcgggtttgataaaaaatctttatggattgatatttgcgactataggaataaaaagagttttgccgcaaaatgtaagcataagttgctcgtgtctattctcaaaataacttacaggaaagaatggcggactctgaaaaatgaaatgctacagagctaa

SEQ ID NO: 141990 - DNA, 1125 bp, Enterobacter cloacae
atggcatggcctatacctgagatacctgataaaaaatcttttccaccaccaaagttctggttctggattatagtattggtactgatgttaatagtgggtgctattttcagcttatggatctggaataaggcaacttatgctgaagttttcttctatggtgttctccctgcattgttgatttggttatgcttattcggggtgctgtttaatcgctacgagcagtctgtcgcagctagacgggcatgggatttcgaaagggaacaaaccaaagctgaatggcgcaactggagtcgacagcagctggccgtagttggtaatgttttgttttctccggaagagaaaggaatggaggcactattggacgagttggaaaaggttcctgcatttcctaaaaaagctcgtccattattcaactcccagcatagctttcaagattttatgaaggaaacagacagaaagctggagttgcaacatcccggatatcgttattccctgcactctgtttatgtttaccagtcgccagaactgattgacgaaaaacgcattgagttaatttctcaacaatgggatctcattcccaatttaatttattccatgaagcctatagattctttctatgatgaaaagaattttgacgggctgatattaatgctttgtcttcaggactggcctcatcggcgcagcgggcagtcaagtgagtttatttctgctcagctccttacgtcatctgcttatgctcatcagcattcattgcctgttatcgctggcataactcgtacgatgccattggaagagggtaagctaagcaatgagttagatatgttattcgaatatgttcagcccgataagcagagtctggaatacgtttggctgttgggagcggctgagaaatctgctacagaaataatgcaatatgcaactcttcatcactggccgctgccagagaaaagacctctgcattctatcgatctctcctttggacctcccggagagatggccttgccactttcccttgcgatgctggccgaggccgccaataaaacgggtaaggatcaactgctggtaaatcagacgccgcagaaaacagggacactttgcttgattgccagggagctttacgcatga

SEQ ID NO: 141991 - DNA, 474 bp, Enterobacter cloacae
atgtcggcaaaatcacgattttttaaaaaactgcaggaccagtccccccgcaacgaagcctttaacacgaaagccgaagcggatatcgcggcgtttcgccagcgaatcagccagctccaggagtccatggagacatggcttgccggaacagggattcgcactgaaaccacagccaactccctggttgaatttctcattggcgggagcgcgttttcggttccgggtattactctgcattacggaacgcggagtatccggtttactcccatttttctgtacggacagggcgtgaccggctgtattgaggtctgtctgtataccggagccgatatcaggccccggtaccgtctgtttatgcgcagtggcaggcaaaatgactggacctggtgtccggccggagcgcagaacggaaatcctgcccggtttgatgaagagacattttttacgatgatcgactctttgcttccggagtaa

SEQ ID NO: 141992 - DNA, 1392 bp, Enterobacter cloacae
atgcaagacgaacaaacacgcctggtgagaaccggcggcgatccgcgatcattgcctcagtttacggcgctgcgcgatgaaatgagtaaacttacgcatccggcacgcccggacgtcgactggaagcaggtggaaatactgtcgctttccctgtttgaaatcaacggcgtggagcttcagacgagtgcctggtataccctcgcgcgcagccatctggtccgcgtcagtgggatgaatgaaggcttcaacatactggttgcgctgctaagccatcagtgggcacaactctggccacagccagtgtatgcccgggcagaaatcctgaatggtctttttcagcgcttacagaaacttttccgcacctggtcactgttgcccgctgatttcccggcccttgagcaggccgaaaagcgtttgctggaactggatgacattctaaaacgtcaggaactcaggctcgcctgcaatctgagtcccctgatgcagcaaatacgcagcgccttaaatcgcctggagaatagtcgtcagctggaggagacaacccagaccactgctttgcctgaacaggcgcggatgagtggtgacgaagtagccccatgtgccagccagctggtctatgtcatccataaagaacccgaagtaaaggtgcaggtgacagaggctccaccggttaaaccaacacgatggccagtctttgtagctggcatggcgacctcgttggtgcttagcgcagccattgcctttggatggcaggtcctgcatcaaccggatgaagccatgaaatccatggctgcgtccgtcagctggcagcccgaacccatgacggcctcgcaaatagatgctttcagggaaacggataccagccggacacattccgccatgtggattgggcggataacgaaccaggttaactggatcatgaatttgtcgccggggtggcggtttcgctatgggcaggatctgattacgcaggctaagactttgtggccgaatgaccccgcaacccgggctttagttcaacgctgggaacaatatcgggtggccagaacgctgccggcaagtcagttactgggctggtatgagggaatgaaacagcttcaggtgctgtcggcaaagcttgatgcgctggaccaccagaaaggcaaatacctgacgggcagcgaactgaagacgatggtctggcagataaccagttcgtttgccagcgcggttccggtcgaagagcagcttcgacaactggttactgttccgggggaggttaccgtacccggagcgaatattgtgcaggtctcgcagcatcttgattcgttgaaccatgtgttagaacaactgtccgcacagaaaatcagtgtaacagagagcgggccggaagcttccgatatgcccaaataa

SEQ ID NO: 141993 - DNA, 495 bp, Enterobacter cloacae
atgaaacgttttcttattttatctctgagtgctcccctgacatttattctcttcggctgtgcgccgcagcatgccacggtatccgctattcaaacccagccggtcacggcgtcggtgaatacggttcttaatcatcaggactggccgaaaaatgagtggtggaaggaatataacgatcctcagcttaccgggcttattgcgaaagcattgagcgatgcgccggatatgcagattgcccgtcagcgcattacgcttgccgaagcgcaggcgaaagccgctatggccgccgacggtccgcagattgatttttcagcggatgccgaacgtcagaaaatgtccgccgaagggctgatggggccctttgccattaccgacccggcggcaggcactaccgggccgtggtacaccaacggtacctttggcctgacggcaggctgggatctcgatctgtggggaaaaaccgcgcgcaggtcgaggcccgaatcggcaaagtga

SEQ ID NO: 141994 - DNA, 2199 bp, Enterobacter cloacae
atgtcgtcatacaccacagacagttacggtgcagcagcacctgaaaatcacgaaattgatctcgtccgtctcctcggcgagatgctcgatcaccgcgcagttattttaacgatgacgctcgttttcactctgcttgcggggctgtatgcctttttggccacgcccgtttatcgcgctgatgccttaatccaggtagaaggaaaacaggataacagcctgctcaagaacttaagccagttcagcagtgaactgtctcccgatgttgagcccgaaattctcctgctgaaatcgcgtatgatcctgggcgccacggtagacgcactgggcttaacccagcatgtgacagagcgcactctccttgttgtgggacgcctgtgggcgcgtttgcagggccaaaagcccgccaccttaaccttgagctggcttcagatctctccggttgagggaaaaccacgcactcttgtgcttaccgtgctgggaaaaggcgcgtaccggctggagggggacaatttttacgccgagggcagggaaggaatagcgcttgaaaaggagggggtttccctgctggtcaagacggttaatgcctcaccaggcacgcggtttacgctccagaccaggacccgtctggaggcaattaacgacctgagtacacaattcaacgtggctgagtctgcccgccagagcggcgtgctgacgttgtccctgaccggtcgcgatcctgagcatattgcgaatgtcctcaaccgaatagcccacatttatctgcagcagaacattgcccgtcaggaagcgcaggattcccgcagccttgcctttttgcagcagcagttacccaaaatcagaagcgacctggatttggccgaagagcggctgaaccagtatcgcaaacagcgggattcggttgacctctcgcttgaagcgaaatcggctctcgagcagatcgtgaatattgaaaaccagcttaacgagctgacctttcgtgaagcggaaatctcgcagctgtttaagaaagagcacccgaactatcgcgcactgcgtgaaaaacgtcagacgctggagcaggaaaaggtccgcctgaatcagcgtatttcagccatgccctccacccaacaggatatcttgcgcctcagtcgggacgtggagtccgggcgcaccatctacctgcagcttctcacccgccagcaggagctgaacatttctcgctccagcgccatcggcaacgtgcgaattatcgacagcgcggtcacgcagcccgatcccattaaaccgcggaagccgttgattatcgtcgctggcatgctgctggggctgatgtgctcgatgggtctggtgctggtccgcattgcgctgcgacgcgggatcaacacctctgaggagcttgaagcgctgggcgtgcaggtgatggctaccttgccgcgttcggtgtggctgtggaaaaaaacgaacctgcgcagaagacgagcgtttggtacgcgctggaaacacaggatcaccgatgtgccctttctgcccgttgaccggcctgcggatattttcgtcgaggccgtacgggggctgcgcaccagcctgcatttcacgctgcaggaagccgctaaccgaatcgtcatgatttcaggccccacgcaggactgcggaaaaacgcttgtcagcacctcgctggccgcgattgaggtacaggccgggctcagagtgttattcattgatgcggatatgcgcgaagggtatgtccacaacgtgtttggcctgaaaaaccacaccggactgtccggcgtacttgacgggcagtgcgagtgtctggaggcgattcagcgctatgaaaaaggcaatattgacgtactgacctgcgggccggttccgctgcggcctgcagaactgctgatgagcgaacgcttcagggcggtaatggcgtgggcggatgaacattatgatcttgtgatccttgatacgccgccggtgctcgccgttaccgatgccgcagtggccgccccggtggcggcaacctcaatactggtcgcccgctttggcaagaccagcctgaaagagatggaaaacagcgtcaaacgtctgcagcaaacgggcgcgcgtatcaacggcaccgtgctgaatgacgtggtgaaatcggccgcgctttattaccgtgcgggctatggccattatgagtatggtcaaagcccgaaacggcaacagcgcaaggattag

SEQ ID NO: 141995 - DNA, 231 bp, Enterobacter cloacae
atggcaaataaaaacagcctgttacgtgctttctgctatgacggtaaaaacataaaaaagagtgtgacaaatcgtgccattcgctcactgaaaaggagggtgaccgcctcgttagcacgcttatttctgcgacaggtgcaaaaagttgtggtcatgatggatgcgcaacggaattacgcattaaaaatgggctctcaacgcgcgtggtttcgcgatgggtttcaccgttaa

SEQ ID NO: 141996 - DNA, 528 bp, Enterobacter cloacae
atgaaaaaattaatgatgttagcaatgatagtcagtgccttttctcttcttaccggatgttctactcctgctcaaatggcacaacaaagaatgaatgagtgtgaaagcaagggtattagtaaagatacatgctacctggtagagcaaaaccgccaacaatcttataatgaagctgctcaaaatgcagcatgggttaatgcacgtgacgctactgctgggactggtatttgggctaagaaagatgctctacaacatgcacaatcagcacataaacaccttgctaaaggctgcacccaggttatggatgcaaacggacaatgtgatgttaagccagcgaagacaagcaatagctttaagcagttttccagtgaagcagatcatgtcatgaatatgcctatctctgatgctgctgaatatcttctttctaaaagctggaagcctaataacggagtatggaggaaatcagactacacattaacgcttgtagttgaaaatgagaaagtattgaatgcacaactttcaaaataa

SEQ ID NO: 141997 - DNA, 1119 bp, Enterobacter cloacae
atgaagtctttaaataaatcagttattgctgtttttgtaatgggtaatgtgtttgctagtatggctaatgctgctgatgtaaacgtaaaccttaacgataacgttaacaacccgggtactttcattcagattcaggggactgacaacaccgcatataaccttgataacatcaaggctagcaacgttcagcaagacgggcaaatctacaacctgcaaggcgatattgctaaagcaaatattgccattaataacgcacaagatacagctaacacggctgtgaataaagctgatgcagctcaagctggggttgatgccaatacactatttattacgactctgaatcagaaagttgacgacaacaaagcaggtcaaagtatcaccgacagtaagcaagatatattaatcaatgaaaccggaaataaagcaaacacggctttacaaggtgttgttaagaatggcactgatattatcgacttgcaaaatcaaagcaagttgcaaggttctgtattagctaatcatgaccaacgtattacctctttagaaaatgcgcccaagcctactaacggcgtggatggtaaagatggcgctaagggtgacaccggtgcaacgggtgctacaggtaaagatggtcttgatggtaagaacggtagagacgggattaacggtaaagatggtaacaatggtaaagacggtgtaaccaccaccattaacaaagtggacatggcgacacaaattaaagtagcagctaatgctgctgccatcgcatccacttcgacccagactgctagcgttgctcaagatctgcaagacgctaaaaaagtgtttagccagcaacaagctaacactaacgcacaattcaaatcattacgtgatgaagtggacggtaacaagaaagaagcccgctctggtgctgcaagcgcaattgcgattgcctctatgccacaagttgaagcaggccaaaaagttatgttctctgctggcgctggtagttttaaagacgagcaagccgtaagtgttggcgcctcttttcatgctggagcggctacggtgaaagcgggtgtatcatcaagcactaataacgatttcgcgcttggggctggcgtaggtttcggattctaa

SEQ ID NO: 141998 - DNA, 963 bp, Enterobacter cloacae
atgtctaatgacaaccgcgtctacagttactccgccgtcctgatgggctcacccatcctcctgaaactcttctcccatgacgaagccctcgcgtcccgcgtgtttcgcctgatcaaacagtatgaagatctgctcaccgtcaaccgtgcacgctcgcaggtgatggacatcaaccatgcggccggccagcatccggtcaccgtcagccgaccggtgtttgagctgatccgctgtgcaaaagcggcaagcctgctcaacgacagcgcctttaacctggccattggcccgctggtgaagcgctggaaaattggcttccagggagaccgcgttccgcctgccgatgaaattgcgtcgctgcttgcgattacccatcctgaggacgtcattcttgacgaggccagcagcagcgtgtttctggccagagcgggtatggagatcgatctgggggccatcgccaaagggtatatcgccgacagggtgcgtgattaccttcataaagagggcgctgagctggggcttatcaacctcggcggaaatatccagacgctgggctcgccggaagggggctggaacgtggggcttaaaaaaccgttcgccgcagaagcgctcattggcaccctgaccgttgagaacctgtcggtcgtcacgtcgggaacgtacgagcgctattttgaacaggacggcaggcgttaccaccacattctcgatccgcgcaccgggtatccgctggataacgaactggatagcgtgactattatttctaaaaactccatcgacggtgatatctggaccacgctgatgtacggcctgggcgtggaaaagggctgcgccgccctgcgcgcgcgccccgatattgacgctatctttgtgaccaaaacaaaagaagtggtgttctcttcagcacaccacttccgctttaccctgctggataacgactaccgcgttattggcagtattgcttga

SEQ ID NO: 141999 - DNA, 1617 bp, Enterobacter cloacae
atgagcgatttgcagcctttccttccgacgcgcaagcgccccatgaagctgaacaccctggtcacgctgatggtgtgcgcgattatcggttcagtgctgctggtggtctttgcgctctatgcggtgcagatcacccgggcaacgcgcgatgacgtcaaagacaccgcgctcggcattgcccgcaccctcgccgacagccccgagatacagcgcggcctgatgcaggcaccgcaggagaatattattcagcccatcgcccaggcggtgacgaaacgaaacgatctgctgttcaccgtggtgaccgatatgcgcgggatccgctattctcacccgaacgaggcgctgctggggctgcattttatcggcgacgatttaactcccgcgctggaaggcaaagagaacgtatcggttaaccggggcgcgctcgccgaagcgctgcgcgtttttacgcccgtctacgatagtcagcacgagcagatcggcgtagtagcggtgggtatctccctcaataaggttgaagagcaaatcacccgcgggcggctaaacgccgtctggaccattttgttcagcatctttatgagctctatggcaatctggggcctggtgcgggtcctgaaacgcatcctgttcgggctcgagccttacgaaatttccgccctgttcgaacagcgtcaggcgatgctgcagtcgctgcgtgaaggggttctggccgtcgatattcacgggcgcgtgacgatgattaaccacaccgccagagaaatattgcttctgccttccggcaagcagaccgaaaacgccagcgctcccctgctggccggcctgcgtgaagtctcaaagacgggcgtcgcgcgccaggatcaggagatcagctgcaacggccgactgctgctgtgcaacatggtgcccgttaaaagtcaggatcgggtcatcggcgccatcaccaccttccgcgataaaacggaaatcagccagctgatgcagcgtatcgatggcatggtcaattacgtcgacgccctgcgcgcccacacgcacgagtttatgaacaagctgcacgtcatcctgggcctgctgcacattaagcgctacgacaagctggaagagtacatcatccagacggcgcatcattaccagacggatatcggtacgatacagagcaaggtaaaatccccggtgattgccggattcctgctgggtaaaatcaaccgggcgaaagaagcgggcgtcaccctgacgctggcggacgaatgccagatccccgataccgccagcgaagaacaagtagcggtgctggtcaccgtgctcggtaacttaattgaaaacgcactggacgcgatggaaggccagccggaaggtgaaataactctgctgctgcactatcagaacggctggctcagctgtgaagtcagcgacgatggccccggcattgatcccacgcagctggaggctatttttacaaagggcttctcaacaaaaggtgaaaaccgcggcgttgggctgttccttgcccgccagcaaatccagaacctcggcggcgatatcaccgtcgagtctgagccaggcgtatttacccaattttttgttcacatcccctgggatagcgagaggaatatcgcgtga

SEQ ID NO: 142000 - DNA, 651 bp, Enterobacter cloacae
atgtcacattggaatatagcggcagcccagtatggcgggcagcaccagagtgttgatgaacacgttaagcaccacctccgcttcattgctgaagcagcacggcagcggtgcgatttgctggtcttccctgaactctcgttaacggggtcaggtacgctgacgttacctcccccacccggcgacgcgcagctggaacctctgcttgacgcggcccatttttaccggattacggttattgccgggctcccccttgagcggaatggccagcgccagaaaggcctcgccctgttttcaccctctcgccagagcattttgcgctacccgcagggtagcggtgcaagcctgatgccgggagataaacagcttactatcattgatgcacacgccgattctccccttctcgatcccagggctacgcttgttaccagctgtcagtctgtgggggatcaccgctggcggcagtccatcagctccctgcagcgcttcgcgcataaatatgccattgcggtgttaatggcgaatgcctgcggcggcagcgcgctatgggatgaaagaggccagctgatcgtccgggcggataaaggcgagctgctgttgaccggtacgctcagcagacggggttggcaaggcgatatcattcctttaggctaa

SEQ ID NO: 142001 - DNA, 207 bp, Enterobacter cloacae
atgagggggttcataaagagtatttttaaacttattctggaagacttgaagaatgatttaaaagcatatgccacgatttttgttattgtgattctatcaatgataccagtaacctttattgaagacgatcaaacagcaatgcttattgttggggctatagtagtaatcgttttttatatagcctatttctacgaacctaaaggatga

SEQ ID NO: 142002 - DNA, 705 bp, Enterobacter cloacae
atgtattacagtaaatcgattatcgaaaaaatagggtccgataaagatctcgctgtcaggcttgatcgtgccgtggctggtgtgagggatggtgctgttgagtatttaaataatcttggcgatgctacaacacgcttgctctattatacatcttgcttcacggataattactttgatgtatgcaaacagttggcttctgaagataagaggtttatgtttggtgttgtagaactcgttaaacatagagatttaatattccgtatggttacaatatttatagaaacaatgcttaaaaacaagaatgaagttgcgaagaaaagtatactagaaaaagttatacccatcacaacaaattattcagttaagcaagtttcgaaattcggcctaatttatgctgttgcaaagtatatatgctatagcaatcaaatgaatgctgcagtgcaaagcgcattgatgaaaaaagttgccggaagaacgggaagtgcatttttagcgcttaacgcttacgcaatggttcagcgcgcggcggacagcgccaataatctcaaaaaattccttccgttattttatcatgcattatatatagagaaaattgaaatgatgtacttcctcatcgaaccagtaataatgaaagccggttatctgaatatttacacagcatcagatcatgatattactaatgcttttataaagatggctcaataa

SEQ ID NO: 142003 - DNA, 759 bp, Enterobacter cloacae
atgagtaacctgctgacgtttcccatgtacgccgtggatcgcgccgacacccgcgcgctctggctggcggtaaagggtttactggttgcgcgcggtgtgcccgtcgatcgtgaccccggctggccggagtctgacctgctgacccactggcaacagcctgagcttatcctcagccaggcctgcggctatccgctggtcacgcagctccctgacgtgcaggtggtcggctgctttcactacacggcaccgggctgcgaagggatccactaccgcagcgttctggcggtgcgcgaggaggataggcatctcacgctggctgattttcgcggacgccgggcggtctgtaattccccggactcgcagtccggccaccgtgcgctgcgaaaaaaagtggctcccctgaccgctgacggtccgtttttcgcacaaacgtcctttagcggtagccatcggcagtcgctgattgatatcaaacgcgaggcaggggatattgcggccatcgactgtgttacctgggcgctgctgcagcgtcacgagccggagcggcttgccgggctggcggtcatcgaccacacccccctgacgccagggctgccgctcatcacctcgcaccacacctcgcctgaaacgctgagcgccattcgcgatgcgctacgcgcgcttgtggacgcgccagaacaccgggacgtttgcgacgcggtgctcatcggcggttttagcgcggtgacgcgtcaggcttatgcctcattgcgcgaatga

SEQ ID NO: 142004 - DNA, 354 bp, Enterobacter cloacae
atgaaatgtttgctgatgccttttttggcattaattgtcagtggtgcgtatgcgcaaacgctcccggacttgacgagtttctctgagcaacagatatttgaaaactgggtgcaaaatcgatgcatcggcaagattgcggatactaagagtctgaaagatgatgcgatagccagcgctgccgcatggctagaagcaagcaatcagcctgccgggaatttcgaaacagcagacaaggttattgataacttactcaacgagaagccgggcggtaacgcaccagttggttatcaggttttgaagtgcagcttaatcgccaatagcgacgcaattcgctcgcttggggtccaaaaataa

SEQ ID NO: 142005 - DNA, 765 bp, Enterobacter cloacae
gtgaaatcattgattactggctggatagcgctttgtttaatgtttatggttcaggggtgcaagcaaaatatggatttaaaaccagacaattacttcagtggtcagcagctcgcagtcgcgcgtgcaattgaagccggtgagatgaatgaggttattaaattagcgtcgcaagtagaccttaataaacccggtaaagaggacatgacgctgctattttgggcggtgatgaacgcaattaacgataaaaaaacaccggaacagctaaaaattattaccgctctgattaaatcgggggcagatccgctccagccaaggcctaaaggagagagcagtccggctgaatatgtgctgaaagcggacagtggggtctggataaaggcaatgctggagggcggattatcgccggatgcgaaggataaaacgtttggggaaccgattatcttcgagaccctcgaagcaaaaaacaccgatacgctgcaggcgatgcttgacggtggagcggacatcaatattaccaattcactgggtaatacgttgctgatcgccgcgctagactttcactcttacgaccatgtcctgcttttgctggagcgcggcgcaaacgctgagatcaaggcggataatggctggacaatggccaaccaactgcagcgttatctgaaccgggcgaaagaggggagtgacgaatatcaaaagctgactgaaatcaaagacacgcttattcagcatggcggtaaatggcctcctgcaccggtgagtcagtga

SEQ ID NO: 142006 - DNA, 456 bp, Enterobacter cloacae
atgagtgttaaaaagcaggtattcattttctggggaacgatggatgcgctggctgttgcggtctactgcgcgcagtccgtgcgccatgacagagtcccctttgtatccgatatatcctctttcagtgcgacaggaaactggctttctggtggtggatccggcgttctgctgcttttctttattctcgatttcctgttgctgttgtcgctctttgcctcggcatggtgctttctgaccgggaagcccttcgcgagcagactggcgctctgccaggaagtttttcgtctgatctccttccggtactcggtgacccttttcccgctgttgttgaatctcgcgggcgcctcaagcgtctggctgtacagtgttttgtttatattttcagagtttcttaagatctactctctgtggatacatcaatacggaaggacgcgtaatgctcgatcttcacagtga

SEQ ID NO: 142007 - DNA, 315 bp, Enterobacter cloacae
atgatcgttaacgctggtgagtacaagcataagtcccgtcaccagattcgctccagcggttatgttatcgatacgcttgaggccgcaatgtgggcggtatggcataccgataatttccgtgatgcgatccttcttgccgccaatctggcggatgatgccgacagcgttgcggcaacggcaggtcaactggccggtgcgttatatggctattcaggtattccgcagaagtggaaagataaactggtccaacacgaacgtctcgtcagcatggcaggggagctatttcacagtgcacctgaggataactttctttaa

SEQ ID NO: 142008 - DNA, 435 bp, Enterobacter cloacae
atgcactggtttttcttccttttctttttgatcctggcgctggcggttatctggaatgaaaagaacgcctttaataaaaaacagtggataataacgggcctgatgttagtgcttgttctgctttctacggttgtaattggtttctttttgaaatggctggcgcagtcatttttattatttcctgtcgcggtggcaaaaaaatactccatcatcatttctatgtctctcctgtgcgtctggggtatgaaatttgccgtcgctttgctgtgtactctattttcaggcgttatggccgcgcataaaaaaatgaattttcgcaattatgaaaagatctccctgatgtcacgcaccgtagcgccgcccttatttgtcttcgctaaactccttctctcgttagggtgtgtccttatgttttcaggcctgtggcttaagtaa

SEQ ID NO: 142009 - DNA, 3084 bp, Enterobacter cloacae
atgaatcgctgggaaaatattcaactcacgcacgagaaccggctcccgccgcgtgcgtacttcttctcatatgataccgtcgcgcaggctcgcacctttgcccgcgaagccagcagccgctttttatcactcagcggccagtggaattttcgttttttcacgcatccgctctatgtcccggaaagcttcacctcagagtacataaccggctgggacgacatcaccgtgccggccatgtggcagatggaaggccacggccagctgcaatacaccgacgaaggcttccccttcccggtggatgtcccccgggtgcccgcggataaccccaccggggcatatcagcgccacttcacgctatcggacggctggcagggtaagcagaccctcatcaagtttgacggcgtcgaaacctatttcgaagtctacgtgaatggtcagtacattggctttagcaaaggcagcaggttgaccgccgagtttgacatcagccacgcggtgcatagcgggcaaaacctgctgtgcgtgcgggtgatgcagtgggcggactccacctacattgaagaccaggacatgtggtggacggccggcattttccgcgacgtctacctggtcggaaaaaatcctgctcacgtgcgcgatttcaccgtcagaaccaccttcgacgaggcgtatcaggacgccaccctcttctgtcagctggagctggaaaacctggccccgcaggcatcagccgtgacgctggagtatgccctgtacgatggcgaggtagtgctccaccagggcacgaccggcagcctgaccgtggcccgcagcgcggaaacggccttcagcattgaggtcaaacggcctcagcagtggtctgcggaatcaccgtacctttaccatcttgtgatgacgttaaaagacgcgcacggacaggtgctggaagtgatcccgcagcgcgtcggattccgcgacatcaaggtgtgcgacggcgtgttctacgtgaacaaccgctacctgaagctgcacggcgtgaaccgccacgataacgatcaccagaagggccgcgccgtagggatggatcgcgtcgagcgcgacctgatcctgatgaagcagcacaacatcaactcggtacgcaccgcccactaccctaacgatccgcgcttctacgagctgtgcgacatctacggcctgttcgtgatggcggaaacggacgtggaatctcacggctttgccaacgtcggcgatctgagccgcatcacggacgatccggcgtgggagcccgtttacgttgagcgcatcgtgcgccatatccacgcccagaaaaaccatccttcaatcatcatctggtcgcttggaaacgagtccggctacggctgtaatatccgcgccatggcccgggcggcaaaggcgctggatgacacgcgcctgctgcactacgaagaagatcgcgacgccgaggtggttgatatcatctcgaccatgtacacccgcgtgccgctgatgaatctgttcggtgaatatccccacgcaaaaccgcgaattatctgcgaatacgcccatgcgatgggcaacggcccgggcgggttgacggagtatcaaaacgtcttcgatcgccacgactgcattcagggccactacgtctgggagtggtgcgaccacggtattcaggcggcagatgccagcggcaatacgtactacgcctacggcggcgactttggtgactacccgaataattacaacttctgtctcgacgggctgatctactcagaccaaacgccaggccccgggctgcgtgaatataagcaggtgattgccccggtcaagctgcgctggcagaacggcgagctgcacgttgaaaaccgcttctggtttaccacgctggatgattacaccctgctcgtggaggtgcgtgcggaaggggaaacgctttacagccagccgctgcatatcactggcctcgggcccaacagcgcgcgcagcatgcctctggacctgcccgcccccgacgagcgcgaaatgttcctgaccgtgcgcatcagcaaaaacagccgcacgcgctacagcgaagccgggcacgagatcgcggtgtatcaattcccgctaaaagcgcgcacggatcacgccacgccgtttattaacgccaacgcgacgccgctgctgctggaagaggaccgcctgagctgcagcgtgaccggacataacttccgcgcacgcttctcaaaagtgacggggaaactctggtcctggcaggttaacggtgaggaaaacctcacccgtgaaccgaaaataaactttttcaaaccgatgattgataaccacaagcaggagtatgaggggctgtggcaacccaaccacctgcagattatgcaggagcacctgcgcggttttgaggtcgagcagcacgacgatgcggtcatcattaccacccgcacgctgatcgccccgccggtgtttgattttggcatgcgctgcacctatcgctggcgcattgccgccgacgggcaaattaacgttgagctgagcggtgaacgctacggcgattacccgcacattattccttgcatcggctttaccctcggcatcaacggcgaattcgaccaggtgagctactacggacgcgggcccggtgagaactacccggacagccagcaggccagcactatcgatctgtggcacaccacggtggatgagatgtttgaaaactacccgttcccgcagaacaacggcaaccgccagcaggtgcgctgggctacgctcgccaaccgtcgcggcagcggcctgctggtggtgcctgagcaacctgttcacttcagcgcctggcactacacggcagaggacattcacgccgcgcagcactgcaacgaactgcgtcgctgcgatgacatcaccctcaaccttgaccatcagctcctgggtttgggctccaactcctggggaagcgaagtgctggacacctggcgcgtctggttcaggccgttccgctacggcttcaccctgcttccgctggaaggcggacaaaccgccgcgcagacgctggcgcgccatcggttcggcaccggtttcttttccatgaattcacacagcgaggcagacaaatga

SEQ ID NO: 142010 - DNA, 450 bp, Enterobacter cloacae
atgatcgttctcgacagcctggagcagttccagcagcgttatcgcacgggccgtaaatggcagcgctgcgcagaggccatcaacaatagcgaccacatccagcccggcgttgcccactcaattggcgattcgctggcctaccgcgtggcctgcgatgccagcaccgacgcgctgttcgttggccatcgccgctatttcgaggtgcattactacctgcagggcgcacagaaaattgagtacgccgcaaaggacacccttcagcttgtggagtgctaccgcgatgaaaccgaccgcgaatacctgaaaggcgtgggtcaaaccgaacaggtgcgcgaggggcaaatcgtgatttgtgaaaaccacgaggcgtatcgctttatcagcgaaacgccggcaaaaaaagtcgtcctctatgtgaccatcgaagacggctatttccataacaaataa

SEQ ID NO: 142011 - DNA, 1974 bp, Enterobacter cloacae
atgctgccgtttgaacagctgataagcgagcttgagcgcaccggccatcgccggctggtggtgctcagcggtgatgcacagtggacgttaacccaagctctcgccctgcgtgacgccctacccggagactgggtttggctggacgaacacccttcacaggccatcagtggcctgctgggacgcgagttccgccatgccgtctttaacgccagcgccgggtttgatgtcgccgcgtttgccgccctgagcggaacgctcagcgccggaagcctgctggtgctgcgggttccaccgctcgacgcgtgggccgagcgtcctgacggtgattccctgcgctggagcgacagcgccgacgcgatagccacgccgcattttgtccgccatttctgccggacccttgccgccgatcccgacgcgattgtctggcttcagggtagcgatttatcccttccacctttacccgatgcgcccgactggcggcccgccagcggcgcgccgcagcgcgagcaggctgagatcctggatgtgcttcaggggataaggaggggcatcgtggccgttaccgccgcgcgcgggcgcggaaagtcagcgctggcgggaatgttgctgaatcgcattacgggcagcgccgtggtcaccgcgcccgcgaagggggcaacggatatcattgcccgatttgccggagagcattttcattttatggccccggacgcgctgcttgcctcttcatgccaggccgactggctgattgtcgatgaagccgccgcgatccccggcccgctgctggaaaagctggtgagccgtttcccgcgcgtgctgctgaccacaacggtgcagggctatgaagggacgggccggggatttttgcttaaattctgcggtcggtttgccgggctgcagcgctacagcctgtcagcgccggtacgctgggctacgggctgcccgcttgagcgggttgtcgcctgcgcgctgctgtttgacgatacgctagttgaccgccgcccggaaggggaggtgcgtttaacttacctgaccccggaggcctgggaaagccgtccggcgctggcagcgagcgtatacgaacttctctgcgccgcgcattatcgcacctcgccgctcgatttacgccgcatgatggacgcgcccgggcagcagttcgctgtcgccgaagccaacccggtcatcgccggggcgctctggctggtggaggagggcgggttatcccctgagcttagccgcgccgtatgggcgggcttccgccgtcctcgcgggaacctggtggcgcagtctctggcggcgcacggcggctcctcgctggcggccacgctccgaggccgacgggtgacccgcattgccgtgcaccctcaccgtcagcgggaagggattggtcaggcgcttatccgcagcgccagcggggaagattatctgtcggtaagctttggttacaccgatgagctttggcgcttctggcagcagtgcgggtttgtgctggtgcggatgggaagccatcgtgaagccagcagtggctgctacaccgcgatggcgctgctggcgcacagcgaggccgggcgtcagctgtgtgagcaggcgcagcagcgtctgaagcgcgatgcgcgggtgttatcggcctggaacggtgaaaagatcccggtggaagatgaatgggacgctacccttaatcatgacgactggctggagctggccgggttcgccttcgcccaccgggcgttttccacctccgttgcgtcgttaacgcggctggtgcagagcgttgatatgccgcttgcagccctgcgcggaaaagttgaggcgaaaaaggatgatgcccggctaagcgctgagctggccctgcctgggcgaaaagcgctgctgatgcgaatgcgagcggaaaccgcacaagctcttgaaaggcttaatgaagctcgctgtcagcagttgaaagacgctattttgcaatggcaattttttcaatga

SEQ ID NO: 142012 - DNA, 825 bp, Enterobacter cloacae
atggaaattaaactgcatgccaatgccaccaccacgccacgcattcgtcgctatctccagcagtccgataaaagcgacagggagctggcgaccgagctcggtatctccgtcacgaccgtcaggcgctggcgcaaccgcgagcaaattacggataaccagacaacgccaaaagtgatacacaaggcactgagacaggaacaggttgcgctggtgaatgctttacgtgaagtcacgggcgcgccgctggacgaactgctgctgatggtcaatgaaggactcgggatcgccgtctcccgcgcgaccctgaaccgttaccttaagccggcttcgataaagcaaaagggcgcgacgctgcaggggaaaaaggcgctgaaggcgggtatcgtgccgcaaaaacttctgctgcatcatctgcctctgtcgctgcatatggacgatggcggggaacagcatctgctctgggcgtgtgaacccgtgagcggatggtgctacgcccggctgtatgcgggcatttctccgccgctgctgacccgctgggtgaacgacgcgctggaagcctgtccggctgatattcaatctgttgagactttcgggttagaggtgaaccaaccggaatgcagcgccgccgtgaaagtacgcccgcagcaataccacgccgttcaggttgctctgccgctatgcgacatcattccacgcctgaacagcgtgccggcaggcgaactgttaattaagctttgcgaattttacaaccgaggaaaagcgcagaaaaagttgggagagagtacgccgcaggcctttctcgaagcgctgcggcgtaacgattag

SEQ ID NO: 142013 - DNA, 381 bp, Enterobacter cloacae
atgagtgaccaggaacagttattaaaaagcctcgccccgctgatggcaggcaatcgtctgaataatctggttgatctgctcgccgtagtagcagacctgctggaaatgaccgataacgcgatggtcgaaaaactggctggcgtttttgaagatgtggtcaccgtcggctgggaaggcggaaccgcgctacgcatggcgtggggtgagcaggttaaccgggaaggggatatctcgcttcggcaggtgttcgccgcgctcaacgatcctgatacccgccgcggcatcatgcttctattgcgggtgttacagattacggggcaacgtctgaattccctttcttccgtcagttatgctgattgccccgaaataaggagtcgttaa

SEQ ID NO: 142014 - DNA, 1197 bp, Enterobacter cloacae
atgaaaaaccgcataattattgtcggcggcggcacgggagggacgattgtcgccaacctgctggccagaaaattacggcgtgaaattgctgccggtcaggtggagttgatgctgatctccgaatcgccggtgcattactacaaaccggcgtttatgtatgtcgcgtttaacctcttccaccaccatgaactggcacggcctgaacggcaattactgagtccggaaattcgatttattaccgataagattgaatccttcgattttaaacagcgtcgactgtacggtgccagtaagcaatattacgactgggacctgctggttatcgcaaccggctgcacgcctttcccccaaaaaatccctggccttgccgaagcgggcgatcatttttatcaatacgcggcggcaagacaattagcgcataagctctccaccattaaaaaggggcgaatatttattaccgtctctttcccggaaacgccgaatgttccccatcagtgcggcatcgcccccattgaaaccacgctgatggttgatgactatctgcgccagcgcggcgtacgtaatcaggttgagattgtttacacctatccgaccgtagcgcagttgctgcgaaactgtctgttcctgcagcgtccggttggggaggcgctgggtgatatttttgctgccaaaggaatacagcatcagcgcggctttaccttaagccatgtcgaccctgacggcaaaattgcttattccgccgagggcgattcacagaacttcgacatcctgatggcaacgcctcccatcagggcagtagaagcagtgcgtaatacgggcctcagtgaggttcataacggtgaaggctggctgccgacggatcaccaaacgctgggcgtctacggcctggaaggggtgtatgtgatcggcgataccgtcgatctgccgatcagtaaagcgggagggtcatgccacaaccaggcgcccatcattgctgacaacattgtggcggagctgtatggcagaccgcccggaagcggtaaccactacgacgggcgggttcaggcggttgcgcagatggggctctgggcgggcatgccgctggtgtatgactatcgcaacgatgtcacgcccatgcctgccactaaacttggcggaattctgcgaaacggcttcaaccgcggactgtattggggtgtcgtgagggggatgttctga

SEQ ID NO: 142015 - DNA, 375 bp, Enterobacter cloacae
ttgaacaagttaatactcgcatgctctgtggccgcgctgctggccgcgctgctggccgcgtccgccatgtccgcccaggccagtactcccgccaggctcaagtcgccagcatcgggcgtgctctgcgaccgatatgtatgcgccaatgacaaggggatatcccgcgagttgacagagacatatctcggtcagaaggctgctgcaaacgaggtgttcacgtcgagcaatgtcgatctgaccgaattcacctttgccaacggcattttctgcgatgtgaaggaacgactgtgccgtgaagatcgctattatggcgcgaacggacagcgctccggggctatatctaaaaagtacacaaagctgctctttggcgaataa

SEQ ID NO: 142016 - DNA, 507 bp, Enterobacter cloacae
atggcagtagttcctagacaaaatgcaccaagtaaaaaaatgatctggcagtactggattgacaacggaattcaaagaggtttggatgatacgcgctatgataatgcgtgtgattttaatgtatgtgtatgctgtggccgcgaatcctcaaaattggagagggcgcatattatccctcactcactaggcggaagtaatgatgtctcaaattatattctgctatgcagtaaatgccatagagaaagcccagatattgctaatgaaactgcgcttattgaatggatgaatgagcaacctactgaaatggaaagcttgttaagactaatccagcaggaaatggataaatataataaagaaactcaaatgacaattaatgaaatttttattaaagaaattttcagtgagttgttcaaaaaagcaggaacacatggtggtagatattctgatgcaaccaaggtgtatattattagggaagctttgaaaaaaatatttattcagactgtttga

SEQ ID NO: 142017 - DNA, 1035 bp, Enterobacter cloacae
atgctgttagggtttgttggtcttggcgcagtcgttgaaacagcttacctgcccgcaatacgaaaactttttgataccccccctcactgtttaggctttgatatccagcccgtaaaacagccggagggtataacgcgctgctccaaactgtctgaacttctctcccagccgcttgataccctgtttatcaccaccgcatcgctgcaccatcttgaggtgctggagcaggccatagcctcgcccgtgccgcgcattgtggttgaaaaaccgattgtcgccacgctttctcaaatcgaaaagcttaacgcgctgctggccatgcccggcgtggcgccccgcgtgctggcgatcgaccactggatggcgcgcatcgacacggtgaagcggcagctggttggcaatgtctctgacatcgtcaaaatcgacggctttttgcaggagccgagcggatttaacgccgcaggagaacccatcgcgcttaactttgccactggcgagccggacgcgcgtacgcttcgtcaccctgatggcgtgattctggatatcggtacgcacgtgctggcgatgctgcgcgaaacggtgcgctatctgggcgggagtgatgagatgacgttgcaggtggtcacggctaaagaccgcctgggccacgctatcgcaaaaggcgacctgaccacggcggaaggtgaggcgcatcttcagggacacatcagcggcgtgtcggtggatatctggcttaacaaatacgcgggacccgcgggcgggcaaaaaggcttacggttctggttgcgcgacgggcggaccatcagttacgaccggcacggcgcagaagatgtgcttgagctgataaatagcgacacgcgtcaacgctggaacattcccggcacgatctacgagcactgtcttgcagagcatattctgggcgccaacagcctgtttgaacgggatccgcacgaggtgagccgcacgacgcgccgcaggatcgaggaagtgacactgctgctggcgttacagcaacagctgcgtggcccgcactga

SEQ ID NO: 142018 - DNA, 912 bp, Enterobacter cloacae
atgtccgcaatgagaaatattatggacagcctcaatagttttctggtttttgtgcgtgtcgcggaagcaggtagttttgtcgctgccggacgtgctatgggtatttcagcttcagccgtcggcaagagcgtggcgcggctggaagcgaagttaaacgtgcgtcttttccaccgtacaacgcgcagcataacccttacggcagaaggtgagcgcttactggagcgaagccgacggattctggccgagatagaggcagtgcaagcagagttggtaggttccactaaagaacctcgtggccgtttacgtataagtttaccggtaatgagtactcccttgcttccagtgctcggtgattttatgcggaaataccccaaaattgagctggatttagactttaccgacaggcttgttgatgttgttggtgaagggtttgatgcagttatcagagctggcgaaccggcagactcgcgcctccaggcgaggaaactgggatcttttcattcagtacttgtggcatcttccgagtaccttgcacaaaaaggcactcccctgttaccagccgaccttctcagtcacacctgtctgcattatcgttttccacacagtggcaaactcgaaccatgggaattcaatagtgatgacagcatgtccgaactgacgctgccggtttctatgatctgcaataatatcgaatcgcggataagcttcgcccggcaggggttggggttagcttatttgccagagtttgccatcaaagaacatttatctgatggctcgctaagacctgttttaaccggctacacaaaacgtacaggcgttttttatgttctctggccttccggaaaacacctgacattaaaagtacgcgttctcattgattttcttcggaagagagtattattagaaacatga

SEQ ID NO: 142019 - DNA, 1050 bp, Enterobacter cloacae
atgcgtgaacgcccggtcatgaaagccattgcttatcgaaaaaactccgttctgagtgaagaggattgcctgactgacgtaaccacagaacgccctgtacccggaccctatgatttatgtgtcgccatacacgccgtttcggttaaccctgtagacaccaaaatacgggcaggcctcgttgatgcacccgatagtgttaattacttaggttgggatgcctctggcattgttgattcagtgggagaaaaagttacgttgttcagtcccggtgataaagtgtattacgcgggttctttccatcgcagcggcagcaacgcgcagtttcatcttgttgacgagcgcatcgcaggacatatgcccaaaagcctgaacttcgccgccgccgcagcgctgccattaacctccctgaccgcctggcagctcctttttgagcgactctgcgttctgcaggacaaaaagtcggctacaggcagtttgctaattttaggtgccgggggcggagtgggctcaatgctgatccaacttgcgcgtcgcctgacagatctgaccgtcattggcacagcctccagggctcaaagtcgtgactggtgtctggccctcggtgcgcatcacgtgattaatcaccgcctgtcattaaatgagcaaatcagttcgttacccataccgcctgtcacgtacatagctgcgctatcgaacacagcggagcactggatagagctttcggaattaattgctccgcaaggaaaagtcgcggttatcaccgaccacgattcgctggattctgtgccattcaaagccaaaagtgtctctctgcactgggagatggttttcacccgcccgctttttgaaacgccagacatggttgaacaacatcatattctcgagaagatagccactctggtggatgatggtgtgctgcgctcgacagtgaactgcgtgctccatccactcgacgcgcctcgtctgcgagaggcacatcggcttgttgaaaatggtgggataacaggtaaggtcgtggtagctaactctcccgcgaatacgaagaattaa

SEQ ID NO: 142020 - DNA, 252 bp, Enterobacter cloacae
atggcggtgattccgtttcctgacagggttaagccggcggtaccagaggacaacagccaaacgcttcccggcttacgggatgcgcatcaagactacagccgcacaccgtgcagcaaaaacaacgatgccgttcgccattttgcactaagggtcgccgggaagcttttaagcgatccggagctgaatcaggcgatgccttttctggtggacaaaatcgtcagagtgctgatgactgaatccagagacagctga

SEQ ID NO: 142021 - DNA, 585 bp, Enterobacter cloacae
atgagcgaacgttcgccgaaagcgcgagaaattatggcaaacacccggcaactactgacagccggagggtataaaagcttcagctatgccgatcttgctgagcgtgtcggtatccgcaaagccagtatccatcaccattttcccggcaaggaagatttagtgaaggcggttgtgcaggagtaccgcgcagaagccctggcgggaatggcggccatggatcggcaaatcgacgatcccctggccaaagtgaaaggatatgccgacttctggtctgcgtgtattaaagatggcacttcgccattttgcatctgtgtaatgcttgccgttgagcttcccaccttgcctgctgaaatagccgccgaagtcaccggccatttcagcgatctctctgactggctcgccaccttactgagggccggcgaagcccgcggcattttcctgctaaatgaaacggcggaagccgaagcccggacgctgatggcgggcattcatggcgccatgctggccgcacgcgcgttcaataatccggcggtgtttgatcagattgcctcgccgctgatcaacaaggtggtcaacgtcgcctga

SEQ ID NO: 142022 - DNA, 564 bp, Enterobacter cloacae
atgtccgataatcattaccatgtgcaccagcagcactggctccagcactattattttatccgcaccgccttctccgttttatgggtggttgccgtgttttccgcgggccagtcttcacttgtctggacgtcgatactgctcattctttaccccgcctgggatgcaatggctaattatgtggatgcccttaaaagcggtggattcggccgcagccggatgcagaccgtcaatgttatcgtcagtatcctcaccacactggccgtgatggtgaacatagacagcatgtatgaggtgatccgtatatttggtggctgggcaatcctgtccggtctgctgcagctgggggcggcggtacagcgctggaaacattatggtgcgcagtggagcatgattttaagcggcgcgcagtctgcactggcgggcgccttcttcctcgttcagtcccggctaccggaacccccatcggtaaacactattgcgggctatgcggcgtttggtgccgtctattattgtctgtccgccgcgtcgctaacggttcgaaaacaaaatgagctcacacaatga

SEQ ID NO: 142023 - DNA, 1056 bp, Enterobacter cloacae
atgaaaatcatatcgcagataaacagaaagacgctggtgcgcctcgcactgccaggcctggtccccctgatactgtgtttattatttctgtggactggcggctggcttacgcccgaacggctgacgtcggataagctcgtcaacgtgttggaacagtcgggcggaattcatgaaggctatcgccgaaatcacgcgaagggcatgtgcgtgctgggcacctttgtctcgaacggcaatgccagcacgctgtcgcgagctttactgttcagcaaaggtgaaaccgccgtaacaggccggtttgcgattgccggcggtaacccggaggcgccggattatgccgttcccgtccggagcatggcgctgtcctttcagcaggctaatggtgagcagtggcgtaccggcatgaacgccatgccctttttccccgtcagctctgttgaaggtttctatgagctccagaaggccaccctaccggataccgccaccggaaaaccgaatccggagaaaatgggggcctttgtcatgaagcatccggagataaaaccgttttttgcctgggccaaacaaaccgttccctcttccagctgggccagcgatcgctataacagtctgaatgcgtttcgcctgattgataaggccggcaatgcacacctggtacggtggagtatggtgccgcatgcagcgtttacgcctgttaccgatcccgataaacagaacaaggattttctgcaacaggatcttcagcgtcgtctggcgcagggcccgctgaaatgggatctggtgttcacgctggctcaggcgacggataacggtaacgacgcctcaaaagcctggccagccgaccggaagacgatgacggccggcacgttagtcctgaccaatgctgtccctcagcagcaggggccctgcaatgacatcaattacgacccgttaattttgcccgacggcatcgcggcatctgatgatccgatacttaacgcgcgctcatcggcttatgctaaatcctacaatctgcgcacccatgaacaggcgcaacagtcaggagaacatctatga

SEQ ID NO: 142024 - DNA, 540 bp, Enterobacter cloacae
atgaataaggtcgattattttcatccggtcctgcgcgtcctgcactggctgatggccaccgcgatcttcatcatgttgtttatcggtgtggcgatggtatcaaccgtttcctccctgcacagtctgctggtgtcgatccacaagccactgggggtgatgatcctgctcctggtcgtcgttcgcgtgtgggtacgcttcaccactccggcccccgctttacccgcctcactaccggcctggcagcgcgggatggcccatctttcgcactgggcgctctatctgatgatgctggcacagccgctgacgggctgggccatgctctcagctgccgggtatcccgtcacactgggttacgggatcgtccttccccccatcatgggcatgaataatgactggtatgcgatactgcgaccgcttcacacctgggttgcgctggcgctgttcgcgaccgtgatgcttcatcttgcagccgcgctgctccatgcttttgtgctgcgcgacggcgtgttcagcagtatggcaggcatccgcaaaaaatag

SEQ ID NO: 142025 - DNA, 747 bp, Enterobacter cloacae
atgaaaaaattacacgacaaagttgccatcgtaaccggtggatccagcggtatcggagccgccattgcccgacagctggcggctgacggcgcaaaagtcattgtcaattacacctccggcaacacccgtgccggtaaggttgtcgccgacatagaggccgctggcgggcatgccgtggcgtttgcggcggatgtcactcaccaggcggacgtcagggaactgatcgcctttgccatcgaccactacggacacatggacattgtggtgaacaacgccggtgtctacgagttcgccccgatagaagaaagcaccgaagcgcgctaccgcaggcagtttgacatcaatgtcctgggcccactgctggtggctggcgccgccgcgccgcatctgacgaaaggcagcagcatcattaacatcagttcgttcgtcacccgcgtctttatccccgagagcgccatctacagcggcaccaaaggcgcgatggacgccatcactggcgtgctcgcgcgcgagctcgggccccggggcattcgcgttaacgccgtcaacccgggcctaatcgaaacggaagggagtcacagtgcgggcgcgatgaactcggacttccagacatggaatgaaaagaagacgccactcggccgcatcgggcaggtgcaggatattgcgccgatcgttgcctttctcgcctccgaggacgcggggtggatcaccggcgaggtgattgtggccgctggcggcatgcgctga

SEQ ID NO: 142026 - DNA, 1458 bp, Enterobacter cloacae
atgtcgacacaacaccacacgcgcgccgagccccgtcgctgggcgatgtttatcatcctgttggtgggcgcgtttttgcccccgctcgatttttttatcgttaatgtggcgctgcctgccattcagggcgagctgggtgcctcgtcctccgcgcaacagcttgtcatttcatcctatgcttccgtctacgcggtcacgttaatcaccggcggtcgactgggtgatatttacggccgggggaagatgttctttcttggacttatcggttttgctgcagcatcgctgttgtgcggcgtggcctggtcaccgtgggtgctgattgccgggcgcgtgttacagggtgccaccgcagccattatggcaccccaggcactggcctccgtacaggcgatttttccggaagcggaaaaaccgctggcgctgagcctctatggcgccgtctttggtctggcctccgttatcgggcagatactgggtggtattctgatttctgcggatctgtttcatttgggctggcgtgcgatttttatcgttaacctgccagtggcgctgctggtcattctcttcggtctgccgctgctgaaagagacgcgggcgcagtcggcacagcgactggatcccggcggcatgctgctggccactgtcacccttagcgcgctgattgtgccattaattgaaggccgtgaagcgggatggccctggtggacatggggatcatttcttgcgttcccgctgctggtgctggggctatggcgttatgaacgtcgcctcagccagaacggtggttcgccgctgctcgatccgaccgtcttacgcgcgccgggactgtgtcagggtctggcgatcgtactgctgttttattccatcggtaccttttttctgttgttttctgtttatcttcaggatgcgttgcatttaaacgccctgaccgcaggcctgatttttctgccctttggcatcggcttcctggttgggccgttgctgaccccctacttcaggcggtttgccggaaattacctgagcgcaatcggaatgggatgtgagacggcgggtctggcgggccttgccgggctgattgccagcacgctgacgggcactcctccggccacgctgccgctcgccgcactcctttttatcaccggtctgggtcaggggctggcgatgccaacgctggtgaggatggtgaccggcagcgtagcgcccgctttttcaggcatgattgccggcgtgatcagctcgacgctgcaaatcagcactgcgctgagcgtcgccgtcatcggaggcattttttacagcatgctggggggcgataaaagcggcgcaacgatcacgcatgcctttattgtctctctgctgacaatggcggtatgcctcgcggctggtgccggactgagtatccggcttatccggcgcgcctccggaataatttctgctgcggcccgcctttccatcaagtaa

SEQ ID NO: 142027 - DNA, 384 bp, Enterobacter cloacae
atgaaaaaatcgatcgttccagaagcctttcagcattattacgatgactggcacttctctcctgtcatcgatgccgatggcaccgtctatctttcgggcgttacggcagcccggaaggacaaacccatcagcaaggatcctgaagaacagtttcacgatgcgttttataagctgggtgtgtacctgaatgctgcaggcttaggctatgacaatattcttgagatgaccacgtttcatattgaccttaaaacacatattgacgttttttctcaggtcaaagatatgtatatcaaggcgccctacccggcatggtctgccataggcgtatcggcatttatcccggaaaatgcccttgtggagatgcgggttgtggccaaaaggtag

SEQ ID NO: 142028 - DNA, 135 bp, Enterobacter cloacae
atgaaaaatatgcatcacaaacctgaaaagaaatccgctgaaaagggcgagggctttattcctcaaacccttgcgtggcgcgaaggaaaacgtttgcgtaaaatcgtttgtcaagacctgttatcacagaactaa

SEQ ID NO: 142029 - DNA, 603 bp, Enterobacter cloacae
atgcgagtaatcatgtttgacaggcagtcaatatttattcatggagcgatacacagtctgcagaagctcattccggaaataaatatgacagggacctgtcagacagaagatttatgggctcaggtatccgcttcgccggctgctatcgtcctgattgacgggaatgtcattcagaacgaggagacagcgtggttggaagcgctcatgcatcgctttccggcgatccgcgtggtgatggtgttagcgaaaaaagaggccagatgggtggagcaattgcggcagcgaaacgtcatggccattattccccgaaacgccagccccgagcgcttttccgccgtgctggactcggtgtcccgagggatggtctgttttccgggagagtgggtcaaacagccgtcgtcgccgcaggcgctatcagcgttaagcgagcgccagcgggaggtgctgaaactgctggcggcgggggagtcaaacaaagagattggacgcaatctcaacatcagtgccgccacggtaaaagcgcacctcgaggcgcttttccggcggctggacgtgaaaaacagaacgcaggctgccatgttctatacccgggcgatggcctga

SEQ ID NO: 142030 - DNA, 339 bp, Enterobacter cloacae
atgaaaggtcatacgctgaaaatatcttctgccgccattgcgttaattaaaaaacatcagggtctttcgctggagaaataccgtgacgaaaacggattgtgggttatcggctatggacatgagattcgcgagagggaaaaattccgcggccttattactcccctgcaggcggaatatttactccaggaagatattcagctgtgtgagacgctgctgcgggaaatgtgtacacgcccattaacccaacagcagcatgacgcgctggtaatgatgatattcagttctggagaggtaccttcactccagaaagcgaactttcaggccatcgcccgggtatag

SEQ ID NO: 142031 - DNA, 576 bp, Enterobacter cloacae
ttgtccctcacaggtaaggataaattcactcacagactctcttttgatatgacgttcagatcgcttatttcaatcctcacgttaagttttgcttcgttctctgcattaagttttcaactgcctgcgtcgatgttatcgatgaacagcgagctggcggtatccccggcgaagactgcgctggtgcaccaggaaatggggccgctacgctcccgaattcttgaccaataccagaaatggaagggaacccagtaccagtggggcggaaccacgcaacgtggggtggactgttccgccctcatgcagcatctgttcagcgatgctgcgcaccttgatttaccgcgcacgacgagcgagcaaatccatcgcggtgtgcaggtggcacaataccgcctgaggcccggagacctggtcttcttccagaccggtccgcaccgcaagcacgtcggcgtttatattggtgatagccagtttattcaagcctcaagcagccagggcgtaacggtttcaaccctgactgacagctactggcaggaacacttcatcaccgcccgccgcatagcaggcgctgcagcctga

SEQ ID NO: 142032 - DNA, 474 bp, Enterobacter cloacae
atgagctatttatcccccagcgactaccttcctcacgacgcgcccatgatgctgctggagcgcgttgagaatattaccgacagcggcgcggcgtgcagcgtcacggtcgacgggcacggtgtgcttgcccctttcctgaacgctgacggcgatctgcctggctggtttgcgctggaactgatggcccagaccgtgggcgtctggtcggaatggcaacggctgcagaaaggcctgccccacagcgcacttggcatggtgctgggcgcgcgcgagctggtctgcggtgcaggacgctttgccgccggtaccgcgttgaccatttccatcgaacgcctgatgcaggatgaacgttttggcagctttgaatgcatcattcaggcagataacgtccctcttgccacgggccgcgtgaataccttccagcccagcgaggaagaattaacctcacttttcactcagggagctccatcatga

SEQ ID NO: 142033 - DNA, 1350 bp, Enterobacter cloacae
atgcgtaaacctcttcctcttagccagtggctaaatgccccgcgtccagaagacgcgccgatcgcctggctcgacgaacgagtctggacgctcggcgacctgcgccacgatgtgactcagctggtcgagatgctgcgtcaggaggagggcgaacgctgggcgctctgctttgaaaacggctacctttttatcgtcgccctgctggcgacgctgcatgcgggtaaaacgcccgtgctccccggccacagccgggctgcgcagcttaacgaacagcgggccatgttcagcggcgttctgagcgacgccacgctcgacttttcggggcgccagcggctggtggtttccacgccgcggacagacaacgccttttctcccctgcccgccattgacgatacgcgcgctatcgagcttttcacctctggctccaccggctcgccgcagcgggtcattaagccgattatcagtctggatcgtgaagcctgtttactcgccgagcggtttggcgagcggctggcgggctgtagcgtcgtggcttccgtggtgctgcatcacctgtatggcctgacgtttcgcgtcgtcttacccatggcgctcggcctgccggtgcatgcccgcctgcttaactatgccgagcagctctcggccctgccccacgataaacgctatcttttcatcagcagcccggcgttcctcaggcggctggatacggcactggcggcgccccctgttgccctgctcttctccgcggggggcgtactgccctggcgggatatcaccgcgtttcagggctggctcaacgtctggccggttgaaatctacggcagcaccgaaacgggagtgatgggctggcgtcaccgtcaggaagagacgacgctctggcagccgttccccggcgtgacgttccacggcgatcgcgtgacgtcgccgctgatccacgagccgaagggggaggagctaaatgatattctccatttcacggcggacgggcagttcaccctcgtcgggcgccgagatcggatagtcaaaattgaggataaacgcgtttcgctcgatgagatcgagcagcggttgctggcgctggacggcatctgcgacgccgtcgcgctggcggtcacgcgtgggggacgccagagtattggcgtgctgctggtgctcagcgacgcggcgcgtttgcacagagataacgtgggtaaaaatgcgcaggaatccgcctggcgtcgcgcgcttcgcccctgccttgaaccggttgccgtgccccgctactggcggattgtcgatgaaatcccggtcaacagcatgaacaagcgtgtttatgctcagctacaggagctgtttcatgaaaccccatga

SEQ ID NO: 142034 - DNA, 606 bp, Enterobacter cloacae
ttgtggaacagctccagcgcgaagcctgacgtgccttcccttccgctcatcccgatactgacgggtctgatgctgctggcatggccgtttttgattggctatggccttgcaagccaccgtttgcagtggatattgcccgtcatggcgctggcgctactgctgcgtttatatcaggcgcgccggcatcgcggtcctctgcgctacgtgctcctgagcgtaaccctggccggggtggtgctgtgcatggcgagcgcgcttctgcacgctcaccagtgggtactgttttatccggtggtcgtcaatctggtgatgctgttggtgtttggggggtcgctatggacaaccatgccgatggtagaacggctggcgcggatacgtgaaccccatctgtcgccggcaggggttcgctacacccgcaaggtcactcaagtctggtgcggcttttttatcggcaacggggcaatcgcgctgtttaccgtgctgtacgccgacatgcgcctgtggacgctgtggaacggggtaattgcctacatcctgatgggaacgctgatggcctccgagtggctggtgcgccagcgggtaatgaaaagagagaacgatgcgtaa

SEQ ID NO: 142035 - DNA, 489 bp, Enterobacter cloacae
atgagcatcacgaaccttctgccgtggcggcagcagcggcgcgcgcgatacctgcgtttctggggcgcgatgtttttcggcacagcgctggtgatgcttatggtcattttttgtctgcggatgacccatctcatgcgcctgcatgccctgcaaacggatctggcgggaacacaatccgtgcagcacgtgctggcctctcgccagaggctcgctacacaaacgcagatgcctgcgcgtcagcaacgccagtggcaaccggtgctggaaacactttccagcgccattcctgcacaggtctggctgacggaactgcgctatcagccgcctgcgctgatgctgaccgggtatgccgcaaccctgccagccctgtccgccctgcatgatgcgcttgggaaaatcgccggttttacgcccgggacggcgggcgagcttcggcaggataatcaggggcgctggatgtttacctttcatcttaaaagcgagggataa

SEQ ID NO: 142036 - DNA, 456 bp, Enterobacter cloacae
gtgaataccctgttggaacgctggtgcgagagtcgttcctggattcgggtgctctgctggtacctggggagtctcctggcagcattggccgcgtggggcatcttgctcagaccgttagaccagcagtgtgctgaacgacaacgccagcttatccaggacgtaagggcaaacgcggcgttatggcctgcggtcagaaaggcgccgtttcacccggaaatgacggaagtacgggagctgacgccgttttcaccgctcgattttcaggacaatggcacgacgctggttcactggaagccgctgccgaacggaggagaactggcgctggaggttgagtggccggcgatcccggggcttttttcccggctggcgcagcgggacgtgcaggtcgcagctttcgctatttcgtcagaaggtaaggcgctacgcctgcggctggagctgaatcatgcgaaatag

SEQ ID NO: 142037 - DNA, 648 bp, Enterobacter cloacae
atgaatgacgctgaaaaacgcgacgacatgctggcagcagaatatgccctcggcactctgcggggaggggcgcggcttcagtttcagaaaaggcttgccgctgaacccgccctggccgcccgcgctgcttactggcagaacatgttcagcgcgctcgatagccatcttgcgccagtccctccgccagaaacggtgtggaagagaatcgtcctcgatctgccctctacaacgcctttgcgtaaaagccgtccttatatcggctggatggccgcggcttccctcgccgccgttaccgtcattgcctggtattccacccgcacgccggaactcgctccgctgatggtgctcaacgatgcccggcagcatggggagtgggtagtcagtgcggacgccagacgcgagcatctgagcattaccccgctcagaccgaacgccgttgcggcacaacatagcctgcagctttggctgatccctgacggtcaggcgccgatatcgctggggctgctgcacatcgccataccgacacgcgttactctcaggaacacagcactgactcctgacgccacgatagcgataagccttgaaccagagggaggctcacccaccggccttcccacggggcccgtgctgtacagtggaaaaatataa

SEQ ID NO: 142038 - DNA, 648 bp, Enterobacter cloacae
atgcataccacccaccgcacgttcattctcgccggccacaccgtccatcacgtcaccttctatcccacgaccttcaccgacgccgatctcttctggctcccccaccacgccgagcttgcaaacgccggacgcaaacgcaaagccgaacatcttgccggacgcatcgccgccgcccatgccttacctgaccacgccgttcccggcatcggccccagcggcgaaccgctctggccggatggggtatcaggaagcattacccacagcggcacgcaggcgatggcggttgtcgtccgtcatccgacagcgctggtaggtattgattgcgaagccattcttgcggagcttgacgcccgtgaaatccaggacggcattattaatgcgcaggaggcgatgtgcctgacgcgttcgggctaccctttcgcgctggcgctgacgctggcgtttagcgccaaagagagtttgttcaaggcgctctttccgcaggtgaagacgtatatgggttttgactgtgcgagagtcacggcgttagatgagaaaacaatttcactgaagctttcttacccggctggagaatatcctgaggatacacgctttaccctcgcctggcagactcatgatgagagcgtgtggacgttgctaaaagcctga

SEQ ID NO: 142039 - DNA, 564 bp, Enterobacter cloacae
atgagtttagggcgcgaaagttggcaaatcataagccttggtaaaatagcctccaagccgcaatatgggtatacaacaaagagtaatcgagatggcagggttcgctatttaagaacaacagatcttacgtcgggaaaaataaactggaactcagtaccgttttgtgtagatgaaccagctgatatatccaaatataagttggagaacaatgatatagtaatttctcgtgctggctctgttggttttcatgcgctgattaataatccgccagaggatgctgtttttgcatcatacctgattcgttttaagcctaacgaaaacattgtgcctaagtatttgtcatacttcttcagatctcaggagtactgggagcaaattactgaaaaatctgctggggttgcagtccaaaacgtcaatgcaaaaaaactttcagagttaatagtccctttagcgcccaaattagaacaagaaagaattgttgaaaaacttgactccatttttgaaaaattggagatggctcagtcgcgtttagcaaatttcggcatattaacgcgaagatcataa

SEQ ID NO: 142040 - DNA, 1182 bp, Enterobacter cloacae
atgagcacacaagatttaatcaacaaactttggggcctgtgtcacctgttacgtgatgatggcgtcacttaccatgaataccttaacgagctgacataccttgtttttttgaagatggtagaggaaacagggcaagaacaactaatacctgaaggatatcgttggtcagatattgaaaacttcaatgcagcgacacgtctcgaagaatacaagaagctactggttcatttgggttctaatggctctctaatcacaaaagcaatctttaataacgcgtcaacttgtattcgtaaaccagcgactttaaccaggctagtaactgaaattgacaagctcgattggtactcagctaagcaagaggggctgggggacatgtacgaaggcttgcttgaaatcaacgcaagcgagaaaaaatctggtgctggtcaatatttcacccctcgtgtattgattgaggtaatggttgagttaatgaagccaacaccaaaagacaaacgacataaacaagaaggtgatgtaatcgttgaccctacagcgggtactggtggttttttaattgcagcgcatcaatacatggaacagaacttcgacgtgaaggggcttgatgagtttgattatgacagctaccagcatgaaacattttttggaatggagttggttccagacactcggcgattggcaatgatgaacttgatgctacatgacatcgcagttgatgatgaaaactcaggtgtcttgtatggcgatactttatcaaatgaaggtaaggcgctaccgaaagcatcgctaattttagcgaacccgccatttggtaccaaacaaggtggtggagtaccaactcgcgacgatcttttgcattacacgagtaacaaacaactggcatttttgcacgccatgtatcacgtcatgcttaaacctggtggtagagccgcagttgtattgccggataacgtgctgtttgaaggttcgacagggcgtaaaatccgcaatgacttgatggaaaagtgcaacctgcacacgatcttgcgtctgcctactggcatcttctacgcagctggcgtaaagactaatgtgctgttctttgaaaaaccgaaaggcattaatcaagacaaaggcaataccaagaaagtttgggtttatgatcttcgcgttaatatgccgaaatttgctaaacgcgactga

SEQ ID NO: 142041 - DNA, 3309 bp, Enterobacter cloacae
  misc_feature (3212)..(3221): n is a, c, g, or t
atggttggttatagcaattttgaatttcttaaaactcacgatacatggctttttaaacttgcagaaagtgcagagcgtaattttatcccgtatccaaatacaacactcgtcaatattcgtcagcttggcgaagcaatcgcacagacaattgcttcacgagttggtattgaatcaggagatagcattaagcaattagatctgcttaaagagctagacggtgttctttgcttggacaacaacgtgcgagatgcttttcacaccatccgtaagttaggcaatagtgcaacgcatgtgtttaacagtagtactcatagagatgctttaaaagctttaatggtcgggcatgctttgtctatttggttccatattgcttttggtggagacgcttcaaaaggttttaaggcacagaggtttgtaaagcctgaagacccatctgactatgtacgccaacttgaagagcaagtagaaaggttaagaatagattttcagcgctcacaagatcgcattaaggttgcagaggaactaagaaacgctgaagctgataaagctcgtgctgaaaaaatgcgcgcagaaaagatggctgaagaaaaagccatttgggaagagctcgcagaagagcaagaaaaaactttatcgactcaccgtctcaagatggataaagcaaacattctttacctccatgctttccgttccaaatcccgagaagaacaagcctcagaaattcagcgtattgagaaatctctatttgaaatggatgaagctgagactcgagttatcatcgaccagcagctggttgatgcggggtgggaagcggatacggagaatcttcgatactcaaaaggtatcagacccgaaccaaataagaaccgagctattgctgaatggccgacgacatcaggtcccgcagactatgctcttttcattgggataacgctggttgcaacaattgaagctaaaaaatcagcacgtaatgtctatagcgcaatagatcaagcaaaacgttatgcccgtggaattcagaatttgcctaacgttgttgaggtttcacaatatggtggtttcattgcccccttagtttttgccactaatggtcgggcgtatttaaagcagctagagcaagaaagtggcatttggtttttggatatccgaaatgatactaatcgtagaagggcgctgaaaggatggtatacacctactgagttaaaaaattacctgcggcaaacacctcaacaagccaatatagagttggaaagcatgggttttgattacgagcttaaactacgtgattatcaaaaagaagcaattctatctgttgaacaagcgattaaggatggtaaggataaagctctggtggctatggctacagggacaggcaagacaaaaacctgtattgctttactatatcgactccttaaagctcaacgttttcgcagaatcctatttcttgtagatcgcagcgccttgggtattcaagcctcagttgattttggtgaagtgcgaatggaaaatttaaatacattcgctgatacctttgaagtcatgggaattgagccaaataaagcacaaaaagttattccggatgaagatataaaagtacatgttgcaacggttcaaggcttggttaagcgtattatgtatccgtcagaaaatggaaccaaaccaggagtcggtcagtatgactgcatagttgtggatgagtgtcatcggggctatttgcttgaccgagagctcagcgataccgaaataaaattccgtgaccaaaaagactacatgtcaaaatatcgggctgtcattgattattttgatgcatttaaagtaggtctcactgcaacgcctgcaatccataccgttcagatctttggcgagcccgtatactcttacagctatactgaagcagttattgatggatacttggttgatcacttacccccggttcgtgttcataccaaattaaatacagaagggattaagtatcaggtgaatgaagaggttcaagtgtatgaccctcaaacacaacagcttgatataattcatacaccagacgaactggattttgatgtgtctgattttaatagaaaagtcattgcacctgaattcactaaagtcatttgtaagtggttaatagaaagtgactcacttaatccatactcgcaagagaaatcattaattttctgtgtcacagatcgacatgctgatgaagtggtggaggcattaaaagaagcctgtgaagaatatcatggggaagttgaagatgatgctattcagaaaattacaggagcagctgataagcctttagaaaaaatacgcttcttcaaaaacgatcgtctgccaaatatcgcagtgacggtcgatcttctcactactgggattgatgtgccgagtatctgcaaccttgtatttttgcgcagagtaaacagtcgtattttgtttgaacaaatgcttggccgagccacccgacgttgtgatgatatagggaaagagcggttccatatttacgatgcggtggatatctacaagcagcttgagaaagtgaatacaatgagacctgttgtgaacaaggtagatattacgttttctgagttagaatatgagataactaatagttcgagtatcaaactgcaagaactggcaaaatatcagttcattgccaagttgcaaagtaaagaaaattacttgacatcagttcagttggatgagtttgggaatattgtcggaaagcaacctcaagaatttgccaaggaactcaaagccatgaacacagaagatgcggctaaatggtttgtcagtcatcctggattaggtgaattgctggatatcaaagtacaaggtggaggcggtcgaaacaagattgtgatttcagataagattgatggagtaaccggcacatccacaggttatggcagtaatcaaaaaccggaagactatctaatctctttttcagcatttgtgaacgccaacagcaatagaatggttgcattacaaacggttattcaaagaccttgggaactaactcgagtcagccttaagcagcttgttgtagagctggagaaaaacgagttcagagaagaagagctaaaagttgcttggaaagaagttaaaaacgaggatattgctgctcgtattattggctttattcgacaagctgccattggggaggctctgattccgtatgagcaacgtgttgataacgcattaaagaaaatactttcaannnnnnnnnntactttcaagccgcgcttggaaaacgccacaaagagaatggttggagactattgcagcgcagatgaaagccaacatcgtcgtggatga

SEQ ID NO: 142042 - DNA, 375 bp, Enterobacter cloacae
ttgctccctctccccgtgagagagggccggggtgagggcatcaggccgcattgtcgcctgattcgcccggcggcgctgcgcttgcacgggcctacgggttgggtgttctccctctccctgtgggagagggctggggttgagggcatcaggccgcatcgccgcctgattcgcccggcggcgcttcgcttgcacgggcctacgggctgggtgttctccctctccctgtgggagagggccggggttgagggcatcaggccgcatcgccgcctgattcgcccgacggcgcttcgcttgcacgggcctacgggttgggttttctccctctccctgtgggagagggccggggtgagggcatcaggccgcatcgccgcctga

SEQ ID NO: 142043 - DNA, 834 bp, Enterobacter cloacae
atgagcagaggaagaaggcttaagtcctatcaggattatgagcaggctcttagtaaaggcgtggggtccgggcatatgcaggactatcagccctggctaagagttcaggatgtaaaatctcatggcaatcgttcggttgtatttggtctaaaaaccatgcgcgcgcatcacttcatgtcgatcattgaaagtgatttcttctatcaggccgaattcaatgattcagttattgatattcgtgaacagttccctttacttcccctgaatctcacagaaaaaattgccagtcacattgctgtaaaacatcctattgtcattggcgtgagtggccccccggttctatatgttatgaccaccgatttccttctgaccatcaaagagcctgacggcggaataaaatataaggcgtttgcagtgaaacccgatggtgtacctactgtccgggttgctgaaaagttagaaattgagcgccttttctgggcgctacatggcattgaatttaaagtgtatattggctctgaactcaatcgtatcataagtaaaaacatatcctgggcaacatccgcactacgaatggatgcctcatgtcatgatcatttaccctatcaggaagttgcctccgcgttagtgccgggagaccacattattgaagcgctctgttcttcgcaggccaggaagtttaatgtcgagtacagcgatatcctgactgtaatccagttgcttattgccagaaaatttatccaggttgatttaaccactcctatacttgaagtgggagtgctgcgtgttctgagcaacacctgtgacaagaaggtatctgagctatggaaataa

SEQ ID NO: 142044 - DNA, 2133 bp, Enterobacter cloacae
atggaaataaccctaaatagtgtctggaaaacaaatgatacagatgggctgaaatccggattgtaccgcatactcggcatgtatattgatacagataccctcatccttttcgagcttcaggaaaactgcacaaacaagccattctttttctctctcaggcgtttcatacttcttgttaaaacccgtgtagtcgttagcgccacgtatgcacttccgcaatacatgctggttgatgaggacagcctcgatcagaaaagcaaaaataaacgagatgaaaattacaatttaattctaccccttatccaggatggcaattttctctatgattttacttcgtctctgcgttcatcacttttaacacaccatgcttcagatgctggtgttaacccccagcatctaagactacttctgacgcgatactggcggtacggccaaaatagttatgcattaatacccgcctattcccgtagcggcgcccccggcaaagaacgcaatccagacacaatcccactgggaaataaaaagaaaaatcgggttttaccgatgcaacgcgccagtacttatatacttaaaaacgaagacaaaaaaaacattatcaggacgttaaaaaaatattacctgaaagtcggaggtttttctttcgcccgtacttatgaagaatatctgaaagactttttccgtgatgagattgagcatgcccgcacagcgggcaaggctccctgcatcccctcgctcaggcaattcagatactggggaaaaaaacgcattcctcaggataaaaggatacgagcaagagcaacggaatcatcttttatgcttaaccagcgagctcgccttggctccgctgctaacacaagaacacttcctggcgatgtttttgagattgatgccactgttgcggatgttcacttggtctccagcctgaacaaaaccagcgtaattggccgaccaacgatatataccattgtcgaccgggcgaccagaatggtcaccggtgttcatgtttctctataccatgcatcctggcgagcagcccgacaggcattagccaactgttttatgcccaagaaagagttttgcagattatttggtattaacatctccgtaagggactggccctgctctcacgtaccggtaaaactggtttgtgacaacggcgaaatgatcggccttaaaccccaggatatcgtaacaccaataacaacgctggaatttgctcccagctacagggctgacaaaaaaagtatcgttgagaggcgatttggtattttgaaccaagaggcaattcatcagcttctaggctcaacaagaggcggacttattgtgaaaggtgagccagtaccaacatcaagagcctgcctgacgttacaggaggttacaaaaacgattattctcgccattctggagcacaatcaggccatctttaaagaactcgcctatattaatccacttctgatagaacatgacctcactatgtcccccctgaatagctggctgataagtctcaaaaaaagcagattcagcgcgcgcaccattctggaggatgaagtcatttcgaggcttctgcctccggaacgtgtaagcattactcccggtgggctgcagtataacaatctctattatgaatgcgaagaaggacttgcctcggcagcacgtgttttcgggcaatcgagttgcgaagcccgtatcgacgacaactgtgtggacttcatctatgtccgccttgatagaaacaaaccgtttacccgccattctttactcgaaaaacgttatattttcaaggggatgccacatattgaggctgatgccctggccgactgggttgatctgcatagtgaaaagtcaccggtcaccacaacatcctatattgtgaaaaagttctctgaagcattacaagagacaggcctgcaaagactgaatcacctgaaaccacacaatagctccagaataaagaacataacggaaaataaaagagaagaattgagtaaaaacgcggttttgtcgggagatctggatgatggcacactgcagctgccacaagaaaaaataatcctgcttccgggtcctaaagaaaaggaaaaatggctggctacaaaaaataaccaaaatgacgcgaagggtgaagaaaaatga

SEQ ID NO: 142045 - DNA, 1443 bp, Enterobacter cloacae
atgagaaatgtcatcgcacggtataatgaagccatactcccggagcatcggggaaacccgttaatcgaagcattaccgcccttgctggacgataccgaaattttaatggctctgagtaattttcctccactagatgaaaatatccggtggaccgaatcagcggccatcagaagacaatacgttgaccgtattaagcatttccgttgcccacagacaaactacattgaatgctatagatatatcaccagaatcatcagagacggatacgccccacgaaatccgttaaaaagcagcactcagcagtaccttcactattacggggatgaacgcccggatattgaacccgtggatggctattttcacccctgtgccgataccttaaccattgtgggtatcagtggttctggaaaaacaaccatgctcgaacaggttcttggtcactttcctcaggtcattcaacacacccagtataagggcgtttatcccggggtttctgaccaggtcatctgggtgaaggtaaactgcccttacaatgccagcgtacgtgaactctgcgaatccattcttatcatgcttgataatatactgggactggagccaacaaaaccagcaagcagaaatggtggtctggcaaggcagatcgcacaaagaattaaagccgcatttcttggcgtactggtgattgatgaaatgcaaagacttaaattttcccgaacaggcggagaatcaaccttgattgattttctgcatgagattgttgattcactgggcgtttcacttgtgttttgcggtaatcatccctttgaagagacactttcaaaaaaactgaggatagcaaggagagctgaatctggtggttttatgaacatttccctaccggatttcaacacaacagactggcaatcctttatcaattatctttggccgcttcagtggacgaacgttgaaactccgctaacaccggagctaaatgagacactttttttgctctcgaaaggcaatatggccatcgcacaaatgatttacagaagagcacaaatgatggtgataggaagcgggaatgaggtcattaacaaagccgtactacgttcagcggtacccaggttatcggccagttcagacgaatttattggcactcaaatcaactttgcacttcccccatccaggtcagtctcagtacgtgcacgcaatgatgaacgttccacaactgtaaacggcaacaggaacaagcagaagacttcttcaatggttgttttcggggatctgagtcgacctcagcacagtgaactggcggatatgagtatgaaggtactaaacgcatttgaggataacatgtcccggattgaaaacagctctgtgttccgaacgcttgcaaatgaaaacaaaagctttgcacatctgtctgcctacggcttactgtgcacagagcctgtatttgaataa

SEQ ID NO: 142046 - DNA, 792 bp, Enterobacter cloacae
atgaccacaaaccagtttttttctgtgttcttcaaaaataaaacgcattcagttcatccttacctcaacacattactgaacatattatctgaaaaaacgattgaatcaggacaggaactctgggcgcgacagacgcttctcccgctctacgcgtgggcaatgccagcctacagaaagcaacttgaagacctgacactttcagccatgaatttacacactctttgtaaattatcaacctatgcagaagatcatcctgcccctttaaaacactgccctgtttgtacatatcatgatgtaaagcactttggggttgcgtactggcaccgacagcatcagatcgccggagtgactgcctgcaatcatcataaagtcaggctgaattcaatagtatttccaagattatcagtgatcaactcccatggattactccatcagagacaaaagatcgctctcagcaaagaggatgatttcaaattcgctgcattttcttcacaaattctcgaactcatatgtagtttttcacctgaatttatcagcaaccatcattcgttacttgttaagcgatttacaaagtctttattattgaaaggtctaaccagtgaaccagacacagccgtactcgataaactatacggtatagcagaaagacttgatcactccagtaaaaacttattcccctcactaaaaaataatatcacctactggaaaacattattctatggttcttcaccacaatcacccaccaaatacttactgttactctattgtttaaatcagcttgatcacgattaa

SEQ ID NO: 142047 - DNA, 1017 bp, Enterobacter cloacae
atgtcaggaaaaatagcttaccattcggatgaaacacttcacagtttcatcttcagagtatgtttggtaaacggaatggagcaattttcagatgtaatcggtcataatgcgcgctggagaaaaactatccatcttaataagaacatagccaatttctttaaatgttataatgaccatgactttctttttttgatcagaaactcatggcaagccagtaagaatacgcatatgttttccgatccgacaaaatatttgacagatttaaaaaatctatatgcaaagggccctcgtaagggaggtatagataaagctcctcatattaaatactgtatggattgcataatagactccattaaagaaaacggatatggttattttaaatcgtcatggcatcatgaatactctgaaaaatgcgtaacgcataataaagctttaactatttcatcaatgacactttctgaaaaaccttttgaaattttaaaaacaatactcggagggaagtaccctggcgggtgttatagtatacttagtgttattggtcccataaaggaaaacattccacccatgtatatttcgaagaacatgtataacacgctgccatatgacaatggtcaatatatatacatcgcagaatgtttgaagagagaaattcgaaagtttattctttcattctctggggaatttccaaaaatttcagtaaggaaagaccgccccccacaaaaatccatacaacagtatcgccgaagctatctttcgacagatcctatccttacaagaataatcatttgtttttttgaagaaagcttcggcccttttatgtctttctggaaaggaaatgctgtcaagacatctataccttgcggtatcattgacatcaacgagattgttgaacatatatatatttttaggaacatggattcatgcaggaaatgtaactctgaaacatgcccaataaaaaaacgctctcttttccctcaaaatagagaccattattctgacacaaagtcaagaaaatag

SEQ ID NO: 142048 - DNA, 1461 bp, Enterobacter cloacae
atgcctgttgaatatatccattttaaaaatttacgaaaactggcgttcaccgataaaagaaacgaagatagtcttgagcacaattgcatagagcctggtatgattaatatattctgcgggcccaatggcagcgggaaatcaacgatactggacattattagagtactcagcgatcctgaactgttgaaaacgctgtctcgagaaaacatgcgttccagtagttctggatccttcttaattgaattagacggtggcaaaagccttacagcactgttccgttcacgcatgtttggtaagacttatgcatgcatcagggccacattgaaagatgcatcgatgtgctttggtagcattatcgattccaccacgcctgatactatcccctctgaatacatactcacggttagtagccttgggcaatgcgttgccaggcgtagcacgtacggtattgatgacctgcctttgaccagagtcgtaaaatacttaaacttaaatgctcaatatttatccggaacagccgcatcgcctttaaaaaaaggagcttatagctataacaaccttcaaatgaagcaagttgattatgtcacaagacagtgcttctctctttctaaatatgatcccaatgccctgagggtatggtttaatgatgatacagcccagaccaatcaggtaaaaattgatgacctcccggcaggatggaaagcgcttgctggtttacttgcatggctatcattacaaaagaagcagacaatttgcattattgaagagccagaagtacatctacatccaaaactccagcgtgtacttgcaattcaaatgcaggaaatcgcgaacagaaaatctctccagctctttattagtacgcattcaaccgtatttctcgatttcgaaatctggaaagaaaatacagccaatctctatataaccgacgggagaggtataaaggagtttagtcgctctgcagagctactcgccatgatgggaatacgtcctggggatgtttttcatgcaaacggtgtcatttggatcgaagggcccagcgatcgaatttatattaagcactggctcaagctttattgtgctgaaaacaaactgtctgttcctattgagaacatcaattatatgtttgttttatatggtggggcattaatgaagcatctttcagcagaccgaaccgatatgatccaaacggtggctgtaaacaggaattcaatttttgttgctgataatgataatgatgcaaataaatcactatccccgctattgttaaatagtaagagttataaagaagaaatccgcaggaagatcccgacatggattactcaaggttataccattgaaagttatcttccggataacttcagaaatcgtttcttcgttgatgaaaataatgaattaaaaaaaatagtaaaacaaaagtcactatcgcgagcatatttgaaagtgaaatcaagacgttaa

SEQ ID NO: 142049 - DNA, 1032 bp, Enterobacter cloacae
atgaatcacctgaactcgcataattcataccggtactaccagccgtggtcgggacgctggctctccgcagacccggcggggacggtggacgggctgaacctgttcaggatgtgccgcaataatccagagacattcagggatgtagccggtatgtatcctgagagcgcccattatatttggctgggtaatgctgagcttccggctaatgcaataagtaatatgatacattttatatcaaacaatccaggttataaggtaaatctctggagcgattttcctgacagactgaagaacaatattatggagaggggttacagcaacgcaatatttaataagataagcattaaggcaccgccaaaacttccttacttattgagttcagctatagctcgtgagtcaggaaatacaccttatgctaattatgctgctgcttctgatctcctgaggttggggatcctaaaaaaaacagggggtgggatttatatggatgtagatgtgatggtaaacaacagtctgggagaaataacacctcaaagagcaagcagtactggaccatcggatgttctcatccataatgaattatgggaaggccgccctagggtttcgaatgcagtaatcatagccagagataattcaaacagtctcgacagaatgatatcatatgccactgcgccttatagtgggaaattatatgatatgggagttggccgggcggcaggaaaagactggcttagtaaaaaactccagtcatccccttataactctgtttctgttgatgatattatgtgggtgctgaaaagatttatccctgtggttcgccgcgaaataactatgcttgtctccggtcctgggatgattgattcctgggttcaggcatctggtcttagtgctcgtttacaatcatcaaaatttttggcttcgcctgaaaagtttggtcaaagaggttcaggagcattaggggaatggtcaagaggaatgaatggggatggaacgtgggcaaacttagcagggaaaagacgagcctcgctttga

SEQ ID NO: 142050 - DNA, 207 bp, Enterobacter cloacae
gtgaatactaacaacgttcaggtgtccggggccgtgccttcctccttaaccgttttttcgcccggggacgccgccctgcggggcggtattcccgcgttaatcttctttctccccgcgctttcgctccgccgcaaaaatgtactggttaaatccgtgctgtcacgtcagctggatgacctggaaccgacactcacgcggcatggttag

SEQ ID NO: 142051 - DNA, 726 bp, Enterobacter cloacae
gtgaacggtatgtacacggccgaagggctggaagataaatcggtagtctggtcaaaatatcactatctggtgcggcaggaagcattgctgttacataagcggcttcctgccagcgtcgagctggatgatttaattcaggcgggttcgataggttttttaagtgcggtagagagtttcgacccgaaaaaaggggtgacgctctcggcgtggatcacccagcgggtgaaatgggcattattagatgagttgagagaaagtgactgggtaccgcgtcgggtacgaacccatacgcgggcaattgtcgccattattcagcaaatcgaacagaaaaaagggggcgaagccaccgaggctgaaattgcagagcgcatgggggtgtccctgcaggaatttcatcagatgctggcggataataattccagccagatgtattcggttgatgagctgcaggaaaattacgccgatagctgggaaacgagtgatgatgagaatgagcagcttaatccgctgaatgataccatcaggcaaaatttgctggaacagatcgctgagcatgttcagtttatacccgaaagagagcaggtaatgttgcatctttattacttgcaggatttgaatatgaaagagattgggctggtgttggggatcaccgaaacgcgcgtgagccagttacacagcctggccgttaaaaggttaagaagccgtatggagtcagcgcacagataa

SEQ ID NO: 142052 - DNA, 1626 bp, Enterobacter cloacae
atgttaacgaaactcaaaatttatagcgcaatcagccttattatttgcctctttgcggtcatactgttcggcgtaaccgcttattccgtttatgacgccgtcgccaataacaataattttaaacgtattattgtcgcctctgaaaataacgatcagatgcgcgattcggcctacaacatcagcgcggtgatggccaataccaacggcctgatgctgcaggcggcgctgggtaacccggtctctgagaatgtcactaaacacacggtgaatgtggtgaaacttgcgcgtcgtaatatggatgcgtttatggcttcaccgtttaacaccccggaagagagtcgtctggcggccgaggtgaacgcagcgttcaatgaggtgtataaagtggctgaaatcaaactgggttatctgcaaaacccggcaggatattcgggctcgctggaacacgacatggagctgcgtaccgcgctgcgtttgaaggttgaacagtatacggttgccagcgcccgcttgagcgagagctatattcaggactctgagcgcggctaccagattatgctgggcctcggcgttgcggtgttaattctggccgtcgggctgctgttcgcggtgcgttactggctgcgcaacaccctggtgcgccgtatggaaacgaccgttgagatgctgcgtcgcgtggcggcgggcgatctcagccagaaaattaacagcggcagccagaatgaaatcggcagtatgctggccgaacttgaaaccatgcgcacctccctgaccagcaccattctggggatccgcgacagcgtgcagcgcattcacaccaatgcccaggaaattgctcacggcaataacgatctctcctcccgtacggaagagcaggccgcggcgctgcaggagacggcggcgagcatggagcagatcaaaaccaccgtgcgccagaacgccgacaacgcccatgccgcgcgcgagctggcggaaagtgcgagcaataatgcccataacggcggagaggtgatgcagagcttggagcagatcatggcgcaaattaccaccagctcgcgtcagattgcggatatcaacggcgtcatcgacagcattgccaaccagaccaacatccttgctctcaacgcggcagtagaggcggcacgtgccggtgagcaggggcgtggttttgctgtggtggctgaagaagtgcgtaacctggcgaagcgcagcgccgatgcggccaaagagatcaaccagctgattaataccagcgtgagtaatattgatattggttcgcgtcaggttgggcaggctagtacggtgatgcaggagatcgtgacctctgtgtcgcaggtgacgcagattatgggtgaaatcacctcggcgtcggacgagcagagcgcgggtatcaaccagatttcgcaggccgtcaatgaaatggatctggtgacccagcagaacgcggcgatggtggaagaagcggcaatggccgcgggcgatctggaagcgcagtctgatgcgctggaaaaactggtggcgcagttcaggctaaaccatgagagcgcggttgcgaaggtgacggttgaagcgaataagccccagcgtcaaaaagaatccgatctggcccagtgggaaaccttttaa

SEQ ID NO: 142053 - DNA, 894 bp, Enterobacter cloacae
atgcgaatcagtacgctttatatgtaccagcaaagttcagagtcgatgacaaaacgcatgagccagagcaacgaggcttatctgcggatgtcggcggggaaaacattgcttaaagcctcggatgacccgacagccgcgaccgacgcggtgaaacatcaggacgcactggcaaagctggagatgtacagcagcgtgcgtgcgcgcgtgcgcagtgcgctggagtttcaggaccatattctgaacggcgcgggtaacctgatgactaccaccctgaaggaaaaaatcgtcgccgcgggatctgatgcctactctgacgaggatcgacaggcgctcggaaaagagattgaggggatacgcgcgaatatgctgggtttagctaacagtcgcgacgcgtccggtcgctatatttttagcggttttaatactcatactcctgcatttgatgaggatggcgtgtatcagggcggaagtgaagcgcgtaagcaaaccgttgctgacgggacggagatgcagaccggccacctcgggaatgagatcttcgatgatgtttttgttcttctcgataaagccgttacggaattatcccgggacccgattaattacgacgatatgcgcgctgtgcttgaagcgaccagcaaaggcattgatgacggtatcgaccgcctgggtaaagcccaggccgagctgggcaccaacctgctgcagcttgacgccctggatttaactggaaacgtcctgattaatgacaccattgtcaaagtgcaggatgccatcggctcggataccggcaagcttgtcacgctggtatcggaatcgcagatgtccgagttggcgttcaatgcctcgatgtatgtatataaaaatatgcagaagatgaatctgtttaatatgtaa

SEQ ID NO: 142054 - DNA, 1641 bp, Enterobacter cloacae
atgaataatttatttaatttagccagaaacggcctcggtgtggcgcaggccgccattcgggtgacgggtgacaacctgaccaacggcatgtccgccaattatagccgccgcagcctgattatcggtgagcttggcggtatgtccaccgggcagggattttttggttacggtgcccgcgccagcggcgttgagcgtgcttatgatgcgtttgctaacaaccagctacgggattcactgtccagctactcctcccataacgaacgactgaaacagctatcggatatcgacaatatgctggccgatgaggcggataacgtctccgtttctctgggcaagctatttaaggatatggcgacgctgagcggcgatccggcggatggcccggcgcgtgcggcggtatttacctcactcgacgtactggcaaaccgctataacgccagcgccaaacgtctctccggccttgaaaagagcacgaatagccagattgaaagcagcgcgaaggatatcaacagctttaccgagcaattggcgcagttgaacaaacagctggagcgtgcgcagggaaatggcgcaccgcccgccgatctgctcgaccagcgtgacgcgctgctggaagggctgagcgaacaattgggcattaccgtgaccgaagaccaaatctcgggtcgtgtgagcgtcacgctcgccgatggacgcccgctcgtttcagagggtaccgcgtacaagttgcaaacttcgccgtcggatgccgatcccaacaaggtgattgtgtcatatgtggatgcgaacggcaaagcgtccccattggatgagaacagcatcaccaaaggccgcttgggtgggttgttcaagttccgcaacgaggatctcgtcgtcgcgcgtcaggatctggatcagatcgcctttatgatggcgcaccggatgaacgaacagaacggcgaagggcttacgcctgacggtacgccgggtggcgacctcttctctctgtccgatatcaaagccattgcgaatgcgaaaaacggcggaagtgatgcgctggatcatatcaaggtcactgatttcaaacaggtgaaatctgaaaactatgacatcagctttgacggcactgactgggtcgttatcggcgctgatggtcgtaacgttcctcttgatcccgctgcactgccagatgcgcttaagtttgatgggattgaaattaccctgccagcgcttgctaccaccgtgcccggagataaattcagtctcaacccaatggcaggcgcagccgaaggcattagccgtaagataaccagtgcgcaggagtttgcggcagccgacctggcgggcggtgaggggaataacaaaaacctcgaaaagatgctggaaattcagaatgagaaactgatcggtgacgacacgctgagtgcagcctatgccagcctggcggggaaaataggtgaaagcgctcgcgaggtcagatcctatgccaccagcgccgaaactgatttgcgtaccaaatacgacaccaaacagtcgctctcaggagtgaatatggacgaggaatatatcaacctcgatatgttcagacagtattacaacggcaacgcgcagctgctaaaaaccgcaaccgcgatgtttgatgccctgctggccatccgataa

SEQ ID NO: 142055 - DNA, 708 bp, Enterobacter cloacae
atggcggtctcttcgattaacaacagcagcggcgcaggtggcaccggtacaggaaacagcgcggcggatctgtcgaatcagtttatgaccctgttggtcgcgcagatgaaaaatcaagatcccaccaatccgatggataacaaccagcttacctcgcagctggcgcagttcaacatggctgcgggggtcgagaagctcaacagctcggtggcgggggttcaggcaatgatgattcagctcggcagcatgagtgcctcagcctgggtgggccgtagcgtgctgatagaaggggaggcaaaagtctctttcggcgaaccagaaggaattggtatccatcaggttggcgcggatcgtccgggcggttcggacgatttccacttcgcgttgacgggtgatgcagaaacggtgaccgtcacgctgcacgacggtgacaaggcgtatatcgcagagctcaagaatgtgaagcaggggatgaataccttcaacctggacgacctggaaaactttaagccggagccggggccgccgcgcgacagggaatacaccctctcctttgaggccagcaattcagagggtgaaaacccagaagtgattgggctggttcaggatcaggtgcagggcgtcacgatggatccgagcgggccgattctgcatctgctgaataatgatccgattggcatgaacaaagtctttgttattcaaaaataa

SEQ ID NO: 142056 - DNA, 294 bp, Enterobacter cloacae
atgagcatcaacagcagccagaccactgcgccgattgcgaaaatcgccccgactcaggatctgcgcgcccgtacgcaacctcaggaacgtgacgctgccgcaacgcgttcagacaagcgcgacaatacgaacgtcaccctgagcgaattaaccaaaaagatccagaccgacgacagccgcgatgtggattacgcacgcgtaaatgaacttcgcgccgcgctgtcggcaggtactctgcgcattgaacctgagaaaattgctcaggccatggtgcaggacatgtttcagttttaa

SEQ ID NO: 142057 - DNA, 444 bp, Enterobacter cloacae
atggacaagctttacccgatactcgcgcagatgaaaacgtctctggatgaactggaggcgatcatgattgaagaggtgaatcagctcaaccgcacgcagatcaacccggtgtcgctgcaggtgcttgcggataacaaaaaccagctgctgaccacgctccagtattacgacgacatgcgccgccagcaggagcagatctgtggcactgaagccccctacccggggctcggtaagctgtttgccagctggcagctggtgcatgagaaggtacgcagcaccaaggcgctgaatcaaaaagtggaatcactgctgcaaagtcatatgaaaaaaaatcagcatatccgcaaggccatcgaccatgtgggtcatgcaaacgcgctctatggtccggcgggagaatccagccagttgccttctggccgcaagtacaacatcagcatctga

SEQ ID NO: 142058 - DNA, 321 bp, Enterobacter cloacae
atggataaggatgttattgcgctgattgaagaattgcttatcagcaatgcgacgctgcgtcagcaggctgaggctggcgaatgggatctgtttcttgacgagtccgtggcgtacacgatggggatgagaacgttgtgtgatatcgatttaacccaactggcgcagtacaacaaagcgcccgtcagcgcgcaactggcgacgctattggagaacgacgccctgttaacgcaggctattcaggggcgtctgaccaccattagtaccgaactctccgccatgcgcaaatccagtacaatggcaaaagcctacacggcggtttaa

SEQ ID NO: 142059 - DNA, 1473 bp, Enterobacter cloacae
atggctgcaactaattttctcggcgtgggctccgggctgccgtttgaccaatggatggccgacgagcgtaaaggcctttcacaaaagctaaatccgtatctgcaaaagcagtcaaattataaaggacagatctccgcgtggggatcgatttccagctcgctgagtacgctgaaggacaatctcagcaagctggaagacgaagggtttaatggcgtcagcgttagcggcaacaaaacgttcaaagcaaccgcggggcagggcgcgatcccgaacagctactccattgccgttaaacagctggcgaaagcgcatcagcttgcgattgagaacgacacacgcgataaccccattggtagcagcggtgcgaaagtaaccatcaccgtgaaagaaggcgaaaaaccgctggtggtggacttagcgaaagatgaaacctcccttgatcagattgccaaaaagatcaacgagcagaaaggcgatgtggttgcggaagtgatgaccatagaggacggtaagcacaagctggtactgacctccaaaaaaaccggtgatgccggggaaatggatatcaaagtcacaggcaatgcggcactggaagggaagatgaccgctgccatagctatgccagaaactgaaccgaaaaatgccatcattttacttaatggcaaggaagtcatacgcagttctaacaccattagcgatttaatcaccggtgtgacgttggagttgcgtgaagtctctgaaagcgatgacaaagacccggctaaacccgtctacaaagaagaatccctcaccatcaccgaagatacctcaaaggtgaaaacgctgattgaagagttcgttaagaactacaacagctacctcaccaccgttgccggtgcgacgaagtacaccgcacccgatcgcgacagcaattctgatgctttgcctcagcctgacccaagtaatggcgcgctgttcagcgatggctccttacgccgtctgaccagccaactgaaagccaccgtaaccggcagctatcccgaggtgggggatgtgattcagactctgggaaaactagggattaccgttacgtttgatggcaaaaccggcgatgaccgtacaggcacactgggcacgttgactatcgataacaaaaagcttgatgccgccctgaaggacaacctgaaagaggttgaggcgctgtttctcggcaaaggggggaaagaggggattaaggatcgaatggatgggatctttaatacctacctcggggataaagagtccattgacaacaaagacggcgtcattgaagacgcgctggaaactctgcgtgagcaggaaaaacgcattggcaagcagatcacggccgtcgaaagacgcattgaagagaccatgctgcgcagagaaaaagaatatcagcgtctggataaagccatgagcgatatgaacagcatgagcacccggttgcagcagtcgctggcggggttaatttaa

SEQ ID NO: 142060 - DNA, 1485 bp, Enterobacter cloacae
atggcacaggtcattaataccaacgcgctgagcctgatggctcagaataacctgaacaaatctcagtcttctctgggtaccgcgattcagcgcctctcgtccggtatgcgtattaacagcgcgaaggacgatgccgcaggtttggcgatttctaaccgcttcacctcatccatccgcggtatgacccaggcggcacgtaacgccaacgacggcatctccctggcgcagaccaccgaaggcgcgctggaagaagtgacagaaaacatgcagcgtattcgtgagctgaccgtacaggcgaaaaacggcactaactcccagagcgacctggactccatcaaaaaagagatcggtacccgtctcgaagagatccagcgcgtagcggaaaccaccaacttcaatggcgtgaaagtctttgacggctctaaagatagaatcactattcagatcggtgataaagacgaagataccattgacatttctctgaacaaactggacatggaaactctgggtctggataaattcatggatgacttcgcaaaaatcggtacaggcaacggcacaggtagcagctatactgccaaagccgataagaaagctgcgactgatgacacaggagtggttgtaggtggtggtactgataaatggaaaattgatgccgcagatatcactgcgctcaaagcagaaatgccaggtggtgctgcaacagccgcccctgaaatttatatcaaagacgatgaggccttcgtcctgaataaagacgatgacaagttatataaactcgatcttgataaggtaacatgggctgccaatggcgcaggtttccagaagattgatacattgacgtcggcagcactggtagaaatgaatgaagccgataccgatatgctgctgaacggaccgaccaaactgagcgatgctaagctggtgaaagcggatgacaatgttcaggttggtggcgctccagtgaaacttgatgccgtgaagatggatgcgatttcaaccgaactcttcggcggtgatgtcgcgagctctggaatgcagttcttctctgcaactggcgcagcagcggatacgttctatgcaatcaatgatgcgggtgaagtgaaatcattcaaacttgattccactggcgcagtagattccgcatctaaagccgacgcgggttatggcgatggcgcagtaatcaagaaagcagcaggggctgcagtgggtgacggtctgctggccgacatggatgctgctatcacgcaggttgcagacttccgcgccgacctgggtgccgttcagaaccgcttcagttccatcattgcgaacctgaacaccaacatcatcaacaccaccgaagcgcgctcccgtattcaggacgctgacttctctgtagaagtgtctgccatgagccgcgcgaacatcctccagcaggcaggtgtctccgtacttgcccaggccaaccaggttccgcagaacgtgctctccctgctgcgttaa

SEQ ID NO: 142061 - DNA, 225 bp, Enterobacter cloacae
atgaacgccctgcatgatgccgcgctgcaaattgccgacagtagcggcgcgctggtgcaactggccagccgctgcgcccgttcttctaaagaactccgggcgctggttgacgatgcgatgatgcaggcgcaaagcgggggaccgtcggtaacgcagaataacagcgtgctgattaaagaggtttatacggtcgcgaataccctgtttcagcgcacaggcagctag

SEQ ID NO: 142062 - DNA, 474 bp, Enterobacter cloacae
atggtttttatcgttattttagtcgttatttttattaccctggtgattctggtgcaggctggggtcatgccctggtttattcgcatcgaggggcagcgtctgagcacgcaggttgatgccctggccacccaattacgtaagcaactcgacagggttgaagcacagcagcgttcaatgaccgaaagtgtggtcaccctgaaaagctttgcgctggataaaagtgctcctggcgataccgatcccggcgaagaggtgagcataagccgacgattttcaattcactggtcaaagagatcggcgagcgtcttggcggtcgtgcctggatggtggatgacaccgggcgcatcgccggtgatgccgccggtgcgccgacggttaaatctcttaacgatgccagccgggcgaagggttacggcatacccgttttcgcagcgccagcggcgaacatacgctggtggtgacgcccattgctga

SEQ ID NO: 142063 - DNA, 222 bp, Enterobacter cloacae
atgattatcagcaccgtggcgctggcaactattggtatttataccattccgcacgggcttaatttgattgcctggttgagctggctcttttatctgcccgagacgctgtatatcgtgctctgtctgtttcccctgacctggggcggcacgctttgtagtcttgacggctggctggtgaaacgctggcagaatgtgtgcaaaattgtttttgtggaggagtaa

SEQ ID NO: 142064 - DNA, 243 bp, Enterobacter cloacae
atggtatctgttaagcattttatgcaaacgtccgatttgcccgccatgtttcccgtatttatctgtcgtctggtcgtcgggatatttttctgtaccgccgggtttaataaattattcgtaacggaaaaccagctgctgatggtggataccctgcaagacgcggggatccctttcccggacgtgatggcggtcgtcgtcgcttttctggaatgcagcatggggctgctgttgacgctcgggtaa

SEQ ID NO: 142065 - DNA, 171 bp, Enterobacter cloacae
atgccaaaccctatcgcgattggaacgtcactaacgctggatgagcagacccgagaacttacccggacggataagcaagagaccgttaccctcccccagagcgcgtgcctgtgtctcaccgcactggccgaggcgcagggcgaggtgctgtcccaggaacagctgatgtag

SEQ ID NO: 142066 - DNA, 246 bp, Enterobacter cloacae
gtgaccgacaacagcgtccgggtgatgatcaccaagctgcgtcgcgcgttcgcccagttggatctgcaggaagacatcacccttatcgccgtaacgcgcagcggctatcgtctgctcgtgcgggaagccagcagcgaactgccgccgcctgcgcagaccgcccatctgcccgcgcaggatgaaccggcagtgcctgacgtgccgccggtggctgcgcacgcccctgagcgggatcgtcgattttag

SEQ ID NO: 142067 - DNA, 156 bp, Enterobacter cloacae
atgaccgcgaatcgttctattttcgcctttattaaatccccgctcaccctgctgtttatgggttggatggtcgccgggctgggcggtatggcgctgaacggatttcagacctcaaaatacgcctcgcagtgtatccccccacctcctactacgtga

SEQ ID NO: 142068 - DNA, 396 bp, Enterobacter cloacae
gtgtatccccccacctcctactacgtgattaaggacgactacaacgcaacgctggcgcgcggcatttatcgctcctgtcgcgacggtctgttcagcgggcataccacctatatcggcagtatcagccattttaaagacggcaaacgcgacggactgccgaaagcggtgaaccgtgaagtgcgttacgatgttgaactgtcgggtaaacggctccatctgaccgctaccagccagcaccgcaagcttggcgaccagaccgcggatcaagacgtgactgattatattttcccgcaaatcaaaccgggtgaagtggccaccagcaccgtctacctgctggacggaaaagtgctcgcctccggtacggaaaccgtcgcccgcatcgcctgcatgaactga

SEQ ID NO: 142069 - DNA, 372 bp, Enterobacter cloacae
atgaacgccacgaactccctcccggccagcggcccggtgctgatgacggtcaccggagcgctggcgctggtcgtcctgctgctgctggtgctggcctgggccgcccgccgcagcggcctggcgcgtcggctgaatgacgctcagggcacgatgaccctggtggcgacccagtcgctggggccgcgcgagcgcctggtgctcgtggacgtgggcgagcagcgcctggtgctgggcgtgaccgcctcgcaggtgacctgccttgccacgcaggcgcgcccggaaaacgcgccgcaggccagcacgcccgcggcgacgttcccgctgatgctggaaaagctgcgccagaaataccgtccgggaggtgagcagtga

SEQ ID NO: 142070 - DNA, 507 bp, Enterobacter cloacae
atgagtaataaaaataaaaaggtcgccagcggcggagggtctcgctcgtttctgattacgttcatgtttttgactgccgttgcggcgtgcggtgtttccggctacctgttctgggaaatgaaattcgcgaaaccggccgccgccgttgcggaagagggcaccagcgtgccccccgaaccggtacaggttgagccgctgtatgcctcgatgaataccttcaccgtgagtctgaaacccacggcgaatgaatcggatcgggtgctgtatctgggcctgtcgattcgggtggctgagcagcagtcgctgacggtgctggaaaaatatttgccggaataccgcagccgcatatttatgttgttaacccatcaaacctacgaagagttatcgacggatgagggcaagcgtcgcctgatgaataatattcaggacgaactggctaaaccgttggcatttaaccagtccattcgcgtcactgacgttcttattaacgaatttattctgcggtaa

SEQ ID NO: 142071 - DNA, 1068 bp, Enterobacter cloacae
atgaacattgatatggccgccctgttactgggcggcggagcgcagggcaaaccgaaggccgggttgctcgcagacgacggcttcagcctggcgctggacgacaagctggcggaactggcgcagcttttcccggggcttgacccccaggcgctggcagcgctgccggaggccgcactggcgggggctggcttgccctcggagttactggcggaacagctcaccgtagaggtacaggaaacagtggcagacggtctgctgctgacggcgacgccggggctgggagaggccctgaaaggggtttctctggccgacggcgaaggtgaagagagcccgcagtggcagctgcagcagctggtgacccgcagcgtcaccggggcagagccggttcagcctgcaaatggcatagtgagcggcaaaacctctgcgcaggagggcaaagcggtatcttccctgatggccgccgccgataacgcgcctgcggcaaacgccgcaccgctgatggcgcagcccgcagcggtgagcggtgaggcgatggtcacggcagagatgtctgcgacctccacggtgagcgcagtggcgctgcctgccgccgtgcgtacctacgttacccatgccccacagcaggtggccaccattaaccatccgccggaagcgccggagtggaagcagtcggtcagccagcatatcgccctctttagccgtaacgggctgcacagcgcggagatccgcctgcatccggaagatctggggtcgctgcagatctccctgcgcatgcagcaggatcaggcgcagatccatattgtcagcgaacatgcgcatatccgccacgtcatggagcaggccatgccgcagctgcgtgccgcgatggcggaatcgggtattcagctcggccaggccaacgtgagcgcggaagagcagcagtttgccgccggtgaacagggccagcatgcatcgggtgacgagcacgccgcgcaggaaggggaagagcaatcggttgaagaggagatcgtgccgactttattaaccaccacccccggaaatatatacggcattaatacctttgcctga

SEQ ID NO: 142072 - DNA, 705 bp, Enterobacter cloacae
atgcctacgtttgatgaacacaacgccaccgggtggcgcgcctggaagcctgaaaacctgctggacgaaccgctggacactccgctgccgacgctggataacacccagtctgaggcacagctgaaagccgagctggcgcgtctgcgcaagcaggctgaacagcaggggtttgcccaggggcagcgagagggccaggaagaggggcgcaagcagggctatgaggcggggctgaaagagggccgcgacgccgggtttgcccagggcgttgagcaggcgcgcgctgagcaacaggccttgctgcgcgaggccgggcagtgggtcagcaactttaagctggcgctggaaaacctcgaagggcttatccccgcgcgtctggtgcagctgtccctgacggcggtgcagcagctctacggctcctcccgcatcgcagataaccatgcgctggtgacgcagatccgcagcctgatgcagcaggacgcgctgctgcatggcaccatccagctgtatgtcagcccggaggcgtttgacgccgtgcaggcggcgttaggtgaaacgcttgccgcagcgggctgggagctgcaccgcgacgccggcctggccgctggcggctgccgggtggtctccccggatgtggaggtggacgccagcatggaaacccgctggcaggcgctctgccatctggcgcgcgaggagctctcgcaatga

SEQ ID NO: 142073 - DNA, 324 bp, Enterobacter cloacae
atgtcagcgacattaatgcgtggcgtactcgatcaaattcaaaccaaggcgcagcaggccagcggaccgtctaatcagcggcacacctcgcgcggtgacgtcccctccttttcagacgttttatttaacagcattaacgaaataaataaaacccaggttgaggcaaagagcaaaacacagcaatggatgtctggaggtcacgatattgccctgaatgacgtgatgctggcgatgcagaaatcttctatttcattcagctttggtatccaggcgcgaaataaaatgatcggcgcgtatcaggaaataatgaatactccggtttaa

SEQ ID NO: 142074 - DNA, 1077 bp, Enterobacter cloacae
gtgaaggcgattcgtgtgctggcggtcgatgattccgccctgatgcgtaacatgctcagcgcggtggtcaatcagcagcctgatatggaaatggtcggcacggcgccggacgcgtttatcgcgcgcgagctgattaaacagctcaacccggacgtgctgacgctggacatcgacatgccacggatggacgggctggagtttctctcccgcctgatgcgcctgcgcccgatgccggtggtgatgatctcctccctgaccacccgcggctcgaaagccaccatgaccgcattggagcacggcgcggtcgattttctgcccaagccggagcatcgcggcgcagagaatatcgacagctggagccagctggtagtggagaagatccgcgtcgctgcccgcgcaaagctggcccagcatagccccgacgccagaccgatcctcgccggtattcccatgcgccagcaaagcatcatagccatcggcgcgtctacgggcggcacggaggcgctgcgccgggtgctgatgccgctgccgaccagcacgccggggatcgtgatcgcccagcacatgcctgccggtttcacccactctttcgcccagcgactcgactcgctgtgccagattgccgtgcgtgaagcgcaggatggcgagccggtgcgcccgggaaccgccctgattgccccgggcgatcgccacatggagatcctctgccaggacaacggctaccggatcaggctcagcgatgccccgccggtgaaccgccatcgcccgtcggtggatgtgctgtttgactccgtggcgcgtcaggccagcaaacacgccaccgccgccctgctgaccggcatgggcgcggacggcgcgcgcggtctgctgcacctgcgccagaccggtgcctttaccctcgcgcagagcgaagccacctgcgtggtgttcggcatgccgcgtgaggcgattgcgctgggcgcggcgaaaaaggtcgtcgatctcgacgatatcagccagtgcttactggacagttttcataaacataaattacccaaaaccgactcacgttcaggagatatccaccatgtcggataa

SEQ ID NO: 142075 - DNA, 408 bp, Enterobacter cloacae
atgatgagagcaggacttgcgctgcttctggtttcgccgctggcgatggcggcggacggttcatggagcgctagcagcttcggcggcacgatgacccggggacaggtggtactgaaaagcaaaccggtgcaaagcccctctcccctgcccgctggcgccgcagcttctcgcgtacactggaagattcagacgaacggcctgacccccgccgggtttcgcattcgtctgtgcagcgccacccgctgcctgacgctgcccggctttaccggggtgctgcccctgcctgccgggatgccggctggcgggccgtttcgttttgagtattattccttggcgggaggtcgcctcgacacaccgctgaccgtgcttaagaatcaggtcacggtgagttaccgaaaccggggttaa

SEQ ID NO: 142076 - DNA, 252 bp, Enterobacter cloacae
atggagaagttaaacgacttgcatggcaaaggaatttaccatggcgatcttcattatggaaatattttatttgatggcgatagtcgagattttaattttattgattttggaacgtcaagaattgaggaggataaggacgttcttgaaagtgaagcggagcatgttaagactaacttcataaatatgtggccgggtataaagagaaaaacagcgccgtcaataattggaaaggatggtcgagtttatatttga

SEQ ID NO: 142077 - DNA, 2562 bp, Enterobacter cloacae
atgagcttcagtcctgactgttttcagcacaccccgaccctgacggtgaccgacagccgcggcctcgccgtgcgcaccgtcgccttcctccgccatccggataccccggacgtctgtgacctgcgcgtcacccgccatcaccatgacccccgcggcttcctcacccgcagcgccgacccgcgcctgtacgcggccggactggcgaacttcacgtaccgtcacgccctctccggcgccgtcctgcgcacgcagggcgtggataacggcaccaccgtgacgctgaacgacgccaccggccggccccttatcgcggtcagcaacatccgcattacccgtgatggtacggaggacataagccgggccgtgacccgcacctggcagtacgaggacgcgtcgctgcccgggcgcccggtgagcatcacggagcaggcggccggtgaacccgcccgcgtcacggagcgcttcgtgtacgccggcagtacgcaggcggagcagggcctgaacctggccggcgtgtgcgtcagccaccacgacacggccgggctggtacggacggacagcatttccctcaccggggtaccgctgtcggtgacccgccgcctgctgaaggaggcggacagcccggacgccgtggctgactggcaggggacagaggtatccgcctggaacggcctgctggctgacgaggcatacaccaccctgaccaccgcggacgccgccggggcggtactggccaccaccgatgcgaaggggaaccgccagcgcgtggcgtatgacgtggcgggccgggtgtcgggcagctggctgacggtgaagggcggcacggagcgggttatcgttagctccctggcgtactcggccgccgggcagaagctgcgcgaagtgcacggcaacggcgtggtgaccacgtatacctacgagccgcagacgcagcggctgaccgggattaaaacggaacgccccgccggacatgctgcgggtacgaaggtgctgcaggacctgcgctatgaatatgacccggtgggtaatgttcttggcatcagaaacgatgcggaagagacccgcttctggcgcaaccagaaagtggtgccggagagcacgtatacctacgacagcctgtaccggctggtgagtgccaccgggcgcgagatggcgaacgccggtcagggcagtcacctgccgtcagccacggttccccttccggcagacagctccgcgtacacgaactacacccgtacctacgcctacgacgcgggagacaacctgacgcagattcgtcacagcgcccctgcgacaaacaacacctacaccacgaaaatcaccataagcaaccggagcaaccggggcgtgctgagcaccctgacggaaagccccgcagaggtggacggcctgttcacggcgggcgggcagcagacgcagctgcagccggggcaggcgctggtctggaccgcgcgtaacgagctgctgaaagtgacgccggtggtgcgtgacggcgacaccgcagactgtgaaagctatcggtatgatgcgggcagccagcgcgtgctgaaggtcagcgtgcagaagacgaacagcagcacgcagacgcagcgggtggtgtacctgccgggactggagctgcggaccacaacggcaggcggcgcggaaacggaaagcctgcaggtgatgacggcgggcgaggcgggacgtgcgcaggtgcgggtgctgcactggacgtcgggcaggccggacggcatcagcaacgaccaggtgcgttacagccacgataacctgacgggaagcagcgggctggagctggacggcgacgggaatattatcagcacggaggagtactacccgttcggcggcaccgccatcctgacggcgcgcagtcagctggaagcggactacaaaacggtgcgctactcgggcaaggagcgcgacgcgacggggctgtactactacggataccggtactaccagccgtggtcggggcggtggctctccgcagacccggcggggacggtggacggcctgaacctgttccggatgtgccgcaataatccagggactttatttgacccaaaaggattagctcctcataaaaatctttctgataaaaaacaaaagtttgttgaagaagctggtttgaagcttgctcagttatcatttaattcaaaaggtgattttggttcattcaaaaatcagatacgcgaatttatggagtcagaacattcatctataaagaaaaaacgatttgatatactttggtcatttgttgtgagcgaagctggtaatcatatacagcagatggaagataatgaaaaaaaattagctaatgagagagttgagctggggcgaggaggggatgcagttgtatatgatatgaaaaatggattcgttataaaagaatttcacaatgccataactgaattagagcaaaaagaaagagaagtggatatttttaataaggtgcatggagacggctcagcaagcatcgtttccaatgccatgattaaaatgaaaaaaaataccaggcattccgattgcagaaataggggtgagctcttttactcaaaatga

SEQ ID NO: 142078 - DNA, 1236 bp, Enterobacter cloacae
atgggtgaagttatctcagtttttgaatatgacctgctggggagtggaaaagcggcttcagttggcgcaaagctggtgcctcaacaggtctttgattatttagaagcacttagcctagcaagcattcaaggaagccagtttctcaaactcacctctcgctcaggcttcaaattgcttcaggtgcaaaactacgcggggatgctttcaacacctcacggtttccagcttgagatactgcccaaggttggtaaaaacctcacagcagctaatgcgcgtgaaacattgctgacgatgctaagccatctgcctgggtttcgacatattcaaacccaacaggcaactctgcaggctaagcgcatgcctttgcttgagatttttatcagtcagtttttgcttagcgtcagccaattgcttaaacaaggtttacgctccgactatgtgagcgagcacggtaatctggcttttatgaagggcaagctgatgctttctgcacagctgcgacataacgcggtaaatcgccataagttttgtgtcgattatgatgagtatatgcctgattgcgctgccaatcggctcttacactccgcactggataagttacttagtctgcagctgtcatcagagaatcaacgctggctttacgaactgcgctttgcgtttgacgggattccacttagcagggatattgaaagtgatataaacagcttacgactcgagcgcggtatggctcattacaacgagccaatggcgtgggcgcatttgattctgagaggaatgagcccgagtgccttgcagggaaataccaaggcgatatccctcctgttccctatggaagcggtgtttgaatcttttgttgcacaaacccttccctacgagcttcctcctcaccttgaagttcagccacagatttccacttattcccttgttaaacatgggcttcaagattgctttaagcttcgcccagacttgttgattcagtcacgtcaaccggttcaaaccaaaatggtgatggatacaaaatggaagctagtgaacagcaacgatcaaaaaaaatcactgtatgggctagcacaatccgacttctatcaaatgtttgcctatggccaaaaatatcttgatgggagcggcgaaatgtatctgatttacccttggcatgatgactttagccaaccgatacagcagtactttgctttctcagatactttaaaatcttggtgctgttacttcgcgctatag

SEQ ID NO: 142079 - DNA, 2076 bp, Enterobacter cloacae
atgactcttgtagataaggtcgaagcaggcaagctgacgatcagtgaattgattgataccctgtcgaaagataaaaattacacagattccaagtgggctcagcgataccgcgaatttacgaccttgctgcaacaaacctcaacttttgctgagcctgaaaatgatgatttagtaaagcggctttggtatgaacgtgacaacggtattgccagtattcgtcagggcgttccatcattagcagaatatcagcaaagcctcccattgcttagagaactcactgagcatgttcgtcagcaaccgaatgaagctacctaccaatacgtaggcaatgcgctgcagcaggccaaagagaccggacagcttaagcgcatgtatcggagtttaagaaatcgtgtctttgccgcgttctcgccagaaaactacaccagtactgtggatgagaatgcttttaataaagcagcagaattcctaaatcaacacttccatctcggcttggtactgaccggaaattggttacagaaaaactatgaattgaaacaagccatacacgccaaatctcctaacacagatccttattacgtgaatatggccatctggcatctctatgaattgctccgtgaacgcgataatgaacaaaagcaggagaaagtagctagcactacatccacaacctacagtgagcccatcgagaacaagaccattccacattcaccaactaacgtgatcttctttggccccccaggcactggcaagaccttcacgttgcagcaaaaaatgaaagagtacacttctcatgctgttcctgctgatcgtgatgcctggctggattctcgccttgaatcgttgaactggatgcaggttataacgctagtgctgctcgatcttgggaaacgagccaaagttcgccaaattattgaacatatgtggtttcaacgtaaggcattattaaacggtcgtaatggcaatctatcgaatactgcctgggcggctttgcaatcctacacagttccggagtcgttaactgttgattataaaaatcggcgtgagcctgccgtatttaacaaaacagataacagcgaatggttgctcgttgattcacagctcgagcaagtggaggatttggtagagctctacgctgaacttaaacgcggtccaaaatctgccgaagccatccagcgttttgcagtggttactttccaccaatcttacggttatgaagaatttattgaaggtatccgcgctcgctctgacgagagtggcaatatctcttatcccattgagccgggtatctttatgcgcctttgccaacgtgctaatgccgatccagcacatcgctacgccattttcattgatgagatcaatcgcggaaacatatccaagatctttggtgaacttatctcactcattgaaatagacaagcgtgcgggtatgtccaatgcaatgagcttacaactgtcttatagcggtgatcacttcagcgttcccgccaatgtcgacatcatcggagccatgaatacagcggaccgttctttagctctgatggacacggctttgcgccgtcgttttgactttgtcgaaatgatgcctgatctctctttactgagtggaacgaaggtgaaaggcatagaactcgagtcgttgttagaaaaactcaatagccgcatcgaagcgctttacgatcgtgaacatacactggggcatgcgttctttatgccggtaaaaaatgcactcgatgccggtgatgaagaagctgcgtttaaacaattgaagatcgcattccagaaaaagatcattccgctgttgcaggaatactttttcgacgactggaacaagatcaagttggtactgggagacaaccaaaagcaagacgacagcctgcaattcgtgattgagaaaaccgacgatctcgatacgctttttggtaacaaccatggtttacgacgccatgatcagcaatcgacagcttacgagctcgaagcatttgatcaagagatctggaatatgccacaggcttatcgttcaatttatcagccccagcagaccagtcctgatgagcaggctgtaaaccatgggtga

SEQ ID NO: 142080 - DNA, 516 bp, Enterobacter cloacae
atggctctacatggaaagttcgtaattaatgatgcgtactactccccgttatcgtttcctggaataggcacgtttttagctttctctggtaatggtgcttaccgtaatcgtggaacatgtggaatgatccccaaagaggggccagtaccagcgggtaaatactggattgttgaccgccctcaaggtggactcaagtcacagctaaacacagtgggaagagacatttataatcacttcgccaatggtgcaacgttcaaacattctgaatggttcgcattatggcgtgatgattgggggatcgacgattacacatggattgagagcgttcagcgtggcaatttccgtttgcatccaggcgtactatcagaaggttgtatcactctcccacatgattctgattttgccatgttgcgtaatgctctgttgagaagccaaagaatagatgttccttgcatgaggaagctacaggcatacggcacgattgaggtgatctccaatggcaaaacatgcccttag

SEQ ID NO: 142081 - DNA, 519 bp, Enterobacter cloacae
atggcaaaacatgcccttagtttattcatcaagatagtgctgttcgctgttgttgtgctgatcgttgctgaaatggttccgtatgatggattagttaattctattacggggcttttcgatttccaaagcgccgacaagtttacccgcttcattttgggtgaacctgatttagaagtttgggaatcgttagacgactattttagcatcttaatcaatacattaatcagcgtacctgtcatgagcgccattaccacggcgtacagtggcgcgacacacaaagttagtccagcaggcatccccagagagtggttcagttccacatcgcgacggttagctaaaatcttcgggtttaccttcctgttttgggcgttatttcgcttgctgccttatcagtctttattcccggatcaaacgtattcaaatttcacaatggcggcgattgtgggctttcagttgctcttaacgattgtttgctactggttcatcacgaagaaaatcacaactaaaaggagtttgtaa

SEQ ID NO: 142082 - DNA, 954 bp, Enterobacter cloacae
atgctccagagtgaaaatacatcagcgaaacgcctgttttttgttgaggattttcagctattcggcgagcgctatggcatcgactatcgttttccccagctaaaagatgcagctgccacccgcagtcccgttctccagggggacgtggaagagatgacgctctcctcgggcatttccctgacccactccgacgttcgcgtgttacagccttacgaaacgacctctcgccacagcagcccgctctatatgctggtcgtgctggaagggtgcgtcacgctaacgctccgcggtaacgagtatgtcgtgcgatcgggtatggccttcggcgcctgcctcagtgaagagcagattatgagcgcgcggcacgatgcggacagtgccctgaagacgctctcgtttggcgtgtaccccaatgacgccaggcgtgaaagcctgctggaaacattgctgctggagtggcaaagccggaatgcgcctgccgttgtctggcacgttcccggattcgtgctctccggcattcagcatgcacagcagcagggcgtatgcgcgttatcacgcagactgctgctagaggggctgatgtatcagctgcttggccatggcctgaatcagtgtcagcaacaccgtccctgtcgaccggagcatgcgcgtctggaacgcgtacggtgcatgctggaacagtcgcctgaacagaatcactcccttgccgaactggccgccctcgcggcaatgagccaaagcagcctgcgcagcaagttccgccagcgctatggctgcacgctgtttgattatctccgcgactgtcggctcgcgctggcccggcgatatctgctggaaggctatagcgtacagcaggcggcgtggatgtgcggctaccagcatgccacaaatttctctaccgcatatcgtcgccgctacggtatttcacccggtgaggtacgtaaaacgcagtaa

SEQ ID NO: 142083 - DNA, 1257 bp, Enterobacter cloacae
atgcgaacgtttgactgtgagatcgcgatcctcggcgcagggcccgcagggctatcggcggcgctggccgccgcgcgctgcggaaaatcagtgatagttctcgacgacaatccgcgccccggcgggcaaatctggcgcgacggcccgcaggtttcgctgcctcagcgcgccttacgcctgcgccaggcggtcgcggaacagccgcgcattaccctgcttagcggtgcccgactgattgcccgccctgactcccaaacgattatttttgaaaccgccgacggctgcggccagatacgctggcagcggctcattttatgctgcggcgcacgggagctctctctgccgtttcccggctggacccttcccggcgtgacgggagccggaggcctgcaggcccagattaagcacggcctgcagctcaggggggaacgcgtggtcattgcgggcagcgggccgctgctgctggcggtcgccggcacggtgaaacgcgcaggcggaaatatcgtggccatcgttgaacaggcgccgatgaacgcgctggttcagttcgcagccgggctctggcgctggccagaaaaactgctccagttcggcgagctgttcccggcccgctaccacccggcaagccaggttattcgcgccgggggggaatcacagctccagtccgtcaccgtgcgccgcaggggaaacacccgggagattggctgcgacaggctggcgatcggctacgggctggtgccgaacctggagcctggcgcgctctttggctgcaaaacggaaaatcaggccatttgggtcgacgcagagcagcgcaccagcgtgaaggatatctacgccgccggagaatgcaccggctttggcggcagcgaactggcgctggcggaaggggaaatcgccggttatatcgcggcggataaccccggaaaggcagaaaaagccctctcagaccgcacgcgctggcagcgttttgcccgggcgctgcacgacacgttcgcgctgcctgagacgcttaaagaggcggttacgccagagacgctgctgtgccgctgcgaggacgtgcgctgcggtgatgtgcaaaacgccgaaggctggcaagcggcgaagctggcctcacgctgcggaatgggcgcctgtcagggcaaaatctgcgccaccagcgcgcgctggctgtacggctggccgctgccgcagccgcgcgagccgctctcccccgcgcgtctcgacacgctggtccaactggcaaaaccggaggagtga

SEQ ID NO: 142084 - DNA, 255 bp, Enterobacter cloacae
atgacgacactcagcatcgttatcgacggtgaaccctgcgacgtgcctgcaggcatcagcgttgcggcggcgctggcgttagcgggcaatggcgtgacccgcagctcggtcagcggcgagcggcgcgcccccttctgcggaatgggcgtctgtcaggagtgccgcgtcacggtaaacggacgccggatgctggcctgccagacggaatgtcagcccgatatggtgattgaaaggagccagcatgcgaacgtttga

SEQ ID NO: 142085 - DNA, 1104 bp, Enterobacter cloacae
gtgaccgaaagcgacgtcattgtcatcggtgccgggatcgtcggtgcggcctgcgcctggcagctcgcaaagcgcgggcagcgggtcacgctgattgacgacggcagtgcaggggccaccgcggcggggatgggccatctggtgtgtatggatgacgatcccgcggagctcgccctttccgcctggtcgctgtcgcgctggcggacgctgacgccacggatgccggaaagctgcgcctggcgcggttgcggcacgctgtggctggcagaaacgccgcaggagctggcgctggcagaggaaaaaaagcagcggatggcgcaataccaggtcaccagcgaaatgcagacccgtagccagctggccgcccgggagcccttgctgacctcccggctcgccggcgggctgtgggtgcccggagacggcattgtctacgccccgaacgtcgcccgctggcttattgacgatgccgacataacgcctctgcgggatagcgccgtctccgtcgaggcgccttttgtcacgctgcgaagcggaaaacgcctgcgcgcaagcgcaatcgtcattgcctgcggcctgggcaccaacgcgcttcttggcgagaaatggctccgggcgaaaaaaggccagctggcgatcgccgatcgctacggcccgctgctcagccatcagctcgtggagctgggatacggcgccagcgcgcatgcgggcggtacctcggtcgcgtttaatatccagccacgccctaccggacagctgctgattggctcttcccgccagttcgacaacaccgaccgcgaggtcgatttcccccttctggccagcatgctggcgcgggcgcgtcattttttaccctcgctggagagcctgaatattatccgctgctggagcggttttcgcgccgcatcggcagacggcaacccgctcatcggcccgcaccccacgggccagggagtctggctggcgatcgggcatgaagggctgggcgtcaccaccgcccccgcgaccgccgaactgctctgcgcccaaatcctgggcgaaaacccacccgttgcgccggatgcctggcttcccgcccggctgtacaagcaggaggccattgcatga

SEQ ID NO: 142086 - DNA, 942 bp, Enterobacter cloacae
atgacagcgcagcacagtgaactgagagtaattgactcccacaccggcggcgaacccacccgcctggttatcgacggttttccggatctgggaacaggcagcatggccgagcgccggacgcgcttcgcccgcgactacgacgactggcgcaaagccattattcttgagccgcgcggtaacgacgtgttggtcggagccctgctctgcgagccggtttcaccgcaggccaccgcgggggttatcttcttcaataacagcggttttctgaacatgtgcggacacggcaccatcgggcttatcgcttcgctggcctggctgggacgcattcagcccggcaaacacgtggttgaaacgccggtcggcgacgtgaccgctacactgcacgacgacggcagcgtttcggtagaaaacgttccggcttaccgctggcgcaagcaggtgcgggttgaaaccgctcacggcccggttatcggcgacatcgcctggggcggcaactggttttttctcgtcaacgatcatccctttgccgtcacgcctgcagctatccccgacctgacggcgtatgcctgggctatccgggatgggttagaacgtgccggcattcgcggtgaacatgacggcattatcgatcatatcgaactgtttgctgacgatgaccgtgcggacagccgcagctttgtcctgtgcccgggaaaagcctgggatcgctcgccctgcggcaccggcaccagcgccaagctggcctgcctggccggggacggcaagctcggggcgggggaaacctggcgccaggcgagcattatcggcagcgaatttacggccagtttcgtggcgcacggcgaccggatagtcccgacgatccgcggagaagcctgggtctgcggcgataaccggctgatccttaatcccgacgatccgttccgctgggggattgcgctgtga

SEQ ID NO: 142087 - DNA, 819 bp, Enterobacter cloacae
atgatgtcctgtgtgattgatgacgggctggctccatcgccggcgctggaagtggctgaactcagccagatctgtgaagggctggcgcgccagcgtccggacaatattcagacgttgctgcacgcgatgggcctgattgcgccgctgctcaacgccattcctgacgtggtcttttttgtcaaagacgtgcaggcccggtatctgatggtcaacatgacgctggcgcgtcgctgcgggtttaaaaccgttgtttctctgctggggaaaacctctgccgatgtgttcccgtccgcgctggggaaaggctataccgagcaggatatgcgggtgttgcgtgagggcgtgacgctgcgcgaccagctggagatgcatctttacaacggtcgcgagcgcggctggtgtttaacccagaagctggcgctgcgggatgcgcagggtcaggtgatcggcatggcgggaatttcacacgacctgcaggaagcgcaggcgcgtcacccggcctggcagcggctggcgatcgtcgacgagcatatccgcaaacattatcaccggccgatcgcgatggaggaacttaccgcgctgagcgggatgtcggtggcgcaaatcgaacgctactgtaagcgtatttttcatctcaccccgcgtcagatgatacacaaagtccggctggaaaaagccaccgagctgctggcgggtgatacgccgattaccgatattgccctgcagtgcggctataccgatcacagcgcctttagccgccagttcaaggccctgaccggctctacgccgcgtgattttcgcctcacgctggccgggtaa

SEQ ID NO: 142088 - DNA, 1608 bp, Enterobacter cloacae
atgactttatctctcactgtttcaggccagcagttcatcgccggacgccgcgtcgcaagcggtgaggcgacgctaccgagcctgcgtgccgctgacaaccagccgaccggataccgtttttacccggcctcccgcgaagaggccgcggcggcggcggtggcggccgagcaggcatttccgctctattcacagacgtcgcccgaggttcgcgcccgctttctcgataccctcgccgacgagctggatttactcggcgaggactttttcgcgatagcccaccaggagacggccctgccgctgccgcggctgcagggagagcgcggccgaacgagccatcagctgcgcatgtttgccggcctgctgcgccggggggatgctttcggcgtgcgtattgataccgcgctccccgcgcgtcagccgctgccgcgcccggatctgcgtcagtatttgaccgccctggggccggtggcgatattcggcgccagcaatttccctctggccttttctacggcaggcggggacacggcctccgcgctggcggcgggctgcccggtggtggtgaaagcgcatccgggccacatggcgacggcagagttaaccgcccgggcgatagcgcgtgcggtggagaaatctgcgctgcctgcgggcgtatttaacatgattttcggtaccgatattggcgccgagctggtccgtcacccggcgattcaggcggtcgggtttaccggctcgctgcgcggcggtaaggcgctctggcagattgcgcagcagcgtccacggccgatcccggtctttgcggaaatgtcggccattaatccgctgattattctaccccaggcgttagcctcccgggcggagacgctggcgaaggagctggtggcctccttcaccctcggctgcgggcagttttgcaccaagccggggctgattctggcgctgcgaggggaaggcttttcccgcttcactcaggcgctgaaggatgcggtgaacccggcgccggcgcagacaatgctcaatgccccgacccttgctcactacgaagaggacgtgcgcgcgcttgaggcgcatccggatattcagcggctggcaggggctgatgagtttatcagcggacgcgcgcaggctcgcctctatcaggccccggcttcgctgctgctggcgcaggatccgctgttgcagcacgaggtgtttggccccctggcggtgctggtggaggtggctgacgaggccgagctgcagtccatcctgcgcgcccttcagggccagctaacggctacggttcacgctgagtcggatgacgggccgctggcgcagcgcctgctgcctgcgctcagtgaaaaggcgggacgcgtgttgttcaacggttatccgaccggcgtagaagtgtgcgacgccatggtgcacggcggtccgtggcctgccaccaccgatgcacgcggcacctcggtcggaacccaatccatcgaacgtttcttacgcccggtgtgcctgcaaaacgtgcctgccgcactgctgccgcctgctgtccaggacgctaaccctctgaacctgctgcgcctgattaacgggcagtggacccgggaagccgtttccccctctgttgactga

SEQ ID NO: 142089 - DNA, 1011 bp, Enterobacter cloacae
atggagatggtaaatctctcgttaacagaggcttatgcgctggcgcatcaggtgctgcgcgagaacggattcagcgaggcgcatgccgccgcggtggcggaaaacgtgacgcacggcgagcgcgacggctgtgcctcgcacggtttgtggcggttgctcgggatcgttgagacgctgcgcaaaggcaaggtctcccccgacgcggagccggttatcacccataccgcccctgcgattgtgaaggcggatgccggcggggcgttttccctgctggcatttgaacgcgcgctgccgctgttgatggaaaaggcgcggcactgcggtatcgccgcgctggccatcaaccgctgcgtgcacttttcagcgctgtttgccgacgtcgagccgctgacgcaggccggtctggtggcgctggcgaccacgccaagccatgcgtgggttgccccggcgggaggcacccggccgctatttggtacgaatccgattgcctttggctggccgcggggcgacaagccgccgtttattttcgatatggccaccagcgcggccgcgcgcggtgagatccagctgcatcagcgggcgggaaaagcggtgccggaaggctggggcatcgattctcagggcgaaccgacgacagatgcccaggcgatccttgacggcgcgatgttgacgtttggcggacataagggctcggcgctggcggccatggtggaactgctcgccgggccgctgattggcgatatgacgagcgcggagtcgctgtcgtgggatgagggcgccggcggtttaccctacggcggcgagctgattctggcgctggatccggcccggctcctcggccatgacgcctctgagcacctggcgcgtgccgaaacgctttttaccgggatgcagcagcagggcgcgcgtttgccgggcgagcgtcgctatgtttctcgcgagcgcgctgtgcgggaaggtgtggagataacccgttcacttttcagggatatatcctctttgacgaaataa

SEQ ID NO: 142090 - DNA, 507 bp, Enterobacter cloacae
atgcacattcatattcgccccactgcccctagcgacgttaccgccctgcccgccattgagcgcgcggcggccggacgttttcgtgacgtcccggcactcgcctggcttgccgggggtgaggtcatttccgtagaacagcacctcgggtatgtcgaacgcgggctaagctggctggcagcggcgaacaatcgccccgtggggtttatcctcacagaagcgcacgcgtcgtcgctgtttattgtggagctctcggtcgatctggactggcagggaaaaggaattggccggcagctcatcgcccgtgcggctgaccatacccgtaaggcagggctggcgtcgctgacgctgacgacgttccgggacgtcgcgtggaacgcgccgttctatgcacggctggggtttgaatacgtcaccgatctcacgcctgaactgcgtcagaaaagagaagaagaggcagcgcacggcctggcgtatgaaacgcgctgcgccatgcgcctgcctctgtaa

SEQ ID NO: 142091 - DNA, 741 bp, Enterobacter cloacae
atgaaatacctgcttgctgacgccctcgtctacaacgacgaggacggttctgtttctcttatcaatgcgccggatgaggatgcgcagatcctcacctgcacggccaataccatcatgaagctgctggtgcagcatcatgggaacgtggtcgaacgagagacgcttcttcaggaggtctgggacaggcgcgggctgcaggggtcgaacaattcgctaaaccagtacatcagcatcttacgcaaattgctggcaagcctgcttcccgacgtgctgtttatcgtcaccgtacctaaaacgggctttatgctcagcgcagacgtcacggtcaccgcgctggaggagccgtgtccggcagccaaaacggcgacatccgtaaggcgcgttcgaccggacgtgctgttctgcggtgcgctcacgctggcgatcgttgcgctgtgcatctggataacggtaatcaagccggcaacccagcagcgggagatccacctgctgacccatattggcacgtgtccggtctacacctttacgccgctggcggacgtgttccatgagaaggcgattgggctggcgcagagtcttcagcaggatggccatcttccgtgcctgaaaaattctattttctacatgcacattcagagaacgcttttctacggccacgaagggcggctggtgctctcccaatgttccctcacgcggggtaaagccagcgcctgtcgtacgctttactattacgagtggtga

SEQ ID NO: 142092 - DNA, 936 bp, Enterobacter cloacae
atgttgctgctattgctgtccctgaagacgatggcggccgcctgctggataacctcgcctgccgtcatcaactttggcgctatcgcggcgggcaatgcggcctcgacccacgccgaggtcaaattcagctgccaggcggacaacctcggtacgacagagtatatcaatgtctgcctgagcagcatcgacgctccgccctttcagatggtctcgccgggggaccaggagggtaaacaatacaccctgatttttcgtattctcaacggcgtcgcgcgctcccaggagctgggtcccgccagccgcggggatcttatccagcagaccctgaccgccgacagcaatgccaatatcagcggcagctttccgcttatcgccaccctcccggcagggcaaagccagctcccggcgtaccactattacaactacaacatgaatctgcgcatagcgtggcacagcgcctcccgtcaggatgccctgcagaactgttcagacggctccgccgagggcgaacaggtgcagggcggaagcaacgcgcaggccgaaattcgcgagggatgttacatagagcacgtcaccccgcttaactttggcaccctgaccagcaccgccacgctgcgcccgacgcgctccacggccaccctcaccacgagctgcccggccggcaccgcgttcacgctcgcgatgggaaaaggcaatcatgccagcggcaaccagcggcagctgtgcaacgatgaaggccagtgcctgcgctacggcctctggcaggatgcggggaccacgcaacgctggggcgaccaaagcagcggcgatgcgatgcaggtcaccaaccccgcgggcgggacgcagaatttcaccgtctacggagacgtcccggcgcagcccctgagcggcacgggggaattcagcgatgacgtgataatcacgctgacttattaa

SEQ ID NO: 142093 - DNA, 2232 bp, Enterobacter cloacae
atgctgtcagcccgcactgaaggacccgccgacaccgtacaatggctggccatcaccgtgaatcacgccccgcgtggggatctgtgggcctgccgggtggtggaagatgcgctgtggattagcgacagcgacatcaaaaaactggggctccgtgccccggacgatcgcagcggctgggtagaactgacggccctgccgggcctgaaggttgatatcgacctgcttgcccagcaggtgtcgattacggccgaggcaaaggcgctcgagggacagcagcatctgacgctcgaaaaatcgcccccgcagtacgcctatcctgaggcccagcccatcagcgcgtttacgctcggctacgccctctacgccagcgatgcgcagggtaaacgccagctgaatgcccaaaccgagctgaccgcgtccggggtgctgcccgggacgctcagcagcagcttttcaagccatgccggggaggaaaacagtgccgcccggcccacccatacgcgtcttgaaacccgctggcagtgggacaataccgattcgctgaccaccctggcgctgggagacagcatcaccacgggcacgcgctggagccgccaggttcgctttggcggcctgcactgggcgcgtaattttgaactcgatccgcagctcaataccgaaccccgtagccgctacagcgacacggcggtcctgccttcaacggtcgatctttacatagacgggctcaggcagagcagccaacgcgtcacgccgggagcatttacgctggatactctgccggccttcaccggaagcgggcaggcgcaggtggtcattaccgacatcaacggccagcgtcgcaccgtacagctcgacgtgtacggcgcaccgggaatgctggccgaagggctcagcagcggctcgctggatatcggctggatgcggcaaaactacgcccagcgttccgacgactatgccgcatcgccaatgctcgacgccggctggcgctatggggtcaataaccacctgacgatggcgctgcatacggagcagcagcgcaagctgcgcaatctcggaacgggcgttgactggttgatatcccccggtgcaggcattgtcagccagcacgtcgcggcgagcgacagtccctacggtcaggggatgcagtggggccttggctggcagtggaacggcggcgggacgggcatttccgccagcaccgtgcgtaccgatgccgccttcgccgataatgcccgcatgagcggtgccgtgcccgtcaggcgcagcgatagcgtgtggctgagccattctttctcccatgtcggtacgccaggcgtaggctgggtacaacaagacattcagggcaacaaacaacgctacctcaatgcctcctggtccgttttgttaccggcgcatctcgccgccacgctgagctatacccgctcgtttacggacgcgtcgagcaacgttcagcttatgctctccctcccgctgggccgccaggacaccctctcgcttcaggccagccaggactcgccgcgcatggactatcgccatcagccggacgaccagaccggcggctggtcatggcagctggggcaaagcgttggtgaacgccgggaaaagtatgctgacgtgggctatctgggccacgccggagagtggcatgtggggctggagcaaggcgctaacgtgggcaatcggtatgcctcagccgaaggcagcctgacgctgctggataatagcctgcacgccctgcgctacagcgagcagggcctggcactggtctcaacgcgcggtatcgggcacgtgccggtgatgctggaaaaccgcccggcaggcgaaaccgacgaggaggggtatcttctgctgaccgacctgccgcgctaccacaacagcaaagtcaccatcaatccgctggatctgccttccgatgtgattgccccggtcaccgacatgtatgccagaccggataacggcagcgcggtaaaagtcgattttaacgtccatcacgctgtgacggttcaggccaggctgatcgacggccgcggcacgccgcttccgctgggcagcatcgtgtcaacgcctcacggcgccaccatcgtggggcgcgacgggtttatctggcttgaagacccgcccctgccgggtgaactggtggtgaaaaccggtcagggagaatgtcgggtgacgcttccggcgccccggaaggcatcatccgtactaaatattggagaacaactgtgccattaa

SEQ ID NO: 142094 - DNA, 738 bp, Enterobacter cloacae
atgctggcgctgctgtcgcgctacgcgctggccgccacgctgcaggtggcgcccgtcacgctcgatctgcaaagcggccaaagagcgacagcggtcaccctcaccaacagtggaaaagcggccattcacgcgcagatacgggtatacgaatggacccagaaaaacggtcaggatgtcttagccgccaccgatgaggtcgtcagcagcccggcgatgaccgcgctggcgccgggtcagcagcagctggtacgtatcatcgtcatgcagccgggcatcgatgaccgggagcaaagctaccggctggtcatcgatgagctgccggataccctttcccgcgcggccaatcccaacggcgtgcacttcctgctgcgctattcgattccggtattcattgccggaacccagaatgcccccgtcggccacgatgccctgagctgtgaacaggcggatagcccggcgacgatccgctgctataacgccggaaacagccatattcgcctgagccatcttgaggccctgacggccagtgggcaggttgcgggctcggttaaaggactggcgggctatgtactgccaggacagaccgctcttgtaaaacttaagcaagcgtcacgccatacgctcagcgcgttacgcgtctacctcaacgatgaccaccatgccagccagctacccctgcgcccgctcgctactcgcgctcctgctttggctaccgctgatgctgtcagcccgcactga

SEQ ID NO: 142095 - DNA, 543 bp, Enterobacter cloacae
atgacgcccttcattcctaatgctggctatcaggtcatcgttctgagcgacaatgcttttttatggcttggcctccattcgatgatttcggcggccgtgacgccccgtcctgaaatgtattggatcaacagcgttgatccgcacgggcttacccgcctgcaggaacggctgctcgacacgcccgccgcacagaactggctgatttttacggatgctgcctgggtcagcgacataaacgcctggctgcgcagtgagcgggtcagagtggtcgcggacaacctgtctcttgcgcagctgagccgctgctttagcgacacgacattttccttcgaaaacgccgccacgctctcgtatcaggagatgcgggtttgcatgctcttacataaaggattcagcccggttcgtatcgcaaaaattctcaataagtcacctaaaacgatctacacccacaagcgtaacgcgatgaacaaattttgctgtcacagcctggcggaattccatcgaaaactctgcctgctggacgctcagtcattctctttgtaa

SEQ ID NO: 142096 - DNA, 849 bp, Enterobacter cloacae
atgtcttggcaaggcgtaccattcaagcttcttgaagcaggcagtgttgaacagctttttttgaaactaacgtctcttcctaaaataactatcgacacgcctactgactacagtcaactctggttaacggttggagctactttccttggcggtatcattcctgcactaattgcctggagaacgtttcacgtaaatgcaaaaaatgtaagaaaagaaagagatgagcagcagcggttcttaaaatctgaaagggcaaagcaacagttgtttatgatgggagagcgtgcttctcaatttgcctcattgaaagaagaacgtgaaatacaaaaaatgctaacccaaaagacaattaatgcacaagttatttctgctaacaggcagaaatggattaatgattttcgtgataatattgctgagttttgtttgttaatgttcaatcactacgatgcccgttcaagctatctgattactgagcgcaagttgcgggtaataactgatatatataaaggcactaattactcagaggatttaagagctcgttatcaggatgcaagtgatgaatttgcaagttgcctggagagatctcaatcaactcacaatggaatggataaaatgaaattccttatactgctaagtttgaatcctaaagaaaaagaaactcacgaaattaaacgattgatggtgtttttaaagacttcaataaatagattggttattgatgaagcttcgggtggattggctaatgtaaccgaagtttatacagacttattaaacggttcagaagaattaatggaggtcgtgggggggattcttaagagagaatgggaaagagtgaagttatgtgaatag

SEQ ID NO: 142097 - DNA, 867 bp, Enterobacter cloacae
atgaacgatgcaaccaatacggcgtaccgcgagcgcttcacgatgatgtgcgactatatcgccctccatctcgatgaaccgctcacgctggagaagctcagcgcgttagcctgctgttcaccttatcattttcaccgccagtttctggcgttcagcggcctgccgctgtatcgctatatccagtggcttcgcctgcgtcgcgcttcatggcgactggcgtttaatccacaggataaggtgattgatattgcgctcgatgctggattccagagccctgaatcgttcagccgtgccttcagaaacgcgtttggaaaaagcccgcgtcagtttcggcagcagccggactggctaagctggcacgagcgcgtaccgaaaatgacctttcaggagcaaaaaacgatggaagttaagattgtcgattttccccaaacccgagtagcgatgctgcaacaccgtggcagtcccaatcgggttaatgacagcgcagcgaaatttatcgcctggcgtaaagccactggcttatcgccagtgcgcgaaagcagcacgtttggtatagcgtgggacgacccggcgactacgcctgaagaagcttttcgtttcgatatatgcggcagcgtttttgaagcgataccggaaaatacgttcggggttggcaacggtgtaattgatggggggcgttacgccgttgggcgtcattctggctcgctggataacatatccaccacggtatgggcgatgttccggaactggctgcccgcaagtggcgaaacgctgcgtgatgcgcctgtattcttccattacctcaattttattcacgaggtgccggaacatgcgctacaaacggatatctacctgccgttagattga

SEQ ID NO: 142098 - DNA, 663 bp, Enterobacter cloacae
atgaaaaaagtaattttggcttctttaattgcactggccagcgcttcagctttcgcagagcctaccgctgtattaaaagtacacggaacgttaactaactctgcctgctcaccttctattggtaatgggggcgttgtcgattacggttatatacgtcttggcgaattatccgccacctcgaataacaaactgggtcagaaacaggttccggtgaccattacctgtacggcgccaaccaaagtgggctttaccgttcttgataaccgcggcgacagcaatgcgcagctgcctgtggatattggtggtaacttaaaccagtcggcgaagtattatacctacggcgtgggcaccacgaccgaaggcgtgaaaattggtaactacggcatgtggatgacagacattatggcggatggcaatgcggtagattctgttgccaacaaccacgactggagctcagagatctggaaaaaaaccggtattccacgcagcgatgcgtttcagaccgttgcctttgctgcaacggggacaaccacaccgatggctatcacgacggctaactttaactttgtcaccaacctgacgattcgcgatacgtctacgctggctgttaccgacgataccgctctcgatggtcaggccaccatgacgctggtatatctctaa

SEQ ID NO: 142099 - DNA, 663 bp, Enterobacter cloacae
atgaaaaaagtcattctggctacggctatcgcacttagcaccacatcagctttcgcagtccaaacggccgtaatgcaagttaaaggaacattaaccaacgcggcctgtacggctgaactgggtaacggtggcgttgtggattacggttatattcgcctcggtgagttatctgatacttcaaataataaacttggtcaaaaacagatcccggtgaccattaactgcaccatgccaaccaaggtcggtttcaccgtcaccgataaccgtggtgacagcaatgcacagctgccagtggatattggcggcaacctgaatcagacggctaaatattacacttatggtgttggcctgacgaatgaagggaaaaaaattggtaactacggcatgtggatgacgggtaccaccgctgacggcaagtcggttgacagtattgcgcagaaccacgactggtccgcgacctcatggaaaaaaaccggcatcccacgcagcgatggattccagaccgtcgcctttgctgaaaccggcaccaccaccccaatggccatcacgacggctagctttaacttcgtgactaacctggtgatttgggatacttccaccctggccattaccgacgataccgcgctggatggtcagaacaccatgacgctggtttatctgtaa

SEQ ID NO: 142100 - DNA, 792 bp, Enterobacter cloacae
atgacgctggcactttttccttctctgcccgagtcgacgctgaatgccgtcaacaccgtaggcacgtggcttgcgcaggacgatcgtcatcatcagactgttgatgccgtgatccttgcagggaatgcggtcatccctgcaattgaggccgcctgtcagatagcggccgaacaggccgtcccgctgctgataagcggaggaattgggcactccacccccttcctgtatgccgccgtcgcgcaacacccgcgctataacgcgctgcctactacaggacgggccgaggcggcgatccttgcggacatcgcgcggcagttctgggcgatcccggcagacaaaatatggatagaagatcggtcaaccaactgtggtgaaaatgcgcgtttcagttgggcgatgctgaggcatcacgggctgaacgccgggcgcgtgctggtggtgcaggacccgaccatgcagcgccgcacgatggcaacgtttgcccgcgagtgccgggatgaagccgtttcgccggaatggattagtcatcccggcgtgacgcctgtgctgcaaaacagtgaagacgggctggcgtttaccggcgataacgaagggctctggacggtagaacgctatttaacgctggtgctgggggagctgccgcggctgcgtgacgacgctaacggttacggtccggcggggcgtgattttattgcgcacgtgacgtttcctgaggaggttgacgcggcatggcatatcttacgtcacgacgccacgttgactgatgccctcgcgagccgctcattgctgtga

SEQ ID NO: 142101 - DNA, 1788 bp, Enterobacter cloacae
atgggacatccttccgtctttcccaccggcgcaacgctgtacgatccggcgcgcgcctggagcggctatacgctttttcaggccactgaacacggtgccgtactggtggacatgaacggcacggtagtgcgggaatggccggagctgcacggctttccgaacaagatcttgcccggtggggctatcctcgggcacagcggcgaacgcgacccgcgctacggaatgcaggacatgcttgacctgattcaggtggactgggaggggaacgtcacctggaaatttgaccgctacgaaaagatcggcgacccgggccacgagccgcgctggatggcgagggcgcatcatgactatcagcgcgctggcaatccggttggctattatgcgccggggctggagccgcaggtcgatgggggcaatacgctgatcctcgcccataccaacctggttaacgaggcaatttcagacaaggtcctgctggatgacaccatcatcgaagttgactggcagggtaacgtggtgtgggagtggcgctgcagcgatcattttgaggagctgggcttcgacgatgcggcgcgcaccgcgctttacaataaccccaacatgcgcgccagcggcggcggaatgggcgactggatgcatatcaactcgatgtcggcgctcgggccgaacagatggtatgacgcaggagatgaacgcttccatcccgacaacattatctgggatgcacgagagtcgaacatcatcgccattattgataagcgtagcggacgcatcgtctggcagctggggcccgattacagcaagccggagcttaaacacatcggctggattatcggccagcatcacgcccatatgatcccccatgggctgcccggggcgggtaatatcctgatctttgacaacggcggctgggccgggtacggcgcgccaaacccggcctcggcggacggcgtgaaaaacgcctggcgagattattcgcggattctggaaatcaaccccgtcacgctggacatcgagtggcgctactcgccgtacgaggcaagcttgccccagccgaccgattcctaccgattctacagcccttacatcagcaatatgcagcgcctggagaacggcaataccttgattaacgaaggatcaaacggacggatcttcgaggtgacgcgcgatcatgaaattgtctgggagtatatctctccctggtggggaaaaacgctgaacaacaatatggtgtaccgcgcgtaccgcattccctacgcctggatcccgcagctgagccagccggttgagacgctgattgagccggtggacgtgcgagcgctgcgacagccgggtgcggctgctgcgggcccggcgcaaagcgtggttcgggtcgccggggtacagccctacagtaaaggtgccgatgcgctgtgcgtcgcgacggataacgatacgcttctccgcagtccgaaactgttccgcgtggcggagagccggttcaggccggttcaggatgaaagcgagctggaacaggaggggactgtgctgctgtttgtcggcgcagaacgctgcgtacactgccgaaaactctggcatattctggctcaggagacggtcatcccgctgaccgaccggcttgatacgcgctatcttgacgctgacctgaacccggcgctggccgcccgcctcggcgtacgcggcctgcctgcgctgctggcgctcaggggcgggaatgagatatcgcgggcgccagcgcatctgtcttcagaaagcgtgcacggctggctgagagatctttttgcatga

SEQ ID NO: 142102 - DNA, 744 bp, Enterobacter cloacae
atgaccgctcaaactctggtctcatttcaacatgtgcgtaaaacctggcagcaggtcacggcgctgcaaaattttagtctcgacatcgctgccggtgaactggtggtgctggtgggcagcagcggctgcggtaagtcgacgcttctgcgcatgctggtcggacttgaagaggtgacgcagggagaaatccgcatcagcggcgagctggtcaccggcgtgggcaaagagcgcggcatcgtgttccaggaaccccggctgttcccctggctgagtgttatcgacaacgtcatgctggggctggcggatgaaaaactgagccgtgccgccaaatgccagcgcgcgcgggagatgctggcgcgggtgcagctcaccgagttcgagggcgcgctacccgcgcagctttccggcgggatggcccagcgcgtcgccattgctcgcggcctggttgcccgcccacaaattctgatgctggacgagccgttcggtgcgctcgacgccctgacgcgccacaccctgcagcaggagctgttgcacatccaccagagtgaaggcaccaccacgctgctggtcactcacgacgttgaggaggcggtagcgctggcggacaggatcgtggtgctttccccgcgccccggacgcatacgcgacgtgattagcctggcgctgcctcatcctcgccagcgtgacgatgccgccttcgcggcagcctgtcgccagatacgaaacctgattacctcatcctga

SEQ ID NO: 142103 - DNA, 1569 bp, Enterobacter cloacae
atgtcgcagataattttaaaaacgggctcatccggaaggcagaaaatacgacttaacggctggccgtggatattgcccgcgctactgctgctgctgtggttcatcgccgtagagcgccactggatgccggaacaaattttacccgcgccttcggtggtcgccgacacggcgctctcgctcctggccggagaccttctctcccagtgggcgtttagcctgcagcatctgctgctgggcctgctggcaggcgcgttcgccggcacgctgttaggcgcgctgttcggcctggttcccggtgcggcgcgtcgcgtggagccgctgttttacgcgctggcgcaaatcccgaccctggggtggatcccgctgtttatggtgctgttcgggatcgataacggcctgaagctggcggtaatcatcaaaaccaccatcgtgccgatgacgatcaacacgcagcaggcggtaaccagcgtgccccataccctgagcgaggccgccagggtgatgaatttttcccgctggcagcgtcttcgctggctggtgatccccgcgagcctgccgggctggttcactggcctgcagctggcgctctctcaggcctgggtgtcgctgatcgttgttgaactgctcgcctcgtcggagggcattggctacctgatggtctgggggcgtcagctttttcagctggatatcgttttcgtcaccattgcggtggtgggcttcagcggcatgctgatggagtgggcggcgaatcgggccttttcccgactggtgttctggccccagcccgccgtcggacgtcttgcctggaaaccgcaggccagctggcaggcgctgcagctgccggttctgctgctggcgctatggcagctggctagccgatggggatggattgacggggcgctgttctcttcgccgctgacggtcgccgggcgctttatgcagggcgcggcaagcggggagctggcgacggcgatactggcaagcctcgggcgcgcctttacgggcggggcggcgggtattgccggtggcctgctctgcggattactgctggcgctgcggccgcgcgccggcgagatcgtcaccccaacgctcaacgtgctgcgccatattgccctttttgcgtggctaccgctgctgaccgcgtgggtgggcaacgataacgtcggtaaaatcgtctttatcgccctggcctcgttctttccgatgttctttagcacccttcaggccgtgcagcagcgtaacccgcagctggacgaagtggcgcgcgtgctgcgtttaggcggcctgacgcgcctgcggatgctgatccttcccggcgcggcacccggtattttcgccgggctgcggctggcgatgatctacgcctggcttggcaacattggcgcggaatacttcatgtcctcgggcgccgggatcggcagcctgatgattaacgcccagcagctgctggatatgcccaccattctctgcggcatggtgctggtcggtctcaccggcgcagcgctggataaagccggacgtttactggaacttcgcgccacccgctggcgccaacaggagccatcatga

SEQ ID NO: 142104 - DNA, 1059 bp, Enterobacter cloacae
atgatgaaagcattttttagtcgcgctctgctgccgctggtggccgccttcgccctgacggggaacgccagcgccgaagcgctgcacgccattcgcatcggcgttccggatcaaagtgcgggcagtaagccctttattgaaggcccggtcggcatggcgtacatccgccaccagcttgaggcagtgttcaaacctcagggcgtagaaatccagtggcagttctttaagggtgcgggtccggcggtgaatgaagcgctggcaaaccaacagcttgattttgtctaccttggcgatctggcagccatcatcggcaaagcgaacggccttcccacgcgcctgctgctgggcagccgcgggtcggagtcttacctggcggtcacccgcgcctcgggtattaaaacgctggcggatttaaagggtaaacgggtcgcggtctatcgcggtacggcggaccagctggcgttcgaccgcgccctgcaaaccgccgggctcacggaaagaaacctgcaggtcattaatctcgactggaatgccggaaaagcggcgctggcggcgggccgcgtggatgccgtctggggcggcgtgtctcttctggcgttgcggggcgataagatcgacgtggtggtaaagagcggcgattccggtcgtcagaacaccacgcagtcggggttcctggggacacaaacctttattgacgcctggccgcaggcgacgcagcagattatcgacgtgctggtgaagaacgcggcagaaatcagcgatccgaacaaccgtgaagcctggtcggcagaaatggcacagcaaagccaaatcccccaggcgctcttcctggaagagctccgccccgacgaccttaactttaccacctcaccgcgcatcgacccgttcctgacggacagcgtcagccacagcgttgaacaggcgcaggcgtctcgcctgatccgcagcgcgtttgatgcccgagcgtgggccgagggaaaattcgtcgaacaggcgctcatcgcgctgaagctggaagcccgctggccgcagtacgatgccgaaggacaaccgcgctaa

SEQ ID NO: 142105 - DNA, 942 bp, Enterobacter cloacae
atgcaccttgattttcgccaacttcgcaactttgtcgcgctggttgaatacggcagttttaaccgggcggcggaggcggtttgcctctcgcagtccgcatttagccgaagcattcaggcgctggagcagagcgtggggcatcctttattcgatcgccagagcaagctgcccaccctgacgctgcacggacaaacgctgcttccttacgctcgccgctttcaggccctgaacgttgagctaagcagccagatgcgcgaggcggaggaggcgcttaccggcgaagtgatgttcggctgcggcccggcaccgtcggcgcggctgatccccgccgcggtgggggcattccaccgcagcatgccacaggcgaaggtaaggtttcaggttgataactggtttgccctccatcaggcgctgaccactcgccactatccgttcgtcgtcgccgacagctggcaggccgaactcgatccccagcttcgcgttcagccgctgagcccgcagcgctgcttctttatctgccacgccgatcacccgctggcgaaggagggacccgtctccgtccagaccatgctccgctatccgtttgccgcaccctatttgccgcccggcgtgcgcaaagtgctggcaaccctgagcgagcagcaggatttttcgccggcaattcagtgtgaccacatttatgcgctgctttctacgctggcccatacgcacgccgtcagcttcgccagcgaggacggctttgcgctgtgccagcagagccaccgcctggtcaagctggagctcagcgatctgccggaagagtggcgcctgatgcagacccggtttgggattatctccccggttcatgcaactcagccgccgctggtcgagaagatgatcgacattattctccacgttgaccgccagcacgcgcttcagctgctggcgcaggaggaggtttag

SEQ ID NO: 142106 - DNA, 525 bp, Enterobacter cloacae
atgagagctgtggttctgctgctttgtttaacgatcgtcatgcccgcggcccaggcggccgactggctcgcctggcgcaaggtgggggacgccacgctgacctggggaccgttcaccgtctatacctctcagctgcttacccccgacgggcgttacggccaggggaacccgaatcaggcgctgattattacctacgcccgcgacatcgatcgcgatgagctggtccaggcgacgcgcgaccagtggcaggcgcaggggatcctggcgcaggaaccacaaagcgaagcctggctgcggatgctccagtcgctgtggccggatgtccggccgggctcgcagctggcctttgtcctcaatgacgggcaggggcagttctggtatcgcgagccggccacccggaaaacgtttattccactgggcccgcgccagtcggaggcgttcagcacccgctttctggccatttggctcgatccccgcacgcaatatcctgagctgcgtcagcagttaatcggaggccaaaaatga

SEQ ID NO: 142107 - DNA, 513 bp, Enterobacter cloacae
atgacgtttcgtattcgacaggccaccgtggcggattcaacgcttttaagcgagctgggataccgcatctatcccgcccattttcagcatctgtgggtatcagacgcagagatgaaggactttctggacgccgagtatgccccttccgtaattgagcggagcctggcagagagccacgtttcctggtttgtagctgaaaccgaccgccccatggggttcatgaaagtgacctgggaggccctggttccagaaacggacaagcagggcgtgctcctcaacaagctctacctcgatcctgctgaaaccggcaagaactatgggcaggtcatgttcagcgaaatcatcgacatggcccgaagcaaggggaaaacctatttctggctggaggtgcttgagcagaacgcgggtgcgtaccgcttctaccaaaagcagggcatgctctgcctgaaggacgtcgttttcgaaaccgcttctcagcagagcattctcagaattatggggatgcctctttag

SEQ ID NO: 142108 - DNA, 582 bp, Enterobacter cloacae
gtgaatacacccgtcatgagtaacgataaaaaaatcagcgtcagggataaaatattacatacggcgcacgatctgttttattccacgggtttcaaagccacgggggtagatacgctgattagagagtcgaaagtgacgaaggtgacgttttatcgccattttccgagtaaaagtttacttattcttgcctatttacagtaccggcatgaaatatggattaactggtttgaaactacgctgcgtcgacatctcgaagcaggcctgacagcgtctgatgcattatccgcaacgcttcacgaatggtttgtttcgcccgagtttcacggctgcgcgtttattaacgccagcgcagaggcaaaatctgaagatattgaaagcgaaattaaagagatttgccgcaaccataaaatagaaacaaagaaaatcattgcgttgctgacgaaaaccgctgacgagggcgtcgttagcgagatcatgctgctgattgacggcgcaattattcatgcgcaaatgggcgtgaatacagctgatgtcatcaaaccattgaagaaggcattatcagggttaacaggggaaaaatga

SEQ ID NO: 142109 - DNA, 438 bp, Enterobacter cloacae
atgtgcgtacgttcagccagtattgatgactatgaggcgctttgcgccatcgactcagttgccgcagagagcatggcgcgacgtgaccaaattcgttactggctcgggtcggcgtgctgttgtgttgcagaggtaaataatcgggtggtcgcttacggcgtattaacgcgccatttctttgaccagccttttattgagatggtgatggtaggcgtagaatatcgtaaccaggggttaggcacagcaattgttagacatttcgagtcagctttcaccgactcgaaattgttcgggtccgccaacatgtcgaacaggcagatgcaggagttgtttgtcaggttgggcttcagaccaagcggttacatagacaaccttgatgaaggtgaccctgaaatcattttctaccgccctgccacctgcactcgtagtgctaaatga

SEQ ID NO: 142110 - DNA, 546 bp, Enterobacter cloacae
atggtttcatctgacaatgctctcttagttatcgacatgcagcagggactgttcaatgacccggtttccccctgttccgccgatgccgttctggcaaatatccgtttgttaatagccaaagcgcgtcacgcgcaggtgcccgtcttttttgcccgccataccgggcctgataactctccgttttcagagaagagtccgttaacaagcctgctacccgaactggaggtgaagcgtgaggtggatgttgttttcacaaagcgctatcccagctgttttcgggataccgtattgcagcgtgaacttaatcagagaggcatcaaacagctggtcattgccgggatgaagacagagttttgtgtcgataccacttgtcggattgcaccggaactgggtttcaggacggtattgatttcagatgcacataccacaattgataatgaatatttatctgccaatgacatcattactcatcacaacagcacgctggcaggcccattcgtgacgctgtcgactgccagtgactggcattttaatacggtcagttga

SEQ ID NO: 142111 - DNA, 786 bp, Enterobacter cloacae
atgtctaccgggaacttatccagaatgggcgaagcagaggttcgcctttttgcgaatcaacagggcaagcagataatagaaaaatgccctgttagtgatgttgaatactgcttttatgagcgcgtggcggaaccccttcgcggcgttgttgaatctcctcgactgctgcacgccgatccacaccgacgcagtctgtggctggaatacgttcctcacaaggtttcccaggaggaggtcgctggtgatgaaatcttgagacgactttctgctcttcacaattattctgccgatcctgcatggatttatcatacccacggctggtctgcttcagcgcttgaaaaagccctgtctcttttaaaattgccgaaccgcgctgcccggcagatgcggtgttttcaacaggcaggcagcgttttgttcagccaggaatgtttaatatcaggggataccaatgccggtaactggggcaaaagagaaaacggcgatgtggtcctttttgactgggaaaggttcggtacgggtagtccggctatcgaccttgccccgctggtaaaagggttgggcacaggacaaagcattttacagcttgctgaacgctactgtttttttgccgggcacttagttgcagacaggttagccagagaaatcacaatcgccaaagcctggattgtcacggaagtcgtattattgctgaacgaaaggaaaaagcctgatttgaatctctaccttaagtggtacagagaatatcttcccggctggctggatgagtccgtctcaattctttga

SEQ ID NO: 142112 - DNA, 471 bp, Enterobacter cloacae
atgacactcgatgttttattccgtgtgacgaaaattatcgcggcacataaaaacagtaccggtgaaagtttacatgaaataataaagattctttcagcagaaaaagagagctcagaagcactgtcaccctttatccatcggctgcatctgctctctttcgctcagggcaatccaggcaacgccgaggagctgctggcagcgcatttaccaaaagatgacgggctcctcccgctgcttgacttcgcggactggccccgggtgcgttacgccgcgtcgggcgaagtgcagacgccagaatcagaggagtatttccgtaaaatgacctcggctgctaatctgttacgttcagcgctgatcgatgccgaacgcgccaagggaacgcctgcgctgtatattctcgataaattactcaacctgaatagcgccctgccggaaagatatagaaaaatggcaaacattccctacgcgtaa

SEQ ID NO: 142113 - DNA, 534 bp, Enterobacter cloacae
atgaaagaccatgtagacttcgtcgtcgaccagtggagccgcgccatgcctgaactggacgcctcgtcgatgaaaatctttggccgaatgctcaggctaatgaagcatctggggaaaaaacgcgcgcaggccatggcgccgtttggctttcgcgagggcgaatttgacgtactcgccacgctgcgtcgcgccggagagccgtactgtctttcgcccacgcagctgtataaatcgctgctgatcacctccggggcgatgacgaaccggctcacgcacctcgaacaacaggggcttatccggcgagttgccgatcccgatgacaagcgcagcaccctcgtaagcctgacgtccctcgggctggagcgtatcgaacaggcgctgctcgttcatacccaaacgcaaaatgcgctgctgagaaacttatctgacgcacagcgctcgcagcttgagtccctgctcagggagttactgctggcgttcccgcccgaggacgaggtggatacgtcgccgggtaccgataaaaccacagcatga

SEQ ID NO: 142114 - DNA, 321 bp, Enterobacter cloacae
atgtcgctttatgaccttaagactgaagcagatgcattaaatgaggcctggcgctctcatgtactaggccgcgttggggaaacaaatctcaaaattctgcgaatggatgagcgctcggtcactgaagaggtgcatgagtacgacgagggattactggtcattgacggtcgtctggaactgagtgttaacggcaaaaaaatctctgtaagctcgggcgagctttatatagccaaagcgggcgtgcctcatacggtggaaatcggcagctttggcacactggttatcatcgatttacccgaaaccgaaatttcagactgctga

SEQ ID NO: 142115 - DNA, 381 bp, Enterobacter cloacae
atgtcattgttttctgaatgccaagcggcgttgagtggcgattttgaaattatcgaaggagaaaggctttgcgttgcgatagatacttttcatcgctatccctttcataacggagggctattgtggtcgcaaatggattttactgattttgaactcgtggatgaaaggttgtatgaactggcatttggccatgaagatgtttatgtaatagcggatgatgcatatgttcctgtatttaaaagtaattttagattaattctagataacatctatgatgtaatggcgctttcaccaaagttatttatattcaacaataaaataatgatgcaaccattgtttcctcattatacaattcgtgttggctgcatgcgtgaagaataa

SEQ ID NO: 142116 - DNA, 387 bp, Enterobacter cloacae
atgacctatatgcatgtaatgcagccatgcaaaaaagaagggtgtggtattgccgtaatggcccgtttactgcaaaagagttatgaggaaacgttaacaattgcgatgggaaatggtttctgcgataaatataagcgtgtcaatcttgcgcaaatgaaaagatttttgctgtatatcgggttagagaacgtttcgtttagaagacacgctgggactagcgaacctacaatcgatggtatatttcatgggcgctggaataatgttaaaaatggagtgcgccactggattgcttgccacgacggtgtgtattacgatcctttattgcctcatcccgtacctcatttaccagaacggtttcatgtgacgcaaatttttaatcatccttga

SEQ ID NO: 142117 - DNA, 387 bp, Enterobacter cloacae
atgaaaaaatttttacttcttgtccctctgatatttactgcgccagcagaagcttctgaagtcacggttggtgagatttgcaaggctgcttcagcggcaatgtttggccgcgaccataagatcatgcagctggataaggttgaatccggcattgcttatgtacattacatcagacaaaacgatggtacccgttgggcaatcaaatgcaaactcattggcgatcaggttatgtgggcttcagataatcctgagagtaccggtcgctggagggatgatccggcggacagtacggtaagatattctatcgagggtaaaaaagtcattatcacagagatttatagcgatggatccagtgtctctaattcttattcattgaaacaattatag

SEQ ID NO: 142118 - DNA, 621 bp, Enterobacter cloacae
atgtctgtaaccgattcacttctcgctttctccttcgctgcactcttgctcaccctcaccccgggcctggacacggctctcattcttcggacagcctgtgctgaagggggaaaaaaagcgtttcaggctgcacttggcattgatgctggctgttttatatggggagcgctggttgcgctgggtctgggtgctctgctggcggtttcagaactggcttacacggtgctgaaagtttgtggtgccgcctacctaagctggctgggcttacagctgctgatacgcccccggtcgtccttcagtcacagcgatagcaatgccgcttctcaaggaaactggtttatcagagggatgcttgggaatgtgcttaatcccaaaatgggtattttctatgtctcttttttgcctcagtttatacctgccggacattccccttttctgtggacgtttttcctcgtcggcatccacgtaacaatcgggacgatgtggtcagccacgctcatcttatccacgcattttgcgtcggcgatgttgaaaaaaaggcgcgttgtcaccgctatggacagagtgacaggaggtttgtttttatgcttcgcggctaaacttgctctgggttcgaaataa

SEQ ID NO: 142119 - DNA, 2823 bp, Enterobacter cloacae
ttgcctgcagaaatacaggcgctaataccggcaatggcaaatgcgaactttagcaaaaataccaccgatcctaactatgtctatcagtacagcccgggtaatatcccgatctacggagatgggatcacgctcgaagggccaggggcggaagccttcgagcattccattaccgttattcagaactccacgtccggcagcccgggcgtaatatttggtgacgatctgactattcgcacccagtcaaaagtggccgccaataatggtaaagatgtcgacggcattcgtacccatggtatgaacacgccggacaatccggtgtttatcattaccggcgatcgcacacacatctacgtcaatggccaaagcggcgacggcattaatgccgggtatagctccttcagccagggctctctcggctccgccaatatttatgtgggcgacgatctctacatcgaaaccaccggcagcaccggtcgcgggattagcgcctatgcactaaatgacgcatcgaaggccaaaaataacgttatcgtcggcgatcgtgcgcatattgttacgcggggcacctacgccgaggggatccgcaccaaccagagcggctcttatgtccgtctgggtgatgaggcaaccattgaaacgttcggcgcatcggcctacggcctgtatgcgggttctgcgtcaaaaattgagctaggaaaaaacgcggccattattactgaccagaatagcgcctccgggatctattcaaccggctcatcgaccatcaaccttgatgagggcgccagcatcaccaccaacggcgccagcgcgcatggtgtctatgcctacacaggtgcggtaaaccttggtgataacgccactattgcggtaaacagcagcgctaaaacaagcagctccgcgcaggcaccgcacgggctctacgcctggtcacgcggcgtgataacgctggcgggtggcgcaaccattaccaccgctggccagcgcgacagcggcagctatgccctgaacgcaggtaatggcggggttattgatgcatccgccggcggtaaattcatcctcaacggcgatattctctccgcgggcggcatcgcggccaccagcacgctgccggcacaaaacagcaccattacgctgacaatgaatgacaattcattgtggaacggggcgtccttcattgagagcaatgccgcaggcagcggtgccatcgcacttacgatgaatgatgccgtatggaatatgcgcgacagctccacgctgaccagcctgacgctgaacgcgggcggcacgattaatttccagcatcccgaagatgcagcgtggcaaaccctgaccatcaacgatgattacatcggtaacggcggcaagctggttttcaataccgtgctgtttgacgatacctctgaaacggacaagctgatcgtcgaagggaatacttccggccataccggtgtggaagtgaacaacattggcggtaccggcgcacaaaccatagaaggaatcgaaattgtcagcgttggcggcaactctgacgggacgtttgcaaagaccagccgtatcgtggcggggggttatgactataacgttgtgcaaaaaggtaaaaactggttcctgaccagcctggctgagcccgttgacccaccggacgaccctgttgacccaccagttgaccctgttgacccgccagttgacccggtagacccaccggttgacccggtaattccaccggtcgatcccattgacccaccggttgacccggtaattccaccagtcgaccccgtagacccaccggttgacccggttgttccaccgcaggaaccgttaccgccggctgcgccaccgaaaagcgagcatcagtatcgtccggaatttggcagctatcaggcgaacagctatgcggcaaatacgctgtttatgacccgcctgcacgatcgtctgggtgaaacgcagtacaccgacatcctcacgggtgagcaaaaagtaacaagcctgtggatgcgtaacgtcggcggccatacgcggtttaaagacggcagcggccagttaaagaccacagccaatcgctacgtgctccagatagggggagatgtggcgcaatggagttccgacggtctggatcgctggcatcttggcctgatggccggttatggcaacagccagagtcggagcgtttccagcctgaccggataccactcgcgtggcgaagttaatggctatagcgtaggcctgtacggtacctggtacgcaaacgaagcggataaaagcggtacctacgttgatagctggatgctctataactggttcgataacaaggtcatggggcaggatcaggccactgagagctatcgctcaagtggggtaaccgcctctgtcgaagcgggatatagcttcaaggtgggcgaaagcggtcgcaacagctactggctccagccaaaagcgcagttggtgtggatggacgtgcaggctgacgaccatcgcgaacgcaacggcacgcgggtgaaagacgaaacccagggaaacctgatgacccgtctcggcgtgaaggcctacatcagcgggcataacgcgattgacgacggtaaatcccgtaccttccagccgttcatcgaggcgaactggatccacaatactcagaccacgcgcatccgcatggatgacgtcagcaacgagatgcgcggtacgcgcaacatcggtgagcttaaaacgggtgtggagggtcagattacgccgcagcttagcgtctggggcaacgtggcccagcaggtcggcgataaaggcttcagcgatacgcagggaatgctgggggtgaaatacagcttcaaataa

SEQ ID NO: 142120 - DNA, 618 bp, Enterobacter cloacae
atgatatcatcgtcacaaaatgttgtccgctgtataagctgtgaattgtcctgtcagttatttccagataacgcagtacgatcacaatactgtgacaacgcctcgtttgccgtttggccggttggtaatcattttttagaaatagcagtacaagataagatattgcgaagaaacaataatcacttatcacgcgggtttatttttgtagatttttcgatatacaacctgcgtgtgcttgcagatccgcaatggattgaacgtctggcgataactaacatgaacattgttattattacggaccgaaaaatggaggcactggctaattactttatcgcacaatacagtgaaataaagggaattgtatattttgacgataatgacgttaaattacaggaaaagataaactatcttttttccggtagacgtgtagacaacaggcgaagaagtaccttgaatgctgtcgaattcatgttgcttaaccgatttatgtcaggcgagtgccttcaggagataataaaaacaaacagcattaatgtgaaacaaatttatgttcataaagttcgactagagaggaaattagggaccagtattcataaacttctcgtttctattttgtaa

SEQ ID NO: 142121 - DNA, 918 bp, Enterobacter cloacae
atggctctggaaaacgggatcgcgcagttagttaaggactttattgatgcaggaaagccctcttcgcgtgaccagaatattgatgtccgaagaaaagggtatattgccagtacggtacttgccgggaaaaaagaagctcgcgtccaggttgaaacgcgcgtcattgatgatctcacctttcagatttattcgcctctcaatgccaccgaaacgttacccggtgccctctattatcacggcggatgctttgtcagcggagggtttgaaacccatgataaccagctccgccagctggcgttttacggtaactgccgggtcatagcggttcagtacagactggcacccgagcatacgttccctgctgcgcatgacgacgcagaacgagcggcagcgcttgtctggcaaaatgcagcagtatttggcgtgaacaaaaaccgcatcaccctttgcggagacagcgcaggggggcatctggcgctggtgacggctctgcgcattaaggccaaaggcctctggaacccggcccagctcattcttatctaccccatgctcgacgctacagccagttttgaaagctatacccttaatggccaggattacgtaattactcgcgataccctgctcagcggatatgaaatgtatctcgcagacaccgaccgtcagcatcccgaagccagcccgctgtggcggaatgattttaacggtcttccgccggtgcacattattaccgccgagtacgatccgctctgcgatgagggagaaatgttgtaccagtatctggcagagcaggaggtgaggtgtaccgctcagcgatggctgggggtcatacatggttttttccagcttggtggaattagccagtcagcgcgagatgtgatgcgggacatcgcctggcggataagctccgcccggcgataa

SEQ ID NO: 142122 - DNA, 876 bp, Enterobacter cloacae
atgacattatccgccgcacagcgcatcagctgtgacgtggttgaaacgcgcgtcgacgtggcgcgtattttcaacatccagcgctactcattgaacgacggacgcggcatccgcacggtggttttttttaaaggctgccctcaccgctgtccatggtgcgcgaatccagagtcgatttcgccgaaaatcgagacggtgcgactggagagtaaatgcctgcgctgtgctccctgcctgcgggatgctgaggagtgtccttccggcgcgttcgagcacattgggcgcgatgtgacgctggacgcgctggaaaacgaggtaatgaaagacgatatcttctttcgttcctcgggaggcggggtgacgctttccggcggggaagtattgctgcaggcaccttttgcgacacggtttttacagaggatgcgtcgttacggcgtgcatacggccatcgaaacggcaggcgatgcgcctttgtcccgattaatgccgctggctcgccagtgcgatgaagtgctgtttgatttgaagatcatggacgcggagcaggcgcactcgcgggtgggaatgaacctgcccagagtgttgcataattttatacagctggtggcagaggggataaacgtgatccctcgcgtgccgcttattccgggctatacgctcaacgaagcgaacatggcgcgcgtgctggcgtttctgctaccttcgggaatacggcagctgcatttactgccgttccatcagtttggagagccgaaataccgcctgctggggcagaagtgggatatgcggcaggtggctccgccgacggaagaagaggtgtcagctattcgcctgatggcggaacgtgaaggatttcagatcaccgtaggaggttga

SEQ ID NO: 142123 - DNA, 357 bp, Enterobacter cloacae
atgacagtgctaacggggcgtcatctggtggcggtgaccgcgtgcgtcagcggcgtcgcacatacctatatggccgccgaacggctggagaaaatttgccagcaggagaaatgcagtgttttcattgaaacgcagggcgcactgggcgttgagaatgcgctaacggatgacgttattcgccgcgccgatgtggtattgctgatcgcggatatcgaactggcggaaagcgaacgctttgaaaacgcacgctacgtgaagtgcggaattaatgcttttttacgcgatccgcagaaggtgatgggcgcagtacgaaaattgctatccgctccgcagcatactcaggtcattctggactag

SEQ ID NO: 142124 - DNA, 1011 bp, Enterobacter cloacae
gtgaagcgttatgccagcggcctggttgtgggcaaattcgcacctttgcattcaggtcatgaagcgcttatcaatgcggctcttgagcagtgcgagacggtctttgtcattagctattcggtgccggaaatacgcggttacgagcccgaaaaacggcttcactggctacagacgcgcttcccgcaatgccgacttcttgtgctttctccgcaggtgatggcgtcttacgatattgcgccgcccccaccgaacgacgctgacgccgatctgcatcgtcattacgttgccacgctgtgcgaagacgttctgcaatgtcagccacgggcggtatttaccgccgaagactacggtgacggctttgccgcggtattgagccagcgtttcgggcagccggttacacacatacgtcttcagcggccacaggggccggaagccccgtcgggaacgcgcatacgctctgatgttcaccgctaccgtcagatgatgtccccggaggtttatcgcagctttgtatttcgtatctgcttattaggcggcgaatcgacgggcaaaagcacgctttcccgggccctctcgcagaccttaaacgttccgtacgttgcagagtttggccgtgaacactgggaggcgaagaacggcgtgctggagaagggcgatctgctgcatatcgcccgggagcaggtgcgcagagaggaattagcctgcaccgctccgtacctggtgtgtgatacctcgccattaaccaccctgttctatacgctcgaccagttcggcagcgcgccgcaggagctcatggcgttagccgaacgagactacgctctggtcgtactctgcggcgatgaatttccttttgtgcaggatggtacccggcaaggcgaggcgtttcgccgtcgacagcaggcatggtatgaagcagagctaacgcagcgaaagatcccctttttgcgcatacggggttcgttgtctgagcgcatagaacaaatttgccaacatatcccgtggccgggctga

SEQ ID NO: 142125 - DNA, 1404 bp, Enterobacter cloacae
atgaaagaaaaccgacgtgagattgttaatgacagcatgcaggcgctacatgcgctggcaaaactgatgccccagctccatgctcaatgttctctggccgatatgctggaaaccatcagccgcacgctgggagctagtcttgcctgggtaagcgttaacggggatgacgggctgcagcgcgtggtctgcgccggggagatgacctgccattccttcgaggtggccgatttccttgcggattctcttctccagcggcaccatcgttcgtggcgagtggtctactggaaagagaatattggtcgcgcgctatttcctcctcagcatcccggctatgcgcaactgcaaagcggtgtgctgtgcaagctttcaacccataactggcgctgcagcggctatttctttttagcatttaatgaaagactctattctctgccgattctgaaaaatatcgtcgtagtgctggtcgaaaaattaaaagactattttgcggaaatcattgcccgtgaaaaaaccgcgcaggaaatgcagcgcgtcgtaacgcaatataaaaccctctttgaacgcgccccggttttaatgaactctttcgacaaatttaaccgctgcgtgctgtggaatgccgaatgtgaaaaagtgttcggctggacgatggcggagatcgctgaacatgccgatccgctttcgctgttttatcccgaccccgaagagcggcggcgggtaagagagtcggtcaacgtctcaccccttaaggatatgtatgagtggcatccgctacgtaaagacggcaccccgttgacggtactgtggtcaaatattctgttgccggacaactccatccttaatattgggctggatattaccgagcggaaaaaagccgagcagcagctggaggtaaaagccaccactgacgatcttaccggctgcttcaaccgttcggcgattttgcagcagctggagcatgcgctggcggccagtgccgggcaggaggttaacagccatttttgtgtcctgatgtttgatctggattttttcaagcagatcaacgatgaatggggacacccggtgggggatgcggcgcttattcacttctgtaattctgtccgcgagctcgccccctcagactcagcattagggcgcgtgggaggcgaagagtttttgctcctgctggcgcaaaccgacggcagtggcgctgcgcgcctgtccgccaggctgcgcaccgttctggaaaccaacccgctgatagtgggtgagagaaaactgtcgctgtcgtttagtgccggggtcgtggaagtcagcgggaaacagcgggattcttcagccttactgaggcgcgccgataaagcattatatgaagccaagcatacggggcgaggaaaaacggtagtggcggctgattatttataa

SEQ ID NO: 142126 - DNA, 357 bp, Enterobacter cloacae
atgggacgtgcagtgaaagtaaatattggcgaaagacaattcgcttcgaaaaaagccgccgtcagttatttcatggagcagcgtgaggctgttaaagaaacggggccgttaaaggagggcattttttttgaagagctgaaggcgctctatctgaaatattgcgattgctgtgaaagctggggactgaacggacgaaccattacctcctttactgttgactttgaaccccgtcagaacggccagacctgggcatcacatctctgctactgggtgcacttttcagaaaagcaggcccggcctttttcggtaagggaagcggtggatgagatcgcaaaagcttctgctgaacagcaatag

SEQ ID NO: 142127 - DNA, 309 bp, Enterobacter cloacae
atgggaatgtttgatacggttagattccggtaccggatgccggacggagtaaccgggactgactttcagaccgacgacctggactgcgagtgtgaattttacgagatctcaccagagggccgtctgttgcgctggcagaagaacggtgaactgaaagatactgagtacaacgggatgttaaccctaaccgccagtgacggttatcacctgtattttgagcaggggacactggcgtggatcgaggtgtactcccagggcgacaagcgctggccgtttgaggctgcccgttttatgccggtacatgcctga

SEQ ID NO: 142128 - DNA, 666 bp, Enterobacter cloacae
atggctgactggtttattgcgaccgaaggtgtgaaggtggtgaaggatggcgccagtctggcacctcaaatcatcacggcagtagcgtcgattggcgcggctctcgggggcgtcgcgctgacgcattacttcactcgcaaacgtgaggaaagagcggcagaagcgaacttggcccgcgagcgactctttattggcacggagctgatctgtctgctggagcactttgctgaccagtgcagtgatgttgcctgcgatactgagcctgacaaagaaaactggacagttaaagatctgcctcttctgagtctagaaggaatcgaaggtgactggcgctcgcttccatccgaactgcttttccgtctccgtaacctgccggcgctgaacagggaagcccggtacgttattgaaagcgtattccggtacgaaccaccacctgacgtcgtggaatccgccaggtaccagtatgcctgtctggggctgaaagtgctgctgatagcctggcgtcttcgtcggatctgcgatcttcctccgccgcgcgaaggggaactgtgcaggcggatcgggtctatcctgtggcgcaaccgccgtgcgttgtggcacaagcatttgaaacgccagcggcagatatggaatgaaccattccgtgagaaaaaggataaccagtga

SEQ ID NO: 142129 - DNA, 348 bp, Enterobacter cloacae
gtgaaaccaaattacctcaacgatctgcatgcaaacgaagccgctgataacattattggcctactgaaactgtgccagcaactgcagtctgaaaaggatggtcgggaacggccggcgcccgaagcatattcccgtgatgaggataaatttaccgatcgtatccgttccgcatgcggtcacgccctgcaactgcgccgactgctgccgatgacaaggaccctgagcgccattggcgccgagatggaacgccggggcgaaatcagtgtgctcccgggcgaagattactctcagaaggctcttgcacgactaacagagcaataccttttcaccggggacaataaacaatga

SEQ ID NO: 142130 - DNA, 783 bp, Enterobacter cloacae
atgatgccggcaataccaggccagggtgtttccttttcggccacgcagctgccggtggccatcgactacccggccgcgctagcacttcgccagctggccctcgcgcatgacgaactgccaaaatacatgctggctccggaggtgagcgccctgctccactatattcccgacctgtaccgcaagaccctggtcgccaccctgtggaattccggcgcacgtgtcaacgaagccgtggcactgggccggacggattttttgttgcaaccgccctacccgttcgtgaagctggccacgctcaaacaacggtctgaaaaagcggccagaacggcgggccgtacgcctgccggaagtcaggttcatcgtctggtaccgctttccgatccgcagtatgtcagccagctggagatgatggtggccacactgaagatccccctggaacgaaaaaacaagaagacaggcagaatggaaaaggctcgtatctggaatattactgatagaaccgtacgcacctggctcagcgaagccgtggaggccgcagcggccgacggagtgacgttctccgtgccggtgacaccgcacacattccggcacagttacgcgatgcatatgctttatgccggtataccgctgaaggtgttgcagagtttaatggggcataaaagcatcagctcgacggaagtctacacgaaagtgtttgcactcgatgtggcagcacggcaccgggtgcagttccagatgccgggcgatgaggcggtggcgttgcttaaaaaaataggtggctaa

SEQ ID NO: 142131 - DNA, 201 bp, Enterobacter cloacae
gtgaaatttgacccgcaaactgtcgcacaggcgaaggcatttgtaaatgccctccgcgccggaaaacgcgctcgcgtacccgcgctgcgcttctcacagtggcagccgttcctgtccgtggtaaatgccgaaacgggctacgccgccgatgctgactgtggtctggctgtcagcgtctacccggcgcttggactggcttaa

SEQ ID NO: 142132 - DNA, 294 bp, Enterobacter cloacae
atgtttgtacgtaaaaaaacatcgcagtggggcaagccagaccgcaaagcaaaggatgtgaaccgtcgattaaggataacagttaactggctgtattcgatttgttgggtactcatgtgggtggtggtgattgcgtgcttcatcaaaggaatacgggaggaatatgcatttcgcatctttggtgcattcctctttgccgccatcctgattcgtatacaacctcccatctggccagatgacaccgccgaacctctcccgggagcaaccgacgatgacaaaaaggagtgcaaatga

SEQ ID NO: 142133 - DNA, 396 bp, Enterobacter cloacae
atgaaacgcaccgccgcagttttgttgattgcgttctccctggcaatgcctggagccgcgaatgcggctgctgtggcagcgatttttacggcagttaataccgcactagcagctgaagccgaggaagccaataactctgcccagtttgaggccttagaacgcgaagctgttacgttaccggatgcatggaaagcatatcagcaggtatcgggcacagtacctgaaggtgcaactatcgagctgcaaaatcgctaccgcagtctcgctgtctcactggtgctgaaggcggcaatggggtgctcgccggatgccctcaggctccttgagcgtaacgatgtgattgagtttcgcgtactccgtccatcgttagtctcagcctgcagaaccactaaataa

SEQ ID NO: 142134 - DNA, 279 bp, Enterobacter cloacae
atgtcactgatacgcactacccctgtgccgtctgtgtctcagcatatgacaggccacaatgctgataacaaaggctgtgacgaagtcgtgaatcaactctctcagctgtaccctgaaatcgcttcatggcaaccggcgctgatcgccggtgcctggcacaagtggtgcgctgagaaccaacttcagccgatagcgccggacgaacgtgatgaggcgtttcccctgtacctcgtcaggcttatccgtaacagaatggaggagatgaacgcatggcgttaa

SEQ ID NO: 142135 - DNA, 624 bp, Enterobacter cloacae
atgaaaaacgcttatctccgggcgctgattatcagcgtcatggtgggtttcgctcctcaggccctggcgaacacccagaccgacgtttccgtttcagaccataactggataaaagggcagcaggacgcgctgaaaattatgaaggaaggcctccagagtcagtcagccggtttatctgctttgccgcagccgcagcaggatctgattaaccgactgcagggtgatattgccgcgcaatccaccacaatgggcgaaaaagacgcattcccggctatttactttgtgagcctcggcataccacgagaaggtcttctgccgatgctgaaagatgctcgtcgctacaatatcccgccgacattgcgtgggctcgtcaataatgacatgcgccagacggctgcggcgatgtttgagctgagtaaggaggataaggacgccggtgtacaaatcgatccgacgctgttcactcagtacaacatcacaacggtgccggccctggtggtgacctgcgcgggtcgccatgacgttatccggggaagcctgccgctgaaacaggcgctggaaaaagtggcagaaagcggtgactgcgcagcgacagcacgccaacttctggaggctgcacaatga

SEQ ID NO: 142136 - DNA, 492 bp, Enterobacter cloacae
atgtcatatagactttttaccctcatcggtgaagccgtgcgggcagccctgtattcctttatcttcggcccggctctggtgatgtatgtctttgtgatgctggcggcatcagacggctcactttcccggcaattcctgacgacatttcatgacctgactgtcggcgtgcctgccggcaaggtgatggcatgtgttaatgaaaatgtgatggcaggacacttttcgtcaccagaacccggagagtcgttaaagcctgtgcctcccgctttagagaaagcactgcctgaagtgttatgtcagcgcggttgggtggacagcgatacctggacgcgttcggctgatgcaacgctacgcaacgtctggatgatggcggtgatgtttggctttggagtgtggtttgtatcccgtggcctgaacatggccgcccgaatgagaatttcaccagacacgcattcggctttggtacggcagaacaaggagatacacgaatga

SEQ ID NO: 142137 - DNA, 417 bp, Enterobacter cloacae
atgaggcacatcagactgaagacgtttatccgaaaccaggctatcgggatactgaaagacagtagtgagaatacggaaacccgaaaatggactgaccagttaacgctgaaactgttttatgccctgatttttaccgctgtggtcgaaagggtatacgtgaaatgtgccggtgcaacgctgagtgcgatggcagaaccggccaccattcaccgccccgaacagtttacgctctcgcttctcatccactatccgcagtacctgttgtggggcgttatggccgcgatttgcgtgctcattgcggtgaatttactcgcctgcagctggttttgtctgaccagatatttatgccgcaaaatgaaccgtgctgacggcccggcaggcaaggatacgcaagctgtggaggtgtcaaatgattaa

SEQ ID NO: 142138 - DNA, 558 bp, Enterobacter cloacae
atgctaactttcaacgatgtaaatcgtgattttaaagcaatattagatggggtgtcggatacaaaccgacctgtaccatcaatatctaaagctctgagggtttcgttaactctgcctctggttggtattattctttcaacggttaccttcggagccgtctgtgcgatctcgaatcatcgagatttcagtattggcctattaattagctatatcctctctggagatgctatacctgtttatatggctatggtcgtcggagcctttcaagggattatgttgttgccatacgttagtctcttccactccatacctcaaaatatcagggaaaacactcctctcattgctcatatgaagagagctatttttaaagggacaatggtgtatgtaagcgtattactcattacgtgcataatgtccttctacaatgtgatgtatttattcgctacacctgttgtaatgatcatctcaatttttgtcacatcgatcactgtcaaccttcaggtaagtaaatttggcgttggtgcattaatcaataagctgaagaaaaaccttaagtag

SEQ ID NO: 142139 - DNA, 801 bp, Enterobacter cloacae
atgataagtaaaattgatcgcgcactttgtgcagctaccgtagtgatactggttgcgctcatcccagtgataatctggagttgtgccactaaaaacaacgatataagcaactggataattgcgcttgctaacgtagtaatggctgtagccgcttttgcagcatatcgtaaagcgagccagtatctcgatgagtttttttctaaggaagggtacaccctagctatcagaatggtgaatgaaaacctgctagatctgagtattaaaaataaactgcttgaacgcactaccatgtattatgcattttatacagaattcaatggaatccagccctctacctcccgacttcttatcatggaagccagaatccagcttttcaataagactctcacacaacatcgccagatacttaataattgtgataggctatccatacagatgctaggttacggcattgttgcggtcgaaagccgcaagcaggcgctgattatgatgcttacctccctgcaaaactgcctaaggtatgcagaagatcttgagatgtttatcagagcagacttcgaaaggtacaagagtgctttgacaggtgataccagcaaaaaacagcctttcttccttaataatgttaattcagtaaaagacgtgagaggaaacttggaaaaggagtggaatgcgatggtcaatagctatgttcagttcttccagggccaacgtcatattaaggaactattttgccttgaaaaaaataaccgcattaatcgaaactacaccaagtctattgtgccacggacagattatccataa

SEQ ID NO: 142140 - DNA, 783 bp, Enterobacter cloacae
atgaagcggttccaggtcattgcaggatacttgattgccggcgcggctagcgccggtataacctgcctatttatattggtatttgttttgttcagtcaagttgcagaaactggcagcgcagctgattgggttgcctccgtcgctaatgtcgttatggccattacagctgtgttggcttttgtcgtggcccgcagttggctgcctcaactgacgactcaggagggatataaggaagcgattcgtctagtcaatgaccagtatatacaactaggcccggacaacactctgggactgagggtggattgtgcgatgcaggcctaccgtgcccagattcaaagcagcacatccagcaaaatagattcttatttagatactattaatagtttaacaatttccctatacgaagcagaagcagttctcaaagaaattagagagacacagttcagactgaatacctacggcctgacgatccattacgtttacgccccatcggttgacgatatgatcaaagcttttgaacttgcacaggcctcagcacgcttgctatgtgaacttctgttaaatgatgccaacctgcgctatcaggctaatattcctccccagcattactctagccttaacggactggcaatggcgctagctttaaacaaaggtgaaacggcaaaaggtgcagaggagcaatatcaaaacgtgacagaatatttggccaacatgttggaatcgcatcaaattgtattcagcaggcatccaccagtaggtaaattattttgtttcagaaaatag

SEQ ID NO: 142141 - DNA, 135 bp, Enterobacter cloacae
atgatcaccctatccccggacatcgtgcaccgcattgaattcgctgtggccagcgaacagccactggcgcagttgctgacctgtctgctggccctgatacaggcggcgccgaaaggtgggaaggtgattagatga

SEQ ID NO: 142142 - DNA, 1263 bp, Enterobacter cloacae
atgacggcgggcgaggcggggcgtgcgcaggtgcgggtgctgcactggacgtcaggcaggccggacggcatcagcaacgaccaggtgcgctacagccacgataacctgacggggagcagcgggctggaggtggacggtgacggcagggtcatcagcatggaggagtactacccgtacggggggacggccatcctgacggcgcgcagcgcggcggaggcggactacagaaccgtgcgctactcggggaaggagcgtgacgcgacggggctgtactactacgggtaccggtactgccagccgtggtcgggccggtggctctccgcggacccggcggggacggtggacggcctgaacctgttccggatgtgccgcaataatcccgtcacgcttaaggatgaggatggaagattttcaacgctaaaaatgcctctggatatattcatacatgatgtggaaaacctcagggcaacaacatcgtcaacagagtttcatgaattgtttttaaacaaccagggtgggcttgaagtaagcgagttatattcttcgccaggactgacaccatctccagttgcagatgacacaaggccatataatcaggatgtagagtctgcctttgtgatttttcaggataattctggaaaatcgagattatttgttaatcctgaagaagaacacatggccatcaatcctgatatgggaatgccaatttttgccgggcgtttgcaaagacttgcaggtgataaaggctatcgaataactaatgaaagtggacattataaaacaccagcaaatacagatgtgttatctatgttgcgatcagcaaatcctgatgcaaatctttcaaatttcaagtatgaaccttatgattttggtgaggtagacagaatggatgatatctttgcaactcctggcgaatttaggcgcaaggttgatgaatacagattgaataaaaaatcatttcatgcttttttgatggaggtgggccgggaacgtataaaaaaaaccgggccatatggaatgatggtataccggaagatgtttactaaaaccacagaaactcaaacggatgaaccttcgttcgttcaatgggcggcaaaagatgcaggatgggtcttccctgagcattatctggattataatccagtgagaatgagtaaatattttgataacctctataatggaaatgttactgtgaaaaaaagtttcttaggaaagaaaaaggagaaaattagaggtccacacttttctcccttcaaccattaa

SEQ ID NO: 142143 - DNA, 1185 bp, Enterobacter cloacae
atgtttgactcaatagtgctaaatcgctcaattgataaacctacactcactgctggcgagatagctgaggcattaattttctatcagaatatacaccttgttttagatacatcgagccttctttccctcataaaagaaattggcccacacaatgtaatcaaattaatctcactccctgatgtaaaaacaacattcatagaagagtttgttggagtgattagccagaacacagaacatggaacagaacatgctttaattagtgcatttctctcaggcgatgatagtaaaggggaaatcaaaagctggaaaaaacgcttggaacatcgtattttcaagcaaggattcactaaagctgaagcagtgaattttgttgaaaggttaaaaagattagttacattaaaaaaactctcaagcgaccacttcattagtggcggagtaatcaatgccgcgcgcagagatttaaatgatagtgattacatatcctcagccgcacgcattattgtaggtgacttaacgcaaagcgaatgcatccctgaggactttatttataaaataatcccttctaaagaaacctttaaaatatatacaaatatagattttgaaaggataaatcaacacacccacaaacaagggccagcaaccccagccacgattgctgcagccatacttagcgcttcttatggacttatacttgccgcccattacggtggcgacttccatacgtctcttactgactcaaaacttataagccataaaaataaactaatcctaaatagatccaatgcaaatagaagagaactggagctattcaacgagattattctaaagggaataccaaatatatcatccacaattaatagcaaagaacgcacctttgaagaattccttgagctactatccaaagccaacaagtttaaaaaatggcttaagggtaagtcacccgacgaaaacttagtcgccaattatcttgaagacatttccaaaacaggatggcttggaagtggaaaaggcaaagtgcttcgttacttagcaaatacagggctcggaattatcggtccaacttccgggcttataacatctgctttagatacttttattctcgacaaatttatcgcaggatggaagccaaatcaatttatctcctcaaaactaattccattcattgatgttaatgatgagctttga

SEQ ID NO: 142144 - DNA, 447 bp, Enterobacter cloacae
atgaatgactttaagccctttgacgacaggctcaatggtctgattgctgccctgtcaccggcatcgcgacggaagctggccggggagattgcaaaggagctgcgcaaggcgcaacagcaccgcatcaaacagcaaaaagccccggacggctcaccgtatcaggcacgaaagcgtcagcctctcagggctaagaccgggcggattaaacgggcgatgttccagaagctacgcataaaccggtacatgaaggccactggccgtgaaaacagcgcggtggtggagttcaccggcaaagtgcagcgtatagcgcgtgtccatcagtacggcctcaaagaccggccaaacgcacacgcacaggacgtacaatatgcagagcgccaattacttggactcaatggagaagacataaaaacaattgaaagtgcattgattaaataccttcagtaa

SEQ ID NO: 142145 - DNA, 747 bp, Enterobacter cloacae
atgaaaaataacaccttctcccaaagtcagattcaggcaatgaccgatattctgcgcaatgaaagcttcgaccatcaggcaacatggttgcgggtcggaaagcttaaaatcgaccgaagtattaccaaatctcgccagataggagcaactcggctttttagtcgtgaggcactgctcgatgcgctgacaacaggcaataatcaaatctggtttgctcacactgcagagcatgcccgcgtggcgctgatgtacatggatagcctttcggcacgcgttggcgtccgtctggcgagcaacggccacagcctgcaactcgacaatggcgcggttatcagctttgtcggtgaggaaactcattgctccgcgctggcgggtaacgtttatctggatgagtttggatggttcaataacccactacgagccgcaaaaattgcggcgggtctctcctgccataaacgccacagcctgacgatgtttacctctccctcagaaaattacgacgctttccgggtgtggaacggcacgttacgaagtcatcgaccttcacctctaatcaataccggcaacagcgtattttgcacagatggcgtctggcgtcagtcggtcacgctcgacgctgcatgtcagagcgggtgcaatctcttttcgccagaggaaattaaacgagaatacagcgacgatgagtatcgcctgttgtttggctgcgactggtctttcgctgttgtagcaggtgaggtggaagtatga

SEQ ID NO: 142146 - DNA, 258 bp, Enterobacter cloacae
gtgactactttgacggagcaggaaaacgcctgggttaagaagctcaataaacttctgtctcagtgcccatcaaaacgcctggcgtttgccactaccggcgattgtgatttgtctatcttcaaccagacacagtatggcgctatctgcgatgagcaggaaattaacggtggagagttcatttcagcggctgcgcgcataggggcactttttgatgaggtgctgaactttcctaatcaggttgaaagcacttcaggttga

SEQ ID NO: 142147 - DNA, 333 bp, Enterobacter cloacae
atggaattcaccaaagagcagttaatcgaatgggcacaaaagcataaaaaacgcgccgaggaatatctggtcgctgtgcctaatgacgagtatggactgaaagatttagcactggctgaaatcgcgctggccgtgctgaccgcgccagactacatcccgcctcacgtattggacgcgatgagcgatatgtgtgacgggggctttaacgcgcaaggaatttgggatttatgccgggattcaattatgccacctacgccttgccctcgttgcgggacagtttcaggcaggccagacggtgctcattattgccatgtcggcgctaaaagggggtga

SEQ ID NO: 142148 - DNA, 342 bp, Enterobacter cloacae
atgaaaacatatttaattcatacagataattactggtgtgcattcgatttaggcgatccgaaaggggataaatctgtcgggattatatcctgcgtagatgagaaaaccgggataacagcggttttgtcgacgcttgatgagcacggtatcggtttggttgctgagctggccgataggctggtcaaagctgaaaaacgcaaatctgatgtcgaggcgatgctggcgcggctctatgccgaatgtgatacgggagaacgtcggggcaatggcagtcaatcaggcgttgcaatgccttcgtggggaactgttgaggcggcacgcttgctgctgggagttaagtaa

SEQ ID NO: 142149 - DNA, 216 bp, Enterobacter cloacae
atgaataaacatatatcagtacctcgcagcaatatgaaagctctgttggcgcaggccgccgttgaggcgcagctagttaccgcgacccgtttcgcgtcggcgcttgattctctgatagctcacatttgcaagtctgaaatgaaccgcacggaaatcatcgagctgttggggcaggaatccgaaaagctacacaactctattttgaatcagcaataa

SEQ ID NO: 142150 - DNA, 351 bp, Enterobacter cloacae
atggggccaggtgctttccccgccctgtcacttgctgacgcacgagggttaagagcggattaccttgccttattagccaacggaatcgacccgcaaatccaagctgaaaccgcagaggaagagcaacaaatcgctcaggacagtattctttcgacagtcaccgctaactggttccagctcaaaagcaaaagcgttacccctgattacgcaaaagacatttggcgttcactggagaaagatgtattccctgccaccggtgagattccagttcagcaaatcaaagcccgaatatggttgaagcccttcaaccaatcaaagctcgtggagcgcttgagactatacgtcgactaa

SEQ ID NO: 142151 - DNA, 1188 bp, Enterobacter cloacae
atgagtgcttctgttcataatcccgatacatacatgtttgattttcgacaactagtaactaatggaagaaaaaaaataggtattcttatcggggcaggagcaccggtaagtattaatattggaaaagacgaaaaatatgaacctttaatacctaacattgaaggtttaacaaagcatgttaaggattctcttacaaaggaattgttagagatatttgaaatcctggagggacctaagggtcaaaacaacctagaaaaaatattatccgatgtaaggactcttgctgatataatcgggcaacatagtgttcatggaggcgatgctgaaacatataaaaaactagatttggatatttgctcaaaaattaaagaagtagtaagcaaacctcttcctgatactcaaaatccttatagcgaattgatatcctggataaatggcattaatagaagctatggggttgaaatatttaccactaattatgatttactttgtgaagacgctttagaacgttctcaaacgcctttctttgatggattcactggttccagattctccttttttgatcccgctagcatttcaacaaatgacctgccaccaagatgggtaaggctgtggaaactacatggttcgataggttggacaatgcggcctaatggacaagttactagggttccggaatgtgaagtttctaatatggtgtacccttctcatataaaatattctcaaacccaagcagctccattttcagccttgtttgaaaggcttaaaaatttcattatggaacctgatactttattaattacaacaggcttctcatttgctgatgctcatatatcttcaaaaataagcgagtgtctttcagcaaaccctactagcgcggttatagctttccaatataaaaatattgaagaagaatcttatgctatagacttagcaaaacgaacgccaaatcttagtgtctattgtagggatggcgcagtgattaatacaataagtgccccctggaaaactggggaactacctagtaaaaattggaactatgttagaaaagaatatttgaatgataacaacgaatttatattaggggattttaaagggcttgctagattcttagcaattgccggaggagaagtttcttcttcaccaatactgtttgaaagtaagtctgaggataaaaatgatgactaa

SEQ ID NO: 142152 - DNA, 1791 bp, Enterobacter cloacae
atgatgactaaaatggctatggcatccacgtcaattggcgtcataatctcaatctctagttcatcagtcacgattaggctttcaaaaaaagtaaattctgggttattagtacttgaaggaaggacgcataaggtaggccaagttggaagttttgttaggattcctcaaggttataatgacttatatggcgtggttggatccagcaatgaaaatgcgatcatcgataatgacgaaatagtctcctccgatagcagaactattgttgtcgagttaataggggaaagttcttgtggtttttttgacagaggtattagccagtatccgtcggtcggtgatgatgtccacatggtgctggactcagatttaaaaataatttatggttcaaaaagtggcaatttggttacagttggaaaattagccagttcagaaagtatagatgttaatttagatatagataaacttgttacaagacactcagctgtagttggctcaacgggctctggaaaatcaaccagtgtatctggtctattgcgctcaatttgtcagttagatggtatagacaataactcggcaagaatactactagttgatatgcatggagaatattccgcagcactaaaagatatatcaaaagtattttctgtcgacccaataggcgaagaatgtaagttaaagattcctttttgggcactaccaacagaaaaacttattgattttttatgcggtaatataaatgatgctagtaaaaactcaatgattgaattcatcacagaaaacaaaaaagaatcaatcaaatccaataatatagaatatattaacgaaagtaaggttacttctttcaccccacttccttataaccttaaaaatttatggtttaaatttaccttcgaagatactgtaacttatttggaaaaggagtttgtgcatcctgcttttaaagacaatattcaaggtgacgcatctactctggaaccgccaaagtttatcccaccgggaacggcaagcaaccctccctttaaaaaaggaagtcatgttctaactaagcaattaaatcttatgaaagccagattgcttgacagtcaatattcctttttcctttcgcctgaaggatatactcctgacgaaaatggaaagattgataatgatcttgatcatcttctaagtgagtggttaaaccatgaaaagccaatatcaattttagatttatctggcatgccttcgagtcaattagacatgcttttaggatctataatgagtattgtatttgaagcgtctatttggggtcggaatttagatgctggattgaagcataacccagtacttttcgtgctagaggaggctcatagatacctttctaacaatgatgatggtctaacaaaaaatattgtgcaacgtgtcgctaaggaaggaagaaagtttggagttggcctaatgattattagccagcgaccatccgaagttgacgataccattttgtctcaatgtggaacattgtttgctttaagattaaccaatacaagtgatcggtctaaagtaaaagcagcaatgtctgatggtctaagttctctaattgacacattacccattttgaggacaggcgaagcaataattattggagaggcggcaaaactgccttcacgatgtaaatttaagttaccaccagacgggctttatcctgacagtcaagatcctgacgtcagcaaatcatggtcaaaacctagagttctcaataagaattacaccaaagttatcaaagcatggcgtttaaataagccaattaaagaggattaa

SEQ ID NO: 142153 - DNA, 300 bp, Enterobacter cloacae
atgctggcgcaaggcgctgagctggctgccgcccttgtcccggagctgatgaattattccgggcagcattccgccattcagcgctgcgccatgcagcattcgatcgactatctgcgtgaggcgctacaggtctggctggccgccggtggaaaaatttattattcggggccggataatgtcattttaacagccatcggattcagtcctgacgcggcttcgcgcgatgatagtcgtgaaaaattcacgcctgcactgaacctgaattacacccgccgccgtgcagaactggtcgcgcagtag

SEQ ID NO: 142154 - DNA, 315 bp, Enterobacter cloacae
atggcagacaaagcagcactcgtcagggaactcattaaaaaacacttctgggaaatgtctgacgatacttctgtaagtacaggtaaacaaagtgtactcccggaagatatgacggattttcttgaggagtattcagaaagtctggatgtagatatgtctgattttgtgtttagtcgatattttccaaatgaggggattcgcttcctgccaaatgcgatattgccccgctatcttagaaccgatcatcatgcgcccgagccgttgacagtaagtatgcttattgaatcggcaaatgctggtcgttggattttttaa

SEQ ID NO: 142155 - DNA, 447 bp, Enterobacter cloacae
atggatacgaccgaacagttaaacggaacatacttctttgatggaatgagcgtcgataaagaggagctactttactggcttattctggatgaatttaaaaagcagtttagtgatgtgattgatttgatagcaattgcctccatgttagtcagcttgccggtaatccctgtcagcgggaaactgggggctggtgctgcaaccagggggacaagcccgctttctcttgggcttcgtacccttattcgacagcgttttaagcagggccgtagaaccattacctgggcaaaacttttgcgtggcgaatgggcatacacaaccagtataggagcatacatcgggagatggctcccttgggttggtgccgtactgacggcctataaccttgccatgatcacccataacgttatccaccgttatcagcttatcgttgggccaggagaaagataa

SEQ ID NO: 142156 - DNA, 207 bp, Enterobacter cloacae
atgaacgtcaataagggcaatcgtcagagattcctcgaaaataatgtcatccgtcagaaacaggaggaaacgctgctcattaacctgaaccgctgcttcaagcacttgccccggtacaataatgtcggtgcttttaccattgagcacaacgtcagattgagcctgggatacatcgatagcgtcacgagtattaaccaattctattga

SEQ ID NO: 142157 - DNA, 315 bp, Enterobacter cloacae
atggcgataacggaagaaacgttgcttagatcgggtttcaccaaagaagagctgcaaaagcttaaacgctatgttgatacacaaagtactactttggatattttgcttcctgcactttcaaaccgttttaaaggtactttcattctttcaatcgtactcactgttctgttcatcctggcggtgtgcttcgcttcccgcgaaaatatcatctcatcaggtgttgctgtattatttatctttggcatcttctgttggatgactcccctgaaattaacgtataaagcctggcgttttacgagggattattatcaatag

SEQ ID NO: 142158 - DNA, 813 bp, Enterobacter cloacae
atggccggtaaacttgcagtaattatgtctatttataaatctgatgacccggaagcattaagagtggcattagatagtctgattaatcagacctatccatgcgatatttttgtttatcaggatggtgaaatacctttagcattgacgagtgttatacaagattatgttgataatcgtcagatcaaattaacatcctgtctcgttaacaaaggccttgcacatgggcttaatacgcttattaacgaggttttgcagggcgattatatttatattgccaggatggatagtgatgatatttctcgtccagagagaatgtctgaacaagtctcgtatctggagaaaaatccgcagatcgatatatgtggaactttttgtcaggagtttgggagtacttacgctttaactgagaaacgtctgcctaaggcccatgaagatctggtgaaattcagtattgccagatgtcctttcattcaccctacagttatgtttcgccgccgcgtgttcgaaaatggccaccgctatccaactcataccacttacaccgaagatatggcactgtggtttgcattaatcgacgctggctttaaacttggtaacgtagacaaagttttgttggattacagattaactgaagatacaattcttcgacgtcgcggtttcaaaaaatcaatcagtgaagttaagttgcgtgttaaatatatgatgcttttgaaaatgctcacattgaaaaatgttatgttgataacatccagggtcattttccatttattgccggtttcatttatgcgatttatgtatcgtaatatgcgctaa

SEQ ID NO: 142159 - DNA, 882 bp, Enterobacter cloacae
atgttttcagtagtcattacaacaaaaaacagattggattttttacgaagagcagttgaaagcattgtcaaatcatcattgctgccagacgagattattattgtcaatgatggcggggaaaaaccagaactgaccgatatttcttttggtaagattaatgtggtcatagagaataatccttcgagtttaggagcgaattattcccgtaatcgtggtattgaactgacttcaacggaaaatatctttcttctggatgacgatgatgccgtagaggttgattcatttcaaaaacgattggatattttgttagcggatgatgaggttggtcttgtttttactgggataaaaattgtcctgagcaccgaactcaatagggttcgcagaacagtctatccgcgtgaatattctgactttactgaggctttatttaccaaaggtaatgttatcggctctacatcacgtgttttactacgcaagaaattttttactgctgcaggtaaatttgatgaggcattatcctgtatgcaggattatgatctctggataagaatgtcgcaactttgtaagattcagcatgacagcagcgcaactgttatttacacagtgcatagcaataaaaaccaaattagctccaatttcaggaaatatcttgaaacggggcagattttgctgaataagtacagcagcttaataaataatgatgcgcgcagacattttatggcgaatctctattttcgcgttgcgttatcttccgcatcaacctcttttgtgcatcgtatgcgctatgcttttctctcgctggcttcagtattttcactaaaagggctcatattgctattgactccttatagtatattaaaaagaacatatctatttgcttaa

SEQ ID NO: 142160 - DNA, 972 bp, Enterobacter cloacae
atgacgcaatacaacaatacgccggctgatagcagcaatgtcccggagcaatttgatttaatagatttaatgctacagctgtggcgcggtaaatggttaatcggcgcttttatcgccttgtctatcgttctcgcaggctcttacctttttgtcgctaaagagaaatggacctcttcagccgtcattgctcagccggatgcagcccaaatagcaacctactctagtgcattgaacattctttatggtggagcggcaccatcaattcttgatgttcagatgcgtgcaataaaccgcttcaactcttctttctctgcattatctcaggcacttgaaaaccagcaaattcctgaaaaattgactattgaaccaacagtgaaaggtcaacctttgccactaagtgtttcatatactggggaatctgcagaagccgcgcaaaaacagttggcgcagtatatccagcaggtagatgagcaaacggcgaaagagctctctattgacctcaaggacaacatcaagcagcagatcacaacaataaacgattcacttgaaaaccaggagaaggttgctcaggagcaaaaagatcttcgtatcaagcagatcgcagaggcgttaaaaaatgcggaggcggcgaaaatcaactcaccgcagatacagcaaacccaggatgtgacccaggaaacgatgttcctgctaggaagcgaagcgctgaaatcgatgattgataacgaagcgtctcgtccgctggtcttctctcctgcttactatcagaccaagcagaacttactggatattgaaaagctgaacgtgaatcctgataccgtgcatgtttatcgatatgtaatgaagcctaatctccccgtccatcgtgacagcccgaaaaagggaataactctctttcttgctgtgctactgggtgggatcctcggggctggcgttgttctaggacgtaatgcacttcgctcctataagtga

SEQ ID NO: 142161 - DNA, 270 bp, Enterobacter cloacae
atgaataacaaggaaaaaatacgcatcccaaccacaccaggcgaagtgttgctgcacgattatcttaagccactcagtctcggcatctcagaactggcagagagaataaacaccgatcacaccactgccagcgcgctgttaaacaataaaatcaaactcaccgttgatttggccataagactggcaaacgcattcgataccagcattgaattctggctgaatctgcaacaaaacgcagaaaaccagggagcgagaatcgaacacctctaa

SEQ ID NO: 142162 - DNA, 159 bp, Enterobacter cloacae
atggcgacttttaataaagaactcaattatctttctcattatttccagcagacgaaaaatgcggaacacattttattccgctggctttatttgagcccggaggcgcgcattgaacgtctgcgtgaattgatagaaccggtaagtaaacctgagcagtaa

SEQ ID NO: 142163 - DNA, 1665 bp, Enterobacter cloacae
atgcgccagcttcagaaaatccgtcagtatcaacggctttatcagcactacggcgcagcgccagcgcccacgaccatcgctgaagtcgcggaagttgcgctgtgcagcgaacgccatgcgcgcaccctgctgcgccagctcgcgcaaagcggctggctaagctggagcgcgcagccggggcgcgggcatcgcgccatcctgcactgtctgacgaccaccggcgagctgagcgcgccgctgatgcacgcctgcctggagaaaggagattaccagagcgcgctgcagctggccgacggcgaccccgccagcctgcaccacatcatcaccccgtttttaggcggtaaatggcttaagcaccagccgacgctgcgcattccgtggcatcgcccgctcgcgtcgctgcacccggcccttcagcgccgccgcgccgaacagcatattatctgcgcggttcacgcggggctgacgcgctgcgcgcccggccactcgcagccggtcgcggatttagcccatcactgggatacccgcgacgacatgcgctgctggcgtttttatctgcgcagcggcgcgcactggcacaacgggcaagccatcagcgatgaggatattctcgccgcgctgcaccagctgctggccgatccggcgcgcagcgcggggctcgcgcacgttcaccaggtgtcgcttgtcgccccctggtgtctggagatcgtcctcagcgcccccgatgccatgctggcgcatcgtcttgcgcatcacgcctgtcgcctgccgcatccgcagcagccgaccgttggcgcaggtccctttgctatcgcccaccaccactcgcactacctgcgccttgagcgccagccgtggtactttgcggcgcacccgctgctgcatgcgatagagttctggcgcacccgcagcgagccggaaaaacccgcgtggatcaccgtaggtaaaggcgaaaacgcccgggagtccgtcacctccaccagcggaggtttcgcctggctgatgctgaacgccgggttaccgcagccgctggccgcctggctgcgtcaggaaattcagcatattaatcagcagtacgtccgccgggacgatatcgacacccgcaccgaaattttgcacggcatcgcgacgcccgcgtttccggcagcgtccgacgtcacccttcccgccaccctgtcgctggtctgctatcacgcgccggggctgtgcgatctggccagcatgctgcaagcgcgcctgaaaaagcgcggctgtgacgtcatcatccgctggaaagaccgtgaggcgtggcatgcccccgacgcgctgacgcaggcggatatcttactgggggattatctggcgggcgaggtgccggagtttgcgctggcagagtggtttacggaagaacccgcgtgggccacggcgctggggcaggccccgtggcaaaaagcgaagcagacgctgatgacctattgcgaaagcgaagagagcctgcgaacgcatctgcccgccttctttcagcgcctgctcgaaagcggcgcctgcacgccgctgttccactaccgctatcgtcttaataccctggaaaacgtgcagggtattgtgctgaccgccagcggatggcttgattttacccgcgcctggctgccgccggctcaggagcgcaccaccagcgcgtcgtag

SEQ ID NO: 142164 - DNA, 2217 bp, Enterobacter cloacae
atgagcagtaacggcgtacagctgcgcgtgcgcggcaaggtgcagggcgtggggtttcgtcccttcgtctggcagctggcgcaacagcttcagcttgcaggcgatgtctgcaacgacggagagggcgtgctggtgcgcctcgcgggtaatgggggggcctttaccgcgaggctgcatcaggactgcccgccgctggcacgcattgaccgcgttgaagcgcagccgttcacctgggcgcgcgtgccgaaggactttaccatccgccacagcgcgggcggggcgatggacacccagattgtgccggatgccgcgacctgtccggcatgtctggctgaaatgcgcgatccgcgcgagcgccgctatcgctacccgtttatcaactgcacccactgcgggccgcgtttcaccattattcgcgccatgccctatgaccgcccggcgacgtcgatggcggcattcccgctctgcgcgccgtgtgaagcggagtaccgcaaccctgccgaccgacgttttcacgcccagccggtcgcctgcccggactgcgggcccgcgcttgcgtggcgggcgggcgacgtcactgctgccggtgaggctgcgctgagcgcggcggtgaagacgctgaaaaacggcggtattgtcgccattaaagggctggggggctttcacctcgcctgtgacgcacgggatccccaggcggtcgcgacgcttcgctcgcgcaagcagcgtccgggtaaaccgctggcggtgatgatcccgaatgccgacgcgttacccgcgtcgattcagacgctgctcggctcacccgctgcacccatcgtactcacgccgaaagcctggctgcccgcatttcccgacggcatcgcgccgggtctggatgcgttaggcatcatgctgcccgctaacccgctgcatcatttactgatgcaggactgccggcatccgctggtgatgacctccggcaacctcagcggtcgtccgcctgccataaccaacgagcaggcgctggaagagctcggcgaaattgcggacggcttcctgctgcacaaccgcgacatcctgcagagaatggatgattcggtgctggatcgggacggggcagtgctgcgccgtgcgcgcggctttgtgccggatgccgtcacgctgccggcagggtttgacgatatccccgccatgttggctaccggcgcggagatgaagaataccttttgcctggtgcgcgggaaccaggcggtgctgagccagcactttggcgatctcggtgacgacggcgtcgaggcgcagtggcgttcggcgctggcggtgatgcagcagatctacgcctttcagccgcagcgcgtggtgtgcgacgcccaccccggctaccacacccggcaatgggcgcaggagcaggcgctgccggttgaaaccgtactgcaccatcacgcccacgcggcggcgtgcctggctgaaaacggctggccgcgcgacggcgaagacgctatcgccctgacgctggacggaacgggcatgggcgagaacggcgcgctgtggggcggggagtgcctgcgggtgaactatctcgagtgtgaacgtctgggagggctgcctgccgttgcgttgccgggcggcgatctcgcggcgcggcagccgtggcgcaacctgctcgcccactgtctggcgtttgttcctgactggcagcaatacccggaaacgcgcgcggtacagtgccagaactggccgctgctggcgacggctatccagcgcggcgtcaacgcgccgcggtcctcgtcgtgcggtcgcctgtttgatgcggttgcctgcgcgctgggtatcgacacgcaaacctgggaaggcgaagcggcctgccggctggaagcgctggcggcacggtgcaatggtgtggaacacccggtcacgcttgcggtggataacctcgcgcgcttctggcaacagtggctggcctggcgggcggaacccagcgcgcgcgcctgggcgtttcacgatgcgctggcaaaagggctggcggatctcgccgcgttccatgcccggcgcttatcgctttcgacaatctgcctcagcggcggcgtgctgcacaaccgtctgctgcgcgcgcgcctgcgccattatctttctgactttacgcttctttttccttcgcgcctgcctgcaggcgacggagcgatctcctttgggcaggcggcgatcgccgctgcccggtcatgttcaaaaaggatttaa

SEQ ID NO: 142165 - DNA, 1746 bp, Enterobacter cloacae
atgatgaaaccaacgtttttgcgctgggtagcgatcgctgcgctgatggccggcggcacatttagcgtggcggccaacccgccagcggctcctcctgtttcttacggcgtggaggaggatgtttttcatcccgtgcgggcaacccatggcatggtggcgtcggtggatgcgctggcaacaaaagtgggtgtcgatattctcaagcagggcggtaacgcggtggatgcagcggtcgccgtcggctatgcgctggcggtgacgcacccgcaggcggggaacctgggcggcggcggctttatgatgctgcgcaccaaagacggcaaaacgacggccatcgacttccgcgagatggcgcctgctcaggcgtcccgcgatatgttcctcgacgatcagggtaatcctgacagcaaaaaatctctgacgtcgcacctcgcctccggcacgccgggcaccgttgcaggcttctcgctggcgctggaaaaatacggcaccctgccgctgaataaagtggtgcagcctgccatcaagctggcgcgcgacggctttgtggttaacgatgcgctggcggacgatctcaaaacctacggcagcgaagtcattccgaatcatgaaaacagcaaagcgatcttctggaaagacggcgagccgctgaagaagggcgacaggctggtgcagaagaacctcgccaaaagcctggagctgattgcggagcaaggtccggacgccttctacaaaggggcgattgctgaccagattgctgaagagatgcaaaagaacggcgggctcatcaccaaagccgatctggcggaatacagggcggtggagcgcgagccgattagcggaacctaccgcggctacgaggtgttctccatgccgccgccgtcttccgggggcattcacatcgtgcagatcctcaacattctcgaaaacttcgatatgcacaagttcggcttcggcagtgcggatgccatgcaggtgatggcggaagcggaaaaacgcgcctacgccgaccggtcggaatatctcggcgatccggacttcgtgaaggtgccgtggcaggcgctgaccaacaaggcgtatgccaaatccattgccgatcagattgatatcaacaaggccaagcagtcgagcgagatccgcccaggcaagctggcgccatatgaaagcaaccagaccacccacttctcggtggtggataaagacggtaacgcggtagcggtgacctacacgctcaataccacgtttggtaccggaattgtggcgggcaacagcggcattctgctgaacaacgagatggatgacttctccgccaagccgggcgtgccgaacgtctacgggctggtgggcggcgatgcgaatgcggtagggccgaagaaacgcccgctgtcgtccatgtcgccgactatcgtggtgaaagacggtaaaacctggctggtgaccggtagcccgggcggtagccgtattatcactaccgtgctgcagatggtagtgaacagcatcgactttggaatgaacgtcgccgaagcgaccaacgccccgcgtttccaccaccagtggctgccggacgagctgcgcgtcgagaagggctttagcccggatacgattaaactgctggagcagcgcgggcagaaggtagcggtgaaagaggcgatgggcagcacccagagcattatggtgggtccagacggggcattgtttggcgcgtcggacccgcggtcggtggatgatttatcggcggggtattga

SEQ ID NO: 142166 - DNA, 501 bp, Enterobacter cloacae
atgataaataaaattctggtaagcgcatgcctgatgggcttcaaagtccgctataacggtagtgaaaaatcccgaatgaacgagcaactcgctcgctgggaacaggaacaacgtctggtaattcactgccctgaacttgctgccgggctgtctgtaccgcgtcccccggcagagattatctctgctgacggtaaagacgtcatgcacgggcaagcaagaataattgaaaatacagggcaggatgtgactgagcaataccggcttgcagcgtggctcgcgctgcaagccgcacaggaatctggctgcagcgccgcgttgttaacggacggcagcccaacgtgtggcagcgtggtgatttatgacggttcttttcgcggtatacgcaagacgggaatgggggttgcggcatcgctgctcgcagagcatgggatagcggtgttttcagagaagcaaatcgacgcgcttattgcctggattgcggaaagagaaggcaaaaaataa

SEQ ID NO: 142167 - DNA, 537 bp, Enterobacter cloacae
atgggctcactggtggccggtaatgacctttcgtggcatctgcatatgaggggtagcggtggccaggaggttaactttaaatgggacgttaacggaaacttttccgtgccggggcaaatatatccggggaacttcgcgaactttgacagccgctattataccaaggcgcaatctgacgcgggatatatgcctaaaactggtgcttataccaaagcagaaagtgacgggcgatttcagccgaaagggagttatgggaagcccggctcgtaccagattagcggcaatattctctggacaaaaaataatgataccggagtgatcgagatgacaggccaggccggttcaacgagtgccggggcgagaataacgtttccatttgcttttgcctccaaatgttacagcgttcacattaattcagtggcaagcagtggcgcaggaacagcgctggcggcacataccataaatacaaccggctttaatctgcagattgcaggcggtggcacagtggcgttttcatggactgcgaaaggaatttga

SEQ ID NO: 142168 - DNA, 423 bp, Enterobacter cloacae
atggctatttattacagcgcaacggcgcggggcttttttcctgattttctgatggaagaatataaagcggcgggtaactggcctgatgatgtgaaagagatttcagaccattggtttaactaccttctcggcaagcaggccgaaggaaaaatgattgtacctgatgagtacggactgccggtattgtcgaacccaccagagcccacacaggcggagcttatcagcgaggcggaggcaaacagggcggcgctaatgatggcggcgggcgcagcgattgcgccgttacaggatgccgacgagctcggtattgccaccgacgatgaaaaagaagcgcttacccgctggaagcgttaccgggtgatgttaaaccgcctcgacctcagtgcagcacccgcaatagaatggcctgaattacctgcctga

SEQ ID NO: 142169 - DNA, 7008 bp, Enterobacter cloacae
atgtcagaacatatccagaatatgcccctcttcgcggctctcgcggaaaagctgaacatcactacgttgtcggaactcggggatttttccctggagcaggtcctggcggcggccggcgatgacgttggccatgccgactgtcacgcgctgcacgccgaagcggtccgccgtctggcgctcagcaccacgcgtgagcgtcaagccgtcacccacgcaaacccgcagctgctgcaggccccgcatctgggcatttccgcgccggctcacgcggttgcctacggcaatgactttgtgacggaccgcaataaccagtttgtgaaagaaggggacgtgtcatccatgttctccccggcggcctatctgaccgagatgtaccacaacgcggagcaactgcacgataaggggaatacgtaccatctggatacgcgccgtccggacctggccaccctgacgctgagccaggacaatcttgacacgccgctgtccaccctgagcctgtcgaatgaaatcctgcaggccatgctgaaaaagcaaagccagtataatagtgacgacaaattgcacactgcactggcgcaaaacctgactcccccggaaggcccgtatcaccacgccttctccggcatcagcgaagcgctgcgcgaacgcgacgtgtctcccctcaccctgctggccccggaaaaccgtccggtgggccatgaggacgtggcggcgctgtgtctggcgctgggcatttccccggcgctgtacgcgcagctgacgacggacatcacgtttgagaatgcgaaggccgagtataagaaggtgtttggcgacacgccgccggaggcgctgcttaacgccagcgcgctggctgcacgctataacctgcctgaggccatgtttgaagaggcgcttgcccgctcggtgctcaacgcgccggataccggcgggaagtatgttgacaatgccatgaatgcttccctgacgattggcggcgagacatattttacccgggtgttccgtaccttcgtcggctactgggctaaattacaggatagcatcacgctcggtcatcgtgcatccggtgagcgtgagtttacgtatatttcatcggatagctctctgtcaaagaaactcgcccgtcttgtcgtcaacgagaccacggtctggcagggtgaaggcgaggtcctgaggagcgggatcacgcgatccctcgggaagacacgccccggcgccggtacccttgagtttaaccgcttaagtgatagctacaactattgggaccgggtcaaagcttatggcatcacgctcatcgctgagtgccactcatcgcacagctggctgctggcactgcatcatcaggtgctgctgcatcgtgcacttggcctgtcgctgccgctgattgcccgcctccaggcccgccatgacgacaacacggcgagtgtactgcgaaccgctgcgtcgttattgcgctttcagcgcgattacgccctggaggaagacacggccggcaccctgaccgggttgcatctggacgtcattccggctggctcctgcgccagtcagtacgatcgggttttcaacgcgccgcctctggatgggttttatatgtcgtatggagtcgatttgcagctggaagcgaattaccacacgctgcaagaagaggaccttaaatttttccagcgtttctaccgcgcgctggggctgtcatcgcatcaagagtttcagatgttaaatcgtctggcgctacactttgaatacttgactaattcacaggaatggctgagtcacctctaccgcggtaaactgctggccgatatccacggtctgaccgtctccgagctcagcaccctcctgcccctgctcggattcaacgaaccgctgtccgaggagaacttttcctccgtcgtcgacaaagtctggaccgccacccgctggctgcgcgcgcagaacctctccgtcgccggcctgcaggccctgctgacagaactcaccccggtgcagaccccggaaatcagcagcctggtgctttccctgcgtaatgacgtcgtcctgcccgtcgacgcaaacggtactcctgttgcccttaactacagtaacctgatcactgctctggctccgcacatggcctccgcgctgggcctgacctcgccggacatgactcgcctggtcatgctctgggtcgagcagaactatggcggtgtcgtctccttctggagcgctattgcttccctgaatatcaacggcactacgtttgtcatgccggttgatgcactgacctactgtcagaggctgggacaactggccgctatcgtcaagggcctggacctgagcgaacctgaactggggctggcggtagataaaccgaaagtgctgaacaaggatgctacccgtacaacaccttcagtcgagaacctgatgctgctgagccgccttcacggctgggtcagtgccctgggtgagcaggcctccgcggccctgaccgccctgcagaaagggacgctgacggtaaaactgctggcggagctgatgtccctggacggtcaggcgctggccgttgccgcgaagcaggccgggctggacaaactcagcgacttcatcgccgttgaacgcctgctgcagtggcatcaggccgcgcagaccctgaacgtcagcgccgccacggtgggcgagctcttcgcgatgcgctttgtggccgacgccggcaagccggtttccaccctggcgcagtggcagaccctgtccggcagcgtgctggcgggcctgtccgggcgagaacgtgcggcggtcagcgcggtacaggatgaacgcctgtcctccgccctgagccagctgtatatggagaaggttgcgccggctgaactgaagctgcgcacccgcgatgacctctatggctacctgctgattgacagccaggtcagcgcagatgtcacgaccacccgcattgcggaggccatggccagccttcagctgtacgtgaaccgctgcatgcagctcggccatctggagtccggggttaaaaccggggcgctgagccgtacgttcttccgcgagtgggccacctataaccgacgctacagcacctgggcgggcgtgtcccagctggtgtattacccggaaaactacgtcgacccgagccagcgtagcggggaaaccaccatgatgcgcaccctgcagcagtccctcaaccagggtcagctgacgcaggaccaggtggaggatgcctttaaaacctacctggcggagtttgagaaggtggccgacctggagattatcagcggctaccacgacggcctgaacaaccgcagcggccacgtctggctgattggcgccacccgcgagtccacgccggtctactactggcgccgggtggacatgagccagtttaaggacggggcgttcccggcgacggcctggagcgagtggcaggagatcaccgtggcggccacgccgcttaacgccctgatccgcccggtcatccgcaacgggcgcctgcacctggtgtgggtggagcagcgccaggacggcatgaaggatgacaagccggtctggaaggcagacctgaaaaccgcccaccttcgccaggacggggcctggagcgcggcaaggatctttgaggacgcaataaagtatgtttatctggctgaccccctcatgcaattgtcgtgcctggaggacattacaacaaactgtgctgacatctatttctggagtaagaaacaaggcacctcaccattgatttatcgtgcgtgtacgctgtcggatacccgactgacagataaagtggtcgataaggtgcccgttttggggctgttcaacaggcagagcagcctgcccgtttgccacccggtatcgcgcagtggggtgtatatcagcaattacatccgccactatgatgattacctgaaaaccgagcgtgccatcctcactgaagtgggaaatagctataagctgagctgcgacctgacggtgattaaagaaaactatatgcctttcaaaaatcctgaagtttatctgcaggttggctacgatgttattacatacaatcccctgaacgccggtgaactcaatactccgggcagaagactcccggtgtccctgaccttcccggcttcagcgatcagcagcgaatcctcccagatggtcactcttgctgtgcgtgagtccggcaatatgattggccctccgataaccatttttgagtttctccgtgatgcggtgaacgataacaccctcctgacgctgcataccgccgggaacggcgcgcagtcgatggtctggggctttaacgccgctaaccgcgtgcgcctgaacaccctgttcggaccggagctggtcagccgcgccgcccgcggcctggacgctatcctgagcctcgagtcccagtcccttccggagcccgccatccagcctaaaggcgcccgggtgaccctgaccctggataagtacagccccgctatccacggctccggtcgtaccgtcacgctgcgccagaacctgatcaccgggattgatccggtcatccttttcaagggggaattgagcgccgacgcccccacgcaggtcacggtgttcctgaagtataatggcaaaggcagccagccaaataacttatacctgcagtatgaatactactcaggcggctttggaaccattcgtatccacaaaaaaggcggcgatgccgacgtctggtcgctggataccgattacaataacggcaccttccggggcctgatccgcgtggaccgcgtggagacctttggcggggaaacacagcctgagccgatggacttcgccggcgccaacgccctctacttctgggagctgttctactacgccccgatgctgattgcccagcgcctgctccaggagcagagcttcgacgacgccggccgctggctgcgctacgtcttcagtccggaaggctacggcggcaacgccgaccgccactggaacgcccgcccgctgctggaagacacctgctggaatgagaccccgctggacagcaccgacccggacgcggtggcccagagcgacccgatgcactataaggtggccaccctgatgcgcctgctggagttgctcaccgcccgcggcgaccacgcctaccgccagctggagcgcgacaccctggccgaggccaaaatgtggtacgtgcaggccctggccctgatgggcgacgagtccgtcacccgcccggccgtctgggccgcgccgaccctgaaggacgccgctggcaaggtcgtgaaccgcctgcaggcgatggaggaccgccaggcgtcgccggtacgtatcctgtccgcgcagccctatacggctaacgccctgaccgggctgtttaacccgcagcagaacgcccgctggcaggccatccgccaggacctgatgcagcgcctgtacaacctgcgccataacctgaccctggacggccagccgctgacgctgccgctgtttgccaccccggcagacccggccgcgctgctgagcgccgccgccgccgccggcaagggcggcacgccactgccgaccggccgcgaactggggctgcaccgcttcccgctggccctggaaagcgcccgcaacatgaccggccagctgatgcagttcggcaacgccctgagcggcgtgattgagcgccaggacgcggaggcaatggcggtgctgatgcagacccagggcaaggcgctgatggtccagagtgtggcgatgcagaagaaaaccctggaggagctgggcaacgaggcgaaggccctggccgcctccctggcgggggcgcaaaagcgccaggactactatggccgcctgtatgacgagaacatcagcgcgggcgaaggctttgcgctgggggcccgcgtcactgccggcgccatgcaggccgcctcccgtccgctgatggccgccggcgccgccgccaacatggcaccgaacatcttcgggatggccggcgggggctcccagtggggcagcattccgtttgcggccggcatggcgctggaaagcatcgccgcggggatgatggccgccgccgacggcgccgcgcagggtgaaatgtaccgccgccgccgcgaggagtgggcgatgctgcgcgataatgcggaaaaagaggtggagcagctcaccgcccagcaggcgtccctgacggtgcgtactgacgcggccgggctgcagctgaactacctggaaacccagcaggcgcacaacgaggcccagctggccctgatgcagcgcaagttcagcaatcaggccctgtataactggctgcgcggccgcctctcggcgctgtacttccagttctacgacctgaccgtgtcgcgctgcctgcgcgccgagaaatccttccagtgggagaccggcgagacgcgcagctttatcaggccgggggcctggcagggcacctacgccggcctgctgtgcggcgaagcgctgatgctgaacctggccgcgatggagagcgcctaccagaaatgggaagcccgcgccctggaagtggagcgcaccctgtccctcggcgagcgctacgggaagctgtccaccgggaagttttcgctgaaaacgaccattaagtcgcagcttgacagcggtaagggcgaggccggcagcggtaaagacaccgtcagcctggataaggatatcctctccgtcagcgtggagctgaaggggctgggcctggcgtcggactatccggacggcatgaagctcggcaaggtgcgccgcatcaaacaaatcagcgtcacgctgccagcgctgctggggccgtatcaggacgtgcaggcggtgctgggctacacgggcacctccccgctggcccgcggctgctccgccatcgccgtctcccgcggcatgaacgacagcggtcagttccagctggacttcaacgacgggaagtacctgccgttcgagggcattgatatctcggataccggtacgctgaccctgcgcttcccgaacgccaccggcgcccagaaggccctgctggccagcctgagcgacatcattcttcacgttcgctataccatccgcgactga

SEQ ID NO: 142170 - DNA, 4416 bp, Enterobacter cloacae
atgcaggatattcaggaaccggttgccgtcacccagctgtcgctgcccaagggcggcggcagcctgcagggtatgggcgagtccctgggcacccccgggccggacggcgtggcgcagatgagcctgccgctgcccgtctccgccgggcgcggcatggcgcccgcgctcagcttaggctacagcagcgccggcggtaacggcccgtttggcctgggctggcaggcgggcgtgatgagcgtgcgccgccggaccagccagggcgtgcccgcctacgacgaccaggacgcgtttatcggccccgacaacgaggtgctcgtcagggagctcgatggtcacggccagcctctggtgagggaaacggcgacggcgcagggcgtggcgctcgcgcaacgctggcgcgtgacgcgcttccgctcccgcaccggcgccggcgccccgcgcatggagtactggcagccgctggccgccggcgccttcccgttctggctgtgccacacgccggacggccaggttcactgcctgggacagcgcgccgatgcccgtctctccagtccggacaatccggaacagattgccgagtggtacctgcaggagtccgtctcgccggacggggagcacatcagctaccactacgccacagagaacgacgccggcaccggggccgccgagcgcgaggcccatccgcgggtcgcgcagcgctacctgcagcaggtccgctacggtaaccggacgccccgggcgaccctctttgcctgggatgccatcccgcccgcgcccgacgagtggctgtttaccctggtgctggattacggggagcgtccggccggtctgaacacggtaccggcgctggcgaccagcggggaatgggggctgcgcgccgacccgttctcacgctacgactacggctttgaggttcgcacccgccgcctgtgccgtcaggtgctgatgtatcatgatgtggcggcgctggacggacgccgcgccgcgccgccggtgctggtctcccgcctgctgctgacctatcacgcctcgccgtcggtcacccaactgactggctgccggctgctcgcgcatgagccggacggcaccccgtgcgcccgagcgccgctgtcgctcggctatcaggcctttgagccacagcacgcgccggcctggcgccccctgaccggcctgcaggggttcaacgacggcctgcgctatcagtgggtggatctgtataacgaaggtatgccggggatcctgtatcaggacgagcacggctggcagtaccgcgccccggagcgcaccccgggcacgacggacgggatcacctatggccgtccccgcctgttacccgtcccgtccctgatgcagggcgggcgcctgatggacctgaccggagacggccgtctggactggctggtagcccgcccggggctggcgggcttctaccgccgtcacccggataagggctggggcgattttacgccgctggccgcgctgccgacggagttctggcaggacggcatgcagtttgccgacctgaacggcaacggcgtgtcggacgttgccctgattggcccgaaaagcgtgcgcctgtatccgggcacccgcgagggctttgcgaccggccgtgacgttgagcagaccggcggcattacgctgccgctttccggcatggatgcgcgtgaactggtggcgttcagtgatttaccgggctccgggcagatgcacctggtgcgcgtgcgccatgacggcgtcacctgctggccgaacctggggcacgggcgcttcggcgcgccctttacggtcccgggcttcagccagccggaaggcgagtttgatccgggccggctgttcttcgcggacctggacggcaccgggaccacggacctgatttacgcccatgccgatcatctctgggtctattttaaccagagcggtaaccgcttcgatacccctctggtgctgccgctgccggacgacgtccgcttcgatcatacctgccagctgacggtcggagatctgcaggggctcggcgtctcgagcctggtcctcagtcgcccgcacatgagcgagcagcactggcgatatgaccttgccggccttaagccctacctgctcagccgggtgaacaataactgcggagcggagagccgcctgcactaccgcagctccgcccagttctggctggatgagaaagcggcggccggcgacggcaatctgccggcgaaccacctgccgttcccggtgcatctgctggccgccacggagtcactcgatgaaatcaccgggaaccgtctggtccagaccgccacctaccggcacggcgtctgggatggccacgagcgcgagttccggggctttgccctggtggaaacccgggatacggacgagcgcgcgcagggcaatgccgaagagcgcagcgccccggtgctgacccgacagtggttccatacgggcgtcgtcggggatgagcaccgttatcgccaggcctactggacgggtgaccgccaggcggtgaagccgggtgccacgcgcctgacccgcgcggagggagacaaggaggcggcgctggacgccccggcggcgttgcagtactggatgcaccgtgcgctcaggggaagcccgctgcgcacggaggtgtatgccgccgacggcagtgcgcaggaaacggtgccgtaccaggtcacggaggcccgctatcaggtccgtgtggtacagtctgccgcccccggtgcaccgtatccggtggtggccccgcagccgcttgagcagtggagctatggctatgagcgcgtggcagacgacccggttgtcagccaggaggtcacgctggccacggatgcgttcggctacccgctgcgcacagtctccgtcagctacccgcgacgtgcccgcccggccgcatcgccttaccgtctggatttaccggagggcgcctgggaggcaagctatgacgagcagcaggacgtgctgcgcctgacggaaaccgaatacagctatcatcatccggatacggtgcacggctggcgcacgggacttccgcatcagcagcgcatcaacctggtgacgacgtccggtgcaggcagcacgccgtacctgtctgcggaagatttgctgcaggacacggggctgctgggcacaaatgccccccgacagtacgccggacacaccacggtgcactacaccgccggtcgggcggatagcccgctgagcgcgccgacggtgcaggccctggtggcctttgaggagagcgccgagctggacgccgacagcctgaaggcgctggacgggattctgagtgcctcagagcagcttacactgctgcaggaggcgggctacacgcaggccctgccggcgtttgcccgtcccggtgaggcaaaagtgtgggtggcgacccgcgcactgacggattacggcagcgcggcgcagttcttccgcccgctggcgcagcgagcctctacgctgacgggcgccacgacgctgacctgggaccgccaccactgcgtcgtgacggcgacggaagatgcggccgggcaccggacccgcgccgtcgtcgactaccgctttatggtcccggtgtgcctgacggacatcaacgccaacgacagcatggtgacgctcgatgcgctgggacgggtgaccagcagccgcatccgggggacggaggacggcctgccggcgggctgcccgacgccggaagcggtcccgttccgggtgcccgcctcacctgaggaggccctggcgttgtccggtccgctgccggtctcgcagtttatggtctatgccgacaacgcctgggcccgccgggtaccggatgacgtcgacccgtccctgcgccaggcgctgcatgaggccgggatgatgacggaggacggctgcctgtgcgcgctggcgtacgcccgcgccctgaagcgtcccgggctcagcgtgctgatgtccgcactggacacggacagtggccgggcgccccctcacgtgctgacggtggtcaccgaccgctattatccggatgcggaacagcagcagcgacagcaggtggtcttttttgacggcgccggccgggaactccagacggcgcagcgcgtgccggcgggtgaggcctgtcagcgtctcgatgacggctccctggccatcggtgaggatggccttccccgcaaggcgcactccgggacgcgctgggcaattaccggccgcacggagtatgacaacaaggggctggcggtccgccgctaccagccgttctttatcaacagctggcgctggctgcgcgacgacagcgcgcgtgaaaacgcctgggccgacacgcacgtttacgatgcgctgggccgggaaactgaggtgctgaccgccgccggctggcgccgccggacgcagtacaccccgtggtttgtggtcagcgaggatgagaacgatctggcgcacctgagctga

SEQ ID NO: 142171 - DNA, 1116 bp, Enterobacter cloacae
atgaacagaacaccaactgtggtaaggcgaaaatcaaccagaatctatattggcagcgtgccggtgggagatggagccccgatcacggttcagtccatgacgaatacccccaccggtgacgtggaggcgacggtccgacaaattaacgagcttgaacgggtgggggtggatatcgtccgggtttctgttcccacgatggaggccgctgatgcatttcgcttaattaaacagcgggtcaggattccggtggtggcggatatccattttgattatcggatcgcgctgaaggtcgctgaatatggtgctgactgtctgcgtatcaatccgggaaatataggaaatcaggcccggatccgtaccgtggtggactgcgcccgggataagaatataccgatccgcatcggggtcaacggtggctctcttgaaaaagacattcaggccaggtatggcgagccgacgccacaagccctgctggaatcggctatgcgtcatgttgatatacttgatgcgctgaattttaaccagtttaaggtgagcgtgaaggcttcggacgtgtttcttgccgtgggggcctaccgtcttctggctgcccgaattgaccagccgctgcacctggggatcactgaggctggagggatgcgaagcggcgcggtaaagtctgccgtaggtctgggaatgctgctggctgaaggaattggcgatacactgcgcgtctcgctggccgccgatccggtcgaagaagtcagggtgggatttgatatcctgaatgctctgcgcattcgttcccgggggatcaattttatcgcctgtccaacctgctcacgacaggaattcgatgttatcggtacggtgaatgcccttgaacagcgactggaagacatcaccacccccctcgacgtttccatcattggctgtatcgtgaacggtccaggagaggcgcaggtctctgcgcttggggtgacagggggccataaaaaaagtgggttctacgagaatggagtccgacagaaggaacgtctggacaatcatcagattgtcgcccagctagaggacaggatcaggtcaagggtacaggctattgaggccgaacgtattcaggtcaaggcgctggactga

SEQ ID NO: 142172 - DNA, 192 bp, Enterobacter cloacae
atgaagggccagtcccatctgcctctccctgccttcttcatcacaggggggatgaaccctctggccttaactgcctggataaagcgggtgtttttagatttacgaccgatgctcattgctggcgagcttcggacagaaagaaacagagcctgctcttctgaagagcaggctctggctggttccgatatctga

SEQ ID NO: 142173 - DNA, 2916 bp, Enterobacter cloacae
atgacaattccattaaccggttcccttcatcgggggactccgaccatacaggtatttgacaaccgcggtcagacggtccgcacccagcagtttcaccgcgatgatgtcgggcaatcagcagccctgcgactgacgcgcacaacctattctcccggtggattcccgctggccacctacgatccccgccttcagatacccgtgcgtagctggagcccgacccttagtggatcccccctgcagacccgtagtaccgatgccggtactgactgcacgctcagtgatacagagggaaggccgttatggcagctcgatgccgggggaaccatacgccgctggcaccgcgaatcaccgaaactaccgggtcgcctgctcgccgtaagtgaacagtctcccggagacactccccggatccgggagcgttatgtgtatgctccggtcaccgcagacagtcaggcgtataatctctgtggacatatcctccgtcactacgatcctgctggccgtcaggctgtactgtccgtggggctggggggacaggtattacgtcagcagcgccatctttgtgcggataccgcgcgtcagcctgagtggaaagcagtgactgaaaccgactgggaaatgctgctggccccggcgtgcgccatcacaactattgttgttgatgcctgcggccagggcgtgcgtcagacagatgcagccggccacgtacaatgtcagcgttataacattgccggacagctggtacagcggacactgcaacgcaaagggaattttgtcctgcaaacattactggctgacgtgacctataccgctgacgggaacatacagcaggaaacgctggggaatggtgttgtaacgcgctatgaatattcaccgcagacaggcagactggtcagtctgaaaactacccgctccaccaccgggatcccgcgcgtccgggttcttcaggacctgcgttatacttatgatccggtcggaaacgttctgtctgttcgcaacgacgcggaagaaacacgcttctggcgcaatcaaaaagtggtgccggaaaacacgtacgtctacgacagtctgtaccagctgatccaggcgaccgggcgcgaatcatcagataatgtcacatctggcgacgggccggggcaacagccagttatccagattcctggtgacgtggtcaaccggagcgtaaactattcccgacactaccgttacgatgcatccggaaacctggttcgtatccgtcatcacggggcgtcaagatggagccgggagctgaccgtgtcggatcgcagtaatcatgcccttcttaagcagggaatgtgggggtccattacgccgcagacggttgatgcccactttgatgcagcgggaaaccagcgggcacttcagcccggacagaatctggtctggaacgaaagtcagcaactggcggcggtccacatcgcctctcagcccggagagcggcgcaacacacaacctcaggagtactatcagtatgatgccggtgggctgagagtggtgaaagaaaccctgcagcaggcacgcactgtcagccaccgcgaaacggtggtgtatctccccggacttgaataccggcgctgccgacagggcaaagacacaaccgagtcgctggcggttattcttgcgggtgaggtacaggtactgcactgggatcaggaacatgaagtaccatcagggatgaccaatggcagcgcacgctatagcctgagcggcgcaaccggaatgaacgctatggttctggatgaaaaaggcaatatcatcagtgcggaagagtactttccgtacggtggaagcgcgtggcgggcttcgagcagcgcggtggaaacacgttaccgtactcatcgctattcggggaaggagcgtgacgcgacggggctgtactactatggctaccggtactaccagccgtgggcaggtcgctggctttccgcagatccggcaggaaccgttgacggtctgaatttgtaccgtatggtacgaaataatccgataaccctcagcgatcctgatggcctcgcgccagtcagatcaacagcgcaacagaagcagattcttcgtgaccgtttcgtttctaatatacgacacgcaggccttcacctcaaagaatttaaagctattcaccgagttgccgtggagaaaacatggcatgttaatgtccgcacaggaaattctgctcgcgtggattacgttggcaaaatggggttccggcctaaaccggcaggcgtatatcaaaaaacgtttaaaggagataaaaatgaggggcttgtgctttacacgggagatcaagccgagaaagccaaacaggatgtgcacacaatcaataacccttcagccgatgccccggaggcgctacaggttcttagcaaggaaggtttccgcctggatgtgattaatgaagagcaggcagcccttgctgatggattcgggaatcaagtatatggcgacatcgatatccatagcgtgcttgacgaaaatggtggctttgtagctccggaagtatgggttccggctctgaatacggcgctggaaagtaccggattgcataaggctgagaacctgcgcggatggggaaattattctctgactaaaccctatggcgtcaaggctcattcccccatacagcatggtgctcatgatgaatggcatgagcgtaatgacgaaacttatgccgggggcatcaatatgggaccccagcccggcgtaatgaatattcgaggtatggcgatcgcgggtgattttgagttatttacaaccgagcaatacagggaatatatgcggaattttgcgcgggacaaagatagtgtttacaccgacgcggcctggagaaaaggtgctgcgcgagtaaattcggtttaccgactgaatatcaaaggccatactttcaggtttaaatcatag

SEQ ID NO: 142174 - DNA, 306 bp, Enterobacter cloacae
gtgccttctgatgagctaaaaaaggctgcatgctggcagtactattcagaacagccagcaatcatgtttcagctcatcccgggtcgtttctttgccgaatcaggggctggaaatgttccagttatcttcaaaatccgggaaatacattgcgatattgtgcataagggcatgagggttacaacgctcaaggccagcaaagagagggctcataaaatggcgggcacaatgtttgcgagtcacatgacgccggggaagcttttgtttgccgatccggccaggaatgaccagggcaacgctcagctatag

SEQ ID NO: 142175 - DNA, 1335 bp, Enterobacter cloacae
gtgctgaaggtgagcgtgcagaagacgggcagcggcgtgcagaggcggcgggtggtgtacctgccggggctggagctgcgcagcacgcaccgcggtgacgcggaaacggagcgcctgcaggtgatgacggcgggcgaggcggggcgtgcgcaggtgcgggtgctgcactggacgtcaggcaggccggacggcatcagcaacgaccaggtgcgctacagccacgataacctgacggggagcagcgggctggaggtggacggtgacggcagggtcatcagcatggaggagtactacccgtacggggggacggcagtctggaccgcccgcagcgcggcggaggcggactacaggaccgtgcgccactcggggaaggagcgtgacgcgacggggctgtactactacgggtaccggtactgccagccgtggtcgggccggtggctctccgcggacccggcggggacggtggacggcctgaacctgttccggatgtgccgcaataatcccgtcacgcttaaggatgaagaggggaaatggccggttaaccccttctcgtttgagagcaaggttcagagtgcaatgaaagatgctgttcgttatatgagtacggcgctggatgttctggaaaaaaataactctgacgctattgccagtattgcggactccttgtatggcaaccattctcaggaaacactgaatcaatggaagcgtaatttaagacagagtattgtttatgcccaggcatttgatgcatcgataaatcttcatgtttttgatagccaggactctccttctgctgctttcgtaaatacacaagaagccagggaatactcaaaatatctcttaaccgtctcacgaatccagaacagtgaaacggatcgcaggacaaaaaaaatcgacctggctgaagcggagattaactatcgtgatgaaaagcatacgaaatatcttcacattaacaaattcaatgtgaaactagaaatggctaattttgggagagactatttggttacttcgcttattcatgaactctctcacgccagcagcaataccaatgattacgtgtatgcagctgcgtataaggagcgcccgaatgaagtcgcttattttacactgaatgcgctggttcgcggagaagtgccgagggagcagcaactgccagcttaccggacatcagcagataccggtgaggaaatggcaaaatggaacgcggatacgtttgcgcatgccactaacttactgttttcctccactcactccggaagacatggccagaattacaggaacttcctggagcaaaagcgaagaggtttcgcaagaccagacagcaggaattga

SEQ ID NO: 142176 - DNA, 159 bp, Enterobacter cloacae
atgaaactgccacgaaataccctgatctggtgtgtattgattgtgtgtctcacactgctgatattcacttacctgacacggaaatctctctgcgaaatccgttacagggacacgaacagggaggtggcggctttcatggcttacgaatccgctaagtag

SEQ ID NO: 142177 - DNA, 453 bp, Enterobacter cloacae
atgagaaataacccctgcaagacggagctgaaagtcgcccgcagccagcgtaacaagctccgtaccatgtcggcaaagctgaaagagatgtgctgcgagtgggacggactcagtggctggctggaaaccgaaagcgagcagctggctgagagtatagacaggcatcttgaggcgctcgaagaccagatccgtgaatggtcagtaggtacggataaccggggagggatattgaacatcatcagtcgcaggttcgacaaaaaagaacccggaaccgtgttccgccatgctgaaagcgggaagatcatgtatcgtctcgatgcccggctggagcgggatgactgggagatagtgcaggcgataatcagccttgtctataacgccggcgtggccgccggaagcaaacagcgagccgctgaaattcgtgaggctctggggatttcaggagctgaatga

SEQ ID NO: 142178 - DNA, 1695 bp, Enterobacter cloacae
atgtcaactttaaagcaatctgaatcgcgacgggattttattaaaatggcaactgtaactatagctgccagcgcgatgggagtcgcagcaagtgaccgtgcgatagctacgacagccagccccatgaattatggaaacgagatgagtaaaaaatcgcctttcgaccaccattttgattttgtcatccttggcggcggatcggctggggccgtcatggcagcacggcttagtgaagatggaacccgaaatgttttacttgtggaagccggacaggcttttgatcctgaagcgtaccccgagctgctctacagcagtaatattattgcggcgaagggagacccccgttatgaatgggggtaccatgcagttccggtgaagcaaagtgaacccgtttttgccccgcggggtaaagttatcggaggaagctctgcgattaacggcgctgtcgcctgtcgcgccctcccctatgattttgaaaaatatgcagcaaagggcataaacggctggtctttcgaagaagttcttccatatttcagaaaaatggagacttatcatggtggggacgataaatggcatggacgtgaagggccgtttccgatccatcagatgacaatggattatatcactccggtgcagaaagccatggtcgaggcagcatggaaattaggttataacaaagtttttgattttaacgatcctgaacataacaacggggcaggccctaatccgatgaacatcatcaacggagtcagggtgaatacaggaatggcctatctgacaaaatcagttcgtgaacgccctaatctgacgattcttaccgggcaactggttgaccggcttttgtttgataatagaaagcgcgttaactcggtattgttgtcagatggtcaacaggtacgcggaaatgaagtcatccttagtgccggagcctatggatccgcggcgatcctgcttcgttccggcatcggccccgaacaggatctgaatgcgctgaatatcccggtgataaagaatgcgcctgtagggactcgcttgctggatcatgctttctactggatgaatttctcaggccaccctgacctgaaagatgctgaacatccggttgttggttcacagctctggacaaattcaacttattctggctctgaaggtgcgcttgatatcgctatttctccctctcatctgcttgatccggatatcagtaacacgggcgtagcgttctcactcgggctggagctaatggagatcagctcggtaggccatatcaaattacacagcagggatccaaaagatgctccgataatcagtctgaatcatctgacctctgaagatgatatgcagcgtatggtagaatgcttccgtattgccagaaaacttgcccggacagagccccttaagagcctcattgttgaggagatatatcccggcccagccgtcggcgactctgatgtcgaaatcagggaggctcttgcaaaaggggtaagtacgctacaacatccttgctctacagcgccaatgggagtgcctggcgatccgtatgccgtggtcaacgaaaacggtattgtttatggtattgaaggggttcgggttgttgatgcatccatttttccggagatcccgttgattaacctgaatccgaacgtaatcatgatggcggaaaaaatagcagcgcaaatccgtggtactgataagtaa

SEQ ID NO: 142179 - DNA, 819 bp, Enterobacter cloacae
atgcatactacatatctgatcggtactttactggaaattaatcatcaatcgagaacgctgattcaccgtggcaacaaaactgaggttgccttaccgacttctggttgcttttgtttgcaggctttagctgaacgtactggtgacactctgtctcttacagaactcatggatattggctggaggcattccggcgttgaagtcacagaaaacagcgtacgagttatgattaacaagattcgtaaagcgatctcttcgctcggtacgcagcacgatatcatcctgttaaccgtacctcgtagtggttatcgtttactggtaagtaataaggaacaatctggattattaccggcaacagaaaaaaataccgatgaacttacgacatcaatggcatcactcgtcgacagggacaggtgtaagcggtctgtcctctcctcagatatgctcttgagccacattaagaatatatccggccgtatggttatattaggttgcagtttgctggttatgatagctattgcctgtacaaactggagtataatttccagtcataataatgaaaatgataagcgaaatggtgaatggtatttttcagtaaaagaaactgataccaaaacatctcatttttttaagattacagagcattctccctccccagctgccacgctaattagatggacaagcaacaattcattgttcgtaaagttaaagcataacgtcataaacatgattctggcttataccttgaatgttgttcaaataatttgtgccacagattcaaaacctgtgtgtatcagtgaaaggatttataatgcatactga

SEQ ID NO: 142180 - DNA, 639 bp, Enterobacter cloacae
atgttagatatcaccagtgacattcaattaaatactgaggcaaatatacttttttgtaacgccacaccatacagcatcactgagaaggagaagaggctgcttgtactgctggttgaaaaatcagttaccgaagatgtcgttacccgcgaggaaatcattcctcgggtctggcctgaacgacatcatagtgtgacagataccaatatattacagctggttagcaagctacggcgtacgctgagattttgcggtctggatgcggccatacataccgttttacggcagggttaccggtttattccagatgaaccgcattcagtacagactaccagtgatgtgagatcacaatccttaaccccttcgcaggctggacctgctgctttctttacctcttttctgaagccggggttcctgaaagttatgataatcgtacctgtaattttgtcctgtgttctttactattgttcaatacctgcagcaaaccgtgccatcataaaagagctaattcataaaaaaagtggggttgtcaatgccgttgaggtattcagctccgaacaaggcacccatgttctgttccgttttgataacacaccggctattataaaattaataccggaatcagggaataaccagacataa

SEQ ID NO: 142181 - DNA, 339 bp, Enterobacter cloacae
atgataaaaaatgttttatatacaggcttaatttccctgttactgggcgccatgttttggggttacaaaaccagccacgctcttgtcagtttaactgcagaaaatcgtcggctggaaaatgaactttcagctttgcgcgaaaattctcgccgtcttcattctcagtcctggcaattaatggaggatctctggagtgtcaatatacaaaaacgtgaagaggataagcacagtgaaactatccttagggcgttacgtgaagcgcaacgtgacaatgtctgcgctaatcagcctgtgcctgatgctgttatcaggatgcagcaggatgccagtaccgactga

SEQ ID NO: 142182 - DNA, 402 bp, Enterobacter cloacae
atgaacattcacatgaataaatttacatttagtcgtatcagcgagcaaaacttgcggggaattcatcccgatctgagccgtgttgtttatcgtgcactacaactttccgccatcgacttcagagtcatcgaaggtgttcgctcagccgagcgacagcgacagctggtgcgcaatggaagtagcaaaacccttaacagcagacatctgaccggacatgcagtcgatctggcaccctgggtacatcacactatcccctggaatgaatggcattgttttgaaaccgttgcggaagcaatgaaagctgcggcaaaagagtttcaggttcctctggtatgggggggggactggaaaatgcgtgatggcccgcattttgaactgagcagggaggcgtatccggtatga

SEQ ID NO: 142183 - DNA, 309 bp, Enterobacter cloacae
atgccattcagagagcctggcgaggcaaacattataacatggcttattataggtgccttttcaacatgggggggattagtcagatatattatggacacgcaaaacaaacagacaaaatggagctggatggggattatctgccagctgatcgtctcaggttttaccggtctgaccggtggcctgttaagctttgaaaccggagcaagttcttatatgacattcattgttgcaggattatttggcacgatgggaagtacagctcttagttatttatggcaacgtattttccccgggagaaatttaccatga

SEQ ID NO: 142184 - DNA, 1692 bp, Enterobacter cloacae
atgagtgccaatccagaagacagggttttgatcgagattattaataaagtactgaattctttgacgccaacacagcacgggaatcttatagaaaaatggattgtatccggtgaaaataaatcggataacacggggggcagttctggtatatacatatcactgtcagtttttttattaattcttttaattgtcactctctgttattactggaaagccagaaaaaatttgctaaggcagcacacacaaaaaaatctggaactttcagtcatatctcatgaactccgaacgccactgatcgggattttgactgcaaccgagggactgctcagcagccctttatctcttaatcataaagacagattattaaatattattaatgtcacgcgtgcaatgttagaaaacctcgatttgtctctggattatgccagaatcagttccggggcggtcagactcaatcctcagcctcatttactgtcatctctctgcgacaccagtattaaattattcgtcgattttgcagaaactcatgaaacaacgctacaggtgcggtatctttcagacaaagcttttcagcctcatcttgtcgatggagcattgctctctcaggcgattaacaatgtcgtcagcaatgcgataaagcacaccagtggagggcttgttttaatggagtgttctcaggttcaggtggatggaaaaagcatgttttgcattgaaatcatcgatacaggaacaggcattcccgagaaggcactccggcgtctggcggagccttttgtccagttcgatgaggatgtaccagggccccatgagcgccctaagggatccggactcggcctgtttgtctcaaaacagaatatgcagttattaggagggcatcttgtccttaacagcaaaccgggtattggttcacgcgttaagcttgtttttcctgtcattccaggacatttacagactgaaaaatttcttccagcacatatccagctcaggctgaactccactgactcagctcctgtcagtgaactaatatccgtattagaaaacagtcatatctcataccatattgcagaatgtccttctacaacgaaaccggaatatgactccacattgttaatcagctttgaacgacagaagaaacagtggctactgtataatagcaataatgagtgcatcacattaaactgccctctgtatgcatcagacgtctatagcgccgtggttgaattaagttgccaccgtagtgaggccgttagctgtagtgatgccgggccttcagttgaagatatctgtgttttcccggttatttctcgtcgcgttcttctgatcgatgatgagccactgctgcttgaggtccagcaagaactctttattgatatgggctatgccgttgatgcagtttgtgaagctcaacaggcatatcaccgctggctacagcatcgacatgagatcatcatcacagactgtcggctagatgagagcgatggattcgagctggttcgccatttaagaaagctgatgcagaattcctcttctgatgtgttggttattggccagtctgcagcactaagagacgatgatatccggttagccagggaggtgggcatggattttctgctgcagaaacccattgcacgtgaacaatggcagcagctgattcaggattatttctctgataaggaccttaacattgtctga

SEQ ID NO: 142185 - DNA, 129 bp, Enterobacter cloacae
atgtgctgtatgaacaagtattttcagttccgggcgtatgttaagtatgcgttttataagtgtcacaccatcatattcctgaatcaggtcttcaccttcatcttcattggtattcataacgacaagtga

SEQ ID NO: 142186 - DNA, 783 bp, Enterobacter cloacae
atgcatactacctatctgatcggttccttactggaaattaatcatcaatctagagcactgattcaccgtggtaacaaaaatgaagtttccttgcctacctctggttgcttttgcttgcaggctttagctgaacgtggtggcagcactctgtctctcacagaactcatggagattggctgggggcattccggcgttgtagtcacagaaaatagtatacgagtgatgattaacaagatacgtaaagcaatcacttctctcggcatgcagcgcgatatcatcctgttaaccgtccctcgctgcggttatagactactggtaactaatacattacaaccaggattactacctggaacaggaaaaaataccgataaacttacggcatcaacggcatcaacggcatcaacggcatcaacggcatcaacggcatcaatagtagttggcagggacaggtttaactggtcagtcttctcctcagatatgctcacgagtacgcttaagcatatatccggccggatggttgtgttgggttgcagtctgctggttatgatatccattgcttgtacaaactggactataatgtccagctttaataataaaaatggtatgcaaaatgatgaatggtctcttccagtacacgatactgatactaaagcatctcatttatttaagagcgcaggatattatcccccccttggtgagacgcgattcagatggataagagataattctccgctcgataagttgaggcataacatcacaagcatgttatgcagcgtatggtaa

SEQ ID NO: 142187 - DNA, 639 bp, Enterobacter cloacae
atgttaatcatcaccagtgaaatccaattaaatactgaggcgaataaacttttttgtaacgccaccccatacagcatcactgagaaggaaaagaggttacttgtactgctggttgaaaaatcagtcaccgaagatgtcgttacccgcgaagaaatcattccccgggtctggcctgaaagacatcatagtgtgacagataccaatatattacagctggttagcaagctacggcgtacgctgagattttgtggtctggatacggccatacataccgttctgcggcagggttaccggtttattccagatgaaagtcattcagtacagactaccagtgatgtgagatcacattccttaaccccttcgcaggctgaacctgctgctttctttacctattttcttaagccggggttcctgaaaattatgataatcgtacctgtcattttgtcctgtgttctttactattgttcaatacccgcagcaaaccgtgccatcataaaagagctaattcataaaaaaagccgggttatcaatactgttgaggtatccagctccgaacaaggtacccatgttctcttacgttttgataacacaccggctgttacaaaattaataccacaatccggtaataaccagacataa

SEQ ID NO: 142188 - DNA, 309 bp, Enterobacter cloacae
atgccattcagagagcctggcgaggcaaacattataacatggctaattataggtgccttttcaacatgggggggattagttagatatattatggacacgcaaaacaaacagacaaaatggagctggatggggattgtctgccagctgatcgtctcaggttttaccggtctgaccggtggcctgttaagctttgaaactggagcaagctcttatatgacattcattgttgcaggattatttggcacgatgggtagtacagcgctcagttatttatggcaacgtattttccccgggagaaacttaccatga

SEQ ID NO: 142189 - DNA, 264 bp, Enterobacter cloacae
ttgtttgatacctctttttttcaacgtttttatgttgccctggaagcttatctgcaacaggcagaaaccgaagtgagaaacggcaatctggctgcagctcgtaaaattgcgcataaaatgctggggttgtgtcagcttttcgggactgcggaacaaatcgcactgtgcgagcaaatagagcattctcagtcattatcaaatattaaaatcattctgggtaatttaaggaaaatgattagtgataataaagctaaccgtcagtaa

SEQ ID NO: 142190 - DNA, 1692 bp, Enterobacter cloacae
atgagcgctaatccagaagacagggttttgatcaagattattaataaagtgttgaattccttgacgccaacacagcatggggatcttataaaaaaatggattgtatccggtgataacaaaccgaattacacggggctcagtgctggtatatatttagcactatcaggctttttattgctccttttaattctcactctttgttatcactggaaaaccagaaaaaaatcactaaggcaacatacacaaagaaatctggagctttcagtcatatctcatgaactcagaacgccactgatcggtattttgactgcaaccgaggggctgctcagtagccctttatctcttaatcataaagacaggttattaaatattattaatgtcacgcgggcaatgttagaaaacctcgatttgtctcttgattatgccagaatcagttccggggcagtcagactcaatcctcagcctcatttactatcatctctctgcgataccagtattaaattattcgtcgaatttgcagaaactcatggaacaacactccaggtgcggtatctttcagacaaagcttttcagcctcatcttgtcgatggagtattgctctctcaggcgattaacaatgtcgtcagcaatgcgattaagtacaccagtggagggcttgttttaatggagtgttctcaggttcaggtggatgacaaaagtatgttttgtattgaaatcatcgatacaggaacaggcattcccgagaaggcgctccggcgtctggcggaaccttttgtccagttcgatgaggatgcacctgggcctcatgagcgccctaaggggtccggacttggcctgtttgtctcaaaacagaatatgcagttattaggagggcatcttgtccttaacagcaaaccgagtgttggttcacgtgttaagcttgtttttcctgtcattccaggacatttacagactgagaaatttcttcctgcacatatccagctcaggctgaactgcgctgactcagttcctgtcagtgaattaatatctgtattcgaaaactgtcatatctcataccatattgcagaatgtccttctacaacgaagccggaatatgacccctcattgttaattagctttgaacgacagaagaaacagtggctactgtataataacaataaagagtgcattgcattaaattgccctctgtatgcatcagacgtctatagcgccgtggttgaattatgttgccaccgtagcgaggccggtagctgtagtgatcccggaccatcagttgaagatatctgcgtttccccggccatttctcgtcgcgttcttctgatcgatgatgagccactgttgcttgaagtccagcaagaactctttattggtatgggctataccgttgatgcagtttgtgaagctcaacaggcatatcaatgctggctacagcatcgacatgagattatcatcacagactgtcggctggatgagagcgatggattcgagctggttcgccatttaaggatattgatgcaaaatacctcttctgatgtgttgattattggccagtctgcagcactaagagacgatgatacccggttagcccgggaggtgggcatggattttctgctgcagaaaccaatagcacgtgaacaatggcagcagctgattcaggattatttctctgataaggaccgtaacattgtttga

SEQ ID NO: 142191 - DNA, 1146 bp, Enterobacter cloacae
atgaagatgaccaaggcagattttggtgtaactattgacgatactttaataactgattttcgcgatgtggttaatgaaggggagtttgcttacagctacttcataaacagaaatggtaaaaaccagttcagccctatctgttcctgcatggattggataagcgtttctgttcgcaatctgatgaacttccctgagctgtcggaagatattgatgtcaaggccatgcaggtttactcccttatatcatctattgatattgctgtggaggcgttgcagcagcttcaccgcatcattgagagtgatcataagttagcgaggtggcctttcaagaaatcagcgaatgtctttaagaataaaacaccctatctatcacatgaggatgatgacgcatactttaagagtattcgtgctatctttggtgctcaccctacaaatcttaaaaatagtgatggtgagcgactgtttgcaagctggcctcattttcatgctttcaatgaaaatgatttcactataagcctttacaacaacacgccagggaaagatgatgttattttcggcattaagttcgatgagctaattacatatattgaagataggtataaatatctaacaaacctaaaggattccgtaatagcaatacgtataaaacattacagcaccctatccaaacagattataccgtctactgataacattcatgctgagttaaagttgcttctttcagaagttgcggtgcgaggtgataatgattattaccgaatggaagtggaagagttaataaagctgttcgaggggaatgttaaagaggcacatctcaaggatgaagttgacgtatttttaagtaaactacatccaattgcagtagagattagatataatcttcaggaaatgaatattgaggatttagcaactaagcatggcgtgatgatttcaacgcttccgaaaaatgccctgcattacgttcttcagaaaatgtttacttggctccactctgatagatatgacccaatgggtggcttttacttggacaagttaaatgaatattcaggcgggcgatacaatttttgttctgaggatgatgacagtacaactctattgaagctccggatgatgttgcattggtatcatcaaccaaaagaggcttag

SEQ ID NO: 142192 - DNA, 249 bp, Enterobacter cloacae
atgacttggctcggcattccattcccatcaagcaattcaaattttttagattcaggtattttaacactaggtaaattaccaactatagttgtggattctgggtttggttgggatagcgtttttgcaagtactctaggtgctattattggcgcagctattcctgcagcaatctcatattacgcaatttcgaatagtgcaaaaaccatgaaaactgatcgcgatgagcatgctaaatatgcccgagagtaa

SEQ ID NO: 142193 - DNA, 336 bp, Enterobacter cloacae
atgacaagcaacacactgaatgctgttccggcaaccgtgctggagacgatggcagaacgcctgaacggtcagcctgaaccgctaaaaatccgcagcaacgatgatcacgccgccctggctgcagatgtgctctggaaatttgcccgtaaaaccgggctgaacagggaaagcgaaagcgtgcaaaccgtcatcacggattttttggccaatctgctgcacctgtgcgaacagtgcgatccggatggggcgggcatcgagggatttaatgctctgctgaacatggccatgatgcactatgagcaggaaaacggaggggacagcgaagaaccgatctga

SEQ ID NO: 142194 - DNA, 792 bp, Enterobacter cloacae
atgtcacaactgagttttgaatccctgttccttgcagaccagaccgatccgcagccgcgggtttccgctcctgtacgggtattgtcgccagctgaggcgcgtaagcagttcgccagtgtattccgccagactgcgaaatatatgcgccgttccgaagtgttccgcgatttcatcaccctagtagccagtgggctggatatcgcgcgaatacgctcgccagaaaacatcgaaaacagccgacgcatctgcgaacggtatcagccagacgatttagacgccatgagacatctgtactgcctgttggtggaggggctggcgggtgaaatgcatgatttcctcggcgctctgtatatggagcatgagctgggcgcggacgaaatggggcagtatttctcgccgtcctccatctcccgcctgctggccgggctactcatgcccggcgcagaggagaagataaagcgtgaggggtggatcacgattgatgagcctgcctgcggcagtgccggaatggttgtcgctttagcttactggatggttgaagcgggactgaatccatcggagcagctgtttgcgacctgcactgatatcgatccgatggtggcagatatggcctttatccagctgtcactgctgggtatccccgcgaaagtcgtgaccggtaatacgctgactctgaaagcaaatcgcgtgcgttatacccccgtttattacttcaatgactggcagggacgtctggagttccgcagccgtttcgaagcgatgaaaaactttctggccaccgtggccgcatga

SEQ ID NO: 142195 - DNA, 201 bp, Enterobacter cloacae; identical to SEQ ID NO: 142131

SEQ ID NO: 142196 - DNA, 384 bp, Enterobacter cloacae
atgcacacacaaaacgtcaacgtcaaaaccgccgctcaagaatcttccagaaagatgggtgaaaacaccgttaataccgttacacagccgactcaggtacagaaaaagctgaatgacagctattgccgtccctggggggaaattaccgaagcccgttatatcgaccagctggagacactggcgcttacggactggtgcagagggttcggcggggagtcgttcaaatcgatggagtttacgggcggggatgtgaccgcaatttttgtccggtacggcgcgcgcttctttgagtgccacgacctgcacacccgcaatcaccgggagctgataggcgacgtgatcgcccgtttctgtctcgatgcgccgctgaattccgcgcattaa

SEQ ID NO: 142197 - DNA, 786 bp, Enterobacter cloacae
atgagcgtaagggaagccggcatatatactatttcagcactgggtgaaggcgccgcagcaaaaggccataatattcttgagaagactattaaacctggttcactaaaggcggcttatggtgataacgctgaatctatgcttcggctggcaaaacgtagcggtttcgttggtcgagtaggtcagtgggatgcatccggtgtaaagggaatttatgcgcacaacagaccgggaggtgaggatgtggcttatccagtcagcctgcaaaatacttctgctaatgaacttgttaatgcatggataaaatttaaaatcatcacgccctatacaggtgattatgacatgcacgatattattaaattctctcatgggaaagggcatgtgcccacggcggaaagtagtgaggaaagaggaataaaagatctgattaataaaggtgttgcagaggttgacccttcaagacctttttattatacagcgatgaacgttattcgccatggtcctcaggtaaactttgttccctatatgtgggaacatgagcaagataaagtcgtaaatgataatggttatctgggcgctgtagcacgtccgggaccattccctgtagcaatggtatatcagggcgaatggactatttttgacgatagtaaggagctatttaatttctataaatccacaaacacccctcttccagaacactggtcccagagttttattgacagagggaaaggaatcgttgcaactccccgacatgctgcaattcttgataaacggcgaagcatgcgttaa

SEQ ID NO: 142198 - DNA, 279 bp, Enterobacter cloacae
atgagcagtaagcgttatcctgaagagcttaaaattgaagctgtcaaacaggttgttcagcgtggccattctgtttccagtgttgcaacacgtctcgatatcactatccacagtctttatacccggataaagaagtacgggccagactcttccaccaaccaggagcagtcagatgctctggccgcgatccgccgactccagaaggagctgaagcgggttacggacgaacgggacatattaaaaaaagtcgcggcgtacgtcgcaacgctgcccgactga

SEQ ID NO: 142199 - DNA, 603 bp, Enterobacter cloacae
atgcgacggagaaggtcgccgccacaagaaacaaattcatccgtgataggcgttggctcaatagggatcgtacgtacatttaaggacgggtggctgattaaggagttctcaggttatttcgacatggagaataagacgaggctccattcagcgataaataatgcaaaaggattcaaccttttctatgccccgggaagtgcatttgtgcgcattgagggaatggatggtacggaagcaaaaaaagtaagaaatatcatgagggctgtccctggtatttctctgaataaactaaccgatatgccggcagttatggctgcagtatcggttattgaccaggaaaaccctgctgtgtatttaagtgaaaaactttccaggttaggcattactcacaatgatattaatcttgggaatatcatgtatgatgaaataagtaacgaatttaatttagttgactttgattccgcatccttttcaacagataaggaaggtaacgttaaaagcttaacagttcttcaaaaagagagcatgaaaaagaaactggattatgttttcaacgattttaaaagaaaagtcagacaaatgcagatgttgagcaagcaataa

SEQ ID NO: 142200 - DNA, 474 bp, Enterobacter cloacae
atgatacaatatcagtctctgtttcactcttctggtatgactcatgccctgccattgacgctgatacgcgttacctttggtttgtttttttttgcatcagggttcaataaagtatttgttccttccagccaggtaataatgcttgaaaccatcactgaggccggaattccatttccggcctttatggccgtttttgtggccagctgtgaaacattttttgggctgatcctgagcatcggtttactgacccgccccggagcactggtgctgatgattatcagtctggttgcgctttttaccgttggactaaatcatatcccgacgggacttaattttctgacgtggtacagctggctgttatacttacctgagtcagtttatattctgatatgtatattgctgattgttcagggggggggaccctggggagttgatcgtgtgattgccaggcgtctcaatcgctccgggtcatga

SEQ ID NO: 142201 - DNA, 903 bp, Enterobacter cloacae
atgaatgcaaaaacaacaagcttaattttcgggctgacaatattcttattacaacttccgccagtgaaagcggctcccgaaattgttgcccatcgcgcaggtaccgctgatgcccctgaaaatacgctgaccgcaatatccctggctactaatgtcaccgatactatctggatctcagtccagctctctaaagacatgatccctgtattgtaccgcccgtcagatttgcaggcattgaccgatggtaaaggacgcatttcacaatacacgcacaaggaactgacccgcctggatgccggatatcagtttgctggcccaaagggtgattttccttatcgcaacaaggggctgaccattccgacgctttctcaggcattgcgtctcttcccgggacaaacattttttattgatattaaatcaccggatgcagatccccgggatatggccagggcactgaaacaggtcactattgacgcaaacgaccagcaacgcgtggtattttattcaaccgaaaaaaagtttctcgatgcactcccacctgagcttgcccgattcaacagtcgtgatactacccggggggccctggccctggtgacaatgacacatacctgtcagatcgagagcgaagaacgtcgtttacaacctcagcctgttttgcacgcatttgagcttcgccgaaatgtcgaagtcatcgaaaagttcacgcttggtgaagggcgttcacattcacaactggtctgggaccaggaagcgattgactgtatcagacagggaggtgacgcaaaggtcatgcttattggaataaatacccgcgaggactatgaggaagctgttcgtctgggagctgactacgtcatggtggactccccagccgtctcccagtcctggattaacgcacaataa

SEQ ID NO: 142202 - DNA, 564 bp, Enterobacter cloacae
atggctatcttaaaccgtgaagaaattgaacagatgggatttgcctctattggagataatgtttttatctctacgaaagcatcattctatggtacatcaagaatccatattggtaataatgttcgaatagatgatttctgcgtcatttcggcaggtgaggggggcgtgcatatcgggaattatattcatatcgcagtgtattcttctctgattggctcaggccgaatcacattgatggattattcaaatatttcttcgcgggtttcgatttattcaagtaatgatgactactcaggtaattatatgagtaacccgatggtgccgtcagattttacaaacgtttctcatgatgcggttgttgtgggtaaacatgtgatcgtcggtagcgggagtatcgttttacctggtgtgattctcgatgagggttgtgcaattggtgcgcattcattagtaaaacatagctgtgaaaagttatcgatttacgccggaaatcctgcccgcaaaattcgagaccggaacgacaagctccttgagcttgagaaacaattacgcaaaaacaattaa

SEQ ID NO: 142203 - DNA, 801 bp, Enterobacter cloacae
atgcaggaaccagcaaatcagacttttagtgggtatatcggaagagatgaatttagcgtatttgataaactgttaaaatttccagaactcttttatgaatctgaggataatccatcttctctggcaggaaatatccacgaagaaaatgtagcagaaggagaacggtcacatcagaaaaaaatatcggtagtctggggaagagaagttaccccccattttcagccaaaacatccgtcagaaatagcgccagatggaggcgtttcactggcatttattcaggatatttcccgggctacctacacgatatcttttgcacctgccgatgaagggatgaaattcacaatagaagatattgataaaattttctcccctcaggccaagcaggttatttccacaattgcacatcagggccatcttgctgatattactattgagttatatggtattttacccgttgatgatatgaacaggtttgtacaaaaaagagggaatatgcccgaacaccgtatctttaatgaaggagggcaatatcgaatcacatcaataaagcagtttgagtttaaaaattctgatacggaagaatatgatgaaatcagtggttttactgcaacggttgaacaaacgacttatctggatgcgaaaggatttgatgggtcaggtaaccgaatattatcttatcagtcaatggataaaccatcttttcagaaaatatcgttaacaatgatattgcctgaaaacccggaaaaccagcctgtagtgccagccggaaaaggatttttttcccgacgaagaaataagtaa

SEQ ID NO: 142204 - DNA, 552 bp, Enterobacter cloacae
gtggtggctgacgcaggccccggccaggttcaggccctgctccgccgccgtgcggccggcgtacacgaagcgctccgcgacgcggggggcttcgccggttgcctgctccgtgatgctcaccgggcgcccgggcagggtggcgtcctcgtactgccaggtgcgggtcacggcctggcccgtgtcctccgtaccatcacgggcagtgcggatgttgctgaccgcgataaagggccggccggcggcgtcgctgagggcgagggcggtgccgctgtcggcgccctgcgtgcgcaggacggcgccggagagggcgtgacgccaggtgaagttcgccagtccggcgtcgtgcaggcgcgggtcggcgctgcgggtgaggaagccgcgggggtcatgatgatggcgggtgatgcgcaggccgcagacgtccggggtatcagggtggcggaggaaggcgacggcgcgcacggcgaggccgcggttatcgcttaccgtcagggccggggtgtggcggaagacgccgctcagggggaatgtgctcatggtctgactccgtaa

SEQ ID NO: 142205 - DNA, 708 bp, Enterobacter cloacae
atgctcgagagtactttattatccgatctattgagcagtgtacacattaaggtgcatttgaagaatggcgagattgtgtcatttagtgaactcagtgagggtgagcagcagttattgactgtgcttggtttgttggagttcactgttgaagaagattccctttttctactcgatgagcctgatacacacttaaacccagcatgggcggagaaatatcacacctttttacagcgatttattcccaataaaaggttctctcatatattaatggtaacacaccatccactagcaattgctgaactaaataaagaacagatccaggtcttaagaaaggatgctgaaggtcaatcatttgctgagatccccgttgaaagccctattggaatgggcgtaaacggtatactgaccagcgacatgtttggcatggtaacaacgctggataaacacactagcaatgttattgaagaaagaaggaatctccttgagaaagaacacctatcagaagctgaaattattgaattgagaaagttaaataattccctcgatagactgggatatagctatatccatcctgacgaagattacaggcagttcttaattgcacgaaagaatgttgtacaaacaatggatgctgaggcaatagactcaactgagtatcgtctaaagctcatcaatgcgattttgaaagaccaaggattaatagaatag

SEQ ID NO: 142206 - DNA, 780 bp, Enterobacter cloacae
atggaaagtgtaatatggtcttttttgccggtctatttcaacagaatcaaatacatttgctgcgatcacaccagtttcgatagaaaacctctatgggcacgcttaggtagaagtctatcaagattgtttgctgatgcaattgtcgttttaacctctactgatgctcgagcttggaataatacaaaagtcaatattatccctaatccatctccatactcagaaaagatcacaacttgtccttataatgaacggcgtcagcgaatcattgctgtcggaaggttagtgcaagttaaggggttcgatagacttttagatatctgggaaaaatttgttaagaaaaatcctcatacccccttttctcttgaaattattggaaatggaccacttaaagatactttaaataccagaattactaatacacaattaaaaaatgtcacaatatcagattttacatctgacattagtactatttataatgatagccaacttatattaatgacatcttaccatgaagggctggctatggttctcattgaagcccaagcgtttggaattcctgctttggcatatgatgttagtggccccgctgaagtcatcgtggatggtcagactggctatttagttaatgatggagatgaagaacaatttatcagtaaattgtctttacttttagataatgaatcactaagggaagatatgtctgataaatgttcagaatatttaaatcgcttcaaaattgaaatgattgctgaaaaatggaaacgcttatttgaggcttaa

SEQ ID NO: 142207 - DNA, 705 bp, Enterobacter cloacae
atgcctgtgattgtacatcaagttacaaaaaacttgatgttaagtgacaaagtttggcgagtagttgctgatgatgataagaaacaatggctctctatatttttacgttcacctgatggcagaaagcaaatagaaagcagagcgacaggtaatcaagagtctatgagaaatatttctcaaaaacattttttggatattgacttacccttacctagtcctcaggaaaagggagtgcttgttgcgactgtaaacgaacttatcaacaaagcagatttggttgagaagcagtatcttgcagtaaaactacgagtagacaaactgactcaatctattcttgctcgagcatttcgaggtgaactttttgaaccattctctgaaaaagttgagagaatggttaaacaatctattccagatattgccgatgagtcgcctgatatggaagaatacatagcgactacagagcagaaagttagcgatactccatctaagacgtctcgattggaagatgataaaagcgaactgcttatacaactaataagtgcttcacaaagcatgtcagctcaacagctttttgatagtacacccatgaatacgtttaaagctattgatgagttgtttgtagagcttaaatgccttttagaactcaagttgattgtaaaagatggtgagggcgagcagtgtaagttcaaggtcgccaaaaaatga

SEQ ID NO: 142208 - DNA, 705 bp, Enterobacter cloacae
gtggacttccagctcgagctggcaggtgcaatactgggagtcaatccatcaagtataggcgcacctgaagcctcgtctgatgctctgtcagaaactggttctgccgggagtgtttccagtgatgaatatgatgaagatggccccgtcaccgacgctgacaggcagccttatgtggatctggagctggagcataatgatttatttaacgacaattacattattaatgtgccggaatcggaggatttgacgctgaaaaacgtcattgacgttgacctggatgaaatgcgggtcattaatgcctctcagacaggaatgtacctcggtacgatagggttaggtccgtgtattgcaattggtggaatagggcatactcaggataagcagataatactggggttaatgcactttacaggccttgaggaacccgatgtcgtcatgagtgcccttgatgatgcgatgagagaggcgggggcagaacatactggatatattatggttggcggaaacattgcacccggcggggaagataacggcagcctgattgcagagagaagtttattaagcttacgggagacgtacgatatccgcagcgtccgcttgcatacttctgagggcgagcttgatcccataacaggagaaagtacagccgttgatgccgtcctgacgacaacacacatgctgttcaggaaagcagcactctattaa

SEQ ID NO: 142209 - DNA, 552 bp, Enterobacter cloacae
atggcgaatgataaaccccagaaactggcagaattacaggacctcatgtcccggctgagcggacggtataacgaggatattccttccgtgcccggcacctgtattccgcaagggtttatccgcgacggaaacggaaagcctaaggaagatattacctttgtatatccacataacccggtcttttccctgtcggtttccactaatacttatcttggcgatccagcgagtatgctggagcgaagtgatgagattcagccctacctggcccggatcaatgcgaagacactgcgtaaggcaaaaacacagattgcaggatttgaggctgatgaatggctcaataccgctccatcagaaaaatcaccggacaccccgtccgggcagctgctttttaacgtgatagctaatgaaaaagtggtcgattttcggcatccaattatcgatgtgacattgagcaatcataccctgccccccccagcctacagcgatgctgaactggtggaaatctgggatcgcatcattcgttctttccgcgtcagggaaaatgcgttctga

SEQ ID NO: 142210 - DNA, 150 bp, Enterobacter cloacae
atggactgtatcagacaggaaggtgacgcaaaggtcatgcttataggaataaatacccgcgaggactatgaggaagctgtgcgtctgggagctgactacgtcatggtggactccccagcagcctcccagtcctggattaacgcaaaataa

SEQ ID NO: 142211 - DNA, 249 bp, Enterobacter cloacae
atggccttccagaatgcgcccaaatcccgccacactctcattttcattgcggtcaaaaatcatcgcattatcactcagcttgtatacctgcttgagaaaaggctgatctacagggtccacggtagcgctgtttttcagtttctgttcccgcaaccggatacgctgctcaaacgccggacggtagagccgcttgctgctgatgcggatctcattaatctgtgcccggtcagtcagggtgttttcgaatga

SEQ ID NO: 142212 - DNA, 162 bp, Enterobacter cloacae
atggaggatctctggagtgtcaatatacaaaagcgtgaagaggataagcgcagtgaaactatcctttgggcgttacgtgaagcgcaacgtgacgatgtctgcgctaatcagcctgtgcctgatgctgttatcaggatgcagcaggatgtcagtaccgactga

SEQ ID NO: 142213 - DNA, 456 bp, Enterobacter cloacae
gtgtgtattccgaatgggtttattcgggatgatggcgaaaagcatctggaaaaaattacatttagttatgaaagtgacgactttattttaggtatatatacaaacaataaatatcctggttctgaggacaccctgtttaatcgtagcgcacaaattaacgaagcgcttaaaacctcaaatcagtacaccataaagaaagtagctctctctccgaatggtattccggcggagtcatggttgtttggtggtatccaaaccatcagaaatccggcgacggggcagggtgagaagaatacattttatgattttgattttaaagccaatgagcgtgatgctacagcagataagccaaggtttggtattggactcaccagcgagtataaaaaaacgcgttacagcgaagcacagatgatagaaatctgggaccgactggtaaattccctgcgctataaatga

SEQ ID NO: 142214 - DNA, 1116 bp, Enterobacter cloacae
atgatttataacaccggcacaatcgccataaacggaaatagccttacaggtacgggaacaaacttcaccgctgctggctcactcattcgtaacggctgcactgttatcgccttgacaagcccagcgcaggttttccagatcaccgcgattggaagcgcaacttctcttaccgtgacacctgcggcaagcccagcaattcctgctggaacgaagtattcgattttactgagcgacagcctgagtgtggatggcctggcgcaggacattgctgaaaccttcacgatgtaccagcgctacatgagcggctttgctgatgtgatgaacggcacgacagacgtcaccataacgattaacggcacaccagtcaccgtaccggggcagaaatcactggcgaagaaaggggcaaacagcgacatcaccagtctttccgggctgactaccgcgctaagcatttcccaaggtggaaccggtgataagacagcagcaggtgctcgtacaaaccttggtttaggaagtgccgccaccaaggatgtaggccctaatactggtaatgttttaggtgtgggctatttcggtttcggaactccaactgttaacgtcttaggaaataccgaatcagggttttatggcattgacggctctggtactgcctgggccccgcaagccggatcgggaattgtatgcgggtatgaccctacgcgccgacagcagatatttacaggagtatccggcaatctttttgtcaggaaccttagcgcatctgctatgaatacaccttcgtccaccattccatggacacagatgcagtctgttggaacatcagatattaattttaagcacgtcaacggcgatctcgatgttgctgattctcttgaaaacatctgtcaaatggagtttaagcgattctactatcttgatgatgatgagcagacagagcgccggggcgtaattgctcagcagatcgaacaaatcgacaaggaatatgttcactctgctgagggcgtagggaaaatgacgcttgaccttaacccactgatgatggatgcgcttgccgccattaaggctctcaatgccaaggtggtcgacttaagtcagcaaattgaagcactaaaatag

SEQ ID NO: 142215 - DNA, 213 bp, Enterobacter cloacae
atgctaagaaatattagtgtcaggaccttcattgcctggttcctgttatgcctttttttggtaaatgcaggtatcgttgctctattttccagcaatttctctctcttcatttcgattaatctggttaatttcgttgcgctgtttttgctctggagttatatgacgaagtttcttgtgacgccgatcaatactgtgaaaaaaagtattgaataa

SEQ ID NO: 142216 - DNA, 930 bp, Enterobacter cloacae
atgaatcgtaacgattatatgttcgctctcagtgaacgcgaacagctaagcaacctattgaaaagcacaccagaaagctcttccataagcagaagaagcttagaaactcgtctaaagaaagtagagagtattatctcagaagcaaacctgttagaacacgagccaaccagtgcagtacttacattcaaaggtcctacagtaatggggactcatggtatttctgcatcattcggtacaaaagcactctcatttttcaatgatgcaattgcatatgttgcaagcgcatttaatggcccgcttccatcatcgggtaaagtgccgaatatagaaaacaatcacttaatgattacagcagctgccaggggatcttttggttttgtcttagaggagttcagaccagatgcaccgctgggctttgatgaacaaactcctgtttctaaggctttagaaaagacacaacagattttacaggcaagcttagatggtgataatgaaaagctctccgatgcccttgaagaactagatcaaagagccttagataaaatcaggggattcattcattatctatatgaaaataaaacagtatttactctaaaaaataacaactatagcatctcatttcgagagccaaaacagttggagaatacctatcagcaactaggtagtgataacataaaacaggagattatcgaggcagatattttcttcttaggcactcttccaaataaacgccaatgtgaatttattgaactaggttttaccgagataaaaacagcaaaaatcgacaagtccatagaagacccgaatgttatcaaccaacacctcggtgtgaaggccagagcaacattttctaaaaagactatcggtgaaggaaaaccaagattcactcttatcaaactacctgaatgggcaaacaacgctcaaaattga

SEQ ID NO: 142217 - DNA, 585 bp, Enterobacter cloacae
ttgactacattgaccaccccactttggaattcgatgggagtgattccaccaatagacgaggctgacccaaccagccacgcacgctctccatacgtgatggatatagtgaattttgttaacatgtttgctcttacagcaacgcgaagaaaaattcttaaggggtttttggcttaccgttcatgcttgagtcaggttgggctaacagatggatttcagtgggttgacgggagttttacagagaatattgagcttactgagcggcgcgcacccaatgacgtcgatgttgttacttttttcaaatttctccctggtgatgacgattcatcagtaataaatcgaaatccagacttgtttgatcatgagtatgttaaaaaaaattaccttgtagattcttactatgaggggcttgacgcaccaggtcattaccttgtcgataggactgtatattggtacagtatgtgggcgcataaacgtgatttatcatggaaggggtttatccaaatcccattaaacccgcaactcgatgttgttgcgttaactatacttaatgcaagtgaggctgaggagggaaacaatgaatcgtaa

SEQ ID NO: 142218 - DNA, 228 bp, Enterobacter cloacae
atgaaagcaattgataaagccattactagagcaggaaccgcaacccggttagcagaactgctggaagttagtgcaatgactattagtcattggcggaaccgctataaggggattgttcccgccgatcgtgttcttcgaatatacaacgccactggcgtcaccccacacgagctgcgccccgacctctatccaaacccaactgacggtttacctaaacaggagccttaa

SEQ ID NO: 142219 - DNA, 783 bp, Enterobacter cloacae
atgattttatacaaatacatagacaatgcttcattagatcgattcttcaaagatggatacatctccataaaatttaccccgcacagtgagtttaatgatcctttcgaaagttatggatatgcacttgatgatgcgtcaattgaatcattaacgatgaggcatgagatcaataaaaaccttgcctgcttatgtctttcaaaaaatccactcaacgtcttgatgtggtcacactatgctgaaaaacatcaaggatttgttgtagcaatcgacattgagaaagcaggatacgatgatgaagcaaaatgcctgattacagctcagaaaggtgatattgattatttaggaaatagaataaaaagcaaactaaaaatcacgcaggaaaatatctatgatactgatgtgattagtaagctattgcttactaaatcattgcattggaaatatgaagaagaaatcagaataataaaaaagacagattcattacagcaacaaggtgctgttttaattgacaaaatatatgatcttaattctatagtcagtatctatatcgggattaacaacagaggagttgatgaaatcattagaaacaacaatgcattagagacattgattttaaacaagacagtacagttatatcagtgtgaatttaagaaaagtacatgggatctcgacatagaagcttatgaatacaccaaatacccgcatgatatgcagagaatggatgtatttgattctgtcgcgaaggtgttgagagcaatggaacgtaaccatataggcgattga

SEQ ID NO: 142220 - DNA, 462 bp, Enterobacter cloacae
atgagccgattaaccgcaatcatctgcgctgtcattatctgcctgctggtttccatggcctgggcgattaaccactaccgcgacaatgccactacctacaaagagcagcgcaatatagccattgaaaagctcagcctggcaaactccaccatcaaagacatgcagacccgacagcgagatgtcgctgcgctggatgctaaatacacgaaggaattagccgatgcgaaatctcagtttgaagatctgcagcgttgcgttgactctggtaagtgtgggctgcacgtcaacgccagatgtcccgcgaacagagcgaccagcaccggcggcatgggcgatgcttccagcccccgacttactgactccgctgaacgggattattttaccctcagagagcgaatcgtcacagtgacgaagcaggtcggctatctccaggagtacatcaaagaacagtgcatgaaataa

SEQ ID NO: 142221 - DNA, 162 bp, Enterobacter cloacae
atgagctacattgtttatcttgagaattccggtgaggcttttttcaccattgatgccgatgaggcaaaagaagaaggcggtcaggttgtgttctacaaagatggaactgttgtttcacgcatcgacacgagcgatgttcgtacctatttgcctaacggctaa

SEQ ID NO: 142222 - DNA, 231 bp, Enterobacter cloacae
atgaaagcgagtgtagatgctatcagcttcaccctcgatataagagtacacttggcgcccttacgtgaagtgtttgatgagttccagcgaaaggtgagtgagcttagtccacgaatcacagcaaaggacacgctacgaatcctacttctcggaatgaccttcggttacctaaaggtcaattcaagcttggatgataagctcattcagataagcttagaggataagaggtag

SEQ ID NO: 142223 - DNA, 291 bp, Enterobacter cloacae
atggcactccccgacaagcaagaaatgttctgtcgcgagtacctcatcgatttgaacgccacacaggcggctatttgggcggggtacagcgtaaataccgcccgtaaaattggcagtgaaaacctcacaaaaccagacattcatgattacattacagaactaaagtcacaacgctgtgatttggtaggtatcgacgctgcgtatgtacttcggcgtcttaccgaaattgatcagatggatgttctcgacatactaacctctaccggtgaactcaagccagtgtcgaagtga

SEQ ID NO: 142224 - DNA, 471 bp, Enterobacter cloacae
atgaccgaatatctctcaatagaaaacgaaggatatccgatactagcatttaaagcgaacttggatacaatattgatattaaaaatcaccgactacagaacaaaaccaaatactacagagaagtatttccctgtaaattacttcaatggacaatctagttctagcggcggtaaagggcagctatcaatgttcattggaaacgaaaacttatggctattgtctcgcgttgagagcgagatgatagattttaatatgaaattcagccccaaaaaaataatcaattaccaaaccaaaaccattgtcaaaatatcttatattgatgcctcagaggaaagccatgaaaaatatttcattgatgaaatacctgtacaaccccaagagtatttctctcttaagtctaaagtgaagaatatacctaatctttcaaaaaatgatttagaattaaacaagctgattgatggtgtagagtaa

SEQ ID NO: 142225 - DNA, 942 bp, Enterobacter cloacae
atgaatcaagatgctctcattattgctaaatctattttggaacttaaacaggaaagtgatgtaataaaggattatttgttccccttttttgttgcatttttttcagcattgctgggtgctggagtagcatatatcttcaataaaagacatgagagatttcgtgtggaaagggaacgttttgatttggcaaataagctcttaacggatgctgtgtctgggttgaattgtcttgtgtccataaagtctaactatttaggcttgacttcccctgatcctctacatagggctttcgaagttcctattattttgatgaatgaaaagcttcttaatgttgatgtctcaaggtattatttcattggtccagttcaaaccagtaattttacttttaaacaaaaacttgtgagatggattaattataaagttattcatgttaaacctttccagccaacgaccgatgagctggggagaagttggcgcaatctaatgagaatttcagcttttgtaagtaactacaactacataatgacaactttagaaaaaaggaataggcaggacgaggaaattaagaaagatattcaaaaggtttgtgagctctatggctataatcctcgcaaagtgactctcgatttcgtttgtaagcatattgatggtgcgaaaatatctcagcttgttcacttaacagaatttcttatcgctcttctagaccatgttctgaaagaaatggattcgtttgttactcagtttccagaaatagctgaaagtaatattgaaatgaaaatgataggctctagagcaaaggttgttagaataattaatgataggcctgcttatttggcaagcttgatacctattaggtctccagattatgttagattatctgctatagttggtagagatctcaaagaaacaaaactagcttatactttttcagattggtattaa

SEQ ID NO: 142226 - DNA, 672 bp, Enterobacter cloacae
atgatgtcactgactctttttattgtttcttacgtatgttttattttctgcagcctccctctagtaatattgggtaggctttataaaaacatatacatgtccactatacttccccgtatactttctcttttcattttcgtaacattaattctctatttaaatggctccgccaattatattaatttaaagacaaccatttacgttatgattgcattattctttatggcttcactaatggcattccttaaggagaaggagaaggagaaggagaaggagaaggagaaggagaaggagaaggagaaggagaaggagaaggagaaggagaaggtcataccaacaaaaaaaacatcacccttcaatataattgatgattttttctcaaatttatttattgttggcagtgcatccctggtatttattttaagctgtggaacatatatcgctcaaagcaccctccctttagggaatataaagctaaatgacaaggaatattctattgttcgtgtttatggagagaacttcattgccttaagcaaagaggatatgactaaaaacaaaggacatagaaatacaatttacatatttaaaagcgaagatctgaaatcaaccccgattattacgcacgaattaaaaaacccaaaagccgataaacatagcacccctaataaatag

SEQ ID NO: 142227 - DNA, 1020 bp, Enterobacter cloacae
gtgcatgtcaaaaatactttttacacaacaaccataaccgtcatcattgtctcgttgatcatttcattgtcgcttgccgtgcagattgcaacgtcccgacagcagtcaatccagcagatcaataccagcgttgccaacctgagccataccctgaatgtctatacagaaggcatcatacgccaaagtgaaatgttgattaccacagtttccgacacccttgaaatttatggcatgaccccgcaacaggcgatcaatattcagcgaatgataagcaatcaggataaccttcttacccagattaataatgtggttgtctatgatgcgcagggggatatcttcaccgccttgcacgaaactttagcaggtccccgtaaaggcgcggaccggtcattctttgtctatcacaaggaaaataaaagccagcagatatttattggcgagccagtgataagcagaaccaatggtaaatgggttattaccataagccgacgccttgagactcacacgggggcatttaacggcgtcgtggtggtgacgctgggtatcgaaaactttctgaccctttatggacagatcaatatcggacacgcgggcgttattggcttaacgacacaaacaggcgttttactgattcgctacccctttaagaatacctatatcggtacgattttttcagattctcctctcttcaggaaatacctaaaagtacaaaatacagggatagccagctccgtttcccggtttgataaaatcgaacgcatttatgcctatgagaaaaacagccgctacggactggtcacgacggtggcggtcagcgcggatgaagccctttccccctggcgcaagcaggcgattcagcttgccttacttattttcgtttttaccgcgatactcatcgtggcgtcttatttcctgtattccgacttatccagaaaaacacgggataacaaagcgctaaagattattgcctcggaggatgccctgaccgggctttataaccgacgtattttcgatgaataa

SEQ ID NO: 142228 - DNA, 1500 bp, Enterobacter cloacae
atgaaaaagatcgttgccgttactatcgtttcagcgtttctggtctttctgtctctctatacggtcaatgcggttatcatgggccagcagaaaagcaaactgcgtgagatttcccagacccttttacagtattcagaaggcctgtctcagagcgtggcgcagacacttaaaggcctgaccactcagggatgcgacaaagccagccttgatcgctacagacagattaagctcgacagcctttattttgcagacatcggttttatagagcagggaaaaataatctgtaccgctttttggggaaaactcgctaaccctgtccccctgccagcagagctccataaaacacccagaggattcctgctcgcgcaattttccagaaaagattttttcacgggcaatgcggccatctacaataatcttattatcttctcctcccgctacgcttacgataaattcaccccggttactaacaattactcactcagcgcaaccaccaaagactttgccagaatatttttttcagcaacccatgaggtaaaagaacaggatggggtacattccacgttatttaccctcaccctcacacagtgcagcacttcctgggatttgtgcgtcattgtgaagcatcaccatgcaggactggcctcgttatctcccgcggtgtttgcctttctcgtggctattttatgttttatctggattgcgataacgttatttttctttcgactcaatgaagaccgcttttcactggaacggacgttggttaaagccgtcttaaccaacactattggcgttcactaccagcccataattcgcattcaggatagcaaaatagtgggcgtggaggttttatcgagatggcgcgacgcaaaacacggtgacgtctcgccggaattgtttattccattaatccagaaaattggtttgtataaaaaatattatacccatattcttgagaaatcccttaaggacatcgcaccgctggtgcttaagcatcaactggtcgtttcgctcaatgttggtcgaacggaaattgaagatggacaatttatcagcattttgcgccgtggatgtttagccaacaacattccgctgtctatgataaaagtcgaactctctgaaaaagccgtttccaccgcgaatattctggagggcttctgtcagaagttaaaatcctttggtgtcagaatatccattgatgacttcggtgtgcaaaactccaacctggccaggctttcgcttcttgaatatgatgagatcaaaatcgacaagtcgctggtcgatggcatcagtgagcattataagcagaacatttttgtgatctttagcgacgccctcgcaaaactgaataaaacgctggttttcgaaggcgttgagaacgaaatacaattccgctttattgctgaacgatatcctgaggctctggttcagggatggtatttttcaaaatctgtttcccgccgtgagcttgcgaagcggctcctgggtctggcgcggtag

SEQ ID NO: 142229 - DNA, 162 bp, Enterobacter cloacae
atgattgcccggcaatttaaagcaggcttcaaccatcatttcaccatcttttcgccatcacaatttaacggcaacaaaaaaaccatccgtaagaggctggttttcaatgtgtttttggtcggcacgagaggatttgaacctccgacccccgacaccccatga

SEQ ID NO: 142230 - DNA, 237 bp, Enterobacter cloacae
atgtcccgcatgatttcattaatcgactgggcacaggaagagtttggtgaacaagcgccaagtgaacgtgtattgaaaaaatatgctaagggccgaatgatggtcccgcctgccgttaaggtcgggcgcaactggatggtggaccgtgatgcacgttacgttggagtgatagccgaacctgttgttcctacaaattctaaccccagattaaaacggatcattgctgatggctgctag

SEQ ID NO: 142231 - DNA, 1134 bp, Enterobacter cloacae
atggctgctagaccacgctcacacaaaatttccattccaaatctctattgcaagctggataagagaacaggaaaagtttactggcagtacaaacacccgactactgggcgctttcatagtcttggaacagatgaggcagaagcaaaacaggtagctaacgaggctaacgccattattgcagaacaaagaactcgtcagattcttagcgttaatgaacgcctgtccaggatgaaagggaaaagaacagatataactgttacagaatggattgataaatatattgtaattcaagaagaacgcctcaggaataacgaattacgaccaaactcttttcgtcagaaaaataaaccgcttcgactgttcagagaacattgtggcatgcgatatctgaaagatatcgagaccattgatatagctgaaatcactgatgcaattaagaatgatggttttagtcgcatggcgcaggtcgtgcgaattgtattggttgacgtgtttaaagaagctcagcatgccggatatgtccctcccggatataatccggcgatggcaacaaagcaacctcgacataaagttacaagacagcgactgtcattagaagaatggaagtcaatttatgaagcggctgaaactatgcagccctatctacagtgtgggatgttactagcgctggtaaccggacaacgactcggtgatatctgtagaatgaagttttctgatatttgggacgacatgctgcatatcgaacaggaaaagactggttcaaggttagccatccctcttgatcttaaatgcgatgcattagggttgacgcttcgtgatgtggtttcaaaatgccgggatgcagtgataagcaaataccttgttcactttcgccactcgacttctcaggcaaccagaggagacagtgtttcatcgagtagccttacgacatcttttaaaaaagcccgtaataaatgcggcatcgaatgggaaaagggaactgcacctacatttcatgaacaacgttcgctttcagaaagattgtatgaggctcagggggttgatacgcaaaaattactcggccacaaatcacctcagcagacggctaaataccatgatgacagggggaaagactggactgtcatagccgtttga

SEQ ID NO: 142232 - DNA, 258 bp, Enterobacter cloacae
atggcaacagcttccgctgctgttcgtgccaaaaacaaactggcggaacgcatcggggaaggaaaaaactatgccgccattatcccggtagagaagaagctcggacagaaattcaaatggcagccactgcgcaagtggtgcagggagaatagcgccgaaccgcatgaggttgaggatccgcgttttggcaccgtgaagtcctggcctcgcgctgcatggatggcggtgtacaacgtggatttgcgcaagatcttttaa

SEQ ID NO: 142233 - DNA, 321 bp, Enterobacter cloacae
atgtttgctactgacatctcactgaaatacggcactcatcagccagagacgattctggaaacaatgccgattgaagaagcctccgaaatcatcaaggagaagcttcgttatgaagtgcgccaggaactcgagtgcgagtatggcgatcgcctttatgaggctgaagaagaggcatcaaactgggaaagcagagctgatgactatgaaagcgatgcgacttgcctggctaaggccataagagaggcttttgaatctgccagctttgaagatgcaaaggtgatcctccagcgagcgatgcacgaccataaagactatttctga

SEQ ID NO: 142234 - DNA, 639 bp, Enterobacter cloacae
atgactaattcagaatctgatcttcttctcgaaagcagaaagagaagacttaagccaaggcaactttgttatggcataggaaaaaacgatgctgagttttgtattcagttaaaaattgatggcaaatgctttcagcatagaggttacaaaacctggaaaaacatcattcagcgctgctacagcgaagaaagcatccttaaatttccaacatatgcgtcgtgcagcgtaacaggcgaatggttgaatttttcaggtttcttcaagtggtggaaagctaattttcgtgagggttgggttgtagacaaagaccttctccaccccggcaataaaatttactcgccagaacattgcctttatgtccctgaggctctgaacaactttgtcattagtcgagaggccaaaagaggaaactcgacaataggtacagcctttgacgatcggcttggtatgtatcgcgcaagtatcagccttggaaaaggcaggaagcaacacctcgggacgcataaaactgaagaagaggcgtatgcagcctggctcaatgcaaagctgaagcttgctgagcaattcaaaccaatctgcgacgagatacaccctcaactttacgacagcctactcacgaaaattcgctcgattaaatga

SEQ ID NO: 142235 - DNA, 309 bp, Enterobacter cloacae
atgacagtcacccacaacaacaagcagtacacagtgacaaagcttgcaaacggtcattcatggcaactggcagaagtcggcaacgttcgccacaagctcgtgatgaaccgtgaccagatgattaagaatggcctcggtcacatcgttaatcaggtcatcgtcgactcgcacaagctccgcgcatcaatgagcaagaaagccattgctcgatatctggaagattctgtgatgctgcaacaggcaattgaggcccagcgtaaagcgctgggtgtcagggtaaatcgtaactcgtttgaagtgagggtgtga

SEQ ID NO: 142236 - DNA, 291 bp, Enterobacter cloacae
atggaagaattcaaaggaacgcctggtccgtggaaatacacaatcagaaatgtgaatgaaatgatgacgacattccacggcgtggttatgggcgacacgtacattgaaattgcaaccagaaacgaacgagaggatgcgcaattaatatcagcagcacctgaattactcgaagcgctacagaagcttcgagattacgcagaagacgtctgcggtgtgtgtccagatgattgtcacgaagaacatcctctaatgatggctagctacgtaatcgccaaagcactaggcaagtaa

SEQ ID NO: 142237 - DNA, 153 bp, Enterobacter cloacae
atgactcacgctaacgacgacataagggttggcactctgcgccttcccttcattggtaacggctggctaatgccattgggtgaagtggtcagcaatccattaaaggcgcagcggctcgctgaggaatatcgggaaaggcaggaggcggcatga

SEQ ID NO: 142238 - DNA, 516 bp, Enterobacter cloacae
atgacccttacgcaaaacaggttaaaagaagtgcttagatatgacccctcaacaggggttttttattggctaaaccctactgcttactgcatgcatccaggtgatgtcgctgggtttgtagattacacaggctatgcctacataaaagtagacaaggtcaaatattcagcacatcgcctcgcatggatttacgtctatggacactcaccaattgagcagatcgaccacattaacaatgtcagatcggataacagaattgttaatttaagactggccacacgctctcaaaacatgatgaatcaaccagccagaaagggcagcatttcaggggttaaaggagttagctgggacaaaaaaatgcaaagctggcgagcaagatgccaagccaatggtgaaaggataaacattgggtggttcgactcaatagaagaagccgcagaaagtctcagagtttataggcagcaataccacggcgaatttgctaaccatggagatcatcatgacaacagaatttaa

SEQ ID NO: 142239 - DNA, 411 bp, Enterobacter cloacae
atgtctcgccaaaagttcacaaaccgtaaggctcgcattgaaaaaaaattcagcactgaagcgatgcgtctgctgattgctctcatgccgaaacaataccctccagtggcgttcactcttgatgaaggctatctcggtggtctctggttccaggagtggcaggtttgcactgttgactactggggtgaagccgacagttatgatgcattcttccttttgcataacgctctcattcagcagacgaccgactgggaagggattaatcgcgcagatgatgccgagttctctggtaatgagccaatcgacataaccccgttttactctccgtggcgtattggtgatgtaacccgcgctcaaatcatcaggcattgccgacagcttgcgtcggctggcatcaactgggacgcataa

SEQ ID NO: 142240 - DNA, 597 bp, Enterobacter cloacae
gtgaaagaacgcggaatgattttcaacggcgagatggtgcgcgccatcctcgacggccggaagacgcagacacgcaggatcatgaaggtacagcctgtcctcaatggtggtttttatgaggtatacggtgctggatgggtccggagcatgaaatctgtgcctgcaattccaggacacagccttgccagtaattgtccattaggtctggttggcgatcgcatctgggtacgggaaacattcagccaggttcctgatcatgaagagcctgctggttgttcagccattctttacgcagctgacggaaacggtccgtatggtaaatgggttccttcgattcacatgccgcgctgggccagccgactcactctggaaattacctgcgtgcgtgttgagcggcttagagatctgagtgaggacgatgcaaagtcagaaggcattacgccgccttctggcggagttcttcccggctgggaatatcgcattaacttccgtgacctctggatgagcatctacggcgccgacaactgggaagctaacccatgggtctgggtaatagaatttaaggtggtgcccaatgttcaggataatccagcctaa

SEQ ID NO: 142241 - DNA, 171 bp, Enterobacter cloacae
atgaagagtaacgcggcagcgcgccgtctgcttggcatgaaccactggcgcagcaatacgcagcaaatgcagtacgtttcgtggcatgtagcagcaagaacaggaaaaccaacccctgggtggattgctgtgcgaacgcgcagttctgatttctgctatttcaccgactga

SEQ ID NO: 142242 - DNA, 216 bp, Enterobacter cloacae
atgaatgacagcatcctggttacaagcgaaatccttgcccgttacaaaatttcccgcagcacgctctatttctggagcacaccggcacgcatgccatcttgcttttcatgccctttcccgaaaccaactataccagggaaccctaagcggtggcgtgaatcggagattaagtcatgggaagataaggtcaacttcactaaaggggatatccaataa

SEQ ID NO: 142243 - DNA, 1182 bp, Enterobacter cloacae
atgctcacagatactaagttacgaaagtcgctgggaaagcgcagagagaaggttgaggttatctccgactcaaacggccttaacgtgcgtctaagcataaccggttcgatcacattcttctatcggtatcgctggcagggaaagcctgtccagttaagcatcggagaatatccaaccatttctttgtcgcaagcacgagacagaaggcagcagttcagggcgtggttgagtgaggggtatgatcctcggcagaaagtgttggtagagaaagctgaaagaatagaagcgctgacagttgatgaagcttatgaatattgggtgaagcattactgcatcccggaggggctcatcaaaattgatgctaatggcaagagtttcaggaagcacatcagcccccgtatcggaaaagctatcgtcgaccagacagtgaaggccaactggcttgaagtttttgatgcgatgggaagaagtgttatatcaggcgagatgctgtccctgaccaagcgtgctttccggttctgtcacaacaggggggttatcaaaaacaaccctcttgaatcgctgcggcggtcagatgttgggatcgctgccaaaatgaaggaaaggaagctatcagacagtgagctaaagcaggtatgggatactcttttctctcttccaccctcacaacaactggttatcaggttcatgatcctgacaggctgtcgtgctgcagaaattagaaaatctcgatgggactggttcgatttcaaagaaaggacctggacagtgccagcagaggattataagaccggaaaaactatccgtcgtgcgctgccagatacggcgatccgacttctgcaggagcaccagcgcggatcaataactaaacacgttcttacacctgcccaattccgagataaagaggatgtgccgccgggccagaccttagtctcgacatacgctatgcaggttgtacgccggaacgggatgaaggagtggtcattgcatgacttgaggcgaacggtggccacgcgcctgtccgagctaggcgctccgccacacgttatagaaaagctgctcggacatcagatgggaggggttatggccagatacaaccttcatgactatatggacgatcagcatgaatggctggatatctggcagaagcacctgcaggagattattggatatcccctttag

SEQ ID NO: 142244 - DNA, 1290 bp, Enterobacter cloacae
atggaatcccgtgaacatccttggtttaggaagcgtggttatcttcatttcgataaaccaatttccattgaacacgctttagacatagtaacaaaccctcgagctgttgcagctcattcttttcttcctttcattacctttacttccactacctacaaagtacaaaaagataaaggcactaatgcaataaataaaactttaaaagaaagacctatagcttattcttctcatgtagatagccacatctattcttactatgcagcgacactgaatgagctttatgagaacgcactgcaaattcatggaatttccaaaaatgttctggctttcagatctctccataaaagcaatattgagtttgcatatgatgcctttcaagaaattaaaaaaagaggtgaatgcagtgcagttgctttagacttatctaaatttttcgatactcttgatcattcttttctaaaagatgcttggtgtcgattgctttctactgataaattgccagaagatcattatgctgttttcaaggctataacaaaatattcgaaagtcgacaaagaaaaagtgtatgatttgatggatatcccaaaaaataatgctaaatacactaagaaaacaagaaagcaaatttgttcgtttgcagattttagagataaagtcaggaaaaatgcgttaataatatctaataaagcgaattttggaatacctcaaggctcgccaataagtgcgcttctttccaatatttacatgcttaactttgatatagaaatgaaggattatgttgcaactttaggcggagaatacttccgatattgtgacgatatgctgtttattgttcctctgtctgctaaaaataatgttgcgggtgaagcagaaaaaaggctgaataaactaaaggtatcactaaataccaagaagacagagattagagagttttcatttgcctcgaaaaaactaaagtgtgacaagccgttgcaatatttggggtttgtttttgatgggcagaacatattcctaaggtcatcttctctttcgcgctactcggatagaatgaagcgaggtgtacggcttgcaaaagctaccatgaagagaaaaaataatataagaaagcataagggtttggcaaaaaaagaacttttcaaagaaaaaatttatgcccgctacgctcatgtaggaaaacgaaacttcttaacttatggctatagggcatcacgtataatgaaatctaactcaataagaaaacaattgaagcctttgtgggaacgattgcaaaaagaaataaacagaagctaa

SEQ ID NO: 142245 - DNA, 1056 bp, Enterobacter cloacae
atgaatacgacccatatccctctgtcagtcctcgatttagcccccataacggaagacaactctctggccgaagccattgctaacagcgtgcgtctggcacaggcggctgaagtggcgggctataaacgcttctggatggctgaacaccacaatatggtggatatcgccagcgcagcgaccgccgttctgttaagccatattggcgcaaaaactgaaaaaattcgcattggttccggggggattatgttacccaaccatgccccgattattgttgcagaacagtttggcaccctggaaacactttatcccgggcgcgtggatttaggccttggccgggctcccggcaccgattatgagacactgcaggctttacgccgcgaaagtcgcacaaaagggctggatttccctgagatgctcgacgaactccagtattacctttccgatcctcgcccggggcagcgtatcacggccgtccccggcgcagggctcaacatcccgctgtggctgctgggctccagcaccttcagcgcgcagcttgccgctgaaaaaggcctgccgctggtctttgcttcgcactttgcacctgatgccatgctggcagctatcgatatataccgtgcaggtttcaggccttcagaaacgctggggaaaccttatgtcatgatttgcgttaacgttgtggctgcacccacccaggaagaggcggaccaccttgcgacgacagaattgcaaaaattcctcaatctgggtcgcggtgttgagaagaagctgccgaagcccgccagggatatggatgccctgtggcatccggctgaagcccagcgcgtgctgacacagctgcgtgaatccgtatggggcaaaccggaggtcgtccgtgacgggctcagggatctggttcgccgcacgggcgcagatgaaattatggtgaactcatggcaaggcactcgtctttgccgctcttcagaaataatgctgagtattctaccggaaaggcaaaaggatcatttaccaaagataatgacgagaaagtcattgacgaagcggggaaggggttaa

SEQ ID NO: 142246 - DNA, 129 bp, Enterobacter cloacae
atgaactacgaattgcttctgattaccccaatagttattggtttgaataccagcaccctgacatatctggaagtgctttctcgcaatgtaaatcaattgaaattaacgaggggtatttttttaaattaa

SEQ ID NO: 142247 - DNA, 444 bp, Enterobacter cloacae
atgaatacacaaaatcatcagtttgcggagcataccgcaattactgcctcggtggtccctgacgagttacgcatcggcttctggtcgcagtacttcggcagcataccgcagtggataatccttgaacccaccgttttcgcgtggatggaccgcttctgcacggactacagcggcggcatctggaatttttacacgctgagcaacggcggcgcgtttatggccccggaagtggagaacgatgaactctggtcgctgtttaacacgatgaacggcaacggcggtgacatgagtgccgaagctgcagggattgcggtctgtctgatggcttacagccaccatgcctgccgtaccgaatgcgacgccatgacggagcactactaccgcctgcgggacttcgcgctcaaccacgcggaatgcaacgccatcatgcacatcatcgactga

SEQ ID NO: 142248 - DNA, 480 bp, Enterobacter cloacae
atggagcaacagttaccgttgtttgcccgtgaattagcccttgccgaccagcagacagtctggaaagccttatctctgctggagtgccagctacgtgaaaccggcgcatcatttacttccagccatgccgtccgcgactggctgcgcctgcagctcgcgtcactggagcgggaagagtttaccgcgctctttctcgataaccagcatcgcctgatagcccacgaaacgctatttaccggcaccatcaaccatacgcaggtccatccccgcgaagtggtgaaggccggtctgaagcataactgcgccgctgttattgtcgcccatagccatccctccggggaggctgaacccagcaaggcagaccgtcaggtcactacgcgtattcagcaggcgctggacctggttgatatccgcctgctggaccacctggtggtcggcggcatggagatcacctcgtttgcagatcgtggctggctgtag

SEQ ID NO: 142249 - DNA, 360 bp, Enterobacter cloacae
ttgtcgaatgaaataccgacagtaaaccacgatatcactgaaccctggtgggggcttaaacgcagtatcacgccctgttttggcgcacggctggtacaggcgggcaaccgtctgcattatctcgctgaccgggccaacatcaccggacagttcagcgacgctgatttacggtatctcgaccaggcatttccactgctgctcaaacagcttgaactgatgctcaccagcggtgaactcaatccctgccatcagcactgtgtcacgctctatgcaaaagggctgacctgcgaggccgactccctcggctcgcatggttacgtatacctggcgatttatccgacaccagcggcaaccgcataa

SEQ ID NO: 142250 - DNA, 378 bp, Enterobacter cloacae
atgcaaacccaaccactatcctcaactcaggaggctacaccacgcccgtcaccggtggagatctggcaacggcttctgagccacctgttggatcgtcactacggtctgacactcaacgacactccgttcggcaacgatggcgtgattcaggagcatatcgacgccggtatctcactgtgcgacgcggtgaattttatcgtggagaaatacgatctggtacgaaccgaccgtcgcggttttaacgcagaaacacagtcgcctcttctcagcagtatcgatattctccgcgcccgcaaagccaccggactgatgacccgaaacgattacagaacggtgaccgacatcaccaccggtaaataccgggaggtgcagccatga

SEQ ID NO: 142251 - DNA, 492 bp, Enterobacter cloacae
atgaagctgtccctgacggtagaagccgataccctcaacgtactggctctgaatgcgggccggatcgccgtggatattgatggcattgaactagctgcgctgattgatgtggtctgtgataacgggtattccctgcgtgttgctgacgagcccagaaagctggttgttgaagatccgctgccacccctcgcgcgcgttaatggcatccagtgcagcaccgcgcatatcacggcggaagacaatgctctgctgtttacccttgcacaccagcatgaagactttggcgagtcggaatggattagctataccggctcgggttatctgctctaccttggcgcatggtcgtttccggtcttgcatctcaaacgtctcggcctgtcgaaagcatgccgccggttagtggtgacgcttatccgtcgctacgccgttggcattgttcatctggatgcctttggcgaagtgctgccgggctttgccaccttcgactggtaa

SEQ ID NO: 142252 - DNA, 204 bp, Enterobacter cloacae
atgccggaattgaccactgaaaccgctctcgatattttgattcgctggctgcaggacaacatcgattgcggcagcgagattatcttcgacaacgacgaagacaggacggattcgacagcgctgctgccatggattgaaaaggcgcttaaagatgtcagtgacctccgtcatcttcaacttctgcaagacgcaaagacgaaataa

SEQ ID NO: 142253 - DNA, 834 bp, Enterobacter cloacae
atgagcacaattgaacctgaggtattaaccgatcacactgatgttatttgctccaccagcattgagcgcattgttaccggacgtaatgcagcgttgagcctgacagaaatccttatccatcagcttagtgatatttctacactaaccgacagtattggcgggggcaaatcgaatgaatggggagtgcggcaataccgttacgactgctggctgatggagaaacctgaaaccgcgatgaaggcgatcacccacaatattgatcgtggtatctggaaagacctgatgaagaaatcggggatgctaagcctgatggatgctcaggcccgtgatgagtggtacaaaaaccttgaaggggaggatattccggctgttagcgaagccaacattctgagcacatttgagcaactgcatcagagcaaaggtgaggtgtttgagcgaggagtaatcaatgtatttaaggggctatcctggaactataagaccaatagtccctgcaaatttggcacaaaaatcattgttacgggactagtcaaatgtgacagatggggatttgggctgaactggggctggcaacgggatcggttagccgaccttgagcgcatgctgatgctccttgatggtcagcccattcccgacaaccgcgccgacgtcacacgtcgtcttagtgatcatattcatacaaaccgacacagtaatcgttacgaggatgagatgtttgcaatcaagtattttcagaaaggaaccgcgcacatcaactttaagcggcctgaactgctcgataaactgaatgacatcattgcccggcactatccgggagcgctgtcagcgagatga

SEQ ID NO: 142254 - DNA, 666 bp, Enterobacter cloacae
atgttcgatttaccggtgcatattggacgcttgcgaattgtatctttggatcaggcagccttagttatggctggaatatctgaaaaggttgatagcgtccaaaaagcagtagaagggaattatataggacatgaacaggcatctatttacaaggaaaccatcatacaagccattcagctaaaggaattaaagccacttcaagctttcaagttagctgattataaatatggtctacctgaggccgtcagattaaaagtagatgttgaatctataactctggatactccgattgttaatgcaaccttcctcgcaaaggatatctggccttgggttgctaatgaaattgagagtggtttaaggatgattgatagccactcccctgatttaaattccgagcagtgcaatgaagatttacacgaacccacccagtggggcaacttcgctggcaaagacacagcactcaaattgatagccggaatggcaattgctctcgagaaaagtcaggggaaatatctgcgtggtggcaaattaaacaaatctgaggtggcaaggactgcgactaaactgattaatgaccatggagacggtatagatgtaaccagtaaagcactgattatgttgatagatgaagctcttgagcttcacgcttccaaaatttcgaagtaa

SEQ ID NO: 142255 - DNA, 213 bp, Enterobacter cloacae
atgtcccactctttaatcagattggctgaagtacaaaaacgcactggatatagcaaggcttggatctatcgtcttcttaaagacaatcgctttcctaaatcggtcaagattggttctcgagccatcgcatttgttgaaagtgaagttaatgattggataagccagcgtatcgaagaacgtgatgcattaatttccactaaacctcaactgtaa

SEQ ID NO: 142256 - DNA, 189 bp, Enterobacter cloacae
atggcttgcactaagtctacccaaacacgccctgaatttacatggcgttttctcaccctgggtgaattcacaaatcagatcgtcaatgttactgcttccaccgagcgcgaagcccgcgaaaaaacgccagaaggatgtgtctgtattctggcgtgtcgatttcgtgttgaggaggtgcagcatgtttaa

SEQ ID NO: 142257 - DNA, 1875 bp, Enterobacter cloacae
atgagtgtggaagttttacttacggcaatggcaaaggcgggagtaacagctgctactaaagagatggtctcaagggcgataaagggatggggtggggggtatttagcaggaagaaaggcgctaagacatttagatagctcagagggatttataaattatcttactaagcacgtttgtttagtaaacagaataagaacaattcacagcaacgaagctgatgtttttttaaatgatatatattatccattaactgtttgtgatatgggttctgaatttgacttagaacgtgattttcctcctgtgcaatctggtttgaaaattgatgattcttttatatctttcgataataagttaacaaatttaataggtatcgcaggtcaagggaaaagtacgattcttaggaagtcattcatgcaatcaattatgtatggagacaaacttccaatttttatcgaattaaggaatgccgaacaaaacggtattttacacgcgataatgaagattttaaaatccatcggagtggattcaagcctagatgtagttaaagaaattcttggggcaaataagctttcgcttttcttagatgggtttgatgaggtttcatcagaaaatagatctaaaatactcgatgaaatcatggagttaaatttaacttatgatattaaaataacaacatcttctagaccagatacagagatctgtcatatatcgaatattaaaaatttaagagtaaaaaaacttaacaaacaagatgtgatagggataattaaaaaattaaaatctaataagcctgaggaaaccaataatgatgctgagaatattataaaaaaaattgagagcgaagataatttatctcaggtaatggtttctcctatattagtaacgttgctgtatgtttgttatccctatatggacattacaccaaataatcatgtcgagttttataccgatttatttaatactctttacttgcggcatgataaattaaagggttatacgcgagagaaaaagtctaccctaggtaacactttggcttacgatagtttttgcgcatttagctttatctgcttacagaaaaatcatataagtatgaagcataaggatatgatcgataatgcacgattggctctaaggaacataaaaatacaaaaaccagaagagcattctcctgaacatttatgtgaagactttgtcgatgttacgtgtttaatacaaaaagatggttttcaaagatattcttttttgcacaagtcaatatgtgaattccatgctgcatcatttataaaagaaatggggatggacactaagccaaagttttatgagaatatattgaatagaatttttgacaataatcaagagttattgaataccgtaatttttttaaaacatcttgatcaacatgatttcgcaaaaaatttaaccattccattgcttgagaagttaggcgtgaatttatgggatgatccaagtgataaaataattgatgcttttatgaataatactttggatggtgcgcaagccaaaattaaaacgagagagggaaaagttataatatctggcttaagatttaaaagtaaaaatatttggctaagtttatatgaggctgagttagaaccagggactattatgaatattagtaaggtaatattcgatgctctttggcgcgaagtcttaagtgaacccactaccgttcaagatggcactaaaacgatgatggttgatgtagtaacaattatagatgatagtttacgttctaaaataagaggtgatctcaaagagattatgattaaaatacatgagaaagtttataaaaacacaaaaaatctcatggattcttcagaggaaaatatgctttcactgctgaatatttcttga

SEQ ID NO: 142258 - DNA, 417 bp, Enterobacter cloacae; identical to SEQ ID NO: 140558

SEQ ID NO: 142259 - DNA, 1317 bp, Enterobacter cloacae
atggccgctaatcttactgagactgctatacgcggattgaagacaaaaagcacgtcgtactacgtgtggagcaacagtgctcagcgtggtaccggcaggtttggcgttaaggttcagccttcaggcagcaaagttttttatttccgttactacgttgagaaaggaaagaaagagagattcattcagttaggtatctggcctgagatgaaattggtgaccgccaatgagctggcgaaaaagtacggggcctggcttgttgaaggaaaagaacctcagcaagagcttgagcaacaacgcctggctgagcagcacatcatgcagcttcaccgttctcagggatcgtttaaagagctggtacatggttacgttaacaagatgaagctcgacaataagcggacttgggccgatgtactgaagcgacttgaaaaagagtgctattcagtcattcctcgagagaccaaagcgaaggatgtcacgcccttacagatcaaaacgatcttgtctggcattatccagcgagatgcggtggtccatgcaaaccgaattcgttcctacctgatggcggcatttaactacggtcttaaagccgacaacgatccgatgaatagcagcgtggggattacgtttgggcttgaggttaacccggtatcggccataccaaagcaatcctcggcggagaaagttggtgacacatggttaacgctggaagagctacgtattgtcatggagcagttcgaccaggcaactaacgttgggccgttgatgcagcaccttatccgcttctgcgtttatgctggcgggcagcgaccgtttgaaatgattgccagccaatggagcgcgattgactggcagcaaaagacgttactggtcatagccgatgtatcgaaaaacaaacgggagcacctgatcccattgactgaatcggcattaagtgaattagcctcagtgaaagaactgactaaggaaagtaacagcccctatatcttcccgctctcgaccaacggcgaacgaccggtacgtaccgatagcctggcccgttccatcatgtatttccgggcttttaatcctaagtttaaagttttcacagcgcgagatttacgtcgcacatgtaaaacgctgatgggggaggcggggatcagcaaagagatccgcgaccgtatccagaatcacgctttgaatgacgtcagctcgaaacactatgatcgttatgattacttgcctgaaaagcgcagggcgcttgagatctgggaagatagggtcaacaactatcagcgacagcaggaaaacaacgtggtaagtctcttcaaaagaacatag

SEQ ID NO: 142260 - DNA, 1011 bp, Enterobacter cloacae
atgaattctaattttttttcgttgtcaaaaataactgatcagcatatcgttcagaaaatactggatgcatggttttctaaacgtatacaactttttttgtattttggcggaaatggcaaaaaatgtagattgtcacgctgtatttcgccttcgctacatataggcggagagcagcttattagtaatggggatgaattttacctgtcagaagacagtaaggcacattcaattttaaaattcatccctgacctgccgctaaaatcgcacttgaagataactaaaggttttaaaatatcaagatcaattcaaggtgagtatttcaactatgaatacgcagggactgcattgggatattgggttgttgtcccgactaaactagcagcctttaataatggtaattatattctcactgataaagagtcatttagtcttaaggctgattcatctggtgcggtatatgtctatagtgtttacgatgaggactatttgatttttgacggtgataacggcatcaataatgatgatctctatatcgatgttaatgtgctaaagtccgtctttccttcattcaaccctgatgataaatttaatggcgtaacagttgagaaaaaatcaaaagaggctgtttttgaaactaaaaaagagaattttgctgtttgtttgcttatgcatgaaactgtcgtgaggaacaatggcgttcctgttgtcagtaaatttaaagttgattatgatgaaatgtggaaagcaaatatatcagaaagtacacttcttgaatggtttgaaaaaccagctgcatttacagatagaaggcaaagaattaagggcgaaaaaataaaaggtctatatttgtttatgactatgttcagtcaaaaatatggaagtggctccaaaagtaaaaccgctataattgcagatgaactcaacaaattggcggcctcggacgattttcagttcccggtcgcattcactacaagtgatgtcagaaagtggcttaagaaacccaaaaactaa

SEQ ID NO: 142261 - DNA, 237 bp, Enterobacter cloacae
atgcacaattcttttactcaacctacccccgagcagcgtttacaggctttacagaactatggcgagaggtcagatcgtctggttcgtgaacgtgaacgccagcgtatcacatcagtatcacgatctacagcatggaaacttgaacgagcaggccgcttccctttacgtaagtcgattgggccaaaatcttgtgcctggctgctgagtgatcttctttgctggatcagcattcgttaa

SEQ ID NO: 142262 - DNA, 222 bp, Enterobacter cloacae
gtgaccgatgcgtacggtctactgctagatgtagaccaagcaaccccattcattgaagccattgatacctccagtggcgtgtgcgtggctttcatcgttactgatgatgaccgtcacttccagtctgtaacaaaacgtttgccaaaagatgttgaaccagtgcggttatacgagtcgtacctgaccaatttcagcttcaccagtggggaatggacagaatga

SEQ ID NO: 142263 - DNA, 360 bp, Enterobacter cloacae
atgacaaaaaacacctcacgctacccacagcgcgtgcgtaacgaactacgttttcgcgaattaaccgtgctgcgcgttgagcgtatcggccaggcgttccagcggatcgtgctggggggcgaggcgctggatggctttgtttcacaaggttttgacgaccacaccaaactgtttttcccgcaggcgggcagcgtatttacgccgccggaagtgaccgacgaaggcattaactggggcgagggcgtgcgcccggctcgctggtggtgccggaagattacgcctggcagctttatgtctgtgacgagtcgggcatgccggcgctgcgccgtcgcctgctgggattacgtcagctgccggtga

SEQ ID NO: 142264 - DNA, 1350 bp, Enterobacter cloacae
atgaaactaattgcaaatggattgaacaaacagttttttagttcttttttacctcctccggattgcgaaattgacggtgtcgttgcagccatagcctatggtgatgataaaactgccctacttgaccattgtctaaaaaatcatcatcgccttgatatctggatgcgatatgatcacaccgtccctgtatccccctcactcttggcgaaatttcttgctaatacaaaaaataatatcttctgcaaacttgttccggatcgtcttcacagtaaagtcatctggtggaagggttatggcgcatatattggatcggctaacttaaccgatcgtgcatggcatacaaacatagaagcaggtatcttcttcactgagagtgatttatatagttctaatctaattgagcagcttgaggaattcttcgatagcttagcgtctcttgactgttgtgttgatcttagtgacgatatcattaatgaacaaagactattgttaaaatcaaaactcgagttagagaaaaaagagcaagagcttatcaaaaagagaaaagttcctgaatggggcggcgtaaactttattgataacaaaaaaaacaaagataaaagaaaagagaattttcataaagaatgggaaagcacactttcaatcattcataatatctcaagccagataaatgattacaggcctatatgggtatcagaagatacaccgatgttctggcaaaccgatcagtttttacatgcttattattataagcaagttcatcagcaagataatacttatccttttgaggattttaatcgtactaacagtaaaaacccacaagcagcattgatgagtatgctctcctggtggaaaagcctttcagccccgccgtctaatgaggatattcatcttgggatttacgctccctatattcgcaaaaatttgtcaaaaaataatattggctcattgactgaggataagctccatcaaatattctcttatacacatgcaacaatggaccatgtgataaaaatgagtgctgaaacatttggccaacctgccacaaagtccttaaacaaggaagaacgtgccgttttatttacaaaatggatcatgggccaaacaaatcaaaaatgcatgactattgctgaattactcaattatgtgctctacggtggaacgccttcttttatgtgggaaaggatctatcaggcagggaaagatgagcaatataaattccagcattacggtattaactccattgctgaagttgttggctgggccagacctgatgatacgcctcccaggaatggcagaaccaataaagcattgcgggcattaggctatccagttcacgtgaatatttga

SEQ ID NO: 142265 - DNA, 834 bp, Enterobacter cloacae
atgagggagtttgagtggcatatcaagaccatccttgagacaaaaatcaccgaagacaaacgagcgttgattgttgaaggcaaaacagatgaactcgtttttactcagctcttaaaaaaagtcgatccccaatgggaaaccaattgggttcttgccgaagttggtgggaaacgcaatgtggtagaaattttgtcaaaacaaccgacctggttgggcattgtggatcgcgatgagtgggataatgcccagttgaaccaacggcaacaacaactgcctaacctgctggttttgcccagattctgtatcgaaaactatcttactgtcccgggtgaactctggcattgcttgccacagaagcagagagcaaaactcccggaggggcgagatgcggctgttcaatctattgctgcgcttattactgaaaacctcgaacggtgggttcaatttggcgctttatgggcaataataaacccgctttgggatgaactacggttacttggtttcaaccgcgatcttctcgaccctgagctggttttggacgagcaaggttttcgggcacagtgcgctatctggcatagccatcttgagcctcaaggactctggcagagatatcaggataaactggctgcaattcaggctcagaataatgatgaaaacctgcgcaccatcgttcatggcaaaaaatttttcaaggcagtagtgacccctgctttcaggcaactctttgccattcaaagtgccatttcagttgaagatttattccgacaaatgccagttccggcagacctggcatttgtctggcaacgcatggatttaaccccagaagataattaa

SEQ ID NO: 142266 - DNA, 1086 bp, Enterobacter cloacae
atgaaaatagcggcgatttacacgcagagtgttggcccgttgggcgatgcggaaattagctttaaaaatgactggacgggagaggtggaggagaatgtcctcctcaccggcccgaacggctgcggtaaatcgacgctgcttcgtggcattgctctgctctggcaggcttttggatactggctggatcgccggcagcccttacctgcaagccacacagcaaaaaaatggtttgagcgctggggaacattcgcagttatttttagtgatttaaaatgctcgcactattctcctaccaacttcggctttttcttcggtgatgaaagcactatagaaaacctgatttctcagcatccaggtgtttcgtgggttggtgaaattgcagtgccaaaaaagaaaaaccgacttatgcatcacagtggtttcgtgcacgactataccttggatgaatatctgcaattgctctctgtgactcgctctcagacggtattaggtatgctccagacgaatatggaattgtcgatccccaacgtcatctatctggatgcagaagaacgtcgctggattgcaccaaaacgtaatatatcgtcgttagagccagatgatttgagtaagaactggctggcaaattacatagtgaccgacgactggaaggatcagcttgagtcatcgctgtttaacatgaaagccaccttgccaaaagcgtatcctgaaatggtcgatatgcttaatcagtttctttctggcaaacagattgagcaagagatcccccaggggggaaggatctttctttatctgaccgatggtcgaaaattgtccttcgatgaccttagctctggggagcatcaggtattaatcatgctgtttaccgttcagcgatggctgcagcctggtggggtggttcttatcgacgaacccgatctgcacttacacccttctttaatttctcctctactggctgttctcgaaaacatcgttactaagagagaagggcagttgatattgagctcccatgctactgatgtttggcagcgctacgaaacattagggctacgttatcctctttctgttgaaaaggatgatgagtaa

SEQ ID NO: 142267 - DNA, 3618 bp, Enterobacter cloacae
atgaatacgtcaaacatcaaaaaatacgccccggtggcacgtaaacagttccgcgatgcggtcatgcaaaaactgaccacgctgggcattgaggccgataaacaaggcaacctgcaaattgcgcaagcaaccgatcttggcgacagtgtgcgttatggtcagttcccgctggataaatcactggtgtcacgccgtgaccgtctggttaagcgtgcagcaaagcagggctacgacgtgctggtggagcacatcgcttacacctggtttaaccgcttctgcgctattcgctatatggagctgcatggctatcttgaacacggtttccgtatactgtctcacccgacgcaggaaggtagttttgaggttctggatcatgtgccggaagtggctgaagctctggggctggacaaagcgcgtctggtggaaatgaagctggcgggcgatcgtgatgaagagctgtaccgtgaactgttgcttgcccagtgtcatgcgctgcacggtgcaatgcctttcctgttcgaagcagttaatgatgaaattgagctagtgctgccggataacctgactcgcaccgactccattctgcgcgggttggtggatgagaaagcgatgctgaaagaggactgggacaagatcgaagtgatcggctggctgtatcagttctacatctccgataagaaagacgatgtgatcggcaaggtggtgaagagcgaagatattcccgccgccactcagctgtttacccctaactggattgtacagtacttggtgcagaactcagtgggccgccagtggctgcaaacctacccggactcgagcctgaaagggaaaatgccgtactacattgagccagcggagcaaacgccggaagtgcgggcacagctggcagctatcactccatccagcattgagcctgaaagcattaaagtgctggatccggcctgcggttccggccatatcctgactgaagcctataacgtgctgaaggccatttacgaagagcgtggctaccgtacacgggatatcccgcagctgattctggaaaacaatattttcggcctagacatcgatgaccgtgccgcacagctctccggttttgcgatgctgatgctggcccgccaggatgatcgccgcattttgagtccaggccgtggcgttcgcctgaatattgtttccctgcaggaaagtaagctggatattgcagaactttggagcaagctgaattttcaccagcaggtgcagcgcggcagcatgggagatatgtttgctgaagggactacgctggctaataccgacagcgcagaatataagctgctgatgcgcacgctggcattgttcacaagcgcaaaaacgctgggatcactgattcaggtaccgcaggaagatgaagcggcactgaaagcgtttctgaatggattatatcgtctggctgttgagggcgataaccagcagaaagaggctgcggcagagctgatcccatatattcagcaggcgtggatactggcgcaacgctatgatgctgtggtcgcgaacccgccgtatatgggtgggaaagggatgaatggtgagctgaaggaatttgctaaaaagcaatttccggacagtaagtcggatctgtttgcgatgtttatgcaacatgcgttttctctgcttaaggagaatggtttcaatgcgcaggtgaacatgcagtcatggatgttcctgtcgagctatgaagcactacgcagctggttgctggataataaaacgtttgtcaccatggcgcatttgggggctcgggcctttggtcaaatctctggagaagttgttcaaactaccgcttgggtgattaataacagtcatgctgaattttatcagcctgtatttttccgtttgattgatggcagtgaacaacagaaacaaacggccttgcttaagcgagagaatcgtttcgatataacactgcaaaatgacttcaaaaaaatccctggaacacctattgcgtattggatcagcaatacactgaagagtatttttaagcaaaatagactattaggtgccgtaggtgacgtgaaacaaggattagcaacagctgataatgatagattcctgaggttttggtacgaggtttcattcaacaatatatctttttcatctgattcttctgattctgcgttactatccagatgcaagtggtttccacactctaaaggtggggagttcagaaaatggtatggtaatagggagttggtggttaactgggagaataatggctttgaagttaaaaacttcaaagatgaaaatggtaatgttcgctcccgccctcaatcaatgaattattatttcaaggaatcaattacttggtcgttgatttcagggaacacgccagcctttagatttgagccgaaagggaatattattgggcataaagggcctggtatttttgtttcagaagacaatacattcaagataatgtgttttttgaactcttccgtgtcaaaaaaaatattagaaataatttcccccacaatgggtcttgaaattgggcaaattgctaagttaccactaattgaagtatctggccttaaaatggatgcaattagcatttgtcgcgatgattgggattctcgagagacatcatgggatttctatacattcccttggctcaaatctgagtgcggaaataaaatttcaacaagctggaattattggcaggcagaaagtaattcacgcatggaaaatttgagggaaattgaggagtataataataaattattaataaaagcttacggcttggaggaggagcttgattataaagtaccaactgagaatctatctgtacacttggccaaccgtgaagaagattttacaaaacttctatcttttgccatcggttgccaaatgggccgctactccctcgatcgcgaaggcctggtctacgcccacgaaggcaataaaggttttgccgaattagttgccgaaggtgcctaccaaaccttccccgccgatgaagatggcatcctgccattaatggattccaactggttcgatgacgatgtcacagcccgcgtaaaagagttcgtgcgcacagtctggggtgaagagcacttgcaggaaaacctaaatttcatcgccgaaagcctctgcttgtacgcaattaagccgaaaaaaggcgagtcttcgctggataccatccgtcgctatctttccacccaattctggaaagatcatatgaaaatgtacaaaaaacgcccgatttactggttgttcagctccggtaaagagaaagcgtttgagtgcctggtgtatctgcaccgttataatgaaggtacgctgtcgcgtatgcgtaccgaatacgtggttccactgctggcgcactaccagggcaatatcgacctggtaaacgatcagcttaagagtgctgaatcgggagctgccaccacgcgcctgaaaaaagagctggatgggttgaccaaaaaattcaacgagctacgcaattttgacgatcgcttgcgtcattatgctgacagacgtatcactattgatctggatgacggcgttaaggttaactacggaaaatttggcgatctgctggcggatgtaaaagccattaccggtagcgcacctgaggagatttga

SEQ ID NO: 142268 - DNA, 3594 bp, Enterobacter cloacae
atgaatattgaacaaatttttgagaaaccgctaaaacgtaatattaacggcgtggttaaagccgagcagaccgacgacgaaagcgcctggatagaactggatgagtacgtcattactcgggagctcgatggccacctgcgtcagttctttgaagtctatgccccagctactggaccaggcagattacagcttgccgacaaaatgggcgtctgggtttcaggcttctttgggtccggtaaatcacacttcattaagatcctttcctatctgctggcgaaccgcgaagttagccacaatggagtcacgcgtaatgcgctctccttctttgaagagaaaattgatgatgcactgctattggccgatattcggaaatcggttcagcatccgactgatgtcgttctattcaatattgactcacgtgcgaatgttgaagatggcgtggatgccatcctcaaagtctttctgaaagtttttaacgaactggctggttattgtggggacttcccgcatattgcacacctggaacgtgagctcgataagcgtggacagtttgatacctttaaagccgcctttgcggatatcactggctctcgttgggaagatgaacgtgatgtttatctgatgataaacgatcagatgggtcaggcgctgagtgttgctacaggccagagtgaagagtcttctcgccagtggatcgagcaacttgataagaacttccctctggatatcaaaaatttctgtacgtgggttaaagagtggctggatagtcaaggcaaccgcaacattctgtttatggtcgatgaagttgggcagttcattggtaaagatgcacagatgatgctgaagctgcaaaccatcaccgaaaacctgggtgttatttgcggtggacgcgcatgggtaattgtgacctctcaggctgacattaatgctgccattggcggtatgagcagtcgcgatggtcaggatttctccaagattcaggggcgtttctcaacgcgcttacaactctccagctcgaatacctcagaagttatccagaaacgtttgctggtgaaaacagaagctgcaataccggccctggaagctgtctggcaggaaaaaggcgatattctgcgtaaccagttggcgtttgacacgacaacgacagctacgctgcgtgcctacaccaatagccgcgagttcgtggataactatccgtttgtaccgtggcattaccagattctgcaaaaggtctttgaatccattcgtaccaaaggggcggctggtaagcagttggcaatgggggagcgttctctgctggatgccttccagtcggcagccgtccagatttctgaagatggcctggatagcctggtcccgttctggcgtttctattctgcgattgaaagcttcctggaacccgctgttagccgcactatcattcaggcctgccagtctccgtcactgacggagtttgacggcaaactgttaaagaccctgttcctgattcgctacgtcgatgtgctgaaaagtacgctcgacaatctcgtcacgctctctattgagcgtattgatactgacaaagtagaactccgccgacagattgaaaccagccttaatcgtctgcaggctgagatgctgatctcgcgtattgatgacaaatttgttttcctcacaaacgaagaaaaagagattgaaaacgaaatccgcaatattgatgttgaattcaccaccatcaataagcagctttcgaccatcattttcgaagagatcctgaagaataaaagatatcgatacccggccaataagcaggattttgatatcagtcgcttttgtaacgggcatccactggatggcgcaaatcttaacgatttggtggttaaagtgctcacgccactggactcgaactacgagagctacaagggggcacattccaatagtctgctgatgacggacagtaaagactgcattttaatttgcctgcctgatgaagctcgtacctggcaagacctgaccatgtatgcccaaactaaagccttcctcagcaagcaaagcggacagcgcccggaacaggcaacactgttggcggaaaaaggccgtgaaaatggcatgcgtgaaaaaacgctgaaggcgcagattgaaagcttgctggctcaggctgatgtctgggcgctgggcgaacggctggataagaaatcctcttcgccgttagctatcgtggatgcagcctgcggttacgttatcgagaacagtttctctaaactaaaattgctgcgtcttagtaccggagacgtaaatcgtgaaactcacgcgctgttgacagtagaaaatgatacccagctcgatctcggggatatggaagaatccaacccagaggcgatgcgtgaagtggataactggatcagtatgagtattgagactcataaaccagtttacctgcgggatatccttactacttttggccgtcgcccatttggctggccggaggatgaggtcaaactgctggtggcgcgtctggcacgtagcggaaaatacagtttcactctacagagtagcgaaattgcactgaagcaggcgtgggacgcgtttaataattcacgtcgttacagcgatttgcgtctgcacaaagttcgtcgccatgatgaagcacagttgactaaagctgcgctgctgatggctgagattgctggagaaccgtttaacgagcgtgaagaacagtcgttggtctctcatattcgcgaactctttggccgctggaagagcgaactgaccgtttttaaaactcgtgcagagagtggacaaaaccctggccgtaaagagatagaagaaggcctggtattgctgaacgggatccttaacgagaaagaggagtacgcggtcattgaaaaaatcatcacagcggccgacgatcttaaagatttctcggaagactgggacgatttgatcagtttctacaaaaaccaatacgccacatggcagcgcttgagcacggcgttgaatggaagttttaaagctaaccgtaacgcgctggataaagacgaaacggcccaaaaggctttgcaggagttggacggtatctacagcaaggcacgaccttacggagagctgcaccggattattccgctgattgaaaccgttgaaaccatcaaccagcgtctggtagaagaataccgaagccatgcgctgcagcagatagataaccatatcaatgagctgaagcaaagtatgcaggagatgcacgtccctgctgacttgcagcactcgcttttacacccgatgcaacaatcgcgtaagaaagtggagctgaacggtctgatcccgcagatcatggaagaacaatcagaagttcttgctttgcaggttaaggctaacgagcgtctgaatatctgggttgaggaagagcgtaagaaaaaaagaattaaacctggtccagagggtggtgttgcaaaaccagatctgaaaaagaccatctacgtgaacacgcgtaaaacgatggaacgagcggcgggtgtaacaacgctggataacgccgaacaggtagacaaagcgctggaacagctacgtaaaacgctaatggatgccattaacgcaggcgaacgcgttcagcttcagtaa

SEQ ID NO: 142269 - DNA, 603 bp, Enterobacter cloacae
atgaatgacccgatccttgaatatcgattaaaacagttagaagaacgtatcggcgacgaccgttttttgaaaaaccaaggttccggcaatgagattggcttctggatttttgactatccggcaaagcaagagcttcaggtccgcgaataccttcactttttattcaaaaaactggataaaaagtacacctataaaacgctaaatatcttccaggttatcgtcgatatgctggaggaacgtaagctctttgaccgtatctgccagcgagagcctgagctgggccttgagacactgaaaaagcatctggcagccccgctgagccaaaaaaaaatcgcggaatatattgcgcgtacggtcgatcttccggcacagcaatttgtcattctgacgggcctcggtaacgcctggccgttggttcgtggtcatgagctaatgagcgcacttcaggacgttatggggtttacaccactgctgatgttctatccaggcacctacagcggatatgatctttcaccactcgctggcattcactcccgtaactattaccgcgccttcagactggtacccgaaaccggaccggcggcgactttgactcctcgttaa

SEQ ID NO: 142270 - DNA, 618 bp, Enterobacter cloacae
atgacaaacgctatgataaaaaatgacaaacgctggattggcgatttactgggcggttcgttgatggtccgagagagccgaaccattgctgaactgttgctttctgaaccagatgaaacgacctggcggcagcaaataatcaatgaaaatattcttcaggcttcctccacaagcacagcaaatcgttatgcccgaaccttaaggttgcgattgatgaccttggatcgggagtgctggcaattgattgctgatggcagtgaaagcgaacgtctgcaaatgctgttggttgcgttgatgatacagtctccagttgttgcggagtttattgctgaagttgtaaatccggctcgtcaacagtttaaagaaaaacttggtatgaactgctggagtgaatttgtggatgagaatctgcgattgcacccggagctggctgctttctctgattcatctatccaaaaaatgggtaacaatctgattaagtcactggcagaagctggttacctggatagcccacgccgccgcaatttacaaaacgttttccttctaccggaggttgcaacggccttgcatcgtttaaacaaagccgaacttctccctattcttgggggtagcgtatga

SEQ ID NO: 142271 - DNA, 999 bp, Enterobacter cloacae
atgaaaaataaaatcgacgttagtgtcattatcccggcttacaacgccgttgagaccattggcaatctggttaataaaatcctcagcgaaacccacgtggctattgaacttatcattgtcgatgacggttctactgatgaaacagccaacattcttcgtcaagtccatgatgaccgactcattctcataaagcaggccaatcaaggcgtctacgcagcacgcaatacggcactagacatccatcggggagtgtgggttgttttcctcgatgctgccgatgatattaccgacgggttcattgaaaaacgatggcaagcagctaccgcgtcgcaagccgacgtcgtgatctttaatggctggcattctggcgctgataaccatcgaagagccgttcatactaagcagccctgtgaagcgacgttgtcaggtcatgagtggatcagacactgcgttatccatcgcgaatggccgcattacctgtggctgcaaatggtcagatcatcctatatcaaacagcattcactgcacttccagcccggcagaagccataaagacattctctggacggttcatcttgcggcgagcaatggtcgattctgcacattggatattaaggactatatctatatcaacaataaggcctctatcacgcatcggccggattactacgatgttcgtgctataagctatgttgaagtgatcgtggatatcatccagttagcggatgataaacaaaacaaaaaaataaagatatttttgtaccggcatgcgctggtagaggctcgtcactttttggggttatatcggaaaaaggttatggataattccaacgttaaaaccagtttcaacaaaaatatatcctttatcagtttattccaaggtattagcagcctcagtgacatatttttctttatcaagctaatgcgaaaattttttagcgtgcataaaataatgctctgttggtactgtctaaccttcttaagcgctaggcaattgtag

SEQ ID NO: 142272 - DNA, 393 bp, Enterobacter cloacae
atgacgatttatgccaaatcctttatcgcgcttgacggtaatcagcgcctcacgggcgcggtcactgcacagcttcacccttacgaccgctacacctgccacctctgcggcagcgctctggtattccaccctgaatggggtactaacctcccatggtttgagcacacatgggaagacctgacggagaacggacgccaccattgtccctatatacgccctgagcctaaggaagccaggcgggtgcgcatgctgcgtcgctatgtgccggatgtcttaccgctggtgcgcaaggccgaatggcactgttctggctgcgacagcgattatcacggtgagcgctattgtctgacctgccgtaccggtgaccacagtaccgaacgttgcgcagaatga

SEQ ID NO: 142273 - DNA, 207 bp, Enterobacter cloacae
atgaccacagattacagcgttcttaaagaccaactggtaacgatggcgtttatcacccagcttaccggcttaaccgacaaatggttctataagctcatacaggacggtgagttcccaaagcccattaagctggggagaagctctcgttggcttgaaagcgaagtggaagcctggctacagcaacgcattgcacagtcccgtcagtaa

SEQ ID NO: 142274 - DNA, 576 bp, Enterobacter cloacae
atgcttcacagtaccaaccgaaaccacgtacccgataattcgctgcagcacgttttattcaaccatcagaatcagctctttgaatgctactcgaaactgctaatgctgcgggtggattttgcttatcgccagaacagtgagtcgtttaacgccgctgatgtgaatcaactggtcgccgatatgacctggctgacggagcaatgtacgacgctatcggggctggtgggttatgcctgggtactggaatacggagaaggtcaccgttaccacatccatgctgcgttttatctcaatggtcagcgtaacaggaaggtctggtgcttctgggagaccattagcgcgctgtgggaggacatcacggacggagaaggctatgcgcaccggtgtgagcctaaggggcattacagggtacgtggagagcgtgttatcagtttttctgacaacagaggccgtaagggcatgcaatacatcctgagctacctggggaaacagtctcaacgcacagagcggcgtatttaccgcgtcagcactgtcccggcaccggcggtgagtggcaggcggcgtacgtacagctga

SEQ ID NO: 142275 - DNA, 942 bp, Enterobacter cloacae
atgatcaggcatgttgaagtaaagtctatcagagagggcgtctatattttgtggtatctcggctatactgatctagccagcttgtatgcttcagggagtgagagagaacttctccgtttcaatggagccattaacagacttattgagcaaatattaacagaaaatgatcaatcagatatcgttctgaattttataaaaaaccaggaaatgtacagaaagtaccgtgttgatgaaacaattgcatcctggttctctcaagatgaaaaatccagtgtctttttttggctttatcttttaaaaaaattcagagatcaacagcttgttgatgagatcttatctcttgctggcaacagttatcatgacaaaaaaatagtacatgataaaaataactcaaaagttatcgttaatgaacttccaatccgaacgccagataatccaaagaagtgttttatggctggattatatattcttgacctgctcagcttttcacctgacaagttgcaacgtacactcgacgaaataaaaatagattactcgcatataagagacctccgccgaaaagatttcgcctggtttacagatgccgggccggaagatgtcaaatgggtctggaaacagtttaatggtcacccgaacttattaaataagataataaagtgggatcttagtgagtctcttctgtctcaggctataccattactttactatttatgggatgagcgagaagacacgaaagctctataccttaatacattgcgtaagcgttacgcgaatatgaagcatcgtaagaaggttgcagataaggcaccggttaatattcgtatttctgaaagtgcaaaaaagacactggtaaaactggagaagcgctttaaccgaaacagagcggatgtgattgaatatctgatagaaaaaacctggcaagagctgaatcagaaaaactaa

SEQ ID NO: 142276 - DNA, 342 bp, Enterobacter cloacae
atgaagaaaatcattacaatcgcagcactctggctgctgtcattttcttcgctggccgcttcttcaccggtcagtgtcagcgtcagcccgggaagctacagtcactattcatcgattcgggttacatcaaaagtcgattcgattgtgattaaacaactcattgttaaccggggaaactgccaggatgctgaatacgccagcccctggaaaccagtacgtctgggattcggcggggcggtaacacatgagtttaccggcaaagggctgatggttccctgcaatgtactggaagtggtcgtccagacaagcgaaggcgcatggcagtttgattttgacagctga

SEQ ID NO: 142277 - DNA, 174 bp, Enterobacter cloacae
atggagcagaccgacaagcgcaagcaggataaactgaagttcgaccgggtaattaatctggcgcgcagactgccgcaaccggcgatccatgacttactacgcgcgctgatactgccaattcaggccgattacttgctggggtcgtctcagaattcggaaaataaagcacgctag

SEQ ID NO: 142278 - DNA, 684 bp, Enterobacter cloacae
atgtcagaaattgcattacgactccaggatgtacacgttgcttatggcaacagccagcaatcggtactgagcggattttcaatgtcggtacgtaaaggtgaaattgcctgtctgctgggtgcctcaggctgcggaaaaaccacggtactacgcgcagttgccggatttgaacgcctgcaaaacggagagatctatgtgtcacagcgacgtgttgccggtcccggcgttcatctgccaccggaaaaacgtcatgtcggcatggtcttccaggagtatgcgttattcccccatctgaccgcgcagcaaaatgtggcctttggattgcgtcgcatgccgcgtgaggaacaacaggccagagtgactgagctgttgaaaatggtggagttacacagccatgccaaccgctatccgcatgagctttccggcgggcaacaacagcgtatcgcccttgcgcgcgcgttggcgccacatccggaaatcctgttgctggatgaacccttctccagcctggataagcgcacacgtgagcgtcttggcaacgaggtacgggatattttgcgcgccgccgggcaaacggcgctgttggttacccacagtgaacacgaagcccaactaatggctgaccatattggcgtggtaaaaatggggcagtatcaaattaaaaaagcgacccatccgacctga

SEQ ID NO: 142279 - DNA, 1689 bp, Enterobacter cloacae
ttggattcgatcaataaacctctgcagtttccgacgttacgcggcctggtttccgggccgcagtcattattaacgccgctacatcttggcgcactgtgcgtagcgcttggcgttctgacaccgatcattgcgctaatttggcaggctacccaggccaatttatctcactgggataatctcctgacgtatgtactgcctgccgcactaaaaaataccgtgctgttattagccggtgtcgcggtgatggtcggcgtgattggcgtaggcagcgcatgggcggtaacggcatgggattttcctggacgtaaaattcttagctgggcgttactgttgccgctggcaatgccaacctacattgtggcctttgcgtggctcgatctgctgcatccgattggccccctgcaaacctttatccgttttttactgggctttgacagcccaagacagttccggctgccagatttacgctcactttccggcgcaatcatcctgctcggattagtgctttacccatacgtgtatctgacaacccgcgctatgtttatcagccagcccgcccatttactggaagccgcacgcacgctgggatgcagcgcaaccggaaccttttttcgtgttgctttgcccatggcccgtccggcactggccgttgggatcagcctggcactgctggaaacgctcaacgatattggcgcatcggagtttctcggggtacagacgttaaccgttaccgtgtacaccacatggatctcgcgttctgatttatctgctgcggcgcaaattgcctgcatgatgctgatgtttatattcctgattctgacactggaattttatggtcgcagaaaacaaggattcagcagccgcagcctgcgggaaattcaaccttcgcgcgtgcagggctggcgcggttggctgctcggtggcgttatttcactgccggttgtactgggttttctggcaccggtactgtttttaatgtgggaaagcgccaaacgcataggcgatgagaaccccctttcctcttcgttactgtcagcattgcaaaatacgctatcgctggcagcgggaaccacgctggtggtggtttgtgtcagtatgctggtggcctggagcgcccgccatagcgccgcagacaacgccatgccgggatttcgtcgcggcgtgatgcgtctggcctctttaggctatgcggttcccggcacaattctggcgattggttttttaccccccgccatggctgtcgaccgctggctggccgatttactggatgttcgcggcctgccgctgatgtccgcagggatcctgctggtaatttgttgtgccatgcgattccaggcgattgccattggcgcgctggattctggtctgggccgcattccaccttcgctggaacaggcgtctcgtctgttgggcgagaatggtgcggggacgtttgcacgagtccattttcccctgctgcgcccggcattagtcagcagtgccctgctggtttttgctgatgccatgaaagagctgccaacaacgttgcttttgcgcccggtcaattttgaaacgctggcaacgttactgtatgcggaagccgcacgtggaacctatgaagaaggtgctatcgccgcgctaatgattgttttagctggcacgctaccggttattttgttggtgcgtcaccaaatgactcgccgtggttaa

SEQ ID NO: 142280 - DNA, 1038 bp, Enterobacter cloacae
atgaattctctgcctcgcgccggactgcgccgtatcacatttgcctctgtcctggtcttctcagttagcctaccggcgttcgctcaggaaacgttaacgctctataccacccgtgaaccgggtctgatccagcctttgcttgatagctggaccaaaaccagcggcatcaaagtcagtacggtctatatcaaggacggtatgcttgagcgcgttaaagctgaaggtaaaaattcacctgccgacctgctgatgaccgtcgatgccggtaacctcattgatttagtggaagcgggtgtaactcagcctgtagagtcagaagcactaaaaaccgctattccggctaatctgcgcggcgcagataatcagtggtttgcgctgtcgatgcgtgcccgcgtgctgtatgccgagaagtcactgccaatcgataactggcattacgaacaactcgccagccctgagtacaaaggtaaagtctgtattcgttccggacagcacccgtataacacggcgctgatcgccgcaatgattgctcatcacggtgaagcaaagaccgaagaatggctgcgcggtgtgaaagctaacctggcgcgtaaagctaccggtggcgaccgcgatgttgctcgcgatattctcggccgaatttgcgatattggtctcgccaactcctattacgtcggccatatgaaaaacgccaaagaaggcagtgatgcacgtcagtggggcgatgcgattaaagtcgttaaacccacctttgaaaatggcggtacacacgtcaacatcagtggcgcagctgtagcccgctatgcgccaaataaagccgatgccgttaagctgatggaatatctggtttccgcacctgcccagcagcagtatgcgaaagcgaacttcgaatacccggtactgaaaggcgtgacgcttgatccggttatcagcgcaactattggtgaaatcaacgtcgataaaacgccgttaaccgaaatcgttaaatatcgtaaacaagctagtctgctggtagataaagttggattcgatcaataa

SEQ ID NO: 142281 - DNA, 843 bp, Enterobacter cloacae
atggccaaaagcaaaatccaattccagaaaggctacagcctgtttgagtttctcaaggactatggcactgaggctcagtgcgaaaacgcgctgttcacttggcgttttcctaacggctttgtctgccctgaatgtgccaacaagacctgttgtcgcctgagaaggcggccacgtgtgtggcaatgcaatcactgccgtcaccagatgtcattgactggaaacacgattttcgcaaacaccaagctcccactgaccaagtggtttctggcaatgcacctgttgtcacaaaccaaaacaggcttgtcagcgatggagctaaagcgccagttgggcgtcaaatatgacaccgcctggatgctcaagcacaagctgctgcaagccatgaaagagtccgatgacaagcagcccatcagcggcatcattcagctcgatgatgtctactggggtggcgagcgccgtggtggcaaacggggtcggggcgcggcaggcaagacgccgtttgtggcagcagtggccctgaacaaggaaggacatccaatcaagatgcggatgacggtggtcgatggtttcaaaaccaagtccgttgctgattgggcaaaacggcatattgccagtggtagcgcggtgatatccgatggattggcctgtttcaaagcggtcaaggaggccaattgtgagcacctgggtgttgtcaccaggggcaacctggactggctggatcatccggcattcaactgggtaaacacgatgataggaaatgtgaaaaactcgctgcggggcagttgtcataagctcggagcgaagcatttaccaagggaaggtgcgaacaagttcctgatatga

SEQ ID NO: 142282 - DNA, 2787 bp, Enterobacter cloacae
atgccaatggagaactgtaagcaaatgaacgccgtagaaattgaacaagccatcacggatcttgcagagcaaccctttgatcccatagagtttccttatgctttccttgaagcctttggtaacaaggaaacgactatcaaacgcttgcgagccggagcatcgaataagtccgatttgggcggcgttcttcagaccaataacattcacattttggctagtgaagaagggcaagtaacacaaatgcttgcttcactcaaggccagcccggcaacaggcaaggccaaggccaaattcatcctcgccacagatggaaaagacttcgaagctgaagacctcatcagcggccagactgtcgcttgtgcctttaaagactttcccgatcacttcggtttctttttgccactggcaggtatcagcactgttcggcagatcagcgaagacgcctttgacatccgggctacaagccgcctgaaccgcctttacgttgaactgctgaaagacaaccctgaatggggtactgcggagcgtcgtcatgacatgaataagttcatggcgcgtctaatattctgtttttttgctgaagatactgacatattcataggcaaggggcgctttactgacaccattgcacagatgagtgagcgcgatgcttctaatatgcacgaggtcatcggcacgctctttcgtgctatgaacactccagactatgagcgtgccgcagtaggtattccgcgctgggctgcagaatttccatatgttaacggcgctttgttctcaggtacggaagaggtgccgcgcttcagccgtatcgcgcgctcctacctgcttcacgttggcaatctggactggaccagaataaatccggacatattcggctcgatgattcaagcaattgccgaagatgaagagcgcggtgaattagggatgcactacactagtgttcccaacatcctgaaggtactgaacccactattcctcgacgaactgcgttcaaagctggaagatgcgggcgaaaatccacgcgctttgctcaatttgcgcaagcgtatcgcccgtatacgcatttttgatccagcctgtggttcgggcaactttttggtcattgcttataaagaaatgcgtgccattgaagctgagattaactggaggcgaggcgaacctgatcgcccatctgatattccggtcacaaattttcgtggcattgagctgcgcgacttcccggcagagctcgcccgccttgcgttgattatcgcagaataccagtgtgatgtactctatcgtgggcagaagttggccttggccgaattcttgccactacgcagcgagaattggatcacttgtggaaatgcgctgcggatcgattggtatagcttaatggatgtgagtggctcaggagttaaggtggtttcagacgatatcctgcaaactccacttgatcaagctgaaatcgagtttgaacatgaaggcagcgaaacatatatctgtggaaaccctccttataaaggaaccaaaaatcaatccgctgaacagaaggcagatctattgtttgtcttttctaaatatcctggaactttcaaagtgctcgactacgtgagcgcatggttcgtgaaaactgcggagtacctctcccatgtaaatggagcagccgctttcgtcagtacaaactcgatttgtcaagggaaccaagttcctgtgctgtggccactgataatgggactaggtgtcaggatctcgttcgcgtacacatctttcaaatggtctaaccttgcaacccacaatgctggtgtaacagtcgttgtaattgggttgacgcgtagttttggaacgaagtgtagattatttgagcatcaaggtgagggaatagtcgagagagaggtagataatatcaatgcctacttggttccaaatgcagacatctttataaacaagaaatctgatcctcctcctggctgcgccccgatggtacttggtaatcagccatacgaaggcggtcatctaattttcgatagtaaggggattgaagccctttgcatcccaaaggatgttcgagagacgatcacgcgcaaaatcttaggttcgagcgaggtaattaacggtagcgagagatactgtctctggattgagaatgagaattttgcgctggccacatcgtttccagcagtctcagcgcagatcaataaagtcaaagaatggcgcttaaagagcgagcggcaggcaacgcgttctatggccactcgaccgcatcagttttgtgagatgaagtgtggaaatcagtcggtaataattgttccaatccggagttctgagaatcgggaataccttcccgtggctctattcgatgagcggactacagtaaataaccttgcttattcgatctatgatggatctttgtttaatttggcactaatagcatcaagattgcatctaatctggattagcaccgtctgtggaaagctagaaacacgatttagttactcaaacaaaatgggttggaacacttttccggtgccaatgcttacagataagaataaggaagacttaacacgctgtgccgaggacattttgctggcgcgagaacatcatttcccagcaacaattgcagagctgtatgaccccgaaaatatgcccgctgatctacgtgccgcgcatgctcgcaacgacgaagtgcttgaacgcatctacatcggccgtcgctttaagaatgataccgagaggcttgagaagctgttcgacctctatatcaagacggccacctcggctgtaccggctaagggaaaaaagagttaa

SEQ ID NO: 142283 - DNA, 1062 bp, Enterobacter cloacae
atgcgcagcgccttccgtgttatccggaccgtgcgggaaaaacacgcctgtacaaaatgcgacgctatcgtgcaggcccccgcgccttcacgtcccatcgagcggggtatcgccggagcggggctgctggcccgggtactgggctcaaagtatgcagagcataccccgctgtaccgccagtctgaaatatatagccgccagggtgtggaactgagccgctccctcctgtcgggctgggtggatgcatgctgcaggctgctgtcaccgctggaggaggcgcttcggggctatgtcctgagcgacggcaaactccatgtcgatgataccccggtccagatgctgctgtcgggcaataagaagacgaagtccgggcgattgtggaagtacgttcgtgatgaccgcaacgccgggtcagcagtcgcaccggcggtgtggttcgcttacagcccggacagaaaagccatccacccgcagacccatcttgccggcttcaggggagtgctgcaggcggatgcgtatgcaggattcaacgagttgtaccgcggtggccagataacggaagccgcctgctgggctcacgcccgccgtaaaatccacgatgtgtacgcccgcacgccgtcggcgctgacggaggatgccctgaagcgtatcggcgggttgtatgccatcggggcggaaataaggggaatgccggcggagcaacgtcttgctgaacgtcagcagaaagcgaaaccgctgctgaaatccctggaaagctggctgcgtgaaaagatgaacaccctgtcacgacactcagagctggcgaaagcgttcgcgtacgcccttaaccagtggccggccctgacgcactatgcaggcaatggctggacagaagccgataacaacatcgctgaaaaggcgctgcggatggtcagtttggggagaaaaaactggctgttcttcggctcagaccacggaggtgagcgtgtagcgctgatgtacagtctgatcgggacgtgcaaactaaacggcgtggatccagaaagctaccttcgtcatgtgcttgacgtcatagctgactga

SEQ ID NO: 142284 - DNA, 369 bp, Enterobacter cloacae
atgataaatcttcctgcaggcactaaaatctggctggttgccggtatcaccgacatgcgcaacggcttcaacgggctggcggcaaaagtgcagacggcactgaaagacgacccgatgtccggccaagtcttcatcttctggggctgcagtggcagtcaggtaaaattgctgtggtctaccggcgacaggctgtgtctgctgaccaaacggctggagcgtggtcgcttcgccagacccgcacccgtaaaccgttccccgaatcactccctcgtgacgaaaaacggctgttgtcggcggcatcatgctgcccggactgtggcgattcactgcgctggctgggtgaagatactgctgaacagctggagctga

SEQ ID NO: 142285 - DNA, 714 bp, Enterobacter cloacae
atgtctcaggctgagcgtcgttatgaccgcctgtctgtccggctgtcgctgattatcagccgtctgcttgcgggggaaacgctgaatatgcgcaaactggcggcggagtttggcgtctcggagcgtaccctacatcgtgatttccgcgagcgtctgatttatctcgacctcgaatatcaggatggctgctgccgtctgctgaccggaggccgtcaggagattcaggaggaggccgcaatgcagtttgcccgtcagtcaggcactggcgcgttgtttcctgatatggatcaccatctggtcagttcattgctgagtagcaaggactcctcgccatgccttatctggcatcagggggcatccgtaccgtcttcccggccaggcatcttcacgcgactggtcagggcagtatcagagcagcggaggataaccctgctggctgacggatgccgttgcgacaaccttgccccctaccggctgattttcagcggcggtgagtggtttctggtgggggaacaccttgcccggataaccgtttttgcactgcacacagttcactccgtgacgtttcacgcggaaaccttcacaccagacggacatttcacccgcattctgtcacacccggattttttacaggcgttacctcattttcatgtttttcattcactactcgctgacggcagttacgggcagcttacccataaggaacaggcatga

SEQ ID NO: 142286 - DNA, 636 bp, Enterobacter cloacae
atgaaattactcacctcggcggcgctggccgccagcctctgcattacctctgtgaccccggccatcgcagaaaatatcgtgggttcagttaaggcctggcagtacatgcaggcagatggctggacatccgctgatggatacgatgataaccatatgcataacgcactctatcaggcggttgtactcgacaattatccctggacgaatcacttttttcttcgcagcagagatggaggctcgctttatctggcagacaaaaaatccctgacggtcagatacattgatataaaaccccgtgacgaatatccgctacatctccggattatttatcagggcaataatgaaggtcagggctgttatttcgctgtcgttgatgaccggatggctaactactggacagccgttgaagacaagctgctctaccagtatcccgccgttgaaaatgttgatgaaaaagcggctgaactcaaaaaacagttcacgccggaagtcatgatgatggtaaaggacaattgtgttaacaaacggcagcaggcagcgcttgcagcccggcgtactgaaaaagacagggaactgcaacagtgggtggcacagcagagtcttgctgagctatgccgtcgtaccggtaactgctga

SEQ ID NO: 142287 - DNA, 456 bp, Enterobacter cloacae
atgaaaaaaacatacccgcgtattgttgtcactgttctggccgttatcagtgctatcagtgtttccggttgtgacagcaaggaagatgctggcgtgaaagcgatagccaggtttaaggacctgactccaccaccgttcagcaaggttgtctcgcataaatccgatattgcccgggaatgggtaaagaaggatgcctttggtacaccgcaatatacggtgatgaaaacccgccagtcaccggaaggctgtgagtcaggcaattattactacattgctgacatgcagcagaaaacagtacaaccactgatggcagccctgtgccttgcggacaatatcaccctgagtttcaggattgaaaccgacagctatacgggtgaaaaatcggtggtgtattcgcacgatggcaaggaaatgggaaaactctatctgccggagaatcaggagaaaaatccatga

SEQ ID NO: 142288 - DNA, 450 bp, Enterobacter cloacae
atgaagaagctgaaaggcgttatctcagttttcgctctgagtctttgtctgctgtcaccggctcaggccgaagaacagcgttacatcagtatccgcaacacagacatggtctgggtgccaggcaatgtctgcgtctggcagtttcgcctggacaacggcggaagtggtgaaggattcgggcctttgacactttccctgcgtctgaaagataaaggggggaacacgctggcgatggggaatatggcagtggctgcatttggcgacagcgatgccactcgctctcaggaagcctcgctggagaacgaatgcgtggaaaacgtcagttccgtcgaaatcatgaaggcaacggaagcctctgatggttaccagactgacctgccgctgtcagtgtttgatccgcagtattatcacccactaccggtgtcggttgccggaggtaagacatcctga

SEQ ID NO: 142289 - DNA, 558 bp, Enterobacter cloacae
atgatttcaatgtcctgcggaactatgcttgcatgttgtgccaatgaaatcatcatgggtaaacagtccaacattggcccaattgatcctcagttcaacggtttctctacccatgccatcattgaagaatggaatcgtgcgcagacggaaatttttcaaaatcccgcagctgtccagatgtggcagttcattcttcaaaagctaaacccgacgatcatcggcgagtgtgagaaagcaatcaaatgggcaaatgagattgttaagcattggcttatgacaggcatgtttgataatgatcctgaggcagaatcaaaggcaacacatgtttgttcagagttaaacaaccatcacacaacctatacccactcgcgtcatattcattttgataaggcgcagaaaattgggttgaatgttaccgaacttgaaagtgatcaagtgcttcaagatttggttttgactatacatcacagctatatgcattcttttggtggagcaccactggcaaaaatcattgaaaatcataacggtaatgcaatgatttggaatatccagtcttaa

SEQ ID NO: 142290 - DNA, 201 bp, Enterobacter cloacae
atgaccccagctgagttctacgatgtttacaatatcaagccggcagaaatgttgaatggtgaaactgttaacaacttcgcttctcgcgtaatggcacagcaaactagtacaagtggaaacacaggtgtttggtactcacaaggtaccgctacacaatcgaagcaaaaccaaactacaagtcatcaactttacacgtactaa

SEQ ID NO: 142291 - DNA, 516 bp, Enterobacter cloacae
gtgaaatttaatctcttcgtgggcctagttgtagtcattgctggtctctcagtcgcccttgttaaaagttgctcagacgccagcagccttcagagcgaaaacgacgttctgcgaagtgacaactatttgcaggggcaggtgatcgcctcacaagcactcaacttcaatcggttcaatcaggttgccgaacatgccaacaggcttaactccctgatcaacagcagcaccgaagaaaccgtaatcgaataccgggagattctccgccgtgaaaaaacctgtgatctgcctgttcctgcttacattgctggtgggctgctcgaatacgcgcaccgtttacgtgccagcgccatgcacatcgataccaacagacctgacgcagccgatgatcgtgccgctgccgccagttcaatgacatactgccaggctgttttgtggattaagccgctgctggctgttattgagcagggcaacattaaattgtcgggtatacgagagattgagaagttacgaaaatga

SEQ ID NO: 142292 - DNA, 1008 bp, Enterobacter cloacae
atgattttttatcaaaaacatagtaattttagggccatgcctcttgatttaattggaactgtaatgactacagaagaacaaaagaaaactcgaagagtacgcgtcggctttttcacaggtaatggaagcaaaaaagatggcccgtcagttgcaaatcttgctttcgagcaaatgcttgggactgctccagcatcgttcccttatgttcatacagctgagacccaaaaccgcggactaaaacttgtaatccttgataaggatgacaagcaacatagttattttgggtatatttcttggagaagggactgtcttcttccattcattgaggatgggctgacgggaagtgaaagaaccattccgttgagtgagaaggactctgttgtagaaagaacctacttcatctattactacgaaaccgatctgttagtaatgacactcaatcatttggggccaaaggtgaacgatttgtccttcattctttacaataagacccaaatgcagaacatccgttttgaggcaatctggaagcacgaaagcatgaaagaccttctggaagatggcaacatcttacgaagttttgacttgaccgttgccgcaccaaggaatttcaataaatccaactataacttcaaacatgagctgactaaggacatagtcgacatggttgttggtatgggcggttctcatcttagactcaatatgcgaggtcgtatccgccccaagaaagctggcttcaactatcttaaaacctgtgtaactgatgcaataaaagagctgatcgaactgtttccaaaggggtcaggtggattacaaatcaaaaaaattgatgttacagaaccatctaatacaacccctactagcttacttgatcaagttttgattgggacacgcacaattgttgtaaaaagtggttatccgtctgattctgatatcagaatcgctatgacatctgctaaaattgaaaattcagcttaccttgctcagtttgagctcgcagtaagatcataa

SEQ ID NO: 142293 - DNA, 450 bp, Enterobacter cloacae
atgagagtgtttttaactctactttggaaactagccctccttttagccatcgcttacggtgcttcgttggtctttaaacctatgaagcacgcagatgttttgaccactgccggagtcctgtcaaccgtttcaggaatcttattcgggtttgttctcgccgccatctcgatttttagcagtgcaaaaagtgacgaagacggagcgataaatgcgcttaaaaggaataacattcttcctttgataatcaagcggttattatcaacaggtgcaacattgattgttgcttgtttctttcccctgatagcaatgtttctcccggatgacttgcttgtcaaaggtaacccgattgactatgtgtttattttgcttggtctttcttccctaatgatttctttatacaccttttcaaggtgttggtacgctctgcgtaacattttcccacatttataa

SEQ ID NO: 142294 - DNA, 321 bp, Enterobacter cloacae
atgaatacgatgatcgaaaagttgcggggacaatgtcggattgatgctgacgatacaacggaagacgaattgctgttgatctattacggtgccgcaaggcgtatggctgagaatttcattaaccgaaagctgtatgaagacgaggtaccggaatctgacccgtacgggcttattattgccgatgatatccttcttgcattgatgcttttggttggtcactggtttgaaaatagggagcaagtcaatgtcggaaacattgtcactgcattcccgttcggttttgaatcccttcttcagccttaccgtttcatatctctatag

SEQ ID NO: 142295 - DNA, 1230 bp, Enterobacter cloacae
atgaaattgcatgaactgaagcaaaaacgaaataccatcgccaccgacatgcgtgcactgcacgataaaattggtgataacacctggactgatgagcagcggacgcagtggaacgcggcaaaatctgagctggatagtctggatgagcggattgcccgtgaagacgaacttcgccgccaggaccaaacttacatcgacgacaatggtgatgaacagcgacagaatttacaaaacgatttagcaaacccggcagtaaaagctgacgaacgccgcgcggcagcttttgataaatttttgcgtcatggttttggcgaactctctgcggaagagcgtcaggcagtcaaagaactacgtgcgcagggcactacccccgatgcgaaaggcgggtataccgttccgactcagatgctgaacaaaatcgttgattccatgaaagcctacggcggtattgccagtgtggctcaaatcctgaatacctcaaacggacaggatattacctgggcaacctctgatggcacatcggaagaaggtgagctgctgggggaaaacaccgaagcatcggaagaagatgcaagctttggatctgcaaatctgggtgcaaaaaaactgtcctccaaaatcatccgtgtatccaatgagcttttacaggatagcggtgtagatattgaagcttatctggcttcccgaatcggtcaacgcatcggacgtggtgaagcaaaatatctggtgcagggcagcggtgccgggacaccggtacaaccgaaaggcctggttgcatcggttactggcactacggcaaccgcgtcagcagctgcattcacatggaaagaaatgaacatgctgaagcattccattgatccggcatatcgcggtggacctaaattccgctgggcgtttaatgacgcgactttgcaggtaatcgaagagatggtagatggtcaaaaccgtcccctctggctgcctgatatcgctggcggtactccggccacgattcttaacaccccttatgtaatcgatcaggctatcgacagtattggggcagggaagaaatttgtcttcctgggggactttgatcgcttcattgttcgtcgcattacttatatgacactgaagcgtctggttgagcgttacgccgaatacgatcagaccgcgttcctggccttccatcgtttcgactgcatcctggaggatgtagctgcaatcaaagcgctggttggtaaagcggcgtaa

SEQ ID NO: 142296 - DNA, 162 bp, Enterobacter cloacae
atgaaatcactcataaccgatgtaatcgggctggtcggttttggcctgctcacgtctggggtttacctgcaatttggtctagccctggctctcatgttttcaggcggccttatgctggcaggtgccctggcggtggccagaagggggaaacgtgctgcttaa

SEQ ID NO: 142297 - DNA, 492 bp, Enterobacter cloacae
atgagcagtcttttaacgctggcgaaggacttagagcagcaatcgaaagcgcagcagcagagtaccggcgagatgctgaaagccgcattcagcgagcacgagcagtctgtcagagcggaactgagcgcaagcgcgaggagaatcagcgacgccatcctcgcccacgagcagagtatgagcgaggcgatggagaaaaaccggcggagcgtactgcggactgccgggcggacatggctcaccatcctgatggtgtcagcgctgctgatcggcacgagcgggagcattctgtggtggcaggggcagcagataaccgacaattacacgcatcttcgtcagcaggaagataccctggcgaaaatgaccgcccggacgtggggagtgcgctatcaggagagcagcgacggccggaggtttcttatcctgccgccggggatacaaaccgaagccatcccttacgacgggacgacatggatccgcctgaaacaggagtag

SEQ ID NO: 142298 - DNA, 216 bp, Enterobacter cloacae
atgacagagctggaaaagcagttgctgagcgcattagagcagctacagcaggactactcgcaaaggctggacgaatgggagagcgccttcgcggaatggcggagcatgtgtgggcttatgcaacgggagaacgcggtgctgaacgagcgcgtgtcggacttgagcacgcaggtgctgagtttaagcgagcagctgcgccgcttgtccgggaactga

SEQ ID NO: 142299 - DNA, 324 bp, Enterobacter cloacae
atgctcaccatgtgggtgacggaggacgagcaccggcggctgctcgagcgctgtgacggcaggcagctggcggcgtggatgcggcagatctgcctggacgaaaagccggcacgttccggaaagctcccctcactctcgccggcgctgctgcgccagcttgccggcatgggcaataacctgaaccagatagcccgccgtgttaacgccggcggcggcaccggccatgacagggtacagattgtggcggcgctgatgaccatcgatgccggccttgagcggctgcggcacgccgttcttgagaaaggaacggacgatgatcgttaa

SEQ ID NO: 142300 - DNA, 195 bp, Enterobacter cloacae
atgaaaaacataccaatgtccgttcatcacgaaggtaaagactggtatccgttcagtgtgaacttctcagataatgaaggacgtcagttctctttcaccatctacgccataagccgcgagcacgcctcctacgttgtacaggagatacgtgaaacagcaacgcttggggatcagatagtcagcatcaccaaatag

SEQ ID NO: 142301 - DNA, 786 bp, Enterobacter cloacae
atgttgatttttgaattaaccaagcccggtagtagtctactttttgatgatatggaagttagcagaaaattcgaaagactattaaatcagcttgagacggctttttatgacgccaacgtcgcattgaatttatttaatgctgagagaaataacacagctatgttcgatgaaaattcttttcatcagcaccgtgatgatttccaaaatcggcaaatattagaggctcaggttcgacaggaactgggtttggggccatacgaaggttatgagcaagttcgagtcgaggttgatactcgcttaaaaagagataagtggagtaaaggaattacccctttgagccatcaacaacgaataatttttttgcatgcaaaatctttccttaatgcattagatactattgataagtttgtgaaggtcatctcagaagagactggcgctccagataatatcaaaaaattacacgcaaaaattgcagaagattttcctcatttgagagctgttagaaactcagcacaacatttagaggatagagcgcgtggtcttggagcaggaaaagtaccaaaacctctaaaacttcaaccattggataatggttttgtcattgctcctcagggggctttgatgcttagtaatttatttggcaccaaatttggatacactatggctgatggtcattatggtgaagtagacgtttccgaagaatcaatgaggaatataactactactatccaagaagtttttgattccttcacatggcaaggattccagcagcatctaccacgataa

SEQ ID NO: 142302 - DNA, 249 bp, Enterobacter cloacae
atgggcaaattactgctgagtgcagtgatgaatcggagtttctggcgttcaatgctgccgtttttagcgctctatcggacatgcaacttacccttcattccgaacgaagggctcgttcaaaatctaaaatggcggccttcaatgagaagttttttaaaacggatcccacgggtcgcaattaagagaatcaagaagcttaatggtctgataggtgatggcttcctgtttaacagtgttttctgggcttga

SEQ ID NO: 142303 - DNA, 234 bp, Enterobacter cloacae
atgaataacgatattattgggttaagactcactgctattgaagctgcgattaagaccatttcagctgcaatatgtgctaatgagggcccactatcagatgacctgcataaccaaataaaattattgcgcgatcaactctcaagcccagaaaacactgttaaacaggaagccatcacctatcagaccattaagcttcttgattctcttaattgcgacccgtgggatccgttttaa

SEQ ID NO: 142304 - DNA, 1362 bp, Enterobacter cloacae
ttgtcacgcctgaagggtgaagcaaaagagcgcctgcgactgagttatgcagccgatgacctgggattaaccagtgatccgcaattccagacaggccgtcaggagttgattaataacggtcttgctgaatggcggaataatgaggccaacaaacctaaggcgaagggtggtaaaaccgaaggcgagaaaaccgaggatgtgtataagcgccttatcaagcagcaaaaagagcagattgccctgcaaggccagaatactgagctggcgaaggttaaataccaggtcagccagggggaacttgcttctctgacggaagcccagaaaaagacggtattgcagaatgctgcactgattgaccaggttaaattgcgtgagcaactgcgaaattacgaagccaaccttgccgacagtaacgccagcgcccgagcagccaatgaagcgcaactgctgggatacgggcagggaaccaggttccgtgaaagacttcaggagcagttcaatctgcgtaaggagtttgagcagaagaataccgatcttctccgccagcgtcaggctggtgaaatcgacgagacgttctatcagcaggggctggcacttaataagcgctacctcgaagagcgcctgcgcgaccaggagggatattacgcagcttctgatgcgcagcgtgacgactggatgacgggactgtctgagggttatgcgaactgggtggacgaagctactgattattcttccatggccgctgacggcatgaagcaggccatgggtggcgcggtcaccacgatcaccgacatgctcaatggcaacgttgacagctggaaggactggggcgtgagcgtactgaagattatccagaacgttctggtgaacatggctgttgctaatggcgtcagctcaattggatcactgttcagttttggtgcctcgtcagccgcaaccgccagcagcggtaccgctattcagaatgctggcgcgaacttcacatttaatgcgaagggtaatgtgtacgactctccgtccctgagcgcttacagcaatggcgtttttcagacgcctcagctgtttgcttttgctaaaggcgcaggggtttttgccgaggctggtccggaagccattatgccgcttacgcgcgccgctgatggttcgcttggcgttcgggcagttggtactccgcaggtctctggtggcgtgccttcagttaacttcggcgatatcaatattcagggcggatctccacaggcgtccagtcagggtactgccggagcagcaggcaggcagcttaaggatgccatcactggtgtcattaacgaacaggccagcatgccgggctcgcctctgtggcgattaatcaagggagtttaa

SEQ ID NO: 142305 - DNA, 339 bp, Enterobacter cloacae
atggcagtcgaaaccttcagctggtgcccaaaggttacctctcaggttgatacaagttttcgtacccgaaaggcgcagtttggcgatagctatacacaggtggccggggacggcatcaacccggtaacacctcagtggagcgtgagctttaccggcgacgaggcttacattcaggccattaaaaactttctgaacagacatgcagggtggaagtcatttatctggaagccaccgcttgagccttctggtttatggcgcgcggaatccttccagatatctacccacggcaacaaaaaatacaccctcagcagcacattcatacaggcataccatccatga

SEQ ID NO: 142306 - DNA, 759 bp, Enterobacter cloacae
atgagtatttcatctgatgtccagaaactggagccgggtaagcgcgtccgcctcatcgaggtggacggctcagctttcggtgcgggtattcttcgctttcacaacgagacaatcccgcataccgaggcggaaatcatcgccgcaggcggcgacgagtcaaaacttgagccgaagtcggtatggtggcaggggcaggagtatggcgcgtggccgtatgaactgaccggcatatctgtaagcagtgacggccagagttcacggccgtcactcactgttgcaaacatcagcggtacgattggcgcgctgtgccgaagatttcaggggatggctaaagctaaggtgatcatccatgacactttcgcacactatctggacgccagaaacttccctgatgggaacccgactgcgaaccccaacgaggagcgcaaacaggtttattacatcgaccgtaaatcaggatcagacgatgaaaccgtagagtttgagctttccagtccagccgatttgcgcgggcaactcattccgacccggcaaattcagccaatgtgcacgtggtgcatgcggggctggtacaaaaccgggaacggctgcacctacgccgggcaaaacggctggttcgataaagacggcaatcgggttgatgatccttcacaggatgtttgctccggattgctgtcaacgggctgtaaacctcgcttcggagagaatgaacagctggattatggcgggttccccggcgcttcacttctgagaggataa

SEQ ID NO: 142307 - DNA, 711 bp, Enterobacter cloacae
atgcgcgacaaaacagttagcgccattctggcgcatgccgccgcatccttccccgaggagtgctgtggcgtggttattcagaaggggcgggtggagaaatacatcccctgcaaaaataatgctgagtcgccgactgagcaatttgaaattaatcctgaggattattcggccgccgaagagcagggcactgtggtggcgatcgtccacagccatcccggcgacggggcaacaactcagccgagcgagctcgacatgctgatgtgtgatgccacggaactgccctggattattgcatcgtggccggagggcgacattcgcaccgtcatgcctcgcggagaccgtcccctcacagggcgtcagtttgtactcgggtatgcagactgctggtctctcatcatggactatttccgcatcgagcacggcattgaactgcccaactacagcgtagatcgccactggtgggagcagggtgaaaacctctatatggataactggcaggaatgcggtttccgtgagtacgacggtcccgctcagccaggtgacatggttatcatgcaggttcagtccaccgtcccgaaccatgccgggattttgcttgatggcaacatgctactgcatcacatgtatggccagctaagccagcgtattccctacggtggctattaccgtgaccgtaccatcaaaattctgcgttataaggatttgatgtaa

SEQ ID NO: 142308 - DNA, 420 bp, Enterobacter cloacae
atgttgagcttgaactttgaagttcccggcaacccggatgactactacgaagttagggaaaaggaagatggaacgctttcctataagcctaaccgcctaaaaataagggggttagcaaaaactcagtgtgactattttgattatatatcctctttaggtgagaatattcatatagccacacttgagagcaatgatgtcatcaacgatttttttgaaaatgagccggaagaggctcaagtttctatttacaatactctttccgaagaatttaacgcaattactgataccattttagataaaacttcagaattgaatgcgcaggcacaacagacagaaaatgtagcagagaacattggtaaagttataggggctatagttcttataggctttatagtttttatattatcgcaaataaactaa

SEQ ID NO: 142309 - DNA, 891 bp, Enterobacter cloacae
atgagcactattaccagagaccagttacgcgaacgcgcgcgcgaaaaggtaaagagtctagagtttgctgtcacacagaccgctttcgctgattcacgtgcagagcttgaagaagaactggagctggcgcgtatcgcgctggcatcgctcgaagcggagcctgccattcaccggtggcgtcgtgtgacctctgaaccatacggcccctatcattggcattatggtgattttatcggcttctcaaagcccgttgatgggattgaggatgagtatttttactccgcccctccagccccagccaatgccgaacccgcagcatggctgtggtcacacaggaaacatccaagcgaagtatctctcgttaggcctgaagatgatgagagagctgaaggagctcactggtctgggtggagttgtcaggcgctatatgccgcacctccagcgccggtatctgtgcctgatgaagtttgctgggaagatgttccagaggaaatcaccgaagacgatatggctcttgcatcagcatgggcacatggattcaatcagtgccgagccgccatgcttaagcactctgagccattcatagtaacgagcgatcatcgcatgatggagatgcctcaagttgaggctatcaacgctgtcaccgccatgcttcagggtgtcgaaaacgccgagacgcccaccaccatgcagaccgcaccagctcttgattcttcgccaaaaattgccgagttgcccagcggaaactctccggtgatcccggatggttgggtgctggtgccagaagaacccacccatgaaatgcttgaggctggtgatgaacaattcggaacttacgatgtgtatcgccggatgatagcagcatcaccgcagcaggaggtgaagtcgtga

SEQ ID NO: 142310 - DNA, 198 bp, Enterobacter cloacae
atgagcaacaccaccaaatcgctgaattatgagcctgccgacccggataaaatgcgccttcctaaaggctcgtgctgcggtaattgccatcacatccgtcgctgtaaagctatgttcggccacacagaggcggatacctattgcgactggtcgccatcgcgtttcattccggcaaagacagaaggaacagcccaatga

SEQ ID NO: 142311 - DNA, 480 bp, Enterobacter cloacae
atgacagccaataaaccaatgaccggcgaacagctggatgaactgatgactgttgcagtcaatatgcagcgcgatagtgaaaaagcaggtgaccgccctaccgctatgttcgcttatgcagttcaggttgctgttctggaactgcgtaagattcgtgatgatgctctagcgctggctgcggagaatgcagggctgaagaagtttattactaaagaatgtcacgttgctcacgtagagccagagacattctacgaagaggaaattactcgctacgttaatgctgatgggtacgagccagaaacaccggcgaccgacgctttcttggctgaagtgcgtgcaaatgcgcgaaatgagctggttgatgagttagaagctcgtttcaccgaattatcaaagaccagcccagtaccagagttgcgaagtggtgctgctggtgccgcaggttttgtctctacttttcgcaaaggagtgcagtcatga

SEQ ID NO: 142312 - DNA, 1365 bp, Enterobacter cloacae
gtggtggttcgcgataaggagcatcagacgcaggacgtggcggacctgagccgcgacacggcgaatgcaaacggcagcatcgacgccatcttcgataaggagaaagagcagcgcaggatggaggaggcgcagcttatcggggaaatcggcagccaggtggcggatatcgcccgcacgcagggtgagataaatgcgctggaggaagcgcgtaaggtacatcctgagatgaccaccgaccagctgaaagacactcaggcctaccgtgacgcgcaggcagaatacggcacgggcagcgacatgcagcgcgccatccaggcggctacctctgccgctcagggtctggcgggcggtgacatgaccgccgcactggccggagccgccgcaccgtacgtggcggaggttatcggccaccgttccgggctggacgatacgatggaaaaagccgccgcccacgcggtggcgaatgcggtgctggcggcaatgcaggggaaagacgcgcttgcgggtgcggcgggtgccgccgccggggagctggcgggcggaattgcgctggagatgtacgggaaggatgttgctgcgctgagcgaaagtgaaaagcagaccgtcagcgccctggctactcttgccgcagggatagcaggcggcgttgcgggagacggcacggcaagtgccattgcgggggcgcagtccgggaagacggtggttgagaataacctgatggccgggagtgaggatgcacaggttgcgtggctacaacagcacggaactgatatgacgagctgtgcagatgccccctcttcagcaagctgccagaaagcaatgaatgaacgggatgccgtcggactggcactggcaagcggtggcgtggcgttattgcccggtggtgctcaggtaatgtgggggcttggtgctggcgctaatgccggggtcagctattgggtagatggcgcaattgacccggcgaatgtcgccatcgctggttgggtaaacatattcagtatggggaacggaattacaggtaccgtgggctggaatgcggcaggtggtgcgctgggtaactggattgacaataaagacccactttctagtgcacttatcaatggtgtcggtgcgggtattggttatggtattggtaaaggactttcatggggcgttaatgccggggcaaactggtggaaaggcggctgggatccgaagtttaatgctgacctgagacagtttactgaagtaaaaggggattatggtatttcaaaagaaattaaaccaagcgatattcctggtaatttcggtgacattggagcctctttctcctccgaatatggcggtaaaaaacttgaaccattcattgaggataagtttaaatga

SEQ ID NO: 142313 - DNA, 249 bp, Enterobacter cloacae; identical to SEQ ID NO: 141188

SEQ ID NO: 142314 - DNA, 429 bp, Enterobacter cloacae
atgaatatcaattcgaaagaaattcttgcgcgtttgctagaaaatgacccagaagccagggcggaatgggaaaaagattttaagctcaaaaacgacccccggattacacctattggccactttattcgtaaaaccagcctcgatgaattacctcaattgttcaatgtgctcaaaggggaaatgagtctcgttggccctcgtccagtcattcatgaagagctggaacgatatgctgatgatgttgattattatctgatggttaagccaggaatgaccgggctatggcaggtcagtggccgtaacgacgtagattacacaacccgtgtctattttgactcctggtatgtcaaaaactggtctctatggaatgacatagtgattttgtttaaaacggttagcgtggttctttttagaaaaggtgcttattaa

SEQ ID NO: 142315 - DNA, 510 bp, Enterobacter cloacae; identical to SEQ ID NO: 97269

SEQ ID NO: 142316 - DNA, 288 bp, Enterobacter cloacae
atgaacggcggcaactacacccgagccaataccgaagacatgttgatcgccaccagaggtaatggtcttgagcgcaagaacgccagcgtgaaacaggttatctacagcccactaggtcagcatagcgagaagccagcagaggcccgtttccgtctggaaaaactctacggtgatgttccacgcattgagctattcagccgttgcgccgcgcctggctgggacagttggggcaacgaatgcgaaggactatcgctaacttacatcaacggatggtggaccgaccaatga

SEQ ID NO: 142317 - DNA, 1152 bp, Enterobacter cloacae
gtgcggatagctattcccagctacatgcgccacctgttccaagggaagcgctactttatgaaaagcacagggacacgagacatacggcaagcgcgtttgtttcgcgatgctattgctctggaatggactcgcttacggaatctgcttaagccacaaggcggctcgtccgtcgatcaaatcattgatgagctacgccgtgtcagtatgtatgctaaggaagcccccgcatcatttggtgcatcggttcaggcttgcccttccttgctaaaaatgcgtgatttgtacctgcttcaatacagcgagaagcgaaagctaaccaccctatccaagaccaataaagccgtagaggtgctgttaacccacctgaaaaagaaagatgttcagttgcgagatattaaccgaaccatagttacaggctggttagataaactcaaaactgagcgagcgccccaaaccatccagaactatatcagcgcactggcgcagatatgggatctggctcgcaatcgctaccacgatgcaccacaggacaatccttggcgcggccatgcgctcgaagcaaaaagcagcaaggtcagctatgaagtcttcgcgccgggcgagctagcaaaggtctatgatttgctcgatgatgagatgaaagcggtaacggctattggggcatacagcggtatgcggatcaatgaaatatgtacgctgcgtgagagcagtattaaaactatcgagggcgttttgtgctttgagatcaccgaggggaagaccaagagcgcggcgcgaatcgtccctgtacacagcaagataatccctctcgtgaagtcgttgctcaagaccacacatagcggttttctgttctatcacgcctcaatcacagaccgggcagacggaaagcgttcaacgtggcacacccagcagttcacacgggcgaagcgcaaagttcttggcgaacctgccgcagagagaaaagtgtttcattcactccgacatgcgtttgtgcaacagctcgaccgtgctcaagtaccagaggatcgcattgccttactcgtcggccatgagcgaggtaacacggagagcttcaaaacttattccaaaaattctgcatctccaattgaattggctcggtatatagaacaagtggcttatctcgaaatttag

SEQ ID NO: 142318 - DNA, 720 bp, Enterobacter cloacae; identical to SEQ ID NO: 80948

SEQ ID NO: 142319 - DNA, 1254 bp, Enterobacter cloacae
atgttggcatggttactaagtatgttaaaggaagagttttcactttcagaagttgcagacattttgggtgtgtcaaaagaaactttaaggcgttgggacactgctggaaaattagtttctcaacgaaatgacgagaacaactatcgtttttatagaaaagatcaacttaaacattttgaacaggctcagtttttattcaaaagccagtggtctgatgagtctaaaacctgtaataacatttatactgtattagaattatttgctggcgcagggggtatggctttaggtttggaaaaagcaggtttgaaatctgttttactaaatgaaattgattcccatgcttgtaagacgttacgaaaaaatagacctgaatggaatgtggttgaaggcgatgtgagcaaagttgacttcaccccttatagggataccgttgacgtactggctggcggtttcccttgccaagcattctcttatgcaggcaaaaaacttggttttgaagatacacgaggcacccttttctttgagttcgccagagccgttaaagaaatcaatccgaaagttcttttagcagagaatgtacgaggattgctaaatcatgatgatgggcgaactttagaaacaataaaaaatattatcacagacctaggttacactttatttgagcctagggtacttaaggctattttctacaaagtgccacaaaaacgcgagcgtttgattatagtggctgtaagaaatgatcttgctaatggcatcgattatgaatggccgtcttcttacaataaaatattaacacttaaagatgctttaaaaaagggagagctgtacgatagcgacgtgccagagtctgagggacaaaagtatcctaaaagaaaagccgagattctaagcatggttcctcctggtggctactggagagatcttccagaggatattcaaaaagaatacatgctcaagagtttttacttaggcggtggcaaaacaggtatggctcgtcgcttatcgtgggatgagccaagcctaactttaacatgtgccccagcgcagaaacaaacagagcgttgccacccggaagaaacacgaccattaacagtgcgtgagtacgcaagaatacagaccttccccgatggctgggtatttgaaggcccaatgtcagcgaaatataagcaaatagggaatgcggttcctgttaatctgtcatttgccgttggcaaatcagttgtgcatcttttagaaaaaataaataaaagataa

SEQ ID NO: 142320 - DNA, 429 bp, Enterobacter cloacae; identical to SEQ ID NO: 80946

SEQ ID NO: 142321 - DNA, 252 bp, Enterobacter cloacae
atgactggcgtactcgctgacctgaaacagtgggtaatggataacggagagcctgagctggaagctgaatttcgtaagctgctggggctaatgcgccgcaacggtatcagtgacaaacgcgttaatgcgatggctgatgagctttatgttctggtttgccaacgccagtgcgaagaatacgaagcctgcaagcgggcagcctctgacaatggagactttgaatcatggttacacggacagaccaactactaa

SEQ ID NO: 142322 - DNA, 426 bp, Enterobacter cloacae
atggctgatgaaaagccgattagagcgctggcagatgatgacccacgccgccagcggtacgctgaactgttggcgcaggctggccgcatgactattccccgactgcatccgggcgatgctaatagtgttatgagccagcttgcgacgatgctcggcgcacctgtcccgatagtcggtgctatgactgagcacgccgctgcatggcgtgcctgtatgctggagcaagggcttggcgatcttctggatggcttgagtaaacaggtgctgaccatcttctttctgctctgctggagagacagcgccttacgattggcgggtaagcaaaaggaacggcttacagcggccagcgagggtttgaccattgagcaataccgggtaatgcacccggcttacagagagaataaagaagatgataaccacgattaa

SEQ ID NO: 142323 - DNA, 510 bp, Enterobacter cloacae
atggttaatgatgcttacgcccctgagctgttgcgatcccttttcctgtatgacccggtgacaggtcgcttgtgccataaagctaaccgacgccgggttaaggctggctcctatgctgactccacccggcgagctgatggctatcgtcaagttgccctgcggctcgatggcaagcagtaccagctaaaagcccatcgcgtggcgtggattcttgcgcatggcgctattcctcacgttaagcagatcgatcacatcaacggtatccgtgacgacaatcgcctatgcaacctgcgtttggttacgcagcgggaaaacgaccagaaccgacgcaaggcaagggggtatagctggaataagggctgtagcaaatgggaggcttacatacgcgttgatggtgtactccgtcatcttggcttatttactaccgaagcggcggcgcgtgctgcctatctaaaagctaaagccagataccatccctcaacgccagccgatttgttgcaggctgcctaa

SEQ ID NO: 142324 - DNA, 996 bp, Enterobacter cloacae
atggctgatacttcgtacagtcccgatctgtttcgcccacattatggcgggggggaatccgacaatgatattcacatcgaggcttatgaccgggatgtccagacccgtttagagtccaaatccgtatttctggccgaggggctgtctacatacaggccgctgaaaggcagcaaccaataccgcattgatcgcctgagtggtgatcttgaggtgaagggcagaaccgcagggcaatcgctggagcctaccgccgttaagtcggacaagttggttatctctgtggatacgctgagctatatccgcatcccgattgactatcaagacgactggacagcgcccacctttcgcgcagagctgagccgcaacatggggacagcccatgcgaagttctacgacgaagcgcacaccatccagctaattaaagcgactgactttgtaccgccgccgacactgcaaccaacgtttaacccgcttacgaataacgttgtctcgctcgacctgacagcggggagcgaagaggacgccgcaaacgaattggttcacgccgtcaaagcggctgttaatcgattcctgactgagaaagatattccggtggcggagctgtgccttctcatcgacacggcttggttcagtatccttatggaacataagaagctgatgaatgtccgttacagccgggatagcagcaacgattacgcatggcgtcgcgttggctatgttgctggggtgcgagttattgagctgaacagttacccgcaggaagccattaccgggcatgaactgggcgctgattatgacgttaccgcagaggaagcgatgacgagggcgacgctgtttaaaccttcctctgtgctgctgacggtcgaagcgcagagcgtcatcaatcgccagtgggatgatgagcgcgaaatgacgatgatgatggactcatatcgcctgttcaatgttgggctgcgccgcccggactgcgttatcaatttccgacaagctgcataa

SEQ ID NO: 142325 - DNA, 414 bp, Enterobacter cloacae
atgagtacctgtaatttccatgccgtggagcgtgtcgctgacgtgcgcccggatttcgccttgccgctgggtagatgcgaccacatttaccctgagcgtgtacagcacgttttcaatccagacgaagcggtttatatcgttgcccggtctgccacgtccgatacccgcacctctgacgttagccgtggtctgtccccggagctgccgccgaagatggccgaaaggctgcgcgaacgtgaacggcacgagaagaatcgagccagaccccgcaaggtaatcactgaggcgatacgcgctgacattatcgttcgctctgcaaaaggccagaagaatcgttacattgcaagcaaggttggcgtgtctgaaacctctgtgcggaaggtgttgaacatggcgcgtatgagtgcgcactaa

SEQ ID NO: 142326 - DNA, 696 bp, Enterobacter cloacae
atggctgacaatcaaaacccttatctcgctgctggcgctgatgctgtaccgcagcaatcgccgtacatggctgcacctgttggcgctgacaatggcgcatcccgctttagttctgcgcctgctgatgctgatttcctccgtacccagcccgttaacggcaatggtggcggccagtggaataatggcaatatcgcaaatcagcaagaccagaacgctgacagcgccggggcgcaggtgggtgatactatccccctgatggatggaaccgctgtagagttgacacctgaacttcatgggctgatggggcaatttcaccagtctgtcgaaagccagctaggtcagggtacagttgacgcgatgttgcagtacgctggcacgctcgacgccgggacgcaatcaacccttgaacggatggtcatgtctggcgaccccgcgcagatgtcgcgtgcggttcagtatctgcaagagcgtatggccgctggctctgccactggttatgtcccgtcgcaggggaacacatatggtcagcccgccgcgcaacctgtcggaatgtctcatgctgagtttattacagcgtatgaccagctttcgcagtgggcgcagcaatcagggtatggccccggccatcgtcagtacgacgagcaataccgcgctctggttgcgcagcgctccgctggcaaacgtgctggccgctaa

SEQ ID NO: 142327 - DNA, 240 bp, Enterobacter cloacae
atgagcaccatcattttaatggagccacgccgcgcggctgattgcgggcaacaactgaaattcattgccgaatccttgaatcttcgtcaaatcgatttggctcatgtgtaccagatcgacagacaagatctcggcaaagcgtaccacggacagaagatgattcctgcccgatgcgtacacgcgcacatgcttttacttgaactggcgcaccgccgagttacatcacaagaggttgcataa

SEQ ID NO: 142328 - DNA, 234 bp, Enterobacter cloacae; identical to SEQ ID NO: 78543

SEQ ID NO: 142329 - DNA, 564 bp, Enterobacter cloacae
atgacagtcctgagcctgaccgatatccagcgcatcaatacccttgttaagcgcgatcttctcaatgtggaggaagttgtcgctgcaaccgggtttgacccggtggacattgatgcggtgctgcgcggcgtttatgtagccgaccttgccaaccagtggagggatgaagccgctattacgctggaggaatacaacgccatccgtaagcgctggaaaccggggcgcggccactgggacactgcacatgccattgcacgcgattttctaattcggcctgaaactgtgctggctatcgtccattcccgctttagcaacgcccacacccacccgatgccgaaagcagttaaagcaaagcctgagaaaccgcagacgatgcgccgcctgctgagcgccgacctcgatcagatgcacaagcttgagcgcttcggctggaaacaaaccgagatcgctggggagcttgggatctctgctgaggctgttgctcatgtcctgcgcctgatgcgtagcaagtggtcttatccagatattttggaagacgttaacacgcgattcggggctaagtga

SEQ ID NO: 142330 - DNA, 177 bp, Enterobacter cloacae
atgacccctgaacagttcagacaatggttcgccacgctgccaccgaactatcagagcaccgcacgcaccatgtacgacgacgcccgcaagacgggaacacacaccgcttccagcctgctacttattcgcacactgattgaagatcaaatcaatttcgatggagactttaccttatga

SEQ ID NO: 142331 - DNA, 210 bp, Enterobacter cloacae
atgacgaaatctgaatttgaagccggagcatgggaactaaaaaccctgctgctgggtgcgttgacgcgcaggcttaaggaggacgaggcgggagagtcacgcatggctgctgccgagttgtcatcctgcgtgaacttcctcaagcagaacgccgccgactcgcctgatacaacctttaacaacgtgttcccggaggatgacgaccaatga

SEQ ID NO: 142332 - DNA, 435 bp, Enterobacter cloacae
atgcctgatgaaaccgtgctgcatcgcgcggggtgttctgacgccctgcttaatgcacaacttgcgtttgccttgaacggctattcctttgatgggttggccgaacgtcatcgcaagactattcaccgtgaagccatccttcgcgaggtatctacaccgctggagcgatattgcctgctgaatgattgcgagccgtgggagtgtctggccgctgtgctgaaccgcatgaaaaggccggatggctcgcgtcgctggaaagccgtccgtttgtccgaccgggttttcaatggccgagtgcatccagtgcgcaaaacgcctgatgaagtttatgccgccattgcccgccgtttgtttttgccgaagcccgtgcatcaagaagtgattcagcacatccgtgcgctaggcctgttaccagttggagataaccaccaatga

SEQ ID NO: 142333 - DNA, 1845 bp, Enterobacter cloacae
atgccaacgaatctacgccgcctgctggcgctggccgctgacgccgaaccgctcaataccgctaacgcagatgtacagcagatgattgctgacgggattgttattcggcgttccaagatatgtcccgtaaaacgtaaacccgttaaagcggcctataacacgaagaccgaagagttttattacaatgcagatggctccgcgatgaccttgcgggagtggcgaacgctgcacggtgttcaaccgaagaagcaaaagcagcgctctgacacggggttgcggcaagtcatccagccgggcgacgcaattcattgccgacgagctgagatagaaatgtggctgaacaagaagcctgcccggtacaccgaaccactgtcgccagattttcccggtgttcgcgtagacgatgccgcattgaaaccgcgtgagcacgccatcccggaagcgaccacagggcaaaacgcctttctcaaagcctgtcgtgagtttctgatttgcgatgacgccaccctgaaaagaatcagccggggcatgagtcaactggaagctatgcgtaacgcagatttcaaacgctacggagactccggggagtttcgtcaattgtggtgtggagagtcgaagccaacggatgataaattcaatacgctgaatctgcattgtgatgttgggggcgttgacctgccgccatccatcccgccgctggttacagcgccgtacaggttccgcgagctggagcaatgcgaccgcccggcattcgtaccgttaccgccgccagacggtggtgactggcgacccggacagcaggacgtagccgccgctgtatttgcccgtgaccgcgatatgttggccgtgctgcctaccgggtacggcaagacggctgcgttcacctatgccctgcgattcgagtctgatgcaggtgacggcctgaccgttatcgttgtgccgacgaacaccatcaagcagcaggtgttacagcagttaagggaggctggcgttcacgcggtggcttttggcgataagctaccgaagcggcgtaatgcgcagcaacttgcggggctggctgctggcgctttccgcgtcgctgtcgtttcgcctgagcatctggtgccgggtagtcaggtgctggcggcgctgatggccgctggtgtggacaggttcatcatcgacgaggttcacaccgttgatgactgggagtttcgcactgctttccccgcgatgaagcacaccctgcaaaatgcctttcctgatgcgcagcgttgcgcgtttaccgcgaccctgcgaagaggtgatgagtttgagctgatgaaagagctgggctgtcgtggcgagttcctgaccttccgcgccagcgctgccagagaaaacatccagcttgttcctgttcggcaatgtgaagcgcagcgccgggctgctgttggtctggtcgatgccctcccggtggatgaaaaaacgctggttatggtggacagtatcaagatgctttacgcgtacctcgacgagctgggaagccgcgcccggccttatcattccgacacccgccgtctgagccgtgaccagcgtcacgctaacgctgagtggtttgccactacgcccggcgctgttctggtggcgaccaaagcctttggcctcggtgctgatatccctgacgtgcgtaacgtaatcgtcacttatgttcccgaagacctgcccgatttggtgcaaatggttggccgtgccggacgggacggacagcccgcccgtgcctttctgttgtggtcatcgctggcgcttgatgccgcacccgacgaactggcggcgttgtaccaaccccacaaagctaactgggaatacctttcccgcttcctttga

SEQ ID NO: 142334 - DNA, 633 bp, Enterobacter cloacae
atggcacacaatgctcttatctattgccgcgccagtacagcggagcaacacgcagaccgggcgctgggcttgctgcgagagttcgccagtgatcggggctggcctgtacgagcggagtacatcgagaacgccagcggtgcgaggctcgcacgccctgaactgatgcgtctgctggatgatgcgcaggccggagaggtcttgcttgttgagagcatcgacaggctaagccgcctgacacaaaaggaatgggcgactctgaaacagagaattcaggataaggggctggtgatcgtcgccgttgacctgccaacctcatggcagttgctgaacgaaaccgcgtcagagctaaccagtggcatcctgagagccgttaatgcaatgctgatcgatatcctcgctacgatggcacgagtggactacgagacacgcagagcacgccaagcgcagggcatcgagcgtgccaaagccgaggggaaatataacgggaagtctaaggatgagagcgcccgtgaaattgtccgcgctatgcttaccgttgggaataaaccagagcacatcatgaaagctgccgggataagccgggcaacgttctaccgtatcaaacgcgagctgtccgccagtgttacagagtga

SEQ ID NO: 142335 - DNA, 612 bp, Enterobacter cloacae
atgagtgggtttcttcgcgtagcatggggggttataaaaaaacctttcagtgagcatcaggctacgtataatatcattattgctctggcaactgcttttacattaatatggggtgtaataacattcaatcttcttcagcagaaggaaaaagctgaggctgatttaaatgaaattagaacaagaattagaaattctgaatctactaccgtgaaagttaatgcgactttttttaaagatggcgattcctattatatttatcctgtagtaactataaaaaataatggtaaggaggagatggtaatgtcgttagaagatacctccttgacagtcaataaagtatatttagaaggagatcaggcaatagcggagaaaacttatcatccacctttttttgaaataatatctgataatgcagataaggatagtaaacaatttaatatgatcgcagttccagtcgatggtgaaaggacactaacctatgcattaaaagtgagtgagggtggtgcatactacgttagttttaaatcaagtgcgtatttagataaggataagaaagctatcgataataggcagttggtatggtttacatcacaatttataaatgtcaaatga

SEQ ID NO: 142336 - DNA, 1113 bp, Enterobacter cloacae
atggctgattgcaaaattttagaaatggatttaaacgcagcatgctgggttgttcgcccagggcaaggatacgctcactataatgagttcctctatgggaaagttgcagctatcggtcatttagatgaatacgtaaccgaagacactgaacttagtatagaaacagcagaagaaatttttaataaaatgtatattgatggagctaaagaaggcttatctaagcaatcaattgcttcaaattttagtcaagcttataagtttttatttgatatgaatattggtgatcttatttttactattggaggtggtagtatcgttgctggggttataacgacagagccatatatttctgaagaaccaatctccttgagtgatgatattcaagctaaaaataaaaatgaacttaacttcaaaattagacgaggtgttgattgggggcgggcatatgacagagaaaaaatacctttagcggtaaggcgcagctttttagcaaaccaaacagtattctctgctgctgagcatattaaatatatttatcactggcttaatgttattttcatctctgacggtgtggtttatacaagttctaaaattaatcagaccgatgatatacatcattactccgttacaaaatactcagaaaccttaaactcattagaagctctagctactttaatcgaagaccagtatataaatggcaatgtcgatgaggagatatcccttaaagacatatctattagactgaaacaattggctgaaaatgaagagttgaatcttactactcagcaactattcatgtcaccaggagattactggacaggtttcacgggaaaaaccaatgttgcttcaatagcatttactatcgcgttgtgctgtctctttaatgtcaaacccgtattcgcgagtgaagaagaacaaattctagctgaagcgatttatttgcctgtagccaacgcagttggtcagattcatgaaaataataatatggatttagtggttcgaaagttggaattagcatttccagagcaaaacaagaaagtagtaaataaaactgaagaaattagcaagtcaaaattccctaaagtttccaagtccgataaaggtatgaggtaa

SEQ ID NO: 142337 - DNA, 573 bp, Enterobacter cloacae
atgttcaacacacaagattcggttataaaattcttgcaccatgctaaatgctcgggctatattcgcagcgttgccgcaaaatcggcaatcgggcgtaggaacccgtgttatctgaaggcgacaccacacgcgccgagcgtgtttttttgtgtcgtagctttgactcacccttattttatggtgtggtggttaaccgtatctattcgttatttacgccacatcatccaaattatggtagtccaggcggggcagctttcgggctggccggtatccttcagagccggtattcctacccccgtttgggctaccacccatgagcgtaggaactccggtggtagcgttacccgctatctgaaggagattgccaccatggctacgatccctgcgttgcctcaccctcaatttacctttgtatttctcgctgttcgccgttctgactatgccgcgcgtccattcgctgtgcgtactgttgcaccctgcgagcgagctgcacgtctgaaactcgttgccgattttgtactgagcttcgccgcacgtattccgatgaacaatttcggggaggtgaacgcatga

SEQ ID NO: 142338 - DNA, 852 bp, Enterobacter cloacae
atgaaaaccattccttctttagattattacagagtgagccgagcagctaaattaataggctgtgatgttggtgatttaattcattggggagcagtagataaaatcaaactttgtgtcatgctggatatggccaattcaatttttcatagctctgtggacgttaaaaaaataaataatgacttaagggatttgcctaatcatactgaagaattcaaagaattaactaggaattcatttatatataatgacgactcaatttacactgagggtattgaatttttctttaaggatgatttatttagttttggctctgacgatgaggactcacttaacatcgcttatgggcacgcatcgggattatgggagcttgagcaaagagtattaattaaaatggaaatgaataatttctatgatgatgggctaatagttttaccttcaggggaaatgagctttgagggtttcttttgttgtttattgcctgattcacaaggatgcagaattacattaaacgatctatggatcacgagagagcatgttgaaagaattctatcaaatgatatagccaataagataattcataagccacatgaatccgtaggtataaaatcggtaaaactatctaaagttgtttcagaacgtcatgccaagaaaagagaagttgtgctcgtggctgctattttctgtaaagaaaagtatccgaatgagtgctctgggtcaattcgctcatgggctaattgcatagaaaaacgtgcaaccgaactgttatatctaaatggtgagcctccactttcgatagatagaatagagcgaattttgggtaaagctattgctggtaaattgatcgcgaactaa

SEQ ID NO: 142339 - DNA, 273 bp, Enterobacter cloacae
atgcaggctttgatcttagaacagcaggacggcaaaaccgttgcctcagtgcaagccatcgaggagagccgcctgccggagggcgacgtgaccgtagatatcgactggtccagcctgaactataaggatgcgctggccattacgggaaaaggtaaaatcatccgaaatttcccgatggtgccaggaatcgactttgcaggccgcgtacataccagtgaaaatccacgttttcacctacgccccagcaggtgctgctcaccggctggggcgtag

SEQ ID NO: 142340 - DNA, 210 bp, Enterobacter cloacae
atgttggttttcctccaacgaattttccatttggtgccattcgtggtgttcccccaacgtaagttccatcaggtgccattcgcggagtgctaccacctacgtaagttccatcgggtgccattctgggttggccgaaaacatatgttccatctggagccattcttactgacatacaacctccaattattgttgaacaatgtgcacgtttga

SEQ ID NO: 142341 - DNA, 594 bp, Enterobacter cloacae
atgagcacttcagaaaagagctttgacccacttgcaatcttggatcgactctgtctcgtctacggttacacacaaaaaatacaactcgcaaatcacttcaatatgtccgccagttctctgtccaaccgctacacacgagggaatgtgtcatacgatttagtagtccaatgcgctttagaaactggtgcagatttgaagtggttgatgacaggggaaggtgaacactttagtaatgaagaaaaccatttggatgaaaaaaatgggccaaaaaaactcgaaaaattcactttatgtgaaggtgagttggttcgtgaaggtgatttttatcttgatgccttagccctcgaagaacttaaccctgatgtttattgcctagatgccgaagacgtattttacattgtggaacgcacccctttgctaattgatgggcataaaatcctcggcattgatggttatgtcagcattcgctccgttcaggtactaccgggcaaacagataaaagtttatggaggtaaggaaccctttacatgttcggttaatgacgtagaggtgttaggccatattgccaaagtcatcaataaactggagaactaa

SEQ ID NO: 142342 - DNA, 264 bp, Enterobacter cloacae
atggctagtgaaattacaatcgtcaaaatcccccgcgaaaaggtctatccagaagaattcgctgctttagaaggcgtctcaatagcaactgtacgccgttggactaccggcctaagtccgtgcctgcctatcgaaccacgagttatcaaacccggccgcattcgtgccggcggtcgtgtccgtatcctttacgctcagtggaaagaaaagcaagtccgtgatgcattgggtcattctcgatttcaaattatcgttggcatgtaa

SEQ ID NO: 142343 - DNA, 582 bp, Enterobacter cloacae
atgagcaacattctgattatcaacggcgcgaaagaatttgcgcactccaaaggccagctgaatgacaccctgaccgaggtcgcggatggtttcctgcgcgacgccggacatgatgttaaggtcgtgcgcgcggacagcgattacgacgtgaaggccgaagtgcagaacttcctgtgggccgacgtggttatctggcagatgccgggctggtggatgggcgcaccgtggaccgtgaaaaaatacatggacgatgtgtttaccgaaggtcacggttcgctgtatgccagcgacggtcgcacccgctcagacgcgtctaaaaaatacggttccggcggcctgattcagggcaagaaatacatgctctccctaacctggaatgccccgcttgaagcgttcactgagcaagatcagttcttcgaaggcgtgggcgtagacggcgcgtatctgccgttccacaaggcgaatcagttcctggggatggagccgctgccgacctttatcgtcaacgacgtgattaaaatgccggacgtcccgcgctatatcgcagaatatcgcaagcatctcgcggaaatttttgcttaa

SEQ ID NO: 142344 - DNA, 1323 bp, Enterobacter cloacae
atgaattcacgagctataatctttgacttagatgatacaatctttgctacagaagaatttaaaccttacctccgaaccgaaattggacgagaaaccattcctggtcttattgaacgcgatgagattgaagtgcgagaaaggcatcagggcgttgtggaatatatcaataaacttataaatagcggaattgctgtctttatattctctgactctccctcggcttactgttttgctattcttgataaaggtggtgtcaaagtaagtcgagacaatgtttattgtggtcaacataaacctacagttgatgacaataatatctttacttcatatcaagatattttggtggttggtgatagtcccaaagatatatattttgctcatttaagggctttcccctctatcttgcttggaagattgagcaaaaaatcctgtgaatattataatcgctggacaaagccaagtgctatatgtacaaatctggatgaattgaaatctgctgttgatgactacctaaatggacagttggttttccagcaacatgattttaaaagaaattatgataccgtcgatcctgatgaatgcgatttaacaacaataccatcagaaaatatagggcatgcctttgaatattggccaaattcagatgactgggatgacgtagaagaacgaaaaaaagtttggtttgaagtaaagagatcaattaaagttgcaaaagaattaactcaaagccaaatagaaaatagtgaaagagttgcattttacaatcgaaataaaaccatcggatatggaaaagcttttaaagcattgatgtgggtatcattccaggagtttttaaaatgggcggaaaaagagaagctaactgggaaaatatatttggttcctacaccaccctcagttccgatggaatgtaataaatcatttccgatgctaattttggctgaatggtggtcaaagtatgcttattttgcgcggaaaaagggtgagataaactttattcttgaacatttttacatcgttgaacgcttttggccaacgcctccagctcatatgtcaaatggaaggagagaggttaggccccatctggagacattaggtacttataagaaaatcaaaaaaaatgatggaacggctgtaataattttagatgatatagttacatcgggaactcaaatgaatgctgttgcaacactactaaccgaagttggaatttttaaaaatgagattcctttttacggatacgcctttgcacgaacaacacgtccaggtgcagatgtctccgaattgttgaggctgtttagcgcatctgaaattgctggatcatga

SEQ ID NO: 142345 - DNA, 858 bp, Enterobacter cloacae
atggatagctctcttacacttactgttgcacaaagtgaagcttggcaacacgcagcattgattctagccaaaaaaataggagtaggttccaaaaaatccaatgccgagttaaaaagtttattattaaattttgggagtatacaaaagctatatgattatcacttttcaatgataccacccgattcggatatagtttctaagcttgataagatattttcaagtttgaaagtcaattttggagtgattaattgtttagacgataattatccagatttgcttcaagatatttatggtgctccacctgttttgtattatcgaggtgatgttaacattttgaaattacctcgaagcatttcttttgttggtacaaggaatcttgataatcctgaacatattacgcaaggtttaaatgccttggaacggcttgtaaaagccggttttcaggttattgtcagcggacttgcaaaaggttcggatacgcttggccatcaaacagcaataaaccttggagcaaaaacgatagcggttttaggtaaccctatcaatattgcctatccagctgaaaacaaaaaacttcaagaattgattgcgaaagatcatctcgttttgagtgaatatccggttggtatactttctcaaggctcatattttgcgaacagaaatctcacaacagttagcctttcaagagaaggtgttgtggtagcaagagctggagataaaagtggaactcaatatgcgataagaacatgtgttgaacaaaataaaactgtttatgcgttagaaaataatattcatgaaccagaatatcagtgggttcataagtataaaaactcgattaaagttgttaaggatagataa

SEQ ID NO: 142346 - DNA, 435 bp, Enterobacter cloacae
atggataaattttttagcaattcagaaaatagtttttatctggaggaaactgtcatttcctatgaggcgcagggtattcctgttccctctgacctgaaaaaaattactgacgaagaatatgaaacttttatggtttcgcctgacaggaaagcaccatattacagtcttaaatcaaaatgtatggtgtgggttgatattgcgccacctacgcgggaagaggaaattgaaagcgcagaattattaaaggcgcagctgttggctggcgcggcagaagctatttccccgcttcaggatgccgttgatttgtctatggcttctgaggcggaaacagcaagtctgtcggcatggaaaaaataccgggttttactaaaccgtgttgataccagcaaagcgccggatattgagtggccagaggtgcctgacgatgtggcgtga

SEQ ID NO: 142347 - DNA, 297 bp, Enterobacter cloacae
atgcaggagtatgaaaagggggttattgcgctggcggttatgggagcgatgattgccctggggaagttgcttaacagcaatgaaacgataaccccccgcctggttctggggcgcgtcattgtcggcggcgggctgtctcttattgccggagtggcgttgtatttcgtgccggatattcatccgctggccttgctggggtttggctctgttctgggtattgcggggcagcatgtcgttgaagcgtggctgcgcaaaatgggctttacggggatttttggtaaaggagatacaaagtga

SEQ ID NO: 142348 - DNA, 246 bp, Enterobacter cloacae
atgtttatacagttgtttgcgtgggaggatactgtgcaggatttattttttgaaaccgttgcctttcaacggatcgctttagttgcaaaacttatggcaaccgctgactgttctgaagatgaaaaggatgtggcgttggcctggcttggagagatgacgcaggaactgggaaggaagctggatcagtatgaaaaaaaacacccccataatgggggcgattcaggcggcaggggcggctttcagtaa

SEQ ID NO: 142349 - DNA, 222 bp, Enterobacter cloacae
atgactaaccatatttcaatcacattggcagtaccatctgtatcagttgaaaagtatagcgaactcacagggttatctatcgataccatcaatgcaatgctggccgatggccgtttagttagacaccgactacgaaaagataaaaagcgcgaaaaagtgatgatcaatatcgcggccatgactatagacgctctttcaggttgcaacatcgtacttaactga

SEQ ID NO: 142350 - DNA, 564 bp, Enterobacter cloacae
atggactttagtacaggtggaagaggcgcaattgagagaatggtggaggcctatggcttcaccactaggcagtctctatgtgagcagttgggagtttcgaaaagcagcctagctacaagatacatgagagattctttcccttctgactgggttatccaatgcgccctcgaaacaggctcatcacttgagtggctagtaaacggtacaggaagtatgaaaaacgacttaacttccgatatagttcgtttacctcacagaaaaattatcgaagggaaaattgtcgactcttctttttatttttttgacaaagccctattaccacaagatttgtctaaacctgtaatcatttcggaaggtaatgatattttcctaacggacttcggcttcaatgaattaactgatgggaaatggatccttgaaattgagggtaaaaccagtatccgcagcattactcgaatccctgttgggaaaattaaagttgataacgacaaatcttcttttgagtgttctttggaagatataaaaataatagcgaagtggcattccactcttttctcccattaa

SEQ ID NO: 142351 - DNA, 1137 bp, Enterobacter cloacae
atggactcagttttggtgggcttaagagagtggatttcttctcgttcagttttacaatctgtaccgtggggcaatcaaaataatcgtaggataaaagccttttgcaaaaatctatcttatgataaagataccggtgattatttatttgtcatctggaaaacgctcggagatagtaaaggtgatatccaaggtatagaagccaatagcatcatagatgaaacctcagacaatgttgtttcagcttctgaaactcaggatggaaaaaattacatctggggtcttccttgttactactgggttatccctgaatacaataaagtagcttccattagatttcctagctcttatgctgacacggatctgttctgtcaatacatcaaagcttacgttgattataggtttgaggatccttctaaaatcattcatgatatagaaatcccacgaaagggtaatcctgaaccctcaaagttcaagcgggtattttttaaaaaaggaaaacatagcctaactttcaaagtcttggcaaaacaaacgcgtaaaataacaaaaggtgcaaacattgcagagctttgcaaaaagatcacacatattgtttatcatgatgtgattgaaactaacgttcctgactcaagaacagaatggcaaaaattatttgataaatttggaggcattttttccaatagttctcctgtattatcgaaaagacataaagttgaattattagtagaaggacaaccttcaccggaagagtttgaacgactaattgaagaatatttagaggattacgatccagtagaatcctcagatgatgaggttactgatgatgatgatactgacgctgatgagagcagtattgagaaacaaggtaaaaatcaggtacgcataggatttaaagttaacggtaaaaacggtgcaactacttggcttgacgaatatgttttacgtcatgaaatttataccagccttggtaatagaaacaaacattattcttcatcttatttgttaggtatagttaaaagccatagaaacgatttaattacttatctaaaagaagataatcttaaagaaacggaagaattaagttatactgaagcagataacgacggagaagggaacgttacaggtttgggggcttag

SEQ ID NO: 142352 - DNA, 582 bp, Enterobacter cloacae
atgatattaaaacattggaaaaagcatctattattaatagcattgtttggttatattgctattaagtttggtgcgctctataaatatagtgatataaaagatgtgttatctacattgcaaaacatatctgctatgatttttactattgccggaatttggctcgcatacatatatcctaaagcaatctctgcaattgttaagccatcgactttaaatcgagaaaaacttggtgatacatcatcaagcaatgaggttgtcattacagaaaaaactcttacaagtgaagagaaaaaatccatagacaaagatatcaaacgtatcactatgatcgttgagacaattattgtttctgctttcgtaatattcgccatcgttttaattaacgcatttaaacctattttttctaactttgattttgttaaaagcaatttagaagcattcaataaaattggttgtttcgcatcactctctttggtctacttacagctagtatccttattcactattatttctagcaacgtagttttcttgaacgatattcataatgaaaaaaatgataacgagcttaatcgacttaaataa

SEQ ID NO: 142353 - DNA, 1050 bp, Enterobacter cloacae
atggctataagaaaacagaataatggaaagtggttatgtgaatgctaccctgccggacgttctgggcgaaggatacgaaaacaatttacttccaaaggcgaggcaatggcctttgagcgccacacaatggatttaactgcgtctaaaccgtggctgggggacgttgttgatcgccgcaccctaaaagatattgtgaacctctggtataaactgcacggcatatctcttacagctggcgaacacgtatacgaaaaactactgctgatcgtggacgcattaggaaaccctctggcgacatctctaacccccaaaatgtttgctcattaccgtgataaacgcctaaccggagagatttatttcagtgaaaaatggaagaatggcgctagccctgtaacggttaaccttgagcaaagttatttaagtggtgcctttagtgaactgattcgcctgggcgaatggcttcagccaaatccccttgaaaacatgcgaaaattcactattgctgaaaaggaaatggcctggctgacacatgaacagattgcagaacttctgtatgactgccagcgtcagaacaagctgttaacgctggttgtgaaaatttgcctcagtacaggggcaaggtggagagaggccgtcaatttgacaaggccccaagtgacgaagtaccgcatcactttcaccagaacgaagggaaagaaaaacagaagcatccctatcagcaaggagctatatgaagagatcaccgcgcttaagggtttcaagttttttgatgattactattttcaatttgcatcagtgatggataaaacttccataattctgccgcgaggccagctaacgcatgttcttcgccacacctttgcagctcactttatgatgtccggggggaacatactagccctgcaaaaaatactgggacaccatgatataaaaatgactatgcgctatgcccacctcgcgccagatcacctggaaactgcattaaggtttaaccccttagctaccatgcaaaatggcgacaaaatggcggcagcgcttgtcactccctaa

SEQ ID NO: 142354 - DNA, 462 bp, Enterobacter cloacae
atggctctcgcacctcgtttccataccgtaatcgcgggcccggcccgtaagaatgaccctcaggtaattgaggcgatctgcaaagtcgccattctccctggctctcttgttgaacttgatgcaagtgggcaattcatttatcacgccactgctggcggccctggtgtggcgcttgccatgcagcacaactatatcggcggcggcgatatccgagacgcggttcccgctggtgatactggcgcggcgatcatgtgtgaagacgatgttgactaccacatgcgcgtcaaagccggggaagtgctgctggaaaatgaaggactggtttctgccggtgacggcacgctggccaagtcaaccacaccagccaccgaccaggtcctattttattcacgcgaaaaaatcaccgttggcgctgaagctcaactcgtgaaagttcgcaaatcagggaaagcaaccgcatga

SEQ ID NO: 142355 - DNA, 258 bp, Enterobacter cloacae
atgagccaaaatattaaagaagttaaatttgagtggaaagaaatattcaagacagacctggatattgcttatcgtgtgacgtgcaaaatttcgggggacgacggcagggctgtagagactagtgaaatagtgaaggtaaataaagtagctcctatgtttctttctcaagaaaactctccttcattgtcgaaagctgccgaagcttctgcatataacagcgctgttgaattgtataaggcatctggaagtgtgcagtaa

SEQ ID NO: 142356 - DNA, 318 bp, Enterobacter cloacae
atggctaaacgtatgcaagataaagaaagcattgccggagtgtcatggttgatagtccttgctctgtcatgctggggcggcctggtccgataccttattgacgttaagcagaacaaagccacctggagctggatcaacgcgctggcgcaaattgcagtgtccggctttaccggtcttattggtggcctgatcagcgttgaaagtgggctgagcctttacatgattctggttacgtcgggcattagcggggcgatgggctccgtggcgctgacgtacttctgggaacgcctgacggggatgaagaatgcaaacaattaa

SEQ ID NO: 142357 - DNA, 201 bp, Enterobacter cloacae
atgggcttgaaaatttacggtaatgacttctcaggcagtgacatttcttaccagttcaaggcagaaatgaaaatgacatgccagcagtgcaagcacacggagttcgtgaaaggtaacttgattgagaacgtcaaatgccctgcatgtggtagtaatgatctggtctttgaaacatcagcaccgcagcaggaggtgaagtga

SEQ ID NO: 142358 - DNA, 285 bp, Enterobacter cloacae
atgagcaacatcgacaaacaggctctgattgcaaaaatcaaaaagcagaccgaaagctttgacacggtggtgctgaaagaggatgaggctaacgcgctgctggatgagctggaagccgcagagaagcggattgctgagcttgaagagctggaggaactatttctacgcgcaaaagctctgatgcaccaatcaggtggcacgccaatcgaaaactcgcttaatccggtagatgcatggctgtatgacgcagaacacgccgcagcaagcaaaggagcagcatcatga

SEQ ID NO: 142359 - DNA, 534 bp, Enterobacter cloacae
atgacaaatttaagcgcagtagaaaaaatggctgaattaatgcaacagatggaagagaactcgccgcgagttgctgctctccagtattgcctgaaacaggttgcggaaaaagtggaagaggcagaaaagcgcaatgcggagctagaatccagatgcgctgcgctggctgcggaagctcaggggtttaaacgatttttcatgttcgccatcaacgcagcattcgatggttgtgacatcacaggcgatcagattcaggaagtggctaaagaaattgggctggtgagagtagagtcttacagcaccgaaaaacacgctgaaatgtcgggcgatccaagcgtcatggaggagggtgatgatttctacatcatgaacaaaaccgcggcgaccgacgatttcctggctgaagtgcgagcgcagggcgtggagatgctaaacactcaattcaagaagtgcactggaatgctgtatgcagatagcgtcgtatctactgccgaacacttcgccgcccagcttcgcaaaggagtgcagtcatga

SEQ ID NO: 142360 - DNA, 762 bp, Enterobacter cloacae
atgaataacatcccccaccaggacatagacgccctcgtaaaatcaggcgcccttttcgtttcaaaccattctggcggtaaagatagtcaaacgatgcttatcaagctgcttgaggttatcccgccaaagcagatcgtcgtagtgcatgcttcgcttggcgccatggaatggcctggcgcgctggagctagccgagaagcaagctgggggttctggactgccgttcatcgttgccagggcgcgcaagaccctgctggagatggtggagcgacgctttgcgaatcgcccagaagtgccgagctggccgtcagctagcacgagacaatgcactagtgacctgaagcgcggccctatccagcgtgaggtgagagcctacgcgaaggcgaacggtttcaaagtaatcgtcaactgtctcggtctgcgcgcccaagagtcccctggccgagccaagcgtcaggtgtttcgcaagaacgaaactgattccaactcggtgctgacctggtacgaatggttgccaattcatgagctgaaggtggaagaggtgtttgcctcaattcgcgaggccggtcaggaaccgcattacgcttacgcgttgggaaatgagcgtcttagctgcgtgttctgcatcatggcgagccgaaacgacctgcggaacggtggacggcatcacccagagctgcttgagcagtacgcagcgctggaggcgcacaccgggtacacgatgcacatgaaccgcatcccgataaaggagctggcagcatga

SEQ ID NO: 142361 - DNA, 315 bp, Enterobacter cloacae
ttgaccgatcgctatctgaacggtatcccggcggattctcgcgcagcaagcggcagtaagttccttaacccggagcagatcaccgacaaaaagctggaaaaggtacgcaagctgaatgcgctggcggaaaaccgggggcaaaagctatcgcaaatggcactggcctggatcctgcgccacgatgcggtgacatccgtgctcatcggcgcaagcaagaacggacaaattgaagatgcagcaggcgtgcttgagaattgtcggttcacggcagaagagctgaagacgatagatacgatcctgtccagttcagattaa

SEQ ID NO: 142362 - DNA, 375 bp, Enterobacter cloacae
gtgaaacaaaacgccatacaacctgccaacctcgaattcaacgctgagggtacacctgtttcccgagattttgatgacgtctacttttctaatgataacggactggaagagacgcgctatgtcttcctcgaaggaaatcatctcagcacccgcttccctgagcatccgcgcagcctgtttgtcgtagcggagagcggtttcggcaccgggctgaattttctgaccctctggcaggcgttcgaccagtttcgcactgcacaccccgaggctaccttacaaagattacatttcatcagtttcgaaaaatttccgcttaccgcgcacgatctgcggcttgcccatcagcgctggccggagcttacccactgggcgtaa

SEQ ID NO: 142363 - DNA, 261 bp, Enterobacter cloacae
atggggccagtgaatatcacccacgccattgagctgcgggcgggcgaacaaaaagccctggaagcggcgaataccggcggattcaagccagcaccactcttctatcttctcaatgccttctgcgaccagcgtaatctccagatcggtgcagcagctgattatcgacttcacaatcgcctgcttgggcccgctcaggtggatatcgctgacgatctctctgtcgattttgagcttatccggctgaaaccgggtgagcagtga

SEQ ID NO: 142364 - DNA, 288 bp, Enterobacter cloacae
atgcgcaaatttatgttagctgcaggtcttgccgtcctgctgtcgggttgtggcgatgatggcatctatggcaactacgttaatcaacaatacggtgtcaggcttgatgttcagaaggatgtgatcaagttcagaaatggcgtttttactgttaaaagctgggatgaaagccaaaagcctgtctatatcgctagaactcaaaacaaagatctaggctcttggacttttaaaatcgaaaaagtcaaagatggcgttgtttaccaaggtgcggtttttaagaaggattag

SEQ ID NO: 142365 - DNA, 276 bp, Enterobacter cloacae
atgaaaaaagaaaataaatgtaatagtcagaactcagcagaacttacagcattgttagaatactctcgctttaccaagaaagtgcttgcgaagcctgctaatgaagtattcgatctatttactgataaatattatatggaaaccgtttacgatgatattattgaaaaaacgaagaagagtattgatcaaagtcagcatagatacatagattttgaagcggttagaataaatataatgtgcatgcatacagaggccattatgatttgttatatgtga

SEQ ID NO: 142366 - DNA, 846 bp, Enterobacter cloacae
atgtggacactacctttaccagatgatgcggatagaatgagcgagttattaaccgctttaacgtataaaaatggaaatcctaagtatgctttaacacaagatgaaaaggataaaattgaaagtatttatactttatatcacgatcgtaaagcaactccctgtgctgaatttttagcaggggaaataagtgatgaaacccaaaatgctataaaaacagcttattcagaagtgcaaataaatggacgactttcaacccttcgctcaaggattttattaagttctaaaaaatgcccattatgtgggatcgaatcatcaaccgacctagatcattatcttcccgaatcaatatataaatgtctcgcagtatattcaagaaacctgataccgacctgtcataagtgcaataataaaaaaagagctggtgtagcagaaaatggagttggatttattcatgtgtattattttgatgagcccgatggtgtatttttcgttgccaatactgaaatgatagatggtgctttagtaattgattttaatatcaatatgatcgagggtatgactcgagaggtatatgattcattatgctttcaaaatagagttgttaaccttaatgaaaggttaaagatggaagcgaatgattttttaggggggctctatacttcacttgaagaaacatataattctgcaggccaagaaggattaagattatttctaaaaagaactagggatgactataccagacgttatgggcttaatcattggagaagagcattgatagatagtctatccgataatgtggagttccttgacgctggttttattactgccttaggaactccagagtga

SEQ ID NO: 142367 - DNA, 1662 bp, Enterobacter cloacae
atgaggtatgttgaaaatatgaaaattctagtaactgcaccttcaagaaaaaatcacccagaaaataatgtattgtatgattttatattgcaacaagatgattggaatgattttagttttatcactaagtatcatttatacattacaaagaaacttactggtcttgatgaaatagagtatgctggggttgttaaaattataaaaaaagatcaatctgaagctgattactacatggttgaagaaggcgagctttcatatttgagtgacgagttttgttctgtgggacaatctcttgattattatgggaggctctcagaattggggggtgaaatttgtgaggggatattgacatcattacgcgacattaatatgtttgattatgtttctgagggtttcaaaaatgaaagagcttgggaacgttctatcatgagggacttaaataatgatgatgatatttttattcttccaaagtttataataaaaaatcagttctcggctatacctagtatagacatgaagttttcatttatgtattcaggaatgattaatactctttcgtttgatttcgattcaatacaatatggatattttgaaagtgaaaaactaccatgtagaatgtccgtaattgtaggccggaacggttgtgggaagagtacaacattggcaagactttctagggttgcttattcttcaactcaggacagaaaaaaagaacagatagccaaaattggtgaaattcttccagagggactaggttttccgaaaataatcaacctttcatacagtgcttttgatagttttcaaatacccgggtgtacttttaaagaaaagaaacagttaaggcaagacatacttgatgggaaaggtaggtatatatattgcggagtcagggatgttggtgctgaattggattatgtattggctaatgtagatgaaaacaatattgatatagagtttgttacattagataggcaagagagaaccatattaaaacctcttgaagtacttagtgaagagttttatggcgccttgatgaaaatacataaagatagtgataagtggaaattgtttaataaagtgatgatgaagttgagagaagaggtttcattatctgaaattattgatgaaatctttaaggatgattttattctaaaatctaaagaatatttccatggtttaagtacagggcataagtttgttttgcattcgatggcgcatattttgttgtatattgaaaaaagatgccttgttttatttgatgagcctgaaactcatttgcacccgccattgcttgcggttttaatgagcgctctgagaattgttttgaatgaagtcgatgcttttgctattgttgctactcattcacctgtggtagtacaagaaacattaagtaaaaatgttaatgttataactagaaatggggagtatactgattttcaacggcctgaaattgaaacttttggtgagaatattggagcaataacatcatcagtattttcattaacgactcaaataactgattatcatgaagaactagacaagctaataatagaatataaaaataataataatccattagatgacattgaaaaatgttttgatacaggtcttagtacacaagcaaggtcttatgtaatatctaaattagcggtaaaaggataa

SEQ ID NO: 142368 - DNA, 219 bp, Enterobacter cloacae
atgtttcactgtccgttctgcaaaaacagcgcgcattcccgcaccagtcgttatctgtccgataacgtcaaacagcgctatcaccagtgcatgaacatcgagtgctcggccacgttccgcacgcttgaatccatcgacggggttattcgttcaccggtgacagagccggttatccctgcacccgcaccggaggccaccgttaaccgtgccggtgcgtga

SEQ ID NO: 142369 - DNA, 147 bp, Enterobacter cloacae
atgaatcaggagccggtgttgtccgtgacgggcatgcaccggccgcagattacaggcgtggatacggagctgttacgcagccctgcaaagagaatgatgctcgccagaaaactggctgaaaatggcgagacagaagcggaggagtaa

SEQ ID NO: 142370 - DNA, 192 bp, Enterobacter cloacae
atgaaggctaacggatacagaaaggtgctcagcctgaaaatgttcgggcaggggctgcccatgatgctgaaagagtacggcctgaatcatgagaagcggaacataaagcaggagatacagaccaacccgtcactgaaagaagaaagctacgacgactggctgccgacatgcgacgagcccgcagcgacataa

SEQ ID NO: 142371 - DNA, 453 bp, Enterobacter cloacae
ttgcgttatcaggctcttggtgatctggaaagcgcatgggttgctgctctgtcacctgcagggcgtcgaaagcttgccggtgagattgcgaaacagctcagagcggcgcagcagcaacgcatcaaacagcaaaaagccccggacggctcaccgtatcaggtgcgaaagcgtcagcctctcagggctaaaagaggtcggattaagcgggcgatgtttcaaaagctgcgcactaaccggtacatgaaagccagtggccgtgaaaatagtgccgtggtggaatttaccggcaaagtgcagcgcatcgcgcgtgtccatcagtacggcctaaagaaccggccaaatccgcgcgctaaggacgtacagtacgcagaacggcagctactcggattaagcagagaacatgagcagttcgtcgaaatgcttgtgattggctatctaaagaagtttcactaa

SEQ ID NO: 142372 - DNA, 2376 bp, Enterobacter cloacae
atgactacaacacgagaaaatcattatgttccggtatggcatcaaaagggatttatggatgggagggataatcatttatgttatttgacgcgtagggaatttccattaaaaaattctgaggttaaaattgtcaatgaaaaaaaatggtataaccccactcagaagctgtatctaaaggatttatattcaatattatttgatggtgatattaatgacgatatagaaagaaaattgtttggcccaatcgatgataatggttcgagggctgttcgggcttttttgactgacgaccaagggcaatggcatcataactttaaggagttttttacttatctggatgcccaaaagttacgaactcccaaaggtttggaatggattaaaactcagtatcagggtttaacccaggaaaaccttatggtcgagatgcaatcactcaggactatgcattgtacattgtgggcagaaggtgtaagggaatttgtatcagctgaggactcagatgttaaattcattacctcggatcatccagtaactatctataattacgcttgtcctcccgattcagatgcatgtctgtatcctagagaccctgatatctctttgaagggttcccagactatatttcctctggataaaaatcggtgtttgattttaactaatttagagtatgcacgatctccagaaaatgtaaatcctttggaacaacgcactaatgctacacgtttgcgtcagagtatggttaatactattaattttatcaatactcgcaagctaacaagagaacaagtaattcaaataaactatattattaaatcgagatcaaaagaatgtatcgcagctggaagagaggaatggctttttccggaagatgatatttcatgtgattggtctcagctaaaaaacactctcttaccacaattaagtgatttatttgggtttggggggggaatgtttgtcaaatttgatgatggatccgttcactatcaagatgagtttggtaggacaacttataaaaatgaatatctaataaaaaaaatagacgagtcacagatgggttgtaatgacccttgtggttgcggtagcggaaagaaatataaaaaatgctgtaaagatataccggtgggtatgcgaacgacgtgggattttattagtattagagaaaggaatatttgtttttgtcaatgtataaaagatgtgttagggcttaataatggaaagtcctgggatgatgttagaaaggggttgtcagagaagcaagttagggaaatctatgagttttatgaatttctttggcctaaggatacagacatatattcgttgctgccaaaaccagacgggaaaagtcgcgcattatattcaggtctgttagatatcagggctatatactctaatgcggtgccgatgtcatcattttttgatgagtttataatccaaagtcccgtaactaacccaataaatattaagcctgaatttaatcctattcatcgctccgaggattttaaatatcaagcactaaaagagtttttgtttatgcttgagttggaaccgtttatagataagggcttggttaatattattccagatccaactgaatttgatattcagttgaaattggaaatgatgaggatggttaaaaaacgaaggcataagcaagttgtatataatggagatgaatttcaatatcatcgtagcttgataattcaagatgtgttgaattcatcggtggggctgccaagggaagctaaagttaattacattgctcagcagatgagcattgattttaaagaggctgaactacgctttgatgattttgaaaaggtttctgaaaattcgcccttaatgatgttgcaagatacaacagtgcagggtagtgggcaggttatatttaataagatggagcctaattatgaaatgtcattgtttattgctcaggtgacaggttctgttgtggtgaccgatagttttgctagatgggaacaattaatgtctgctcagcatcgtgaattaggaatgataagttttccttggggtgaaatgcttcttgaccttaataagttgccaattgatgctgcctacatggaatcgttttgcaaatcacagggtgtgtttgcaaatatcagaaatctgattcgatctttggtgcggatgttagatgcacaggattatgatgttcagcatttatccaatgctaaaaaaacgattaatgaagtaatggcaggtgttgaccagtctcgagagtcattaataatgagaggcttgaaaatatcatgtccaaagtatggttttcatgatgataatgttcagcgtttgttgcttagctcgagttgtttaaagtataagcgatatgtgacggctattattggtattgatatttaa

SEQ ID NO: 142373 - DNA, 1377 bp, Enterobacter cloacae
atgagaatcaaaaatgaaatagttcaggacggttatttttggcttcctggcggtgaaggcagtaagatattcggtacttttattatgagggagaatgaaaatatacatatcgagttaaaaggtctcttcgaaggtgacactacatctcctgataatgatatctttgatactgttcatggatatactgatcatcttggttacataactttctcagattgtttttatacaaaacaggacatttcatttggtgggatgtcaaatggtagcgcgactttattggttaatcatgtttatacaggtgatctacttactaaccctaacgacttacacttaaaatcactaacttttcgattcgatcacttagatgaatggttgtcaatttcagggataaaagtagagagacagtcgagtaactcagagaaacctaatgccatttattataacaaacccaaccctatttattttgatttaggagaagggtttagtctttctatagatttctcatattccataccgggatttccgaatattactgaagcgaaattcacacaaaaagctttttttaaccttacttctgacaaaccttgtgcgctgtctgaactggacaaaatggcgcataagatcttgagattgatatcattatttattggcaccccattagtaatttcagatttagtagccaagacttttactgaagataaaatcattaaaatattctataaaagtgcagcatatgcaaagaaagaaaacatttcttttcatgatatgaactttctttataagcatatagaggatgatcttggtgaattaatacgaaaatggagcacttcccacgatctcttgctaccatctatttcactttatttttcctctttcaccggtcaaaatgccctactcgatgcaagatttctctctttagttcaaggtttagaaactttccacagaagaactagtagtgaaaaatacatggatgaggacctttttaaaaaattagtagaagaattgctgaattcctgtcctgaggaacatgttaaatggcttaaaggaagaactatgcatggtaatgaaataagtcttaatagaaggctggaactcctgatggctccattttcaaatttaatcggcaatcaaagaaccctagctaagctagcaagaaaaataagcacgaccagaaattataaaactcactatgacccatcagctgaaaacgcagccgtggatgggattgacatgtacaaactcatcgtattcatggaatgtctattaaacttgttattcctaaatcatattaactttcctatcgaaaaattaaatcttcgcgtggaaaataattcatgtaaattgaataagcttttaaaatattcactttcaaaataa

SEQ ID NO: 142374 - DNA, 855 bp, Enterobacter cloacae
gtgctgacaactcttatttatcgaagccagctgagcttaacctgcacctccgcagcgttaagcgcgctggtcgaacaggccaggatccgtaatacggagcagggcatctcaggcattcttctctcccgtggacgtgacgttctgcaaattctcgaaggcacggaacagcgcgtcgtcgcgctttttaacaccatccgtgcggatgaccggcataccggcgtggtggagctgatgcgcgattacggcccgcgcagacgtttcgaagacgtgggaatgctgctgtttgacctggacgttcagaccccgaaagcggttctggcgtcggttctgcattacagcaagctggaaagctatctgacttctgaggatcgggtcttcaaatttattcagacctttatcaccggcaaaaccgctatcccacccgcttcggactatgagcctgataaatggacgctttcgcgagagcgcgcgccgtttggtaaagggttaggtctgctggcgggacagccctgccagtttgcgctgcaacccattgtcgagccgtccgaaggcaaaatcagttctctcgaagcgcttatacgcggaaacgacggcggcagcccggagcatttcttccgtagtctcgatcgtgaacagatttacgaagtcgacctgcaaaccaaagcctggacctttgcgctggcgcaaaagctcggcatcggcagccacaaactggcggtgaacctgctgccaatgtcgctggttaacgtgccgggcgcggtagagttcctggtaacgcagatcaaaaagcacaatctacagccagagcaggtgatcattgaagtcactgagaacgagatgatctctggcttctga

SEQ ID NO: 142375 - DNA, 324 bp, Enterobacter cloacae
atgggattcgcatcaccagctgctgattatgttgagcgtcaactgtccctagcaatcctgtgcaacatcggggcggatagtagggtgctcgaaactgatatggggtttgcggtcatagagccagcaacgaaaaagacgcctggagatgtattgttaattttgtgcgacggccacacacaatttgcaaaactcatgggcaaggcgctcattacggatgatggtgaagcgattgagggatcagcgcttgaagaagtggaagtgctgggtagggtgacgttcttcattaaccgtgcgagggatgatgacgactgcccggtgatgtaa

SEQ ID NO: 142376 - DNA, 240 bp, Enterobacter cloacae
atgccacgcacagcagacattcatgccgcgtttgttgcggccatagagttaaaccccaaggggtatcgttacctgagcacagacgcattcatagagaaattgcggcagttcaactggcactacacgcgcgaagaagcgaatgcctggatagagcgcaaccagcctggcttcgctgataaaaccaccgacggcagcgataaccgctattggatcctgcgtaacatggggagggtacactga

SEQ ID NO: 142377 - DNA, 1086 bp, Enterobacter cloacae
atgaatgttcaaacaagaaatgataaagctaagcagttcattttagatcaactatcaactgtagctcaactaaacgaaagtgattttgaagatttacctgatttccaaaggcttaaatctatcactcaagatttaatttatgttaaggctatggggttcagaggaattgttgctacggctttaacgggcaagtttcttgatgatagctatgattatttgaatgatttctacaaatgtaatccgcgatctatctttgaaaatggaatattttacgcatttcaggaaatgaaaataccctgtggaaaatcagatccattaaatgtagcaaaaaataataatgtattagacgaaaattgggctaaggggagaaggcctcagaaaactgctatcgctgcagtttatttattaagaatcattagcagcgaaggtgatgatactattcggcaaaaaattgtaaattatttctttttccggttgttatcttattcacaggaatgtggttcagtagttattcacactcttaatgaaactttcctttcaaatcagatcgttgcttcaaagttaattagcttcacccttaattatcctgagtctggaacaataccgcagtttgttatttcaaaaatattgtcttctctatatagccaatcatcaattgatgttatcggcggagatgaaagtgtttttggaactaatactacctcgaaaaaacctgctgatgtatggctcgaaaatgaaggtgtaatattaaatctctatgaaataactgttaaaaaaatcgattacaaaagattggacgacagcattcagtcccttgctgataccgactctctggaaaaaacaattatattcatatgtcgactgccggatgatataaatactttgaacgggtatcaagacggtgttctaacgtataaaaataaatcatttaattttgtggatatatcagagtttattaaaaacactatagctttattatctccccatcaaattgaacttcttctgtccgaaatagaggagtttgtcggttcatatttaaggcccgttaagactaaaaatggatggaatgaaatattcgccatttga

SEQ ID NO: 142378 - DNA, 282 bp, Enterobacter cloacae
atggaaaccatcgggcagagtgaaacagtctcagcgcttacttttgaacaattctgggatctgtattcatgggtcgtcagcgaatcacaagctgatgtgaagcctgttaattttgtcgcaccggctgacagtgtcgaactgatttatatcgatccggaagtcccggattacttctctgtatggttactggatggttacccggttgccgcagctgcaatgctggaaaatttctcacgtgtattaccttctttcgagaatatcttcgctggagacaaatcatga

SEQ ID NO: 142379 - DNA, 468 bp, Enterobacter cloacae
atgctactgtccctcccctttctgttgatctattttgcgttatcggccttgcttgttcgcaccgatatccgcacggggcttcttcccgataaatttctttgcccgctgctatggacgggcctgctctaccagctttgtctccatcctgattttttgccgagcgcggtagtgggtgcgatgacaggatatgccggattcgccattatctattggggataccggctcatctgccgacgtgaagggatgggatatggcgacataaaatatctggcggcgctgggggcatggctggtgtgtactaccaatactggcattagtggccgcgttaatggctctgctgtatctggttgctttctcgttgtttaccctgataagcaggcattaaaaaacccactgccttttgggccatttctggcggcagcgggtttatgcgttggctgggaaagcctgattaactttccactttga

SEQ ID NO: 142380 - DNA, 468 bp, Enterobacter cloacae
atgaatacagaaaaacagttttttaaggcgttcgacgaagccagttgggaatttacatatggccatctggataatatggactataacgtcttacaggtaggtctgacagccacgctgtatattaacgaaggctggcgtccggaaaatcgggaagcaatggcgaacgcgattgaacgttatgttgatgaattcggcaataaattaaaatggggttttctgggggatgtaaacaagccagaaccttttgttctagccgacaatttctcaagaaaacaacgcctttcagatcttgaggatgatacggcagatatccagtggggctcagaatattataaggattatgtcagcgattatcagataaatatatactcaccggcaggatggtttgaacatatccaccgtcgtatatcatgcataaccttctttttaccagtgtcggaattaaaaaaatggacgggagcattttga

SEQ ID NO: 142381 - DNA, 1770 bp, Enterobacter cloacae
atggatgatctaaccctgcgctattacgaagcagagatgcgctacctgcgtgaggcgggtaaagagtttgcccgtgctcatccggaccgggcggcaatgcttaatctcgataagcccggcgcccgggacccgtatgtggaacgcctgtttgaaggctttgccttcctgatgggccgtctgcgagaaaagctggatgatgatctgccggaactgactgaaggactggtgagtctgctgtggccgcactatatgcggactatcccgtcgctggccatcgttgagttttcgcctgactggcgtggtctgcgtcaggccgaaatgctggctgaaggcttttccgttttgtcacgtcctgtcgggccgcataaaaccgcctgtcagtaccggacgacccgcgatgttccgctacaaccgctccaccttgcagatgcccgcctgcatactgaaaccgatggccgctctgctatccgtctgcgcttcgaatgccctgaaaaagtggactggagtaaagccgggatcgacaaggtcgccatattccttaacgcagagagtcctgtgagttctgcgctgcatctggcaatgacccggcgtgtacatgctatgtatgcgcgtcatgccgggacgcatactgaacgtcatcagtttgatggctggtgcaaacccatgggcttcgatgacaatgacggcctgtgggaaaaagccgatacggccttcagtggttaccagctgctgctggagtatttcagcttccgtccaaagtttatgtttgtggagctgcgcggtctcgacactatcgggctcactgcggccagcacctggtttgaaatcgacattgtactcagtgaagcctggtcatccgatctgccctttgagacggaagacttccggctgcactgtgcgccggttatcaacctttttaccctggaagccgacccgctgacgctaaatccgctggagaacgaatacctgctcaggccattgcgtcttcaggatggtcacaccgagatttacagcgtcgataatattcacggcgcggtgaagaatggcaaacacccttatgtgccgttcaccagctttcgccaccggggcggcatgatgcgtcacgatgcccctgaacgttattaccatacccgcgtgaaacgcggtccctctggcctgtatgacacctggttaattctcggtggcagctcgtttgaactggagcagttgtccgaaaaaccggagtcactctcgatgcgaataaccgggaccaacggtcagcttccgcgtaaggcactggaaagtaccctgctggatagggtggtcaaatccggcaaggtgcccgtcagggtcctcaacctcacagcaccgacgatgccgctgtatcccccggcaaacgaccgttttcactggcgagtgatgagccacctcggctcaaacttcctcagcatgatggacaatgctgaggtcctgcggggcacgctggcgctgtacgactggaccgacgatgaaatgaaccgccgccggcttgaagcaatcgtcgccgtgaagcacaccctgatccgccgttttgagaagggctttatgctgcggggagtggacattgaggtcacgctgaatatggacaattttgcaggcgagggcgatgtgaatctcttcggcgagatgctgcaccggttcttcgcgctctatgccgatattcacctctttaaccagctcacgctggtactgcaaccgacagggaaacgactgagatggcgcgagaatcacagccagcacgtaccgggctga

SEQ ID NO: 142382 - DNA, 498 bp, Enterobacter cloacae
atgccaattatcgactatcccgactggctgcctctggcgcagaaggccagcaaaaacatgactctcgataccgggttccagaccgatcagccagcggtcggcccggctatcttcgagaatcaaaccgacgacttgaaagtgacctggtcactgacgtggatcttcactctggctgaggaaagagcattccagcagtggctacgcagcccaaactatctcaaccgtggcctgaactggttccggatgaatatcaatctgggcggtagtggcctgcaactccaggaacttcacttcacgcagatgccagtgcaaaccagtatcgacggcggagtggtgacctggacgggaaccgttattgccaactatctgtacaacgctgacgacgagttcgacgatatcattgttgaactaccgccgccatgggattcgtggctggatatcgtggttacgggttatccggacgggcgcgatccggaaagtcttccgagggttccctga

SEQ ID NO: 142383 - DNA, 2325 bp, Enterobacter cloacae
atgtctgagaaagcaggcgagatttattacgacatcgaggccgatgtatctggcttgctcaaggcgcagggaaaggccaataagtcgctcgactccatcggaaactcggcgaccaatgcagccaaaaagatggatgagttgcagacgaacatcaaccgcgtcgccggggcaattgccgcctcactcgtagttgactggggtaaggcgtttctcgttgctgctgacaacatgagccagctcaacgcgcgtatagagaggctcactggtagcgcagcgacagcctcgcagactatgcagagtctgatgcgcatcagttcggcaacgggtggttcgctacaggatacagcgaaactgtgggagactctcagcacggcgttgcgcgataccggcgcgacgaacggccagatcatccagctcaccgaaacacttcagaaaatagggcgtattggcggatcctcatccgaggaaatggcgaatgcgctgcgacagtttggccagtcgatttcatctggagttgtgcgggcggaggagttcaactccatccttgagcaaatgccggaactggcacgccagattgccgccgggatgggtgtaagtatcggagagcttcgtcagctgatgctggacgggaaactgacggcagaagatgctctcaacgccattcagaagcaaaccggctcagtgaatgcagagttcgagaaactcccgcgcacgctttcacaggccaataccgccctgacaaactcattcctgtcgatgattgactctgttaaccaggcaacaggtgcgagtaacggcctggtggcagtcatcgattcaatgactgctgcactcgaccggctggtgggtaaagcggcgtcggcagatgctcagatatcggatctgaacagcaccgctgaaatgtttactcgccgcgcgcgcacctggtcatggcttgggcttgatggctgggaggcgcaaaacaaagcgctggccgggctgagtaataaagccgccatgctggttggcgacctggccgctgtttccaaagcatcgcagaccgcggctaacacaaagccgatcgagattaaaactaccgcctcagctacaggcagtaaagcgaaaggcggaaagtcttcggcacagaaagaagctgagcaatacgccaaagctcaagaatctgttaatcaaaagctggatgaactgaggcagaaggccgagctgtcagctggcagtgtcggtgaactgtccagggcgcaggccgtgcttaatgcgcaacagtctctcggtaacacagccacgcaggaacaacttctgctggccgggcaactggcaggaaaagcctgggacaatgccaacgcattgcgtgagcaggccaaggctgaacgggatcgcacagacgcggccaataagttcagcgcaatccagggtaaaaccagcaaaaccgcaggtctggatagtcagtaccagaaagacatcgctgatatccaacaatacgcccaactttacccgcagaagatcggggaggctgaggcggcgcgtgccgctatcgagcagcagtatcgtgatcagcgtaacgctgcgatgtgggaggagtgggcgcaacagaacgcggccacccaggcagcagcggcggctttcgactcccttggctcggtggccagcaatgcgctgaccggcattgtcaccggaagtatgtcggccagcgatgcaatgcgcagcatcgggatgaccgtgctgaacagcgtggtcaactcgttcgttcagatgggaattgagtgggttaagtcagccattatgggccagacggccactaccgcggcggttgcagcatccaccaccgcacaggcagcaggcatcgcaaccacgacggcgacttcgacggcagcggcagcggctactacggcggcatggactccggcggccatcatgtcctccgtggcttcattcggcggtgcagtggctattggtcttggtgcgatggctggcatcctggcactgtcaggaaaacgtaaaaacggcgggcctgtctcggctggtgggatgtatcaggtcggcgaaggcggcatgccggagatctatcaggccagtaccggtaagcagtacatgataccgggcgacaatggcagggtgatcagcaacaaggagatgactgctggcggcggaggggtagttatcaacatccagaactacacgtcatcgtccgttgatgcacaggctggtactgatgcaaatggtgggcttaccgttgatgtcattgttgcagacctgaacaacggcgggccaatcagcagcggtataaccagtaacttcaatgttaaacgcacgccaagagggcagggctga

SEQ ID NO: 142384 - DNA, 186 bp, Enterobacter cloacae
atgagcatgaaagatggcgacctggtctttgaatcggaattgaaccggttcgacctgaaaaataatgagcttactcatacaacttcatcagtaatttctcatgcagaaaagccgatagggatttacaggattatttttaagaacggcattccgatagattcctggattcagccaattcaaaactga

SEQ ID NO: 142385 - DNA, 1407 bp, Enterobacter cloacae
atgataagtttatcaccaccgactatttgcaacagtgcccttgaacgttacactcgcctgcgcagcctggagttttcctgtctgaatttcactgggctgcccgccatacagctccgcaatctggcacgctatgccggaatggcatcggtgaaatatatcagcagaatgccagaagaacggcggctggcgatccttaccgcattcgtgaaagcgcaagaaatctcggcgctggacgaggccgttgacgtgctggatatgctgatcctcaatattacccgggaggcgaagaaaaccgggcagaaaaagcgacttaggacgctcaaggatcttgaccgcgcggcgttgctgctggcgcgggcatgcgcacttttacttgatgaagataccgccgatgatttgctgcgaaagaccatattcagcagtgtgtctgtcgccagactggcagagtccgtggaaaaagtgaatgaactggcccgcccccaggatacaaactttcaggatgaaatggtggagcaatacggacgggtaaggcgttttttgcccgcactactgcgcgatctgcacttccgtgcggccccagacggtgaacataccttggctgccatccattacctggcagagctaaacggctcgaaaaaacggatcctggacgatgcacctgaacatatcatttcaggcccttggaaacgcctggtgtacgatgctgacggtcggatacagcgagcaggttactcgttgtgtctgctggagcgacttcaggatgcgctacgccgtcgtgacatctggttggaaaacagcgatcgttggggtgatccgcgccaaaaacttcttcagggggaggaatggcaggcgcagcgggttccagtctgccgggcattgggtcaccccactaatggcagtaaagcatcggagcaattggccgctcagttagatgaaacctggaaaacggtggcatcacgttttgatcgcaataccgccgtggacatctgcaatgaaggtaaacatccttcgctgaccatcagcagcctggataaattggatgaaccaccggcgctgatacaactgagcagccgagtcagacaattgcttccacccgttgacctgacagaactgttgctcgagattgacgccagaactggcttcacccgtgaattcagccatgtcagcgagtcaggtgcccgtgcgcaggatctgcatataagcctgtgtgcggtgatgctggctgaggcctgcaatatcggacatgagccgctgatcaagcacaatatccctgcactgactcgccatcgtctgagctgggtgaaacagaactacatccgagcagaaacgctggttagcgccaatgcgcggctggttgattttcagtcctcgttagcgttggcaggatactggggggcggggaggtag

SEQ ID NO: 142386 - DNA, 2478 bp, Enterobacter cloacae
atggcgctggttgagatatcgaattttccaggaacgcctaagctgcgttgcagggtgccaaacggcacccttttttatgactggctggcggccaatgacgctactttccaccgcgacctgctaatcgtccgcaacggcgtaaagctcggcgacgatgacgaactggcgtttgagctgtgtgagctggaccacatccagatattcgaccagccaaagggcattgtcggcgacatcctgagcccgatctttaaagtggtgggccaggtgttttcgttcctggcgccgaagcccgctatagcaaacaacggcggtaataccgtcgattcaccgaacaatagcctgaccggtcagacaaacactgcacgcgtttacaaggccaagccggacatttacgggcagattcgttcgttcccggatctgattcaggagtcggtgttcgaatacgtgcaccagacgtccaccgacggcggcctgaagtacgtcactgaatggatgtgcatcgggatcggcaaatacgattacgagtccgtgcgctactcagaatccagcctgggctctcttgcaggcgccgaattccagttcttccagccgggagaagtcatcccgcagatcgttgagggatacgggttcgatgatgttgacgggcaggaggtgcccgggcagaacgaagccagcgacttcccgatcgaaacagcaacggcaaacacggtggtcaacggaacgtattccggcggccagatagcgatgaaaatcgttaagcaggctgagttcgactatttcatggggctggtgctgccgcacgctgtaaccttcaccatcaacgtgacgtatagcacggcctccggcaacgttactaccgatgcgacattctccggaacgctgatctccgccgttgaaacaaacgacggcgcggttgttaacccggtgcgctggtacacgttcacgatgaaccaactggagggtccgcaggacatcccggcgaatgccacgatcaacaccacgaaattcatcctcaacgataacgaggcgctggtggttgggccgttcttctctccagttgagtcaacccagttgtggcttcatactcagtccagcctgggcggtaagaaagaaacgaactggaaggtggtcatctggaaaatcgacgacgactacaaccaggtgccgggaacgcagcagacgtttacgtaccggcagacgacgccgcaccagtcgacgagcgaggtgttttatcgcactgacaagatcactccgaccggcggggtcgggaaatacgcggtcagcttccagcgcacggataactccggtgacgcgtcactgctcaaggtcgaagagatccacagcatcaacatcaggacaaacgtcgttcacccgaccgacacgctagtgcgcataaaagtccgggcgaccgagaatgcccttggcagccgggagcgcaaatataacgcgctggtgacgcgtcataccatcacgtacgacctcgacgcgcaggaagtggattacacgctgcggccgtcgcgctcgttcgctgatgcggtggcgcacacttggattgtgatgggtgagcagccggtcagcagcattgacctgtacggtctgtactctattgctgaaagccttcctgatgagcgactgggttacttcgactacacgtttgatgacgagaacgactcgcttggagaccgcgtgctggcgatctgcaatgcggcgtcggttgtggcgtactgggacgacggcgtgctgacgtttacccgtgatcagaaggttgactacccggcggccgtattcaaccgggccaacatgaagacggacgagtacaaaatgacgtacgaggccacgcttcctggcggctacgacggcgtacaggtgtcctacgtccacccgaccacgaacaataagacgtacatcaactaccgcgtgctgaacggcgccatcgtcgagcaggaagcggaaaacccgaacaagctcgagatagtcggcttccgcaatgagtaccaggcgcgtgagcgtgccatgcgagaaacgaaacgcctgatctactcccgagtgaagatgaacgctaaagtgtttgaggacggcattatccaggtcggtagcgtcattcagatgcccgacatctacgacagcaaccagcagcagggttacatcaccggccgatccgggaataacttcgataccagcgagccgatcatgtttaccggctcgatgtatgtgctggttaccgacagcctgggtaatccaactctgcgctatccggccaccgcccgtagcgacacgaagtacggattcaccgcggctatcccaaacattcagctcaatatctggaacggagacactgtgcagctaccgtcgcgctatctcattgcgacagaggaggaactggacagtcagctatggacagtcaacagcatcaaaccgaacacagataacacggtatctctgaccgtcgcggaatacagcgacgccatctaccaataa

SEQ ID NO: 142387 - DNA, 918 bp, Enterobacter cloacae
atgaaaatttctctggtcgttcccgtcttcaacgaagaagacgcgatacctattttttataaaacggttcgggaatttgaagggcttcagcagcatgaagtagagatagtcttcatcaatgacggcagcaaagacgctacagaatcaattatcaacgcgcttgctgttgccgatccgcttgtggttccactgtcgttcactcgcaactttggtaaagagccagctcttttcgctggtcttgatcacgccaccggtgaagcaattatccctattgacgttgacttgcaggaccctatcgaagtcattccgcacctgatagagaaatggcaggctggggccgatatggttctggctaagcgatcagaccgctctacggacgggcgcctgaaacgaaagaccgctgagtggttctataagctgcacaacaaaatcagcaatccaaagatcgaagaaaacgttggcgacttccgtctgatgtctcgcgaggtagtggaaaacattaagctaatgccagaacgcaatctgttcatgaagggtgtgctgagctgggttggcgggcgaaccgatgttgttgagtatgctagggccgagcgagtggccgggagcacgaaatttaatggctggaaactgtggaaccttgccctagaggggattaccagcttctctactttcccgcttcgcatgtggacgtacatcggcctgttagttgccggtgctgcgtttttgtatggtgcatggatgattttcgacacgctggtattcggaaatgcagtacgcggatatccttcattgctggtttctgtacttttccttggtggcatacagttaatcgggataggagttcttggtgagtatattggcagaatctatgtagaagttaagaaaagaccgagatatattcttaagggaaaaaaatga

SEQ ID NO: 142388 - DNA, 558 bp, Enterobacter cloacae; identical to SEQ ID NO: 86000

SEQ ID NO: 142389 - DNA, 3405 bp, Enterobacter cloacae
  misc_feature (3291)..(3300): n is a, c, g, or t
atgtcgctcactatgactccggatggcgtgtttaagccgacgactaaagtgactttagatgatggcactgagattgatttcaaacagtcctgggcaacccctttacgtagaactttacagccggtaagtggacctcaaaaagtcggtgatgagtacctctatatctttgacttaacggatcttataaacgggtcctacgcagcgacttttacagtagaaaatacgagcaaaaactcttctacgtacactgagcctgaaagcaaactgatgctgtctgataacccaacgcttatggttctcaaagatgggcaggtattaactaaacgagcacccgtatacttcctgaacgagattatcgttgcagctttccaggggcaggctggggttgctgacataaaatcagtaacaatagacaacaaagtagtttcgttaacacctacaaattataaaggtatttactacctgccggttggagacgatttagcagttaattcggatcacgagattactgtggtggctgaaaacctttatggaaaaaacgtaaatttcagtaccgtgttcacttatcaacctactggattcactcttaagaatctggaaaaaaacgtaactctttactcgcgcgtacgtcagtatacggacctgcttagtcaaacagctggtgataaatgcactctgtttaccacagaggaaaatgcgaatgcttacctcgcctggtatggggaaaaatcagatgttacagcatgctaccctcagtggaacaatgtccctgatgggttggagttctattttaaaggacgtaccccgggtctaactggattctttaataaaacaggtgagaatctgctcgactatcaagtctatatgattaacgggaagggctctaaagcggtttccgcaaggaatcgccgtactctgaccacacaattaccatacaacccgatcatctcttacaaaaagaataaagtcatagcaggcatcaatccgaacactgctctggcttatacgaccgggggggaggccgctcgaatattagcgaaggtggtaccagctgacgttacgatgatcgtctctcaaaacggctctgaggctgtcaaaacgtcatttaaaaatcgttcctcaaacaacgatgcaacgacctttgtacaaagggtcaaggttgctgctgcaccattgtggacaaagaacgtctttgacatagctgtagaatactcaaaggatccagaattaagaactacagacaccctcaacgtatatacggtgcctgatttcaatattcgagcatcgatggaagtggatgacaaaaaaacagccacatctcttgaagtgcccttaaaggtaacagtggggcgttataacaactccacacgtaaaagtgcatttgaccgtaaaacaatgggagaatgggacgtcacgatatactctcaaaaaagtgtatacggcaaagatcctgaaacaggccgttataaaactacatacgaaagaactgcgctgactgaagcattgccggtcaatgatgcgggcattgtcgaaaccaagattaaaattgaaaatatggatctgggtaatatgcgtctggttggtgtggctaaggtcagatcgccattctctgattttgaaatgaaacgtgagaccagtgctgtaggcattcgaatctataaaggtgaggaactggagggtaacctgtcgaaaagccttattatcggaaggatcccacttagtactctggtaagcttcaaatctgccagtacggctaactctgatgcactcgcccccaccgaatggcagcagtcctctgataatggtcaaacctggaccatgctttccgacatgaccggaaagagaagtgtaagtatcaaaaagacagaagtaggaaagtggctttatagggcaaaaatgactaataaattcacatccaagatttcctacacagatgccttaacggtagttacctacaagcagcctaagctcagtatagatgttacagacattcttcagggctcagatatacctgtaaccctgcttgataacgatgaacctataccagcaggcaccgctgaggttctctggtcagaggataaagtcaactgggtgcagggagatacaacttacactgtggcttcagctgataccctaccgtctacgatttatgcccggatgcgttaccttgattccgatgaactggcagaggagtcttcatggaaggaaacgtctgctcggttggcagccgcaaaacccaagcgcctttctgtctcggtaacgggggtttcaaaggtagaggttggtcaaaaagttactttggaaggtaagttcacgaaccctaacagtaagtaccagaatggtaataacgtagttgaagaatggaaaacaccggatggccagacatttaagggctcttcactgtctgttacccttactgagcaaatgttggataaacagggatatgctgcttttgaatacagtgcatggttagcggacaataaggagaatacggtttctacccgtagagtttctgtcaaatcgtgggtttataaatttcccgagatgaaaataagctccaaacttaaatacgacatggcaccgaccaccctacgcgttgcgttgagcggtattaaggatggagactatcctggtgttacttattcccgtgaatggatctacgacaaagagaatctggtaatcactaaagatgaaggtgacaccaaagaatttacaattgaaaatcctggcaaatatacattgatggttgttttcaaagataaccgaaacaatgaacagcgtatcgaaaatacctttgttgtcgatgaacaaacgccaatgaacgttgagatgacacccaagttctctaacaaatatatgagagctccactcgatgtaaccttaaggtcaaacatcaagctatctcattcggcggactcgatagatacggtcacatacaaggtgaacggtgaagtaatacccagcggcaaaaattattgggctcaactgatctcgggtttaaaagaaaagaaatacgagattacaattgatgttgttagtaaacttggacagagaggttcagcatctgttgagtttgatgtcgttaaaaacgcagtgcctaattgtacattgagctacacggaaaccaacctaagctggagctttaccaataaatgtgatgatactgatggaaaaatggttagatatgaatggttcatcaacggcgaattaaggaacgttttcggtagtacggctacactttctaaaaaccttaaccgtggtaagcaggacataaaagtaattgcttatgannnnnnnnnntatgatgatagtggagactttgcaacacagcacgtgacagtgttcggaccggctgaagaggcaagtaggtctgaaaacactgtatcaataccaagcagtgagtag

SEQ ID NO: 142390 - DNA, 666 bp, Enterobacter cloacae
atggtaatccttaacgcaaaagattttggtgtccctcaatccagagaacgtgtttttattataggtatatttggtaaaaacaaacaaataacatacactgacttcgaacacaaaaaagagaaagccatatctttacgtgaagctataatacatcttggccccgcaggcagtgaaaaaaactcaagaattaccaaggcgaaaattactcttgccgaaaaacctgtgctgagaaagtctccatatgctggtatgctttttaatggtcagggcagacctcttaatcctgatgcatggtcaagcacactgcctgcaagtatgggtggaaacagaacgcccataattgatgaagggcatttatatgacgatatgccaagctgggttgaagaacatcacaaggctttaatggaaggtacaaaaaaagcggaatatggagatgctcccaaaagattaagaagattaacgattgatgaagcaatcatactacaaacattcccagatgattatattttcgttggtcctcaatcaaaagtatttagccaaataggcaatgcggtaccttgtaaattagctcaagtcgttgctgaagtagtcaaaagcaaactatcgaaaaaaacaaaccatcaagaaaatgatagtacgcatcaactacccttagagattatatag

SEQ ID NO: 142391 - DNA, 1254 bp, Enterobacter cloacae
atgaaagggaatgtagccaaaacaggaagatcatttaaaaatagagttggttatatattaaaagatgatcacacctttatttgtagcaatatgtcagcagataaaaataatgttagcgatcttactgatgagtttaaaactgtaagcggttttagacctgatataaaaaaaccaacttttcatgcgtttttatctcttccaaaaaatgagaagctcacagatgaacaatggcaagaaatagcaaaagactatttgaaggaaatgaatatcgatatagaaaaacatcaatatctttgtgtgcgtcataaagatacagataaagaccatattcatattgtagcaaatagggttgggctggatggttcggtatggcttggtcaacactcagcatttaatacaatagcagcttgtgaacgtttagaagtaaaacacggcttaaccattactaaaggcttacaagggcaaaaatcagaggtatcagcaccaaccaaagcagagatagagcaagccctacgcaaaggtgagaaaccagctcgtatcgttctacagaacgcattacaggcggctatgttgggtaaaccagatctgcagacgtttattgacagagtgcaggccgtaggcattgaaccttggttcaatgttgccagcactggcaacgtggcgggttgttctttcagtgtgggagatgtggccttcaaaggttcgcagttaggtaaaaaatacagttggaacactataaaaaacaaggtgaaatatgacaaaaatagagatgatgactcattagaagattcgcagcaagaaaaacatatgacgaaaatagtattagacgatcatttgttgaaccaaatatcaatgacgatagaaccattatcagaaacgatgatgatattatcggagtcagtcagcacagctttaaaccagacacaacagacactaacaagagtgaacaactcattagaggcaacaacaaccgctttaaactcagcgaaaaatataatagaccaacaggcccaaaagttagaagaacaacacaaaaagctgcacaagtactcaacagaattaaaaaacaatacaataaagaaccaatcaagccttataatcaaggtggcttcaatagtgggagttctaaatttagcagcggttctattggtaggatacttgatcatgcagaaacagccaacgcagccacaaataaatttagactcaagagaggtagccgtttcaatagtagagcaactaagatcgaagaaataa

SEQ ID NO: 142392 - DNA, 1110 bp, Enterobacter cloacae
atggccactacacctactaatctgccagtaccgagtgaatccccgcatgatctgaagtttaacgcaggcaagattgatgaatttgtcacgtctatggggtggacctataccgatcgcttcggtaagaagcactacactattgaaggcattaattaccttgcccagcaggcaatggcagcgttcggctatgtgatcctcactggcaaaacatttaccactggcgcaacgataaacaacccgaacgaagttctgctgaatacagctgatggggaatactacaaatggaccggttcatttgcaggtgatcctaaagtagttcccgaaaactcaactccggcgagtactggtggaattggccctggtgcgtggattggcgtcggtgattctagtttgagagctgctcttgctcaaaataaaggatcttcactagtaggttacggcgatcgcaccgtagaagataaacttaatgagcggaaaagccctttcgattttgaagcaataggcaatggtgaagatgatgacacattagcacttcaaaaatttatagacgaaactgatggtgatcttgatcttgctggtggcacatttctaataagtaagaattatgcgctagctattcaatatccaaatgaagccgacttttctgacggtacttataactacagcccatgccttgcattggttggaaagaagggtatcaaaattcataatggaacattgctggttaagacgcatggccttgatgcgttaagcctcatagcctgtgagcatgttactgttgatttaactatcaagggcccgggagtcttccctgcaattgatactacaactgggtatgcagagaaaggagaagccagattcgggtacgattctgctctagttcttgcaccaaacaatgcccttgataccagcgcatatactggtggcgcatacgctggtgttacaggtcaattccctaaatacaatgcagacggtagccaagcttcaggttggcagaacacgtggggcaagttccttggcggcaacatcggtagctgggcttgcggtgtgaaggttcaacgtgcatgccgtggtattcttatcaatgactgtgacatctctgggttttga

SEQ ID NO: 142393 - DNA, 282 bp, Enterobacter cloacae; identical to SEQ ID NO: 140451

SEQ ID NO: 142394 - DNA, 492 bp, Enterobacter cloacae
atgaggcaaaggaacaacagcagcagacagagcaggaggagcaggaggcatatgatgaatccgagaccgataccgataccgaatcagaagataaatcgcttacgtcgactgatagtcgtgaggatgattctgaggacgatagtgaaggtcaggcagatacttccgataacgctgatcttgctcaagagggatgttctgagccttcagaacttgctgaagataacgagggaaataatgaacccaccggtggcaatcccacgggtgataacattattgaagacgatactgatgcgattaacccttccgagagtgaatcagatgaagccagttcgactaacgttgaagatgaaagtaacttttcatcggctcaatgggagatactggcagatttgttggatgcctttcttagcagtgatgaggatagcgaagattatcacgatgctttggctaaagagattgaaggtattgcatcaaaagtatccgatgacgtga

SEQ ID NO: 142395 - DNA, 288 bp, Enterobacter cloacae
atgttaaagcgtattatttcaggagagcaaaaggttactgactggttggaatctattaccagatcatttaatcaaagctcacaaacagaaccgaacgcgctacagaacacaggtattgaagctattttagattcaacaaatgtgtttcaggttgaacctgtcgtagagaacgatataaaaaacagcacgttttcaaacactgattctgtagctgaacctgagaaatcagtttcgcaacaggaagacaatgctgaaaatggttttgatatcgagctcaaaggctggtaa

SEQ ID NO: 142396 - DNA, 192 bp, Enterobacter cloacae
atggagcagatcgacgagaagatcaacctcaacggcggcgcgatcgcgctcggacatccgctaggctgttccggagcgcgtattagcaccacgctgattaaccagatggaacgcaaagacgcgcagttcggtctggcgaccatgtgtatcggcttaggccaggggatcgccaccgtattcgagcggatgtag

SEQ ID NO: 142397 - DNA, 291 bp, Enterobacter cloacae
gtgtgggaagagcgtgacgacaacccgttcagctggtaccgctggcagtatgacagcgccgggcgtttgcttgttcaggacgacacgctgcctggccaggagcagatgcgctgggaaggggcgaatagtgcctgggaaaaactgctgcagggaagcgggacgcagctatcaggatattctcagaacttgcgtatgcaggggcaatacctggaccgtgagataggactgacaacaatctgtttcggtattatgacccggactgcggtaggtttacgcagcaggacccgatag

SEQ ID NO: 142398 - DNA, 147 bp, Enterobacter cloacae
atggccgagctcatgaaactgcagccaattggtcgcctgggcgagcccgaagagatcgcgcgcgccgtcttatggttgtgcagttccgatgccagcttcgtcaccggacaggctctggcaattgatggcggttatacggttcagtaa

SEQ ID NO: 142399 - DNA, 198 bp, Enterobacter cloacae
atggagcgcaacgcccatcgcttgacgttgcattcacctgcgggagtaatattgcaccttacgcggtcattgtttattgacttcgctcaattaaaagagcgttttgatctccgtaaaagctggaaaaagcgtaaatttacagccatttactacgatgcaaccaccatgcaacaccaccgatcaaaacaactaacatga

SEQ ID NO: 142400 - DNA, 1290 bp, Enterobacter cloacae
atgcttcatgaaacgattcacaatcctgatcggtatatgactgatttgcgacaaattttatctaagggtcgtaagaaaataggtatcctgttgggggctggagttcctacatcgataagagttgacgagaatggcaacctagaccagagcggaaaagctctcatttgcgacattgctggcctaacaacttatgtaattcagaaactgaataaatcggattctgaggtaattgacataatcatacaagagatgaaaaaagtaccagggagagaagaggggtactctccaaatatcgaagccatattgactaaaataagaaagttagcccttgcgataggaacgcaaaaaattaatgatcttgatggtgatggatatagagacttagggagaagaatttgccagaaaattggagagcatgtggctccaaaattgcctaaagaaaataatgcatataatgaattagtgtcttggatttcggggatacatagggaaaaggcagttgaaatatttactccaaattatgatcttttaatggaggaagcttttgaacgtgcaaaggagccttatttcgacggctttactggtgcgcattgtccattttttgatcctgtcagcatatctaatgacgaattgcctgctagatggtctcgactgtggaaaatccatggttcattgggttgggatgtcaaagatgatgttgtcatacgaactggtagtcgtgatgcaacaacattgatttatccagatcatcttaaatacgacgaaattacaaggttgccttattcagctttattcgagaggctgcgtagttttttaacgactcctgatagtcttttaatatgtagtggtttttcattttttgattctcatatatgcgctgttttcgatgaagcattggcagctaattctcacactgccatattcgcttttcaatataagaatttagaggatgaattaaacgcggtaaaattagcgaaaaaaagaccaaatctgagtatttatgcacgtgacggtgcggtaataagcggggtctcaggaaaatgggtacccggggagccgccgaatgattcttgggaagaaatcaggaaaacattttggaagaaaagcgatagctctggaattcatgagttcatattaggggattttgctgcattagcccgcttcttttcattggcccaagcgctgaatcttaaagaaactttacttagtactagcactcatgctggcttcacctcgcaacatccatatgttgagaacgagtctgaaactacactgtatgagggcaagtaa

SEQ ID NO: 142401 - DNA, 1842 bp, Enterobacter cloacae
atgttcgcaaatgacccaacatatgtaggaaaagtagctgcagttactggttcttcaatcaaaatatttctttcccattcaatttcttcaggaatatcgataatacaggggcaaacatatagtgttggacaggtcggaagtttcataagaattcctcaaggatatcaagatctttttggtgttgtctcagatgtcggtgcaagcgcagctccggacaacatataccctaatgagccagatactggccgatggatgaatgttcaattagtaggggaagcgttagggggatatttcgagaggggtattagtcagtatcccaatataggtgataaagttcatatagcgattgagtctgatctaaggaggatttataacactaaagaccaaggtcatattccaattggaacattatccagtgctgaaaatatcgaagccaaaatagctcttaatgaactaattacaaggcattcagcagttttaggttcaacaggggcaggaaagtctacgactattgctagtttattgaggtccattacttcgacaagcaaagggattcatttgccaagtgctagggtgttaatgctggatattcatggcgaatattcgtctgcattaggtgacgttgcgcaagtgtttagtgttgaccctattaacaaagaagaaaaactattgatccctttttgggcgcttgattctgatgctctgctcgattttttaacaggaggagtcactgatagtcatcaaattgcatttactgataaaattaacgagcttaaactaaattctcatcatttgcagaactttgcaggtatagatattcaatctataactgttgatacgcctataccatttagccttaagaagatgtggcattcacttattaagtttgaaacagctacttttattggtgatcaaagagatatttcgactctgcaagatgatggtgatatttcaacacttacagctccaactttcacacctcatgctatggggtcaaaaggtccatttattaatacccaagcacatggtattaaacggcctttaagtctattgcgctccaaactattagacagacgttatgattttcttttacaccccggcccatgggaacctaaagaggatggtagtgttgaaaaagatcttgatgaattattaaaagggtggttgggtgggcccaaaccaataacaattcttgatttatctggagtgccaagtggtgtacttgagcagcttgtagggtcaatattaaaaataatttatgaatcattattttggagcagagaaaaaactgaaggcggcagagaacgacctttactggttgttatggaggaagcacataggtatttgtcaaagcaaaacaacactcctgataacttagcctctcaaattgttcagaaaatcgccaaagaaggcaggaagtatggtgtgggagcaatgattattagccagcggccttcagaagtgaatgaaactatactctcccagtgcggtacttttgtagcattgagattgactaaccctgcagatcgtagtcgaatacaaggtactttgcctgacggtctagtttctttaatggatgcgcttcctatcttaaaaactggagaagcaatagttacaggagaggctgctaagctgcctatgaggtgtaagatatacttacctgcgccagaacatagacctctgagtgaagaccctaaagttacaatcaaatggtctatcccgcgaagaacagagggttatgatcgtgtagttgcatcttggcgagcacaaaacccaagagcagtggtaaatactcttctcataaaacgtgaagctgtagaagatgaatcctcagacgaataa

SEQ ID NO: 142402 - DNA, 210 bp, Enterobacter cloacae
atgcaacgtaacaatgtctcatcgtcaaatattagctcgattgggtatgatgcggcctctgaaacattagaaatagagtttttgaactcgtctatttaccaatattatggagtaccttcattcctatatgaaaatttaatgaaggaaagttctaaagggcaatttttcaacgcatacattagaaatgcattcccgttctcacgagtgtag

SEQ ID NO: 142403 - DNA, 213 bp, Enterobacter cloacae
atggcgtttgtagagggcaacgtagttacattgaattctggagatcgtccgatgacggttttgggtatcgctaaagatatgggcgctgcttggaagcatgttccgggagactatgttatagcaagatggatgaccgaaaatggagactccaaaactgatgcatttgaccctgatactctcactttttcagatcccgacatcgaattaggctga

SEQ ID NO: 142404 - DNA, 291 bp, Enterobacter cloacae
atgaaaacgaggaattacgccgctggtatagcgctgatttgcctgatgctgtgcgccggttgcacacccgaacggcctgcacctccgccggtcattgtttacagcgcctgcccgaaggtgagcctctgcccgatgccgggaagcgaccccgtcactaacggcgacctgagcgccaatattcgcaggctggagggcgcgctggctgcatgcgcgctcaaagtcgaaaccgtcaaagactgtcaggacaaactcgatgaagaaagcacacggcctgcgtcaggcgttaattga

SEQ ID NO: 142405 - DNA, 516 bp, Enterobacter cloacae
atgaagaaagcacacggcctgcgtcaggcgttaattgacgccgtaccgcagataaaaacgaatcccgaaatgatgcgcatctttgccgatgaggggaatattgacgcgcgtctcgcggcctcgctctcgcatgaaaagatttacaccctgaatgtgatcgtgtgtgactttgtcggcgaccccgatttgattttcgtgccggtggccgtatggctgcgtgagaatcagccggatatctgcaccacggatgaggggcgcaaaaggggctatcgattccagatggttttaaacgacggtgatagtgttgatatcagcatcagcctgcagctcactgagcgcacgctcgtcagggaagaaaacggcgcgcttcacgtcagctatgcgcctgagccgccattgcccgagccggtcacgcgtccgaccgagctttatatcaatggcgagctggtgagcaaatttatctatctgcaattattttgcaagcccccattttatgacatgagaattataaattga

SEQ ID NO: 142406 - DNA, 918 bp, Enterobacter cloacae
atgatcatttctattaagaataattgggctaccatagaatccaagcataacgcatttgtcatgcgtaaaattgagaaacacttaagcacggcaggactatgttatgggccaaaaaccttaacaacatactttatcgaaaagacaaaagacctcataatttccaataaacttaatgatttacttttagcggcaaaatattatgatctcatcattaggaaaaacaaacacaacggggaattaatcaaagggtttaaaaaagatttaactaatatttttgattataacaatttcatcactaaaaccatcagttatgatgcctatgatttatgcagcgcatctaaaactagaagttgtccatattgcaatcaatcatatgctttcacagttagatcgcctaaaaaagaatttagaccaacattagatcattttttcccaaaagaaagctatcctcacttagcattaagcctatataacctcgtaccatcttgctctctttgcaattcaagtttaaaaggaggaattaatttctctaaaaaaccccatttacaccctttatttgataacgagagcattgagttttctcttgaaactacaaaatcaagagaggaaatagttgcgttattagacattaacaccaaagaattcaatattaaagtagaatataataacgacaccaaatcttccaactcagtaaaaaccttcatcattgaagaaaggtatgagagttttatttttgaggcagtaaattttgctcgttgtaaaatttattatgatgaattaaaaaataacaaccaaatagatatcatcagagatattgatgaaagctcggcattaatgtttaatcacaacgcctatcaaaaccaacttcttggaaaacttcttcaaggtatttacaaacaatattcacaacaaccatag

SEQ ID NO: 142407 - DNA, 1491 bp, Enterobacter cloacae
ttgatacgcagcctttctgttgatgaaaaaaaattagagttaagaaatgcagtggatgaaagttcaaatatttttgacattgattccatttctttattaataggtgagaacggaacagggaaaacacatttccttagtcaggttataaatgaattcaaatcatctcatataggagcatttactggaggttgtgaaattgattttttcaatatacctagacaagatgtcaaaaacgaatctagatattggggggttgtatatttctcaccaataccatttagagaaagatattctccatcaaaaaatttcattgatgcctcacctgtatttgggaggagtataaagctaagcaacttaaatgaatcaaaagagatacttgaatatttcaatatcaaaccagcatcgcgcattgaatataaattcaacacaaagatgataataaaatcaattcttgatgaagtttttaaacttagtgatcgtcgtataaaaaaaatacttcaacgacactctattttcaacgaattaatacatctggaaaaactcaccagagaaatgagtaatgaaaatgaggatcctgacaacactaaaaattactcaagcatcttaaataaaagaagatcaatttttggcgcactaattcaagaactatatttaagccttacttcaattgaaaaccccattgaagttacttcatcacttataacgattaacggacttaagaaaaaaaataaaataaaaaactcatcagcaataaacatacttaactactttcttaatggggccgaaaatcttaatcgtcacgaaatgaaatctctagaggaatttgagaaagaaagaaaaaaagttgaatcgtttttgaaatttataaacagtaacttcaccttcactgaatacatgacattccctgtcgatgcttatgagggagagaaattacttagtgattatgaagtagaagattactttgagtttaaactcattgaaatgagttctggacagttggccgtcatacatcaaatgggcttaatttccaaagcaataaatcaacttgctgaaaaaaatataagcaaaatactcttaatgatagatgaaggtgatgcttatcttcacttagaatggcagagaaattatatactgaaagtcaatgattttttgcgcaaagtgaaagctatcaataacatttctgtcctacaggttattctagccacccattcgccactattagcaacagatattcctaaaaatttcatatgcccaatggataagacagaagccacatcaggattcgcatcaccgattcatttgttacttaatgaatcttttgggaccaagactattggagaattcgcatctcaacggatcaataagactgtaataaacatcaaacaaaaaaaagcctcaaaaaaagattatttagttattcaatcaatagataatgatattctggagagagaaattatgaaactacttcctttaaacggggatttaaaatga

SEQ ID NO: 142408 - DNA, 657 bp, Enterobacter cloacae
atgaacaatctaaattctctgcaggatatcgctcgggcgatccgcaaccttatccgtaccggcattgtgaccgacatcgaccacgtcgaggggctctgtcgcgtccagaccggcgggatggaaaccacgtggctaaactggctgacctctcgcgccggtcgctcgcgtgtgtggtgggctccgtccgttggcgagcaggtgctgattctttctatcggcggcgagcttgataccgcttttgtgctgcctggcattttctctgacgacagtctcgcgccgtctgcttcccccgatgcgcttcatgtgtcctttcctgacggggcggttatcgagtgcgagcccggcaacgggtcgctcaccgtatccggtatcaaaaccgcagacattaccgcgtcggattcccttaccgccgccgtgccggtggtggtgctgaaagcccaaacccgcatcaccctcgatacacccgaggtggtgtgtaccaacaagctcataaccagctcactcgaagtggagaagggcgggacgatgaaaggtgatatcacgcacaatggcgggaaatttatctctaactgcgtccaagcggatgaccacgcacacggcaatgttcagagcggcgggagctggacaaaggagaccaaaccccgcaaggcatgctag

SEQ ID NO: 142409 - DNA, 303 bp, Enterobacter cloacae
atgaggcagggaaatattgctggggagaatataaaattttttgtgcttacggattttaacgcatatcgctcacgacgggtgggcgctatgcgtcgcctcccgactacgaaaattcgtttaactaatgcggtggcgatagcggccaggatgattgccaacaacgcaaggaagatgagtgaggataatagcgtgtttagcatgccacctaaacgggtgaagtcgctggtcgttaaaaggcttaaagtcactcataccatatgcttaccaattcgccgttggtatagcgctcttttcgccgggtga

SEQ ID NO: 142410 - DNA, 825 bp, Enterobacter cloacae
atgagtgaaggattacaggtagttatgtcaccggttcagatggctgcagtgttgtctgataaaacagtaactgaagcagagacactgcagaatcggttgttgggcggactcggtgtggcaatgagtactgttgaactggccggcgcgacaattttgtgcgcagcaccagacccaactacgctgactaaagcagcctgcattgttgttggtgcgcatgggctcgatagcctcaatgcagctattgaccagactatttctggtcgagatacccgaacagcagcataccagttagctgttgatacagctcgccgtcttggtgctgatgaaaagaccgcaattaatataggtctgaccgtcgatattgccgttcccgtagcttttggccttgctctcggagctgtccgtgtcgcatcagtgcgcgtcggaagaattaggcttattgagcatgaatctgcatctggatataaacccggtgggcatacactctctcgccatgtaggtttaagtgaagcagatctcagaacacgtatggctaacagacccacgctatctggaagcagcactttttataacagacgcatagctgaagatgccatttcccaggcactgaaattcaattcctcttatataaataactgggccaaaactgcgagaactggctcaaaattgaacctcgatttttttgcaggcaaagaagttggcttcggcatagagtctgcgactggccccataatcaagtcatataaaatgcgtgtcgttcttgagtgccagttgtataacaacaagccgtactacgtactgactgcattcccggtactgagataa

SEQ ID NO: 142411 - DNA, 297 bp, Enterobacter cloacae
atgattaataaatttttagatcatctaatgggtgcttactttaaccaggattacgacctgttcggcgagacgatcgaagaggtgatggaagagtatttgaaatccgaaggacctgaatatgcaaagggactaattgaggattgccataatttcatcaacaaaaatgatgatgtggaactggaatttcttaacttgtataggttcgattttgacccatctttatggggtattaccgcaaagcagtttctcacaatgatatcgacgcaggcttcccattatcttgatgttaaaaagtag

SEQ ID NO: 142412 - DNA, 222 bp, Enterobacter cloacae
atgaggatcaaaatctatgtgcaaaaatccattcacaaactcatgaccattcgcaaaaatgtttatctgtacggcagcgactgcaatcacgagcaatgtataagcaatgaagagagggtatttgcggagtcggttgatttttatcttccccagatacaggaggacaaaaattgcaatagatacaataaaatagcaaaaagcgggccacataggtgggtttag

SEQ ID NO: 142413 - DNA, 1065 bp, Enterobacter cloacae
atgcttcatcacagccaggcaatgtcactggacgacatctaccttgaggacatccctcacattatccacccggacactgcggcaggagatcttgcagaaactgcattgcccaatcgcatcatccaggagtggaatttaccgcagggctacacccggtttgtcagccgctatcaaccgtttcactggcagcaaccgtggatggcataccgtgacacgcttgccgacatcaaatccgggaagctcgttctgctgagaaaagacataaccgggcatactatttcgggtgtgctgacgacatccggtgaccttcgcaatgatctgcctctgttcctttatacccggctcagcttcctcctgtcccggcagctgaaacgcccgggatatcacgtccgcccggcggcacctgcgcaacatgctcaggctgtaaaaaccatcaatagcaaagcagcaggccggttgttggccgcaggtgggatctataatggcaatattgatggattccatcagaccgcgcagcaactcggtggcgatgcgccagagggttacaagcaagttatggacaataaagggctgatcattgctggtgcttctgttgctgcgggtcttgggctcggcagaataggggcggtgagtgagcttaacaatcttcatgttctgggaaaaatcgagggggaatactcgatgataaagcccggaccattacctaaagagctagcagaaactttttccagtggtacatacaaagagatcactctatcaacagatacgagtttctatagagggggggttgaggggcgaccattaggtcagtttttcgggtatgaacgacctcaaggagtgctccaaaccaggatagataaggcactgctacccaaatggcctaatggaagtgaatctcctcttgatagctatcacgagatccaaatacccgcgggaacgaaagtatatgttggagaagtaggctatcaaacagaccttttttccggtggctctgagcaagttgtagtacctgcaccgtggaaaatacctggcgttaagatacttggaagtggtggtttgaaatga

SEQ ID NO: 142414 - DNA, 1869 bp, Enterobacter cloacae
atggcaactaaacaagacgacacccaaccaataagcgatatggcgaccatgcctgtagttctggcggcagcagatgatttcgccgtttttaactttgattccttgctaccagaatcggcctcttgtgattatcacgagctaaatagtcagttggaagcatcagctcgttcctctaatgagactccaaaaagcgtgtatgaattgttcaaggccgtttgctcatttcattttagggctgatgaccctgtccaaccgtgggggccagtatggagtggtccaaatggtcgttcttacatacctagcgacttccgaggtgaacaaaatgacattctttcaaacgtagttattaaaattgaaaacagactacttcgagcacgggtggcagatataatatggactaatgataaaagaaaaaaagacgcagctacaatagcaataaatacttattgcgaactaatagacacatacagtaaccgtagtgtgaaggaggggaattatagcacctttaatcatatggggaagctcgagcaattcttaagacgtgtgttcgatatagcctcgttaacacagaagaaaaactcattcccgcaaaatatacaatctgcatttgatgttgtatatgcaaaagcattagagctaaagttgtatgtagtatttgaacgagtagcgcggtttggggcaaataagaagataatcgattggagtgttgttgcgaaggatgccaagagactagcaagtaagactgatgctaatacaaatccggatgttgtcaaaaaggtactttatttagcggcaagtgcatttgaaaaaaatggggacaatgattctaagcgagagtgccaagagaaggcagtagagcagacacttaagatgagagagcatgtcagtcaggcttcagcaaaagcatactggacaagcattgcaataggggaactgcgttctgtaggtgggcacaaagagcgaatagcagcgttgattgccgagttgcgtgacttccagatgtcatcacgcgatgaatttgcaacattcacactccccatagatgccgataatgagagagaagaaacatctaaaatctactcagaactctccctctcagcctgtttgcatgaatttgccctggctccatacattatatctaagagcgacttacgtcaccacgctgacactgttcgaaaggaaagtttttttagtaatttcatgggaggggttcatactgatgtagagggtaaggtctacgccaaaacgcctgcagtttctgtcgatgggaatccatcggatgagtggtacaaatctcggcatataagaactcttgatttattttatcatcacttcgtttcaggttatgtagaccctgttcgttattgtttatcaacccggttttctatagaagaacgtcatttcgaatcaatttccgcattaagcccattcgttccacgtggtcatgaacatatattttcgttaggcttttctcgcttttttcagggtgattatgcttctgctacttaccttctcgttcctcaacttgaaaactcaatacggttttatatgcacacattgaaccgtgagacttctaaattagataatgagcttcttcaggaagatcgttctctatctggaatgctagaaagccttcgccctgagttggagcaggtctttggtggggatttaataaacattattgatttactttttaattacaagccaggtccgtcactgcgccatgaaatagcgcacgggaagttgtctgcaggagggtgttttagcgcttcagctatttatgcttgctggttgatttatcgtcttgtctgttggcctcttttagattgctgggttgaacatatagcaccgtctatagaggaaaactaa

SEQ ID NO: 142415 - DNA, 534 bp, Enterobacter cloacae
ttgcagatttgcatgatggattatggccggctgtcgacagatgggaaaacgctcaagctggattgttatggtattggatcatttgacgttctgtcagggatcgaacgatatatcaacaatcctaactgctcagatattgaaaaggccgcgattccacccggtacttactggattgttgatcgacccactggtagtttcgttaaccaggcgagagctgaaataatcgatctggcacacctgtataaaaaccatcactctgaatggttcggtttgtacagtgcgcaaaccatgagcgattacgtctatgttaacggtacgagacgtggcagtttcaggctccaccctctcaatactgatggttctggtgtatcgtggggctgcatcaccctttacagagcagctgatttccagattcttcgtaatgcattactcaaacggaaaaaagtgactgtacccggcggaaaaggattaatggcatacgggcgtattgatgttcgtggtgttcctgactttagtaaatgtggtgtgagatga

SEQ ID NO: 142416 - DNA, 216 bp, Enterobacter cloacae
atgaaaatcataatattcgttgctttgcttattgtctgttttatcctcattcccgatagctggattaatgatgttttcatgcaacatatccggatatcaggtgatggtgaagaagccatgaataactatgatttcacagtaattttgattaaattttctctgtctgcattaatagcgttcttgctgataatactgaagaaagttctgaagaaatga

SEQ ID NO: 142417 - DNA, 660 bp, Enterobacter cloacae
atggaaaataaaaataaagcttactacaatctcaaaaagatagctgtttcgctaccccttattattggtgggttcctttttataaatagtttcttcagttgttccatgaatttatgggcgggcagtggttatttatttaccggtttcggcctgaccattttttttgttagatggctgttatggggtgacttggattttacatccggtggagtgatggtatcagtcggatttgtattgggtatcatcagtgtgtttacaggttcaaaagcgctcgatccggcatacaacaagctcagagtagatatgtatagcgtgtttgtggaagcatcactaacttgtaagggggacagccaaccctacattaatgccgcacgctcttgtggtgttgcgccaatattagatgtaatggatttgaattaccaactagccaaagctcgatatctgaatcccacagcctcgattgttgatggtgtataccattcaacagatggtgttaaggttgatccgtgtttagtgaactattatgaactatcatcacagtgtcccgatgcattcgttcaattgaaaaataaccaccccgaattgaaatcttctgcatccttcaaacagtgctcatcgctttggctaaaagtgcgtgggtggatagcaaggcttttttga

SEQ ID NO: 142418 - DNA, 1104 bp, Enterobacter cloacae
atggaacttcaggtgaatgatttcgctgattatcgtggggataagctcaaattagctaggatggctgttgggctttcttgcgaggaattagctgagaaaataggtaaaacgaagcaatttgttagcaagttggaaaaagggtttaagccctctgagcaagtgttagaattaattgcctcggctttaatgattacacccgactttctctttaccgagcgaaaatatgctttggaaagtgatgtttgtcatttccgtagtaaaaaatcaaggacccaaacgctaactaacagtgttttggcaagagcagaaatcctgaatatcataatttccgctcttgaaggtgaaatcgaattcccagatgtgaatatcccagaacatccgggcgctgatttgctcacgccaaatgatatagagcgtgtggcggaagactgtagacgtacgtggaacttgggtctcggccctatatcgtcaatggtaaaactggctgagagcctaggagtcattgttacacatgtgactggagtagatgaccgcgttgatgcttttactgttcataacaacagacctgttataatcaggaataatgtcaaaaaaagcatatgcagatttcgctctgatttaggtcacgaactgggccaccttgtaatgcacgagggtattaccacaggcgataaactaaccgagtcacaagctgatcgtttctcaagtgcgttacttgttccaagaatatcctttatcaaggagttcccacgaataagagggaaacagttcgattggaacgctttagttgagtttaaactgaggtggaagattagcttgaaaatgtgtatttatcgcgcaagtacacttgggatattaactcaggatcaggctagaacaggttacatgcacttaaactcaaaaggttatacaaaggttgaacctggcgatgacttaatacgacctgaagaaccaagtatgctagcagaggcaattgagatgttggacgatgtgacttggataaaaatcctcatgaaaacaggattgagccaggaaattatcagagagttgtttggtgtgagtcgtccactttctaaccccaaaaatattctccagattgtgtga

SEQ ID NO: 142419 - DNA, 651 bp, Enterobacter cloacae
atgagtgataaccagttagcaccttgttgggaatttcaaccttatcttgctgaaagcaatgtacgcgtgcttttggccgaaatcgctaacgtgttagagcagttatactaccacaagcataacttggacagtaactggtctgaaggcgtgagagcgtatgactgggttagaaaccatttgattcaaagcgaaggaactattcctggtctggaaatggtttctaaggggctggactacgttgttgctctgaacaaagtgccgttgcaattttccaaagattgcattaacaatcctaagaaaaaacatcgtctcctccgaaatagagttgaacacgaacagctatccctttttggcgagagtgagtctgagcaagatattacatggcgtattttagccgagccattcatctccgctgaggaagaaggcgaactggatgcaacattgcctcgctgggaagtggcgctcgttgggtttaatgcttatggtgcccagattagcatggtatctcatcagtctacggcctccgtaccacttatgcctcttgattccaacacccttcctgatgaagcagagattggcaaagcgcctcttcgccgccgccagaaagatcaagattcggatgtaagcaataatggaacttcaggtgaatga

SEQ ID NO: 142420 - DNA, 483 bp, Enterobacter cloacae
atgatcaataccgatatcacttccccggatgccaacagctacgccactgaagaagatttgatcgctttcggcgcgctacgcggcatagaactgcctgacagtctgatacctctgctgattaaagcaatggactacctcgaagggctggactgggtaggttaccgggcaaaccctcggcagccgctggcgtggccgcgcgagaatgttgtcttggacggctacgacttccccgccgatgaggttccacgtgaagttgttactgcgcagtgcatgctggcagtagaggcaatcgacggcgatttactttccagctctcgcgaggctgctgtgaaaactgaacgcgtggaaggtgcggtcactatgacctatgcggtcgcagacggagaagtttttacgccatcttatccggctgtcatggcgttgctgggcgaccttgctggtggtcgcggttatgccattaacacttttgcggagcgtgcgtga

SEQ ID NO: 142421 - DNA, 954 bp, Enterobacter cloacae
atgccaacaactgttaatacagacctgattatttatgacgacctggcgcagactgcgtttcttgagcgtcgccaggataacctggaaatttttaatcaggcttctaacggggcaatcatcctcgataacgaactgatcgaaggtgacttccgtaaacgcgccttctataaagtcggcggctctatcgaagcgcgtaatgtcaactctactgacccggtaacgggtaaaaaaatcggcgcgggcgagtccgtgtccgtaaaagcaccatggaagtacggtccatacgaaacaaccgaagaggcgttcaagcgtcgtggacgcgatgtcagcgaattctctgaggtgatcggtgttgatgtggccgatgctacgcttgaaggctatatcaaatacgctcttcaggggctgatcgctgcaatcggtgctaacgccgacatggttgtgacagcagacattgccaccgacggcaagaaaacgctgacgcgtgggcttcgcacctatggtgataagttcaaccgtgtgtctctgttcgttatgcactccaccacgtacttcgatatcgttgatcaggccatcgacaacaaaatctatgaagaagctggtgtggttgtgtatggcggtcagccgggcacactgggcaagccggtgcttgtcaccgatacaatgcctgttgatgccattcttggtctggtatctggcgctgtgtcagttattgagtcacaggctccaggcttccgctcctatgacatcaacgaccaggaaaaccttgccatcggctatcgtgctgaaggtacggtaaacgtcgagttgctgggttatagctgggacacctctaaaggtgaaaacccagacctgacggccatcggtacggaaggtaactggaagaaacactttaccagcaacaaatctactgctggcgtgctgatcaaactggggtccgcggtgggggagtaa

SEQ ID NO: 142422 - DNA, 195 bp, Enterobacter cloacae
atgcctgaaaactcaactaatgaagcaataaatcaagcgtaccaagctatcgtaatgcagctttacaatgtctacttaaattctgcagatgactcgacggcctctggtagatttgaagcgggtttagttctagcacgaaaagtcagagataattgctataagattgccgcacagcaccctgaaacttcaatgtaa

SEQ ID NO: 142423 - DNA, 270 bp, Enterobacter cloacae
atgaaagtgattgcaaatatgttggtagtagtgcatggaaatggagttcatactaatttgcataaggagattgatactcccctgattccagtgactggcatggagtatgaagactcaactttcaaaaatcctgtcaaaatcatctcggtaacatgtaattttgatgagcattattactacgttaccctacctgctattgaatgccacagcgaagatgcagccaaggattatgcagatatgacgctgctccatggttgggaaaaaccataa

SEQ ID NO: 142424 - DNA, 210 bp, Enterobacter cloacae
atgtccgacatctaccaaatcacgctaaccacccaaacaggcgaaaccttcgcaggtaatctttcacgacgtcagcctgaactggcgaatggattttttccgctagcggcggagacgggcgagtggttgtattccgcccagggcgatgtgaagcgcgtgcagttcccgtctaccactaccggggggccagtcgaagaaataatgggttga

SEQ ID NO: 142425 - DNA, 177 bp, Enterobacter cloacae
atgtctggtgataatgaatatttcgaagaagaagatttcgacgaagaagattacgacgaaaatgatgacgatcatgaagatgaaatggatgatctgaatgatatctatggctatgaaaacgaagaagataatgatgaagcggcgctggatgatgtgttaaaagccagtgaaagatga

SEQ ID NO: 142426 - DNA, 462 bp, Enterobacter cloacae
atgagccgattaaccgcaatcatctgcgctgtcgttatctgcctgctggtttccatggccttggcgcttaaccactaccgtagcaacgccatcatctataaagggcagcgcgataaggctactgaacagctaagccttgcgaacgccaccattaaagacatgcagacccgtcagcgtgatgtcgctgcgctggatgccaaatacacgaaggatttagctgatgcgaaaaagcagcttgatgatctgcagcgttgtcttcgcactggcaagtgtgggctgcacgtcaacgccaaatgtccagcgaacggagcggccagccccaccggcttggatgatgctaccagcccccgacttactgacgccgctgagcgggattatttcaccctcagagagagaatagaaaccgtcactaaacaactcaatgggctacaggtatatgtccgcgagcagtgcctcaactaa

SEQ ID NO: 142427 - DNA, 318 bp, Enterobacter cloacae
atgctcggcaagacttacaccgagtcagagtgtcgtgcgcttctcaataaagacctgaccaccgtcgcccacaagattgacccgtacatcctgaagccaattcccgaaactatgcgcggtgcgctttactcgttcgtctataacgttggcgcgggaaatttcaagacatcgaccttgttgcgaaaaattaacctgggcgaccagaaaggcgcatgcgatcagctgcagcgctggacgtatgccggtggcaaacagtggaaggggctgatcacccggcgcgagattgagcgtgaagtctgcgagtggggccaaaaatga

SEQ ID NO: 142428 - DNA, 270 bp, Enterobacter cloacae
atgaccagaatgagcaccatttatagcagactctcttacggcaccgggaccgctttgacgggctgtggtgtctccgcgaaggcttacgccgacacagcaaaaacagaggtttggatcttggccgacaaaattgcagggatgaccctgagcgattgggcaatcattgtcggtattgcatgcaccgttatcacctgtggcgtgaactggtattaccgacggaaagaacgggaggacaggctaaatggctatgccactaaggctgaagaatag

SEQ ID NO: 142429 - DNA, 432 bp, Enterobacter cloacae
atgaaagaagttaatgaagatggacatttagttatcactattgttatgcctgcttggtttcccccagtgttgcatgccataacaaagtatgattctaagacaggcttttgttatcgaattgacccgcagaatgatggagcatcaactaaaaggcatattcacatctggaaaaaaaataaaccacataaagaggtgtcatggaacatagacggctcaagacatgataagagaaaattcgatgagaatatcgaaggcttcagacacgcaaaagagctagccaacagaatgttggaacctgctgcaggcgtgaaattcaacctccagcaaaagaatgttattgatgagatatacaataacttaattgttcttttggcttatgccattgcaaatgatactgcaatcaaatcaataactatcgattacaactcctaa

SEQ ID NO: 142430 - DNA, 804 bp, Enterobacter cloacae
atgaaactagaatcatcattaaaacacttcagccctcagggaatgcacatcagcgatagtgtaaaaagtacttctccgaatcgtctcaacggcgccgatgtaatggtggccgttggtaccaccagcagtcgtgcgcgatttggccttgctgccttcttcggaaaggctggcatcagcaaaacggatgaacaactggcagttcaggcgctcgcgcaatatgcgatggatgtagcaccgaagaatgtgcgcaaagcggctggtggacatttcggatggtgcatgcagatgctggcgcaatatgcctttgctgattactcccgttcggcagctaccagcgtgacgtgtcacagctgcagtggtaccgggtttatctccgagaatgaggatgtggttaaacatcctggtattttcgacgccgacggtgccgaagtggtggccccgaagattaaaaatgagctggtgaaaagggtttgcggaacatgcggaggaaagaaagtgatctttgcccggtgcaggtgtggcggtaaaggcgaagtgttggaccgcaaagccacaagtgaacgcggcgcgccggtgttcaaaacctgcgagcgctgcagcggaaatggattttctgaggtgccgtctactgcagcctataaagtgatactgaagcgagtcccggatctgcacgtcagaacgtggacccgtaactggaaaccgtttctggaggtgcttatcgacgtctgctacagagaagaacaaaaagcagactcggcgtttcaggacgcaacgagcttttgtggtgatgtggacaaaatttag

SEQ ID NO: 142431 - DNA, 138 bp, Enterobacter cloacae
atgaagccagaaaagatcgacctacttcgcgcgcgcttgcggcgtctcagtatttatcaccgcccggggtctgtgctggtggtttatcagatcttccgtaattacatcagaattgaatcgaagcagaggggcacatga

SEQ ID NO: 142432 - DNA, 1809 bp, Enterobacter cloacae
atggaattaatatacacttacataaataattataaaggcttatatgatttagcactaccaacgtccagtaaatataaagtatcaggcgaccgcaaccatattaaaatcatgaagaaggatttaagccaagactattacagcgatatacaatgcacattaattttaggaaaaaacggcgttggaaaaacctctatactagatttcatcaatagttttatttatgactttgaagggagcggttattgcatatggaatgaaaatgaaaacttaataatcacaacaagcaattcccggccaccaacaattgaatcagacatgaaagttgattacattgaaaataatgaaagtttctttagaaggaataaaataaatcttgtaaaaatcaacaatacaattgatctcaaaaacatgttagttggtagaaaaaagaaaaaaaacacatccacctctcaagatctatcactatcttacttcttacaaggcagcaaaacgcgtactaaacaattactcaagaaattaatatcattttcagataatagttcttgggctggcgataaactttcagatctcaatactaaatttcagtttgaaatcgaaaactctccagtttataaagttaattccatcttaaaaaacaacgagattggagacaaaggactttatggagcaactgaatatttttttgaaacattacatgaaaaaatcattgataacaaactacctacatatgtaatatcagacttgaactctcaagacatttcactttctacgatactaaatgatgaaatacatcttgatgaaaaagatattattgaattaattttcaataaacatagaaatttgcaatcccactccaatcagccatatcatgaaataataaaacttatgcttatgccagcaataatttggcatttactcaaagcatcaaaaatctcgaaagatatgtgcgaaacaatttatttatattgtttatgtaaaacgtaccttgaagatgataaaccatctgaagttatagttgagacattaaaccaattaaatgtaaaagattattattttacaaaaatattaagcctctcagagtatatatttgaaaccatatataaaatagccggcattttagaaacaatcaacgaagcacctgatgctgatttttctttcactttagaagaacctaaacaaataattgagctaatgaaattagtagacaaattaccaagcgggatatcttcaagatttagatatggttgggattcgttgagttcaggggaatttgcaaaattaaacctattcaatcaactttatgactcaatagagcacagcaacggaaaaaatataattatattattggatgaatgcgacttatacctacaccctgaatggcaaaggacgatattttcagaaataatagacttaatcaaagtgcacaaacaaaacaaaaccgttcaagttatattcacaacacactccccaatactagcgagcgattttttaccctcggacataatatatcttgaaaaagacagcacccataagacaaatacaaaaccaatagagtttggatttggagcaaccatatcagaactttatataaatggttttttcattgaggcaaccataggccaacatgcttacaactatctagaatcgattattcataacgctgagcaaaaaactttaaatagcaatcaaaaagttatacttaagcaaatcaaaaacaaattactaaatgacctcatagcaataaaatcaaataatatcgaggaaattaaaccaataaaaaggagtaaaaacaatgattttaataaatag

SEQ ID NO: 142433 - DNA, 1191 bp, Enterobacter cloacae
atgattttaataaatagagaagtcagtgtcgaggttaaaatttcattttctaagatagtaaaacaagttgatacaatcataaaaacaaagaaatctcaaacaaacattgataaagagcttgaacttctcaactctttagataaaaaaacaatccgaaaactagtcttttcaaaaccaaaaagattaagaaatatcgtattaaaattatacaacaaacacccagaactatgtgagttttattcaccggattatttttttaggaatctaaatctttcttcagcgacaaatttgcagctacccttaaaagataaagaaaacaaaagaatagtttaccaagaacttagcactgtaattcaatcaattcgctcacttcctcatgtaaactcaagtgttattcttaatgatatattaagcacgccatactcacaaacaaaattatctgtattgagagataaaatacttgaccttgtgaatatcaaaaaaaatggcactttaaataagaacacaatagctttgtttccatcatggataagttccatctcacaaatatttaagtactcactcattaatagagaaacggcatatcagttaaaccgtttcttagaaatttatgcctgtccgtattgcaacagtgaagaaatagaagcaatctatgatgaaacaggacatgattacagacctgcatttgaccatttcattccaaaatataagtatccttttatttcttttagcatttacaacttaatacctagctgtacaaaatgtaatagtacatataaaaaaacactcgatccaataatgacctcactttccaatcccttccttgagggagttaatgacagtagactcttctcgtttgattatgatatgaactatatatatggcagtggtattattgaaaatgaagatattaaaataaaattaaaaaaacttggtaatagcatcgataataacatggaagaatttagcatcgcagaaagatacaactctcataatattaaaagaatagctagggtaattgcaaaaagagcatttgacttaaaatcgtttgaagacaactttaatatggatccctcagttttattaacattcggatatgactctaatgttgaaccactgaaacatactcataaaaaactcatgcaagatgcaatattaaccttttccaataaacatgtgtccttaaactaa

SEQ ID NO: 142434 - DNA, 543 bp, Enterobacter cloacae
atgcattcactagcgtatcaacacaataccggaataaacccgggagcgatgataaaccacgctcaacctaaggcggcgccagaccacgaaaagatccgcgatgcggtccgagcatgggcctccgcgctggacaatcaggacgtggtctcggcactgatcatcaacgaatacagggagcagggcgtgaccgccatcagcttcccggaggacatcagccgggcgcgccagaaactctttcgcttcctggataaccgtttcgactctgagcagtaccgcgagaacatccgccagttggcgccggcaatcatggccgtcctgccgctggaatttcgcaaccgactggcgcctcaaaacgacacgatgtccctaatcgcatctgcaatgaaagagtgtgccgaggctaaacaggccgtgctgctgaatgctccacagcatcagaagctgaaagaggtaagcgagggcatagcggcgctgttccgcctcatgccggagcaagtaggaccgttgatgacgatggtcacgtcgatgctgggggttatgtga

SEQ ID NO: 142435 - DNA, 195 bp, Enterobacter cloacae
atgttctctcctatcaatgaaagttacgtggcagtaggtacatcactttacatcaaggacgccaaactgctaggtgatggtatatacgacgtcgtttatcgcatttatgaagatgttgaaggaaatctcagtgaagttatagatgaaaaaaggtgtgctttaatttcaactatcccttcaagaggtaaggaatga

SEQ ID NO: 142436 - DNA, 300 bp, Enterobacter cloacae
atgaaaagacatttatacactgttcctcttgatggaagccaggttgaacaaattacattcaaaccgcataatgatgaaatgtatggcggaggtaatggcggaggtaacgatatgctaaaacgagttgaaaaactggaagagaaagttatctctatcagttctgacttggcagttatcaaggctaccatgtgtacgaaggaagatttacacaaggaactgaatgggcagacatggaagattgttgtagccctggtagttaccgtgcttatagctgtcttttctagatacttcatcaaatga

SEQ ID NO: 142437 - DNA, 282 bp, Enterobacter cloacae
atgacggactacaccgttagggttgagctaagtggcgctgattgggaaacctataacaagcttcatgaaagcatgcttgcttccggatatcatcgaacggttacgggcgacgatgggcaggtgttcaagctcccggatgcggaatatgtggcctctaaatcattagtcctatatcaggttcgagatgaggtgatgcgcatatccaaatcgttaaacatcgatcctcatatccttgtaactcaaagtgaaggaagagcttggtatttagctcttgatagatga

SEQ ID NO: 142438 - DNA, 492 bp, Enterobacter cloacae
atggccacatttaacagaaatcttcagcttcaaattcttcaactcgctttagagagctatcctgacccgatcgagtacataccgagggagttagctgctcttgataagaaaacgcttttgcaaaacatcgcttatttgagagaagaggggatgattaagggaggaatagaagaatatctaagcggtaaagaacctgctctggatacgatttcagtaactaaggatgctattaacttgctcagtgaagagggaagtatctcctcctcattaaaagtggtgacagtaaaactccatgacgaatcgctcactgctttaagggatttcataaatcagaatgtttcagacccagaagaaaagaaagtgtatttgcagcgcttaaaagagcttcccgctgacgccacaaaacacatcgtgcttgaacttgtgggtaaggggttaggtcagataccgaacgcagttcagtggctgcaaacaacgctccatcagttgtaa

SEQ ID NO: 142439 - DNA, 3141 bp, Enterobacter cloacae
atggaatttttccatctgcttaaagccagtcagaagtctggcaagaaagatgcggtgatttggttcaccgcgaaaagtgcagcgcgcgccaatctccaactcgatgtggccctggaagaagcaggcattgaagaaactggccgcggtaaagactatgcaaaaccgatccgcaccgatttcccggtatataacgaccttccggaagaaggtgtagtggattacacctggtgcgagcgctacggactgcaggacgacggccgcacctggctgccaaaggctggtggtgagtcggctgcagtcgtggacaacacggcagcaccggaaacgcccgttaaactggaagctacagtcgagagtgttccgcttgaaaaccgcactccagcggtacgttttgctgtccatctgaccagcgacaaataccagacactcatcactaaagagcagcaactggctgccagcgaaatgtcactggatgaaggcaacacctatctcaagaacttactgctggcgaagaacgacatccctgaagttgccgaactcagcctgaacgctgagtggaaacttgttcaagcgattaagcaggtcttcacgccagatgaagagcacgaagtaaatctgcttgctgctttcatgactgactgggcgagaacagatgccggcgaccgcaatctgttagttgaagagtggagaggcggaaagcttactcttctcaaatcagaacgcaccagcaacgctggggttgcaactggtcaggatctcgcagcaaatgacggtatccagatcggcgagcatgatgacgaaaccactcgttatccagtcgttcgtatgcccttccgcaagcagctactcgcccagttcaccgccgacgaactgcgccaccacttaacccgcgaagaatacgaaggtatcagcgcgctggagatggacactgacaacagctatgtccagaacctgctgctggcggcagaaaactgcgaagaggttaagggttacgacactaaagacctgtggcgctacaccgatgccattcgcaaggtgttcagccaggaaaagcgtcacgaactcgctctggtacttcgttttacccgaatctgggctgcgactgattacattgaccgtggcattctggcgcgcgaatgggctgccgttaatcgcatcagtaatgttcagcgcaccgattctggtaccaatgccaacggcgggtatgtaacggatcgcggcgaaggtgcgcaccacactctggacactctcgatcttgaaattgcctgtgccctgctacctatggatttccatcactttgaaatcccctcaagcgttttacgtcgcgccaaagaaatcgtggcgaagaaagaagaaccatggaaatcatggagcgccatcctgcgtaatcagcccggcgtactggcggtgaaccgtgcagcaatcttcaatctgatccgcatcgcgccggaaaacatccaccacacgccagcggctcatcttgagtttgtgaataaaaccatgacggctgagtttaactctgctgtggagttgctgccgctgtctactccggctgttgagaccgaagcacctgttgaacaaccgcaggttgaaaatctcggcagcggcgtgttctccatcgatggcctgatgggtggaaacaccgaaccggtcttcaatacctcctcaaatgaagtcgaaaaaacagaaaacacagcggagaccaccggcaatgtgcagatggaaacggctaagccagagaaagacgaagatcttggttcggtaccaccgtgcgagagcactgatgcagctagttcgcagacagattccgtagcgttggaagaacagcaagcagaaccggtaattgaatacccggcttacttcgagcctggccgctacgaaggcctgcctaatgacatttatcactcagcgaacggcattagctcaactcaggtgaaagatgcccgcatcagcctgatgtacttcaacgcacgccatgtagctaaaaccatcccacgcacagcctccaaagtgctggatatgggaaacctggtccacacccttgcactgcaaccggaaaacctcgaagcagagttcagcgtagaacctgagatcccggatggggcgtttacgaccaccgcaactctgcgtgagttcatcgacgcgtacaacgccagcctgccggcgctgctaagtgctgacgagattaaagcgttgcttgaagaacataacgcatctcttccagctcaagtgccgcttggcgccagtctggaagaaacggctcaaagctatatggctctccctgctgagtaccagcgtattaaagaaggccagaagcagacagcaacagcaatgaaggcatgcattaaagagtacaacgccaccctgcccgtgccggttaaaaccagcggcagccgtgatgcgctactcgagcaattagcgatcatcaatccagacctggtggcgcaagaagcgcagaaacctacaccgctgaaagtgtccggcaccaaagcagacatgatccaggcagttaagtcggttaagcccgatgccatgttcgcggacgagctgctggatgcctggcgtgacaaccctggcgaaaagattctggttacccgccagcaactggccacagcgcgggcaattcagtctgcactcctggcgcaccctaccgccggcatgctgcttacacatccaagccgcgccgttgaagtgagttacttcggctttgacgacgaaacaggtttagaagtgcgtgtacgcccggatctcgagattgaactggacggcgtgcgcatcggtgctgacctgaaaaccatcagcatgtggaatgtgaagcaagaaagcctacgcgccaggctgcaccgggaaatcattgaccgggactaccacctcagcgcggctatgtattgcgagaccgcagcgctggaccagttcttctggattttcgtcaacaaagacgagaactaccactggatcgccatcattgaggcgtccaccgaactgctggaactgggcatgctcgagtaccgcaaaacaatgcgtgctattgccacaggattcgatacgggcgagtggccagcgccgatcactaccgattacacagatgaactgaacgatttcgacctgcgccgcctcgaagcgctgcgcgctcaggcttaa

SEQ ID NO: 142440 - DNA, 243 bp, Enterobacter cloacae
atgcgactgattaatcgaggcagtaagcaatcccctttggctcgccaggcatgtgaaatcgcactcgcagcccaccagcaaagatatggtgactatgggcgcagcaagatgaaagagacttatacggtgaaggtagaaggcgtgaaggtctgggtggaggtggtgaaccgcaaggcaagctatgtggccacggcaatgacaggcatgcgacgactgcgatccttacctgggcaggtggcctga

SEQ ID NO: 142441 - DNA, 258 bp, Enterobacter cloacae
atgggacagctcgttagcttggaggattgggcttccggtccaaacggcttcaagcaaccaccatccagagcggcgctgcacaagattgctaaaacaggacaaacaatcccaagggcgctgaaacaaggtcgtcggtgggttatcgatgaagaggccaaattcattggtatgctcgcatcgccggctctaccaccacgcatgccgaaagcggttaagacgcttatggagagagtaattaatggcggccagaccacgtaa

SEQ ID NO: 142442 - DNA, 1140 bp, Enterobacter cloacae
atggcggccagaccacgtaatcacagggttgatatcccaaatctctactgcaagcttgataagcgtaacagcaaaacctactggcaatatcggcaccctttaaccggtcagtttatcggttttggtaccgatcaagaggcggccagactggccgcctctgaattgaatcgtctgcttgcgcagcaggaagttgcccagtcgtttgccctgatagatatggtcagccataagaaagttaattccaagaaatcgatgcggatgcgcctatggattgaacggtatctgaaaattcaggaggagcgactcagcaataaagagataaaaattaatacgcttaaatcaagaaggacatgcacaaacgtactggttgaaaggatgcctgatgttggcatccaggaagtcaccaccaaaatgctggcagccattacagacgaatataaagccagaggcaaagcacgaatggcgcaaacgctccgcagcgtctggattgacctgttcaaagaggcgcagcacgcaggcgaagttgagccgggttataacccggcgctagccacaagaaaagtcgttgtccgggtaagtcgttcgcgactgaaccttgagatgtggaaggcgatatttgaagctgcctccaatatggcgccctacgtccaaaactccatgcttctggcagttgtcaccgggcaacggcgcggcgatatcgccaaaatgaagttctctgatgtctgggacggtcatctccacgttgagcagcaaaagaccggggcgaaactggctataccgctctcgctacgctgcgagatgttggatattacactggcgcaggtgatcaagcgatgcagggatcgggtcgtaagcccctggcttctccatcacgtgacctcaagcggtaatgtgaaagcaggcgatcaggttggcgagaacagcctcagtgtctccttcaaactcgcgatcgatagtactggcatttccgtagaggatgggaaaacgatgccgacttttcacgagctgcgttctctatcggagcgtctgtatgaggggcaaggcatcaatacccagcagctactaggtcactcatcagacaggatgacagcgcagtatcataacgatcgcggtctcgactgggtgaaagtgaaggtgtag

SEQ ID NO: 142443 - DNA, 711 bp, Enterobacter cloacae
atgccaaagcccgtccgaccaatcgacagagttaagctgtatgaccactacactttcgacccaaccataccggaactactccgagtcaagaaaccttatggtcaatctaaacgtgctacaggacagcctgtaagcttctctgtgcagccgactggctatgcctgtgtgtctgtattaggcaagagctatcggcgctccagaatcatctacagcctttgtaaaggtcgcatcccagacgggtacgttgtggaccatatcgatggtaaccgactcaatgaccatcctgataacctacgagtctgcacctatcaggagaaccgatggaatgcagatagccaaggtggcacgcgtcagaactatttgccgaagggcattagctactgcaccagagatgacaagtatctagccatgctgcgtctgggaggtcgacactatacgcgtctatcaccttcagtctctgacctgattaacttcctcaaggagttacgacaagtccaccacaagggttttgctttcgatggctggacgaagtggacggaggcggaccagaaggctgcggacatcaagtaccagacgggtccggtggtaggcagagtcttggtgggcaaaggtagagccgcacaggttcgactgaaccgagctactggtcaaatgtacaggcaaacagccgatggtcagcgacatttggtagctgaaagtgatgtgttttga

SEQ ID NO: 142444 - DNA, 783 bp, Enterobacter cloacae
atgattttgtacaaatacatagacaatgcatcattagatcgattcttcaaagatggctacatttctataaaattcacccctcacagtgagtttaatgatccgttcgaaagttatggatatgcacttgatgatgaatcaattgaatcattgactatgaggtatgagatcaatcaaaaccttgcctgtttatgcctttctaaaaatccactcaacgtattgatgtggtcacattatgctgataagcatcagggctttgttgtagcaatcgacactgagaaagcaggatttgatgatgaagcaaaatgcctgattacagctccgaaaggtgaaattttttatttagagagccgaatgaaaagcaaactaaaaatcagtcaagaaaatatctataatactgatataattagtaaattattgcttactaaatcactgcattggaaatatgaagaagaaatcagaataataaaaaagacagacgcattacaaaaacaaggcacggttttaattgataaaataattgatctaaaatcaataacaggtatctatattgggataaacaacaagaaggttgatgaaataattagaaataacagtacattagaagcattgattttgaacaagacagtgcagttatatcagtgtgaatttaagaaaagtacatgggatctcgccttagaaagttatgaatacaccaaatacccgcatgatatgcagagaatggatatatttgattctgcagagaaggttttaagagcgatggaacgtaaccacataggcggttga

SEQ ID NO: 142445 - DNA, 162 bp, Enterobacter cloacae
atgattaagagctaccggcagcttacgctgtgtcttttcatactgttgtccacattcggcttctgcctttatctgggttttttttccttctgtctggttaaaataaaaaccgacccgcttgttatttcagtgctgacaggttcaactgcgctggcggcgtga

SEQ ID NO: 142446 - DNA, 627 bp, Enterobacter cloacae
atgtctttaactgcccttatggcttttgccctgattatgtctgccggtatcgtcactccaggcccgactgttctacttgctcttaataatgcggctcgctttggtatcaggaaggcgacatgggggattattggcgcagcagcagcggatatccttctggtagcgctggtcggtttaggacttggcgttgttctggctgcttcagaaaccctttttgtcaccctgaagtgggttggagctgcgtggcttgcttttatcggcttgcgaatgttgctttcttcgaacacttctttgcctggaggcattgaggaaacaactccggcgcgtcattcactttttctcaaaagcttctttgtcgccatgagcaatcctaaatattatatcttcatgaccgcattactccctcagttcgtcagtacggcgcaaccagccttgccgcagtatgtcagcctggcggcagtgatagttttaatcgatgtggcggtgatgctgggctatgcgatcttgggtaagaaatccgtcagcctctggagagctggcggtattaaatggatgaaccgtatcagcgggtcgtttctgttaattctcgctggttcggttgctttgtatcgtaaaagcagcacataa

SEQ ID NO: 142447 - DNA, 129 bp, Enterobacter cloacae
atgatatctggattattctcattcaggaatgaaaaggtactgattattgccctgagcggacaagttatcctcacggcctatcagcgacgaaccggcacgcatcattttcaccctgaacgtccgtcctga

SEQ ID NO: 142448 - DNA, 1179 bp, Enterobacter cloacae
atgaagaccattgatatgcaatttaaggagttaacaaaagagctccttatgcttcatacaaataaaatgcgcagtccatgtgtatttgttaatatggttataaatcaacgacttgagaattgcagcgttgaagagatattgtctcttcaacaaacacaatttttgtctagtaatcataacggatcgtactgggccgataaaccgctctacgctgaagttcagggcaggaagaaaacactggacctggagcgtatgtttttaaaggatagcggtgactactatgtcacctattttgttcagagaacactccatccagccggatgggaaaccatccggacttgtggaaataatgttttcgatgattatctggcaagcagaaccaccttcaaagattatatgaagggaagcgtgtttcataaccactggatttcaaacggtaacactttgagttcacttcatgcagatccggtcaatactttctttctccaggtgcagggaacgaaaagattcagattgattgaggagtctttattattgtgtaaatatgttgatttaagacagcctcataaacttaaaattaattttgataagctaaaaaatttaggtgttaaaaatgaagagttcactgtcacccctgggatggccgttttcatgccttcttggtgttttcatgaaatagaaagtcagggggccgggcttaatatttcgttaacttcgcattatccccgttcacgttcagcgttccttctttctcctctacaggccatcaataaagtaaggcgtttctggtatccaaaatttgtccaaaaaaaaagaatacaatttcagattgaaaatctttcagtgaatgctgtacccttttttccctggttctcctcattcgtatcaaatactactttcttaaatgacaccacctaccagcctcaatattatatattgaacaggaaaacaaaaaggatcgtacccgtcttaaatatggaattggtatctgtacttaaacagataaatggctttgttacagtgcaggatatttcgaacataacaggtcttgctcaggataccgtaatcgatactctggccacacttattgaagatgagttcatccagatactttttgattcggaagataagtataattatttctatcaaagtatagagccgaaaacattatctacctga

SEQ ID NO: 142449 - DNA, 1305 bp, Enterobacter cloacae
gtgaaaaaatcattgatatttggtgagccagattactttaaaaatatcagatctaggatcataccattcattacaagcagggtggttccctttgcaggttttacactaatcaccgtcatgatcgcccgcctcaactatccggagttgggaactttcacctatcttactgcgatgttttctcttccagtagtcctgatgtcgatgccattagcaatggttgggaatttctcggcagcatcaaaaaagacaggtgaaagcgggagcgaaatatttttgagtggtcttccgttggctgtcatcctgtcggtttcaggagggttcattgctgcattcatgctgttttacttagtcaacacggtagatccaaatgttgatttggctgggagaatatattgcttttgcgttcctttcttaataattaacacttatttattctattacatagaaagctatataagcaacaagataatggctaaagtaaagattgccagtactttcatcagtgcggttgctatcttatccctttcggtatttgtgaatgaaattgttacttggcatgttttttccgtatttttgctaatcgagattattcttttttgcctatatgtatgggtaacagtctcccattcagatgctaatctaaggcagggtattggtttaaaaattacagaggcctcaaaaaaactaatcgttatcgggttgcctgttgctctgggcctgacggggcaaaaagcggtatactttcttatcactcagcgcatcaacgatataaacagcagccttgtggcagatttgtctgtaatgatgagtatatcgggaattttatctctgccatttgccgcttttgcacaaatacatagcttgtttgttagcgaaaatgattttaagtttcattaccagatttacaaacaaggggttgtttgtggttgtattgctatcttcagcatactgatactgggagtaggtagttattatttcttactggaattatataatgccgcacctgatttatatagtataaattactttgtcagtatttcagctttgtttgttgcgtcttctcttatgcttttgtccatgagtcatctgagggcgttacatgacacactctatcctcagtcgattgcagtcttaattctcctggcggggtttatcccggtaatctggttacatacatttaaaagcaatgcattgtataaagttatatatatacaggctgcatttacaatgataatttttgttgcactgagtttcaggattaaaacacaattcaaattcagtaatggaactgaggttacacaatga

SEQ ID NO: 142450 - DNA, 468 bp, Enterobacter cloacae
atgatggacgatattgctaaaactttgccacattctatggaagtgtcgcttaccgggcgagaacccactcttgatgaagctgtagagtacattgataaaattgacttttctgagttgaaaaataagttatcaagatcagatgagctaatttcccgagtctggtctgagcaagagttacagatgactgaacaatattataaaaacttcctgtatctgaataaaaaatacaataatattgttaaagtaattgtcccaagcctcgccatagatgaattctggcatcatcatatcttagacacaaggtcgtacatcagagactgcaacaatatttttggatactattttcaccactacccatattttggtatgcggggtgagacagattataagaacttaaaaaaagcatttgatgttacacaacaaatatacgaggcggaatttggtgaaaaaatcattgatatttggtga

SEQ ID NO: 142451 - DNA, 3117 bp, Enterobacter cloacae
atgccgtactttttcattaaacgtcccattttcgcatgggttgtcgctctgtttattgtcctggcaggcgtattgtctattcctcgtctaccggttgcacaatatcctgctgttgcaccaccgggtattatcatatcagtcagttaccctggcgctagcccggatgttatgaacacttccgtcgtatcactgattgaacgtgaaatttctggtgttgataatttactgtattttgagtcttccagtgacgctacgggtatggcgtcaattacagtgaccttcaaacccggaacagatatcaaaatcgcccaaatggatctgcaaaaccaaattaagattgtggagcctcgcttgccgcagtctgtacgacaaaatgggataactgttgaagcggccaattccgggtttttgatgatggtgggattaaaatcccaaaatggagaatatcaggaagctgatttaagtgattatttcgccagaaatgtgacggatgaactccgacgcgtacccggtgtagggaaggttcaactttttggcggagaaaaagcacttcgcatttggctggaccctatgaaattacacggctatgggctgtctgtcaccgatgtattaaacgccgtcagtcaacaaaacgtgattgtttctccgggccgaacgggagatgaacctacgaccgacgggcagggggttacctatcctataacggtaaaagggcaactctcttcggttgaagaatttcgcaatatcacgattaaatcgcaagtctccgctgcgcgtctgacgttggcagacgttgcccgcgtggagtccgggttacaaagttatgcatttgggatacgtgaaaatggtgtgcccgccacggctgcagccattcaactgtcgcctggcgctaatgcaatgagtaccgcatcgggtatccgtacgcggttaacagagctatcgggtgtacttccggagggaatggagttcaccgtacctttcgatacggctccgtttgtgaagctttctatcctgaaagtggttgagacatttgtcgaagctatggttctggtctttttcgttatgctgcttttccttcacaagattcgctgcacgattattcctgcgattgttgcaccggtggcgctactcggtacctttaccgtgatgttattaagtggttattccatcaatattttgaccatgtttggtatggtgctggccatcgggattattgtcgacgatgcgattgttgtggtcgagaatgtggaacgtttgatggaggaaaaaagcatgtctccgcaggaagcgacgcgagaagcgatgcgtgagatcactccggcgattattggtatcacgctggtgcttaccgcggtatttataccgatggcctttgccagcggctctgttggtattatttatcggcagttctctatttcaatggccatatctattttactgtcggcattcctggcgctgacattaacccctgcgctttgtgcaaccctgctcaagccccatggtcgtcatcacggtaagagcagtgcattttcagcgtggtttaacgctcactttcatagactggcttcattttacgccaccgggctgggctttgttcttaagcgtactggccgcatgatggcgatctacgctgctttatgtatagcgctgtatgccggtctgtcttccttaccttcttcatttttacctgatgaagaccagggatattttatgtcgtcaatccagcttccatcggatgccacgatgcaaaggacgcttaaggtcgtcgatgagtttgaaaatgaaatcgcccaccgtcaggcggtagaaagcaacattatgatcctggggtttgggttctcaggctcgggtcagaactcggctatggcgttcaccacactgaaggactggaaacagcgtaaagggatcacggcgcaggatgaagccgactatattcagtcccgaatggcaaatgtgcctgacgccgttacgatgagtcttctgcctccggcgatttctgatatgggtacctcttccgggttcacttattatttacaggacagaggcggtaagggttatcaggcattaaaaaagaccgcggatgagcttgttatgcaagcaaatcaggatcctcgactggccgatgtctatattgatgggcttggtgaggggacacgtctctccctcaatgtcgaccgggaaaaagcggaagccatgggtgtgtcttttgatgagattaatcaaaccatttccgtcgcagcgggttccaattatgtcaatgactataccaatcatggtcgggttcagcaggttatcgtccaggcggatgctccgtacaggatgcagccagaacaaattttggccttgtcagtcagaaatcatctggggcagatgcttccgttatccacttttgtgacactttcgtggaatgttgctccgcagcaactgaatcgttatcagggatatccagccatacgcataaccggaagtgccgctcagggaaaatcgtcgggcactgcaatggtcgccgtggacaaactggctgagcacttaccgccaggatttgcaggggagtgggcggggagttctttacaggaaagggaatccgcttcacagcttccaggactcattgtgctctctatactggtagtatttatggtgctggctgctctttatgaaagctggtccgtgcccttcgcggtaatgcttgttgttccgttggggctgctcggtgctgtgctggccgtagccgttacgaatatgactaatgatatctttttcaaagtgggcctgattaccctgattggtctttccgctaaaaatgcgattctgattatcgaatttgcgagacaattgatgaatgacggaaagaacctaattgatgcgacaataactgcagcgaagcaacgtttgcgacccatactgatgacttctctggctttcacattgggcgttgttccactgatgcttgccagtggggccagtgacagtacgcagcatgccattggtaccggtgtattcggcgggatgattagcggcacactactggcaattttctttgttccggtatttttcgttgtggtcagccgatttaccggaaggggaaaagatagactggaaaatagccggaacggctaa

SEQ ID NO: 142452 - DNA, 909 bp, Enterobacter cloacae
atgacctataaaaacgaaaaatacggttccacggcacctggggtggctatctcactaaagagactcgcgttccgtcacattaagaaattgtgtattacttttctgctcgttattacagaaaacgttgcatttctgctctatcccgttctggctggcgtggccataaatgccattctggcagggcagacggcacgtgcgaccatctatggccttctggttctattcatgtggtgcatcggggccgccagacgtagcgtagatacccgaacttttgcacgtatttacgcaagtcttgccgtgacggtagtgttagctcagcgaaaatattcacacaatcaatcgactattgccgcgagagtaacgctatcgcgagaatttgtggacttttttgaattgcatctgcctgtctttatcacttcgataatttcccttttcggtgctgcaattatgcttttgtggattgagttctggacaggaataacctgtttgatcatcgtggcaatattaatgtgctttgtctcaggctatgcctgtaaaaacgaggcgctttaccgacgacttaacaaccgccttgaaaaagaagtcgattatgttgataaggcatcttttagtgctttgaaccgacactatgacacgcttgcccgtctacggatggtcttatccgacagagaggcatggggattcttattcataggcattctggtctctgcgctattttcaatgaccattatcaggatgagtatggaaaccggaattaatgccggtcatgtttattccgtaatgacctatatgtggatgtttgcaacaagcctggatgacgctccacatctccttgagaaattttcccagcttcgagatgtaggtcggcgggtctcaacagacgatgaaacgcatttaacgggaaagtga

SEQ ID NO: 142453 - DNA, 387 bp, Enterobacter cloacae
atgatggctaaggtaagttttcggcgtgagaatgtcatggcctctattttattttctattttgtcctgggggttattgtattcctgggtttatcttatgcgtgccaccaatgaaagagtagattcaactttacctgagtcatcagtgattcaggtttcgataatattggctgtcatatttttcgtgtttcagaaaagacccggcgtattaaaaaatcttttcataataatatctgggttaatcttgatatttttatacacaatcactgtgttacatctgcttttgaatgtggttccggatatcgatgatttcgttttttattatgagtgttttttattgatgtttttttgtgggctgcctatgtatttatgtctaaggatgatttga

SEQ ID NO: 142454 - DNA, 705 bp, Enterobacter cloacae
atgcataaaaacactctgatcatcgttgctgaagacgatgatgacatcgccgccatactgacaggctatttacataaggcaggaatgaaaaccatgagagccgaagacggtgaacaggcgatcaatcttacccgtctccacaagcctgacctcctgctattggacattcacctgcccgtgtacgatggctggaacgttctcacaacgttaagaaaggaaacgaatgtacccgtcatcatggttacggcactggatcaagacgttgataaactgatgggtctacggctcggggcagatgactatgtgataaaaccctttaatccttcagaggttattgccagagttgaagcagtccttcgcagaaccagaccgattgcagaggctacacattcacgtcctttaagaacgccttttcttacaatttaccccgatgaattttatgtagaaatcactacgcaaggtgaggtttccacgccagtacttaccacgactgagtttaagcttctgacctatctggccagaaatccgagaaaagtgtgctcaagagaggagttactcgatgcgtgtttaccagagggcgactcgctggatcgcactgtagacagtcatatgagtaaactccggaaaaaacttgagcatgccggactaaaaggcattccggaaagcatcagaggattaggctaccggctcggtgacaaaaaatga

SEQ ID NO: 142455 - DNA, 1071 bp, Enterobacter cloacae
atgaacaaagaaacaattctgagccgtcagatattgacatatatgttgtcattaactttcgtcattattgcgattgccatacttggctcctacttattttatagtttcataattgattatctgccgggagggattaacgcaggtaatgaagataacatgacattccttgactggatgtggatcttgatcgcttcagttaccagtctggtcgtttcactcttttttaccgtaaaattatctgcaagaatattaaaacccttgaatgaagtagcatacagtctgaaacagatctctcaaggaaaccttagcgcaagagcgtttagcagtaattctcagttaggcgagatgaataaactcgtcaatgatttcaatgtaatggcggaaaaattacagacactggatgctcagcgaaatttatggaatgctgcaatcgctcatgagctccggacaccagtgactattttgagagggaggcttcagggactggttgacggcgtgtttgaaccagagccgtcgctattccaaaatctccttaaacaaactgaagggctgactaacttaatagaagaccttcgtgtcgtgagttcttcaggcggggccggatattctttggtgctcagtgaggtcgatctcaagacaacaatttcaaatacgctggatacctttttaccagactttgaaactaaagattttaaaatagtaactaaacttagctctcagcgtagcgtctgcgatcctttacgcataattcagtgcctgactgtcctttttgataatgccttaaaatattccacatcgaaaacgcttttagttaataatggtatcatgggaagcgataattttataatcgttcaggataaaggtccggggatccctgaagacctccagaagaccttattccagccttttcagcgaggagaacaagcaaaaaaaattaatcctgagggttgtggattaggactatcggttgttaaagccattatgcgtgcccatggtggagacgtcagctacagcttaacacgagaaaacggttcagttttcaggctttcatggcctgttcaagggcattga

SEQ ID NO: 142456 - DNA, 915 bp, Enterobacter cloacae
atgaataaaataacttatcacattaaatacttcgagtatttattaagaaagtgcaggaagattttatccggggatatttcattccatgcggccaggttaaataaaatttcaggggtttatccagatttacttaaccctgtaacgcttaatgagaagatttgtcatcgtcttatatttgaacgcaacccattttatacaatgctagcggataaaattgctgtcagggagtatgtggctagaaacactcgtttagttaacattgttccggtgattggtgtatataaccgtgttgaagatattgatttcgacaagctacctggcaaattcgtcttgaagtgcagccatgatagcggtagtgcaatcatatgcacagacagggaaagttttgaaccggagaagattttaaataaattaaagttggcccttaaaaagaatatgtattacacaaccagggagtggcaatataaaaatatctcacctgttgtaatctgtgaaatgtatgtggatttattttccagtaacaataagagtgtcactccagaaatgttaagaatacattgctttcatggtgtggcttgtttcattgaagctgattttaccgatgaaaagggccgaggattcatcaatgtatatgatagatcgtggcatttacaaccctttcaaatggaatacccgaatacacccactccggttgatgaacccgagtcattccataaatccataattgctgcccagcagttagcgaaagaaatcgactattgtcgtgtcgatctgatgctaaaaggacaagatatctattttagcgaaataacgttaagtcctaaaagaggaaaactgaaaattaccccagcgatatgggatacaaaactcggggggatgtgggatctgtcgttgactaaaaacaggctcaattga

SEQ ID NO: 142457 - DNA, 306 bp, Enterobacter cloacae
atgaatttttcatcaattgaagacgttagaaaacgaatcgatgaaattgacagtaaactggtgaagataatcgcgcaacgcagcgaatgtgttaaagctgcagcaacgttcaaagttgaccactcagccgtccgcgcgccagaccgcgtccagcaggtgatcgacaaggtacgtaaacaggccactgaagcaggacttcccgaagtgattatcgaaaaaatctatcggactatgattggagcgtttatcgattatgaactcgagcaacacgaccaactgcggaagaaaaaatctgagcttgattaa

SEQ ID NO: 142458 - DNA, 738 bp, Enterobacter cloacae
atgctgatagcgcaggtttcagacattcacgcctcacccgagaatgatcatctgtttcggttcgaccagatattaaattggcttacgcatctgcaaccggacgtactggtacttacaggtgatctaacggatgggtattggcaggaaggttatgtacagatagctgaccgcctgaatcagcaaaattacccttcgtatatcctgccgggtaactcagacgaccgcagtctgatgcgttctgtttgggatgaaaatagatgggcgcacgatgcccaaggagaagccctgcacttaattcataataccggtggcattcgcctgattggtctggattcgacggttaattataaggattacggcagtgtgactgaccatctggaatggttggataatcaatttagcgacgcagacagccctccttcattgctgtttttgcaccatcatgtatttgcatctggcataccaacgctagacgaaactatgtgcagaggtctaactgagatggaagatttgataagacgctccccgaccagactactcgccatttctacaggccatgtccatagaccaatagctggtacatttgcggacatacctgcctacatttgtggctccgtctgcccggctaatcctgtctggtttggaacagtaaacgctcctcctgcaaatgacccgccagcgttgatgattcaccgctacgtcagtaactctcttaccagtcatcacgtttgcgtttaa

SEQ ID NO: 142459 - DNA, 876 bp, Enterobacter cloacae
atgtgtgataataaaactgatagttacgccagacgctttaaacaggtctttgattatattgaccaccatctcgatgacgctttattactggaaaaactgagtgaagtggctcacttctcgccatttcatttccatcgtcagttttgtagttattgtgggatgccacctggccgttacatccagatgatgcgcttaaaacgcgcatcttatcgactggcttttaatccgttagagaaaatcactgatatcgcgtacgacgccggtttccagcattctgaatcatttagccgtgctttcagacaaatgttcggtctatcaccgacgcaattccgccagcagcccccctgggtggattggcataagcgcatatccgaaccttacaaagccaggagacaaaccatgcaaagccaggtcaggatcattactttccccgcgacgtcagtcgcaatgctgacacattatggacaaccggagcgaataaacgaaacggcggctcgctttattgaatggcgaaaaaccacgggtttttcaccggttgccagtagccagacatacggtattgcaccacacgatccaaccttaacgccgccggatgaatttgagttccatatttgcggaaccgtcacgtcacccattattgaagacaatcgcttcggggtgataaatagtgacattccggctggtcgctgtgcggtgttacgtcatcagggatcgcatgatgcgttaaccgggttggctaagtctctgtatcgtgactggttgccagagagcggagaggaacttcgcgacttcccgcttttctttcattaccacaactttgtgcatgaggtagcagaacatgaattactcacggatatatatttgccgttaaaatga

SEQ ID NO: 142460 - DNA, 354 bp, Enterobacter cloacae
atgaggcgtgcccagataggagtggattttgacgccgtactccagggcggtggcaatggcatcatcgcaggctttgatgcggcccgcatccagggtcatctccccgcctttcagactttcgtctcccagcacaaaaacattcttttcagcgccgtcacgccagttgtaatgacggataacgtcctccgcagcaggcgccacatcttcctgagcggggttcccctctttgacatactctctgcctttcagggcggacgggttagctccggcctcgctcgtcaggaactgacggaccgttttattaaatttggtgccggcaaaaacgccttcgatacccagaaaatcagttcgtaa

SEQ ID NO: 142461 - DNA, 2193 bp, Enterobacter cloacae
atgacagtgaagtataaaacggttatcaccaaagccggcgccgaaaaactggctgccgcaaccgtcccgaacgggaagaaagtgaattttacggcgatggcggtgggtgatggcggcgggcaactcccgacgccaaatgccagccagacgaaactcatcaatgaggtctggcgtcatgcgctgaacaaaatcagccaggacaaaaagaataaaaattatgtcgtggcggagctgctgatccctcctgagatcggcgggttctggatgcgtgaaatggggctctatgatgataccgggacgctgattgctgtcggcaatatggctgaaagttacaaacctgcactcgctgaaggatcgggacgtgcgcagactgtgcgtatggtcatcatggtgagtgatatcgcttcggttgaactctctattgattcttcaacgattatggcaacgcaggaatatgttaacgagaagctgacggagcatgagttatcacgccgacatccggatgcctctctgacggcaaaaggatttactcagctcagcagtgcaattgacagtatgtctgagatacttgcggctacgccgaaagcggtaaaggtagcctacgatctggcgaacgcgaagtatacagcagctgatgcaactacggtgcgaaaggggatagtccaactaagtagcatgactgatagtgtctctgaggcgttagcggcgacgccgaaggcagtaaagagcgtcagcgatgaaatagttaaacttaaagaaagcctcggtaccgcatcaaaagcaaatgttgttacatccctgattgattctacatcaggtcgcctccctgttgttggttggatgggactgggagggattagagataccagggtctcagaagagaatttttcatcattctggcgtgataccactatcggaaaatcaggcatcactattccctatgatggtactccaacgatttcttatcttgcggtagatgctgctaatcaacacgcctacgtggggcgtagaaaaggaaatgaggctatttcttgggtaaaactatatagcgaatttaataaaccaatgtctcaggatgtattcgggacggcaatgggaataggtggaggagcagaccttaacgcttacaccgcgccggggctttattaccagccagcaaatgttcaggcacaaagcggtaaaaactatcctgagactgtcgcaggttcacttcagatatacaaacatgctggtatcactcagatttaccgtgtttatagtaattctcggtcttatatacgcaccttatataatggagtctggtcagcctggacaaaacagtacgatgctgcaaataaaccgtctgcagatgatgttgatgcagtatctgccgtaaacggtggaacattcaggaaattagttagcttcaatgaaggtctggaggttagaagtcgcacaggaattgttagcggtaatgatgccgccagttttgatagtgccaatatgattttgaaatcatggtatggcattggtttttattcaacgctgttagattctgttggaaaagaaactggaatgacagggtatatcaatactcgtaatggccttttgcaaatgaaaggccagattattccgggggattatggtaattttgatactcgatttattaggctggctgggagtcaaaatatatcgggaattctgcgtagttcttccgaatatcaatcaacgtcagctaatagttaccgttctgtttacggaaactatggcactttctggcgaaatgatggtgccaatttatatttgatggttactaatgcaggtgatcaatacggtgcatataatgatcttcgaccactcgcgataaatctggcttcgggttatccaacaatgagcagattggcacttagcgactacaccaactttgatgctcgttattacactaaaagtcagtcagacgcaggctatatgccaaaagtttccgcttatacaaaagctgaaagcgacgctcgttatcagacaaaaggaaactatataactggagtgcgttttggggcatctgctgaatataatgagcgcggaaacactgagcgtatgactggtggtgtgatgacatcttttgctgatcggggaagctcaaattactggattcgtcttcgtccgttgcagtatcagattaatggcggcgcatgggttactgcggcctacgcataa

SEQ ID NO: 142462 - DNA, 519 bp, Enterobacter cloacae
atgatgttaatgaaaaacttcactggaacaacaaaacaactcgatggcgtttccattatggtatttatcgatgaggatggaaatgattggtataaatcacagggtgagttttcgactacaactctgaaatttatgtttgacgagaaaggtaatgttgttgctgcatcatgggatgcttccatgctagccccagagaatttgtcggtttcggaaatcgaaaaaaaaagcgtgccggttaattttttcgagccgggaaaacgctgggtatatgatggtgaaaaaatcaccccgtttgtttattcgcaggaagaactgcatcaacaggccaaagaccaactcgatcgcttactcagcgacgcaagggaaaaaataattatccctcagaccaaattaatggcgggtagaacactgactgattcacagttaaaggagttaaacacctggctcgattatattgacgaactagaagcatgtgatatcaccgtaagacctgtaaattttcctgaaaccccgcagtaa

SEQ ID NO: 142463 - DNA, 306 bp, Enterobacter cloacae
atgattgtcattaatggttttaatgaattgctacaaatgaaagatggtttgcctgatgtaggttggctgtatgtttcgccatcgttcagcctttcttcagaagaagatatagtcaatggtcgttattatattgctgaaaacgaagacgaagaaatggattttgaagataactacggcactttccttgaagcgccaatttttaaggcgatcattgacaataagctagagcataatcctgcctcagggagtggtgagcttctctacgcggttcgttattacctggaaaacgatgattttcaggactga

SEQ ID NO: 142464 - DNA, 804 bp, Enterobacter cloacae
atgtatgccggggcagggaaggttgatattcaggcgcaggcggatgccatgaatgtctcggcgctacaggacatcaccatcaccagtggtcagggaagtgtaaaggtgaatgccagccaggagctggttttaagttgtggtggcgcttatataaagcttagcggcgggaatattgaactgggatgttcgggaaatattttactgaaagcggccaatgttaatcaaacgggacctgcaacacttgatactccacctcttactttccttaaggggtatggcggatcgtttactgttaccgatcctgaatcaggggatatcaaaccattcacgagttataaagtaacctctccagatggcgaggtgcttgaaggaatatctgactcgtcaggaaagactgcaccgttttactcctcgacaccgggtaatgtaaaaatcgagtttccacgtgagcaaaaggatgaaggacctgggcattgggttactgatgatcatgattatcacgggttgaagaatactgcaattatggcaatcaaccgcttaacctctatgggagatgaggggcgtgtttttggttctgaagggaaggactatatgaatacgaaaagagataagattcaggaatggcagcctttgccatctgatgttacagacgagatggagcagcaatctgtagtacatcgttatggccaacagcgaaagataacacaaacttttttggaaggtgacgattcctgggctgttacgggtcagtcttggcactggcaaccaacgaccgctgatgatatgtatgagggaaataaatga

SEQ ID NO: 142465 - DNA, 432 bp, Enterobacter cloacae
atgaagttaagattaaatcagaactatatattatatttttggggggtgtttgatctcttttatattgccagatttatctggctgaatatctctcagggaagaattcctttaatttctgatatattgtcttttggcaatatttatccacagcaagagttttattcgctagtcctttttttatcttcattgctgtttaatatgtcgattgttttttctgctgtaatgcttttaaaaaagtggaagtatgtgaattgggtagtttattttcaaacaccattcagactgttcttcatgatcccttctatatcaatattgccatggttcttcaaaactatgtcaatcaaagttggagtgatatttattgccgctgtattcttgtcagagataattaagattgggacattttatcttacaagagaacaaggctcataa

SEQ ID NO: 142466 - DNA, 1779 bp, Enterobacter cloacae
atggcaggcagttcattagtgacatccgtgacacatacagaggcaaaagctacggctggaaagcaaaaaccctactgggtagaatttcaactggttgatgagcagggcgaacctgtggcgaatatgccatggactgtggaaagttctcatccagttaccgggccggtggagggattcacttattctgatcagagcgatactgacgggataatcagagtcgatatgccgcatgggctggaactgaggttgacgttagatggcaatcagctggctacggaaatggaaaaacgtgccttacgcgttagtcgcgatgcggaaaatgattctattgtgcgtcctgaagttgaagagaaagggtatatctggcactatgtagttatcggtgaactttgccgtacccttccctccgttaaactacgaaaaggagaagtgtggccgccatttcattttccggcagacaaggttatgaaagggttgacgataaggtcaaatcagcttgaaaaacgtcatgtaatagaaatatgcccattccgggcgtgggaacttgtcttacatcatcagaaagattattcgctggctaatgctataaatttaggcggaggggcttgcctggcatatgcagatgataatgtgtttgatgaaaaatcaataacccgctttttcataagtcaatgtcaggacttaaagcaattaccaaagtttcataaaggtagcaatacttacaatgcccttgtatgtgatgttccctatagcgatcgctataatccaccggtatttatggatacatcaaaaaataccggtggatcttcatctgatggcgggagtactccgaaaaataatagtactacaggcaaagccgatggcgatactcagttatattacgtttataaatcagataaagtcatagtttcatggcgcggcacagcaagtttatatgacgttggaactggtctttcattttctccggtaaatactaaaacatgcaatgtggataagacagcatgcaccgaattgctttgggccggaaaagtccataatggtttttggagtggctattgccgagttgaacgtaaatttgatgaccaaatgctagagttagagcaattagctggtggcttgaaattgtttatatgcggtcatagtttaggcggtgcattagctttgatccactcagtgaggctaagaagtttagatccaaagatttatacatatggaatgcctcggacatttacaaaaaatgctgtccagcagttatccggcataactcactaccgccatgttaatgacaatgacccggttcctgctgttccacctgaagctaatgttgacaatgagttatacaatatgtggggaccagttggtgcattattaggtatgacttgggccgtaggtgaattgatggcatatcaattgaaatcttggggggattgtttttggcatcatgggaaaatcgttgcatatttcacggcaacgcaatttagagaatggaaagagtgtaaaattagttttcctgaaccagctggatgtataactttgagtggcccgctaccaattacagcaaagctttatctggtaccatcatttgcagagatggaatctgaagaagctggggaaaaacagcatgaatataaaaaatcattaacggcacatgatttaagtaaatattttcctgaagagcaaaacccatccagattagcggatttaaattttggggagcacttcatgacatcttatatgccttacattaataacaaaattcttggtttgattgataaataa

SEQ ID NO: 142467 - DNA, 768 bp, Enterobacter cloacae
atgcataagttgataaaaattatcgctgtttgtctgtctgcatttattttgaatagctgcgcacaggcaatggataaaacactttctccgccttcagacacgaagtgggtgaatgttgaagttaaaaacccatcgcgttataccaaaccttttccacttgaggtgacttacatttcgcataaatgtcttaaaaacaggaccagtggttttgatggttcgtcggtcactgaaccgagctataacggaacgaaaatcccgctcgagcagcagggtaaaagcgatgtctggattgctaaggttgcgatgagaggcggtgggtcatgtgactggacattaagcgagttcaatttaggaattgagtatatagatgcaacgcatcttggagaagaccttgctcctggagctgcagtaggtgcaacgattgcatttgataacgatgcatcaagaaatggtcagttcaccttcgtgaagggggatgttaggttaactccgaaatattatccatatataagagagtggcatttggtaaggcaaaaaaatgagctaacctttcttgcaaaggaaagatttttttcttatagggcggagggggcgacagcgatatcatatatgccaatgattgatgaaagtaaagttgttagatatttagagccaagaaaaaaaacggatgactctcatcccactataatatacccggatggaacagttgtatctgacggttcaacttttcctgactttgataaagtagaaggaatgaaaagtaaatga

SEQ ID NO: 142468 - DNA, 789 bp, Enterobacter cloacae
atgcataagttgataaaaattatcgctgtttgtctgtctgcattgattttgaatagctgtgcacatgcaatggataaaacactctcgctgccttctgacacgaagtgggtcaatattgaagtaaaaaacccgtctcagtatacaaaacccttcccgctggaagtcagatatatctcgtatgaatgcatgaaaaagagaatctgtggatttgatggctcagttgtcacagaacccagctataacgttatcgggatccctatgatgcaaagaagtggagatgtttgggaagcaaaagttgctatgactggtggcggttcatgcaaatggactttaagtgcagtaaatgtaggtattgaatatatagaagcgactcatcttggaaaggatctcatcccaggctccgctgtgggcgtaacggttgcatttgatgctgatgcttctagaaatgggaaatttgaaattataagtggaaataaattcaattacactcctaaatattaccccgtattagaaagatggagtactcaaaagaactctacaaaatcagataaactgaacttgtttggggagaaaagttccttttttgatgttcgtatgattataaaagataatgatgcttgggtgaattaccatccaacaatcgatgaagataagaaagttgagatgatattcccttatgaaaagaaaaaaggagtggcattcacttttgtatatcccaatggtgaaagggtgtcatcgcgagaaataaaacctgactttaaaaaacttgatgaaatgaacgttaattga

SEQ ID NO: 142469 - DNA, 354 bp, Enterobacter cloacae
atgacaaaaggcttggttttgcttggtgacaaaacttctcatggtggaaaagtgatctccgcttcctccaatattactgtcgatgggaaaaaagccgcgttagttggcgatatggtcagctgcccggtagaagggcatggaactaatcctatcgtggaaggatcaccgcaccggccacttaacggtcgcgctgttgtcgtcgatggctgtaaatgtcagtgcggttgtactgtaatttcaagtgctcagtacctgtcaggcagagcaggcaccactgcttgccaggatgatgaagtgtcaggccagttatgctgccatgagggatcgttttatcgtccggtctgctttttttga

SEQ ID NO: 142470 - DNA, 645 bp, Enterobacter cloacae
atgctgcgtcgcggcgtcggtgagcaccagggtgtgcttgtccgcctcgtggctgaagtgatacgcaatcccctccagctccatcagacggctgatgaagtccaggctcgactcctgatactgcacgcagtagtcccacacccggtagctcccggtgagcttatcctccacgttgacctgatgttcacccagcagggttttcacaatctgcggcaccgtctggccctggaagatacgcaggttacggtcgcgcttcatcggccacaggtccggctccaccgtcagctgatacaccgcataacgggtgcctgtcagctcgacggcactcaccgccacgcgggtgatttttccattgatatagcggggcgtcagcaggctctgcgtcgggatggtcaccgtgaccggctgacccagcagtttgctgcggtcaatgcgcgcatccgtgccaagcagggtcagcgtctgggcgaacgactcggacatcgcctcgcgacccgtcagtttccagaacagaagcccctccaccgggagctgaacggtaattcggttgagcataactttattccatatggcttatgcgatgcaaagactcacggcactaaatgtgtcatggtaatactatgcagtgtcagattggttatttag

SEQ ID NO: 142471 - DNA, 129 bp, Enterobacter cloacae
atgaaagggaagtttggcagtgcggattatgcagaggaagaacttgtcgcggagctaggaagtgcttttgtgatggctgatcctggcattgaaggagaggtacaacatgaaagctatattgcttcctaa

SEQ ID NO: 142472 - DNA, 294 bp, Enterobacter cloacae
atgctgaaaaccttcaccgtatttaacgttcagcaaatcgacggtttgcccctgacaacggaaacggtcagcccggaagcgacatttgacccgttgccgcaggctgaaaacctgttcaggaagagcggtgcaaacattattgagaaaggacaaaatgcctttttccgaccctcaactgatgaagtctggttaccggagcgccatctgtttcggatgcggctaacttctacgctaccggtctgcatgagctggctcactggagcgggggtaaaaaacgccttaaccgtgaaatga

SEQ ID NO: 142473 - DNA, 252 bp, Enterobacter cloacae
atgacaatttccctgcttaacccccggacaagcgcccctaacaccgcagcggcgaccagcgtatccccgctggacccgtcaggctcctcaaaaacgaaattttctaaaaccagaaaggatatttatcagaccgttaccgacaacatcattgcagcactggaagccggtgttaaaccctggtcctgcccttggcagcgtgtatccggcatgtctggtctgccatccaattacacaaccggaacccacacttga

SEQ ID NO: 142474 - DNA, 360 bp, Enterobacter cloacae
atgtacatagcgatagatggtgatgatgtggggagaaaaataacctcatcatacttatccaactcagaagagaggttgaaatacataagcaacaaattaaatgataccacaataaaaatatctaaaatgctcttatccaatggatttgagataattttccaagccgcagatggtgttacagcgaaaacagacaacgaggtcaatcttaactttgtttttgataagataaaatcctattcctttgacgaaattacattttcagctggtgtgggagcgaatctaagagaagcctatgttgcactgttaaattctaaaagcaacggtaagaatatgatttctatttacaaagacatattataa

SEQ ID NO: 142475 - DNA, 603 bp, Enterobacter cloacae
atgtttagaataataagatttgactggttgttaaaaacggtatcactaatctctttgtttgtcacaatactttcattttggatctttaagacagttctgtcttctgacttaagcctgttcaaattgttatcaatatcatcattagcatccattatcataaacttctttctactttcatcaaagatatcaagactaatatggggaacaataaggtttttcaagaaagacatatatcctgacttaaatggaatttgggttggacatataatcacagaaacaaatgatgaatttgaagtccgcgccaaaataaagcaagcactccttgtaacaaagatagaaatgcacggccccacagttaaatctgttacgctagaagcaacgccaactaaggaattggataacaacaaattgtattatgtatataaatcaacccctaaaaaccctagttggagcgagtatattggctcgaccatattcgacgtaattgaaagtaagaatgcgctccaactttctggtcgatattatacagacagaaaatccgtggggagaatatcaataaaaagaatatcacttaacactgactccgacatatctttttattaa

SEQ ID NO: 142476 - DNA, 1770 bp, Enterobacter cloacae
atggaggacgggaagctccatcaagtgatgacgggatgcgggtatcgctatatgcgtgcccgcaatctccctgaaaaatcgattctgcacagcagggagcgaggtgcaggatattacacgaaagaatacgcgactgatgccggtaattttaatgttgcattggtgattcatcccgaccctttcacagaactgccgacagcattcattattgagcaacctgaacagttcaaaagttgccttatgccccatgtcgccctggaagggttcctttgctatgttgagcagatggaagcagactgggattccaacgagctggaagcgacatataaagaagttgatgcacagatacaccagaccctcattaattcggtatccgctgctacgcaaggggtaaatgataagagagaactggaaggggagtttgccgcatactggcgtcccagcgagacactctttcttctgtcaaacgcaagtcgggggaccacacttaaaacctctttggcaaaattacttaagtctgatggaactacaagacaggagtacataacggttgaggaatcctccccggaggactcggaagccgttatgaccaagtggctcaaacaaaggtatttccccagaacttcgttaaaagaaatacccatcagcacgcattacatttctgtaaatcccagccgtcttgccgggatgaaatggccaccggcttcattccgggacttactggaatggcttgaaaaatcagaccacaatgccagagatagagtcattgaaaacatcaaagccgaagggaagaaaaggtacatttttctctttgatgttttaaaccaggacatcttagctatctatgttgagttcaatacgctgtctgttgatttcagaaggtaccggaagacagccaaaaactcaacggtcaagcttgcggcgatgttgggtggcaaaagtgtttgcacggaatatcaaaggctgggtgtcattcgtgctgacattgcgacgctccttagccggaatacacgacggaagggggcagtaagtctttcaacaaagcgtatagcgttgataggttgtggaacaattggagggtatctggccgaattattactccgcaacggagccggatgtggtaagggttatctgcatctttatgatgatgatatctacaaacccagtaattttggccgtcataccctatcatcacatgatttcgggtggcctaaatccctttcacttgcggcaaagctccaggagtctgtgcatttacagacaaaggttgttggatttatggaacaattccgtatcagcgcagatgaaatgcagaagtacgacatcattattgatgcgacaggacgcccacctgtgtcaaaacgcatcgctgcggtggttagacagattccactggagcaaagaccatttattattcacgcgttcaacgatggcaacggccgggcatcaaaagtctttattgatgatggccgaagctgttacgggtgtatggtttctaaccctgcaaaataccataaaggaaccgattcaaggtttaatgatcttgatatatcaagcgaaaaaaataaaagttgtggcagcacttacaccctttatgatgcagcagttagtagcataacgtcatctctggcccagatggccgtgttaagtactctagaaccagagttaaagtggacttacaatgaacatatccttgagggggggcgttcgctcaggcctcaatttttgccacatcagcctaattgccctgtgtgtaatgaacataaatga

SEQ ID NO: 142477 - DNA, 1299 bp, Enterobacter cloacae
atgccttgggattttaacaattactatagtcacaatatggatggcttaatcagtaagctcaaattgagccagactgaatccgataaactcaaagcacttcgtcagatcgtacgtgaaaggacgagagatgtatttcaggaagctcgccaagtcgcaattgacgtgagaaggcaagcgctgacacttgaaagtgtcagattaaaacttgagaaaacaaacgttcgctacctctcccccgaagaacgtgctgatctagcgcgacttatttttgaaatggaagatgaagcacgcgatgacttcatcaaattccagcctcgtttctggactcaaggaagttttcagtacgatacgttaaacaggccttttcatccggggcaggaaatggatattgatgatggcacctacatgcccatgacggtgtttgaatccgaaccgagcattggacacactctgctcctccttctcgtggatacatcactgaaatcactagaagctgaaaacgatggctgggtatttgaagaaaagaatacctgcggacgcatcaaaatctatcgggagaaaacacacattgatgtgccgatgtatgcgatccctaaagaacaattccagaaaaaacaaacagcagcagattccgcacacctcataaagtcagattcggtgtttgaatcttttgcattgaaccgggggggacgcgaggcttatgccgttgagtccgacaaagtgaacctagcacttcgcgaagggatcagaagatggtcagtcagcgaccccaaaattgttgaagactggttcaacgaaagctgtaaacgtatcggcgggcatctgcgttcagtttgccggtttatgaaggcttggcgggatgcacaatgggaagtagggggcccttcatcaatcagtctgatgactgcggtcgtcaacatcctcgatagagaatctcataatggctccgacctcaccgggacgatgaaacttattgccaggttgctgcctgaggaattcaatcgcggtgtggaaagtcccgacgatactgacgaaaaaccattgttccctgcggaaagtaaccataacgtgcaccatagagctatcgttgaaactatggaaggtctgtacggtattttacttgccgctgagcaatcagtaagtcgggaagaagcgttacgtaaaatcaacgaagcatttggtaaacgtgtgactaatgctctattaatcacgtcaagtgctgcagctccggcatttctcaatgcaccatccaaagagccatcatctaaaccaatcaacaaaacgatggtaagtggctga

SEQ ID NO: 142478 - DNA, 672 bp, Enterobacter cloacae
atggtcccggcagtcaatctttcaacaggaaaacctcagttcttcaagacaccacataacccagattttacccgcgacggtgcacttaaattgattgatgccgcactcgcaacctccgctgcaccgacgttctttgcaccacaccattgtgaagatcttggttcttattttgctgatggaggtctggtcgccaacaaccccagttatatcggatttttggaagttttcagggacatgaagtctgattttcctgatgttgctcataaagacatacacatacttaatatcggtactaccggggaagagtattcacttagcccaaggctgctgagcaaaaaatggtggaatggctactgccgactttggggcgtaggtaaaaaactggtccttacaaccatgacggctaaccaacatctccataaaaatatgctcctgcgcgagcttacgctccatggtgcctccgataactacaccagtctggatgaagtgatccctaatgaagctgccagcgacatcactctggataatgccacgaagagttccattgaaaatctgagtgcaaggggaagacaactcgctactgtgcagttcgctcagaaccagaagcttaagagctttttcactacacctgcaaaaccctttaagcgcgcaatcgcgcaggagaaattctga

SEQ ID NO: 142479 - DNA, 480 bp, Enterobacter cloacae
atgtttgatttctatgacttctggtgcagggaaaataatcaaaacgatcgtcttcaacgctatatgtctcgttttcgcgtcgacgtaaaaaacggtgtgccaagggagacgctgaacagagagtattatcgccagtttaaaggtgtgtcttgtcgttatctggaagaaatgggcgatgaatggttcaggcgtaagccagaaaacgaattttttattgagagtgccgtttcagcacttaaaagccatcagagacagaacatgtacatcgtatttatatcgggctctatgcttccgattctgtcacccattgcgaaatatcttggggtaacggacatactctgtgctccgttaataataaatgacgcaggcgagttgacgggggaaatcggcctgcccgaaacaattggagcgggtaaaaaagacgccctgatgacgttttgccgggataaggagattaatccagcggattgttatgcctaa

SEQ ID NO: 142480 - DNA, 138 bp, Enterobacter cloacae
atgcctaaggtgacgatctttcggatattccaatgctcgaagccattgggcatcccgtctgtgtgggagagcattccgcgcttatccgatatgcagcagaaaaaaattggcacattatttaaaccattattgaggtaa

SEQ ID NO: 142481 - DNA, 1221 bp, Enterobacter cloacae
atgacttcagaactctctccgcaaaatatgacgttaaggtcatggcttgcgttattcattctggctatttcaacgtttactattgtcactaccgaactggcgccggtcggattattaacgccaatcgcagagggattacggtcttcggaatccgcggtgggcatgaccgtgtcgctttatgcctgggtgggggcgttgagtgcgctgtttgcctccgtctttttaggcaatgtggctaagaagcggcttttactcgtgctcaccgtggtgcttctgatctctaacgtcatggccgcgacggttaacacctacggaatgctgcttagtgcccgcgtgctgggcgcgcttgcacacggtgcattctgggcgatgatcggcgcaacggcggttgccatggttcctgccagatatattggtgcggcgacgtcaatcgtatttggtggcgtttccgcagcaagcgtttttggcgtaccggtttccaactacattggtatccacttcggctggcggcaggcattttggctgatggccgcgctgagcgtaattgcctttgtgggtattagcgtgcttgttccccagatcgccagcaaaagcgcgcttggcctggatgcgcttaagggcgtgctgaaatcgtctaccctgtggaaaatttactcagcaaccctgctggctgttacggcgcactttgccgcctttacgtacattgaaccctggcttcacacgcagagtttactgtccaccgcctttattcccgccgtgctttttgtttacggcatcgcgggtctggccggtaatttcctgaccggcgtgatgattgataagtatctcaagctgacggtttcgctgtctgtactgctgatctgtgcagtgctgctgttcctgggcctgtcaggttcctcgctctctgctgcgctgatattcaccagcatgattatctggggcgttgccgtgtcaggaatatttgtcggcttccagacgtgggttttacgtatggctgaagataaagccttcccggcctccgcaatctacgtttcgtttttcaataccgccattggtatcggcgcgtcggtcggtgcctggatggtttcatcattttcaatgccgctcctgtatatcgtcgccggcacggctatcggcctgtccgttctgcttgtcgcggttattcctgcaaccttgaccgcaaaacaatcccgtatggagaaatcttatgagtcaaattaa

SEQ ID NO: 142482 - DNA, 345 bp, Enterobacter cloacae
atgagatattcaggtcaggtggatattcagcaggtgatcgacgacagtcccttttccgggtttcactgggtgctcatcgtgctgggctttctggtgctggcgatcgatggtttcgataccgcagcaatgggctacattgcgcccacgctgtcggcggaatggggcatacacaaacaggatctgggaccggtactgagcgcagcactgctcgggctgtcgctgggagcgctggtcgcaggcccggtatcggaccggataggccgcaagcgcgtactggtcttttcttgtctgttcttcggcctttcaagcctgggacggcctgggcacaaagccttaacaccctga

SEQ ID NO: 142483 - DNA, 1359 bp, Enterobacter cloacae
atgatggcatataaaaatatacacactacactgtgcgcgctcgctttaataacattcccccctttatcaggggcacaggaatggaatggaacggtgttaggttttgaagcgccaccggaccctctcctgggcgatatgggcggcatccgcaagatcattaacgataacgggtttacttataatctgggctatctgaacgaaatcgcctggaacggaggtggcggctataaccacgattctcacgtggcgtatattgatcagtttgcgctgacctttaatcaggatctggagcgctggacaggcgtgccggatgcgcggatcgaaggaaatatcgtcaaccgtaatcacaatgacgatctcaccaccaggcgtgttcaggatccgcgcgttaactttaacgacctgacccaggaaagctggggagggcagtctattacccgcctgggctggctcacctttgcccgcagttttgacgatcggcgtctgacctggcgcatcgggatgatgaacaaagtgcaaacctttgatcaaatcatcccgtgtgacttccagttgctctcgcagtgcggcgggaaatctgccaactcactgacctggaacaactggaacgtgcatacctggggctccacgctagcgtataaagtaacgcccacgctgaccataaaaggcggtgtgatggagcaaaacccggacgcgtcaagccgcagccatgcctggagctggtcaacaaagggcagtaaaggaatattactcccggttgaaatcgaagcgcgtccgcatatcaacggtctgccgggcgcgtacaatctgggcgtagtgtttaccaatgcgccgcaaaccgatctttttcggggtaaatccggtggggcgggtgcgagcgacccggatggatttgataagcacaaccgcacctggtttatgtatgccgggctaaaccagcaactgacccaacatcaaaatgatccgaatcgtgggttgagcgcctctttcagcatgagtcttgccgatcaacgcacgaactctatgcaccaggtatacgcagcctctttgcgataccgtgggttgtttgatgcgcgtccacaagactggattggcttcggtctgacctggattgatatgagcagccagtacgcacgcaaccaacgttacctgaacagcctgagcggggcttccgattataacgatccggcattccatcctgtgccggaccattcgctgaacggtgagttctactatcgctttcgtccgctgtcatggctggagctacagccgggcattcaatactggcaccatcctggtggggtttcccgcacgcaggatgcctgggtaactgagctgaaaacggtggtgaccttctga

SEQ ID NO: 142484 - DNA, 1596 bp, Enterobacter cloacae
atgagcacgctaaatgccttactcagtacctgtcaggcagagcaggcaccactgcttgccgccacccgtgagcatgtggtgcagtgggataattggctgctgccgctgaccggatcatcccccgtaggcgaagacccgggttatgacgatgatttccagcagatgcgcgaggaggttaacaaactttccggtgcggatactgagctcatctgccggcttgcagagaaactgctgaccacgactgccaaagatatccgtgttgccacctactactgctgggcaaagctgcaccgcgagggtgaacaggggctggcagaaggactcgaactgctggccggtatgctggagcgctttggtacacatttgcacccgcagcgtgaccgcagccgtaaggcggcgctggagtggctggcgggttcgcgcatgactgactctcttttcctgtacccggaagtagtcagggaagaggctgtgcgtactaccggggcgttgctgctgatagcgcagctgactgaaaatgagccggatgaaacacggccggaacttaatgcgctgtacggtgcgctggagaatcgtctgcagaaagccggcggtgtggatgccgtggtaccgcagaatgccagcgcaggagaaaaccctcctccggtgagtcacagcgatgtgccgtcaatcgggcgaatcacttcaggccaggatttgctggcccaggcccgcacactcactgaatacctccgagagcagcctgatggctggctgtcagcacaccatctgatgaaaagcctgcgccatgataccctgcgggccattcctgccccggatgcgcagggtcgtacccgcatcgaaccaccaagagcggaccagcgagctctgctcaaacgcctctacttgcaacagaactgggctgagatgctggaaacagcagacagcacgttttcccgcggtgccaatcacctgtggctggatctgcaatggtatatccatcaggcgctgacgaagtccggcaaggaggcgctggccgacatcattgccgctgacctgaaaggactgctggcccggttatccgggctcgaaacgcttgccttcagtgacggtaccccgtttgcggatgaagtgacgctgaactggatccagcaaagcgtgctggataccagtggcgggtggggtaatgacacagctttggcacggatgtccggcggcaacgatgacattctggcactggagccggaagcgatggccctggcggacagtgaaggcccggatatggcgctggcctggctacagaaccgccctggcgtcaccactgcccgacagcagtggctgttgcgcctgctgatggggcgtatcgcggagcagtacggaaaaaatgaactggcggtgcatctgtttgctgagctgggcgtgcgcgctggcgaggtcactctcactgagtgggagccagaactgctgtttgaagtccacgcccgccatctgaaactcctgcgcctgaaagccggtcgcagtgaggctgataaggcccgactaatacccataatggaccagttacttgccgggctgatcgctgtcgatcctgcccgcgccgccgtactttgcggttaa

SEQ ID NO: 142485 - DNA, 1191 bp, Enterobacter cloacae
atgcccattgaattaaaaaaaataccagagaaaataccgcttcctgaaccaccttcagcattccggtggtttattactattgtgctgatatccgtactggggggaatactggcgctttatttatggccggagaaaatgtctacgcattccgcatggttctggttttgcatttttgtcataccgctgtctactggattggcctgttatgcctttcggctacgcgcttatgaaaatgaacgtgatcgcgtgaactactggaatcatcttcatcaggagcagcatgatatacaagtgaagagaggacggcgtccggcaggcctactggggaaagcgtatatcactccgattgcctgtaataaactggcttccgccctcataaatcatggtagtcagttacaatcaacctattttgcccattttcagcaggccttcactacggcccgacttgagccttccacttcgcacttcctaaaggaaggctacagtataaggttaaccggatatatcacccagcttcttcgcatgctggagccggatttgtcggtgctacccgcagacagattgtctgttcgtctccgtcacgacgggtctctggataatatgcaaatcacacagatttggcaggcgatatttccggcgacatatcacatggattcaattgtggtagagcaagaaggcgatggcattatgtggctagatgctttgcttgaccagcatgaaaaggtgctgatgctttctgttgaaataaatttatttgttgatcccgtggattatcagtctgaatcggtatcggcactgttgttggcctctccggcgtggcttgttcaacatgatgttaaacctgaggtcgtcattcatcgtcccgtcatcgccacggaggatgtcagtaccctggaagatatgttgcgttggggaaagctgtctgcggaagaagcacatacgctctggcgatggcgggtcgataaaggggctatgacgcggttaattcagcagtcagaaaggcttggttattctccgggtcagaacgaaggttatatgccagatgatttatttggtaaccccggagcgtcattgggaaatattgcattgctctgtgcctgtgaatacgccatgacatctggtaaaccgcagtgggtaataatgtccgataaaaccacgcatcaggcgattgtgcgtcaggaagagtgttga

SEQ ID NO: 142486 - DNA, 258 bp, Enterobacter cloacae
atgcaaggagttattcgaattggtgatgccatatcaagtggtgggaaagtcttgcaaggcagcagtagcgttaaatttcagggaaaagaggtatcctgttttggcgataaagtatcatgttccgctcacggcataacgacgattgcggaaggtgatgagggttcaaaaatcaatggtaaaccgattgcacttcacggacatctctgcggttgtggttgctcactgatttgctctctccccaatgccggaaggcgttag

SEQ ID NO: 142487 - DNA, 330 bp, Enterobacter cloacae
atgaatgtaatagcgcgtatcattaatggtttttgttctgtaatcggtgtttttcttggtttgctgggatttttactcagtggtgtgatggcatcatttgttcccgaggtggcggcatttaccgcactcacaacacttcttccttttattattatattattgtctgtgataggtctttatggtgttatcaaaaacaacataaaaatacaaattgcatttgatatttgcttgttgcctgcatggtatatcggaacggttattggagggttatgcctgttaattttttatatttccaataaaaacagtatgctacaaaatagcgaagcgtaa

SEQ ID NO: 142488 - DNA, 219 bp, Enterobacter cloacae
gtggatgcctattacaggcacgctgtcatagttccagtagtcaattctatctatttttacactatcatcgcgatcgaatactcagaaagtattaataacgcgattaatgctatttatctcaagcacaccattattgtctccactaataaatgtctaccccgactacgggccgcatatgtcttctgggcttcgtcgaaacaattcacggtagaccaatga

SEQ ID NO: 142489 - DNA, 207 bp, Enterobacter cloacae
atgatagctcgaatggcttttttgctactgactccgctactgttgagcgcctgcgataatgatgcgtccacaaaacctgcgttggactcggggcaaaatcagcagcacagcgcggaattacagagcctgattcaccaggtagttgatgagggcttcggggcaatatatagcccggaaaaagattcagctcgacacccaaaaggatag

SEQ ID NO: 142490 - DNA, 987 bp, Enterobacter cloacae
atgaacaaatatggaatttggctattagctccgctaatgttgggcgcctgcgataataatgtaactacaaaaccagttgtgggctccgggcagaaccagcagcacagcgcggaattacagagcctgattcgtcaggtaaaagcaaatctggtgtttgtggaaggcggtaattttctgatgggcgacttcggagcaaaatacggcccagaaaagattcaactcgacgcccaaaaggacagtaaaccactgcataaggtgacgctgagcaactattccatcagtaaatttaaaaccaccaatcaggaatatcagctttacctgaaactaaataaactgtatttaagagaaaataataatccattaatgcaaaagcgaatggatgcgttaaataagttgcctgatacgccagcgcatatggactggtacgatgcggagaaatattgtgcctggctgggtaaggtgagcggtctgccgtttgccttaccaaccgaagcccagtgggagtatgcggctcgcaaccgggggcagttcattattgctggaaccaatagcggtgtactggagatggatgggatccagcgtggaattaatatttctggctcactggatcgtaaggagtttgcccggaagatggggcttagtactgaaatagatacagcaatgccagtggatcgttatccccccaacccactggggctctatgatatggcaggtaatgggtatgactggataaaggactggtatgatccagattattataagaattccccggttgttgatccccagggaccagaaaaaccggtatttaagcgtcgtgaggggatttacgatgcagaagaaaaatatcagaaggtgctgcgtggtgcgggaacttcaggtccctttaacggcttgacggtcgcccgttttaagcgcagccaggatacaaaagttacctttataacgacggttcgctgtgtcgttaacagtccacagccagtgaagtaa

SEQ ID NO: 142491 - DNA, 2328 bp, Enterobacter cloacae
atggatactaaagcgaatgctgaatgtcagctaagtaaatctgaaaataacattactcaagtctgtcatgaatcaggcgtgctctatttccgtcctgaaactgaagaaattattgttgtccctgcacaggatgcgggcgattttgaaactcactgtctggagatgatggggcatgttgatgaatttcatcaggcaaaccatgcttattcttccgcagtagagaaatatgggctgcaaagacagcaagctggtatagatattgactccctcattgcggaggttgttgccgcagaaactacgctggaaaaaaagcgggaagcgttgttggaaaaactcgcagagggagaaacaagtaatatgggatatcaggatgtggtggaactgctcccgttactcgatacccgcggaagggaaccaggtaatcagcgactggggcggcgttatgcttatgcccgccaaagctattattctgaacgttccggcgggcgttctcaggccggggctaaaaagaagtggcgtactgtctcgctgaagaataaggacacagcaaccggaaaagagagtatctatactgttgacggtcacggccgccgaaagattgataccaaaaagctgaaagagcagttgaccaaagagatattgcctacgataaaacttgaacttaaagattacgtcgatctgaatgactataatgtggatgaaacactgtttgactgggcggatagctggaataaaagtctggcggggagtcatgcctttgataatggcgtagatgtgtcgggggctgctcagttcatgcgttttgtttctaatatcggtgccgaggcagaatttaaccctaatgaagggagcgtcaaaattaagggtgaagcaaaagggactttaactgttgcatcaggtattggttgtgcagaattttttattcctgaccgactgggctgggagctgaaatatacgcctgaaaaagaggctgacagcaacactgctacacagactccgacaagttttaacatgggggtggtgcgaatatatattgaaaatcagctcattggttttgttggtgcgtcagcccaggtcgaggcccaacttcaggtcatggtaaaggataacgagcaacagattgttactggtcagccacggggacgactaccgcgctttcaggaacgtcagtcaggccgcagcagtcagttttaccagcagatgaaagaagaagatgaaggggcttcaattactgctaatgcctttgctggtgcgagtgcggagtattcgctaaagggcgccgttcaatggctaaagcccacgcctgcgccatctgcggatagtacggctatcaccaaaacggtaggggaatttaccgattttgctgctattggtgccagcattgggggtctggcggggattggtgcaggagctaaattcttgtgtacctttattaatggtaaattctgctttaaggttgctgccagcttgtgctgcggagtcggagcaaaaggggcgtttctttgtgaagtgggggggaaagccttgctggagtttggaagctggctggcctatcagctatttgccctggactatcgctttttagacctggtatttgaggacgcttttaaaacttttacccgaatatgtgtgatgcaactggctgatttaaaaaaagatatatatcaagtatataatgaattaatgtctgacgctggtgacgttgcagttgaatttaaaattttcatgttaaatttaattgatgataataaaataaatattgaggcttctaaaaaacgtaatcagttagccgcaaatattattgctaaaccggagcggctattaacctataccccggaggccaaggggattttactctatctgttgacccgccatggaaagtgggatcatgtcgatccagaaaaccgcagcagcttgctgttggatatctatcctgaacggaaagaggcaattattcaggtactctgtagcatccagacccggcgtgagtgggttaaggtgatgtgccatcgtagtaaagatggttctgatctggcgcagattggcgataagcaattggtggtaaaagagcaggaacaacagttacttgaatttcttcgggaaggctttaatcgtgaccaggatatgaaacgtagggccgctgaacttgcggcacaggagctatcagaaatctacctccgtctgaaaaccgggcaggaactctcctggggctatgcgctggcgatgaataacactcgctggtataacctgaaccgtgcgccgaatccccactttccgcagcgctgcgagtttggtcccagtgaagcgacgatgacgcgaatggcttaa

SEQ ID NO: 142492 - DNA, 804 bp, Enterobacter cloacae
atgctggatatgaatgcggctgtcgcccagttacagagtgcgctacagctggtcaccgctctggcacaaagtgccggaacttccggggcactggacgcggatatcccttcgcaacagcagcttgccctgacactgaatcaacttaaagaagccggattattattgtctgcgcccgcggggattggggtcactacgcctaaaaatattcaacttaccgcaggccacacccttacggccaccgcaggtgaaaatacggatatgacgattttcaaacggctgaccgttgcggcgggtgaagcaatcagcttatttgcccagaaaatgggcatgaagatcattgctgcagggggcaaagtagatattcaggcacagtctgatgctatgagacttcaggccgatcagcagatggccattaatagtgttaacggtgaaattgtattgaatgcggcagaaggaattatcctgaccagtaaaggcggtgcttatatcaaaatcaaagatggatctgtggaaattggagcgcccggaaaaatcgatctgaaaagtacaaatattctgtggggtggtggggcctctcttgaacaggcgctgaagcctgcaacagtaaaagatccgcagtatcaattccctgtaagcggtgggtttcaggttgtggacaaggtcactcaaaaacctaaaccttgggtggcatatcgaatagaaacgcctgagggcaaaattgtttgtggcaggactgacgaaaatggctatacgcaaaaacactatggtattgacccacagaatattaagctattttttgaataa

SEQ ID NO: 142493 - DNA, 150 bp, Enterobacter cloacae
atgacctttgaacagctcctggaagagtatttttttgcccgtctgctgcgccctaatacccagagctgctattgcacggcggtaaatcagtttacccactggcgcaacgcactgcccgccgaagtcacaccgcatagggtgctggagtag

SEQ ID NO: 142494 - DNA, 207 bp, Enterobacter cloacae
atgacaccactcgaaacactgcaatcagccatctctaacgtctctgtatggcgtcagggagacgtatgcgctccacataaaccgttgttgctactgtatgtgctgtcgcagtacaaagcaggccacccacgcctgttcaactacggcctggagatccacgaaccactcacttgcctgctgaaagaatttgccataaacgacgcatag

SEQ ID NO: 142495 - DNA, 1824 bp, Enterobacter cloacae
atgcctagtaattctactttcgattacaaaccacatttaaaatctgcttatattgacccaatcagaactgtgacagttatcgatgatgaatacccaaccattgatgatttaattctgagcagtaaggaagatttttcccaagaaaatatttatcggcttaaagagataattgatatcagtcgaagtgaagaatacaactggcttttagatgtttacaatggaaaagaaaaaaaggtccaagaaggaacagtatcgaaccgcctttatcacagtgatttattaattttagattatcatttagatggtgaggattctgggtattgtaaaaaatcgatagatattataaaaaacttatctgagaatcgtcattttaatattgttgcggtacataccaagggctatgatgggcaaaaaggttcagtcaatgaggtacttatcgatatcattacatcattacagaaaaggccagcaattagtattttaaatgagaaaattaaatccaaggtagacgatgttttagatgagtgggaaatcgatgaacctggaattagggacgagttaattgattctatatcaactatagatttattatttttaattcataagcatgaaactgaattatgctcagggaattttcagaacgaaatccttgatgttttccatggcatctacgaaggtagacctgataatataaacatacaaaaaccattaattctaaagtggattatttcaaaaaaacttgagaaatatgctgatcaattcaataataagacttccaaattttttgattggggaataaacaaaaattgtaactggataaaaacagaggacttatttattactgtccttggtaaaaaagacacaccgatcagtgaaataccaaatcaacttttagaagcattatcagactctaaaccacatccgcataaacttatcttatcaaagctccgaagtgagattgaaagtaatggtagttacgctgcaagcaacatactgaataagagattcttacaagccgcatggttaaaagaacttcttctaaacaaagacgataatgcaataaaaacagcagcatggcaagcagttactaaattgtgggaagaattagcatacgagattaaagttggtttagatcaatttacaatcaatctagtccaagatctaaaaaaaatcgactctcccctagactattttattgataagtctacacttgctgacgaattagaacaaatcaaacatgctaattgcttcagctgctctaaaaaaatcacttctcatcatttagtcaccggacatgttttagaatttaagaataatcactggttatgtttaactccgatgtgtgatcttgttccaggtcaaaaaagcggggataatttacttccggttacgctcgtgaagatgtatgatgcgaaagttgcattaaataacactcgccaatatatgcaaagagaacttaatttagatagtttaccaccaattgacgataatgaagccattaggcaaatcttgaattactcaactcaaaacaacctattattcattcaacctgaattggacggcaaaatacatattcttagttttaccgttggacttgatggtaaggcaaatcccaaagcaatggactgttatgtagaaaatcagggcatcttcactgaagcgaacacaataacacttaaatatgtcgagccaatggataataatatgaatgtaacatctgtggaagcaaaaatagttgcggagttacgttatgaatacgcattaaatttattgggtagacttggggtatccaaatctcgagtggggttagattttatcaattaa

SEQ ID NO: 142496 - DNA, 1224 bp, Enterobacter cloacae
ttggatggtaccctaaaaaacctatctttaggttctgtaccaaggaatttaggaagtatagagaaagattatcgtcaatatcgcgatttagagattgatgctaaaagtcttttaaagcaaattaataattctgtatattcagcacttgatcattttacagttaaggatgattattcaattgctgaaaaagactttcgtagcaaagcagccatattgcatgcaaaaataaggaaattctctagtaaaggacgaaatatattaaaagaagagactttacgttttgacgagataacaaacaatacaaataaagctttccatgaaaagacatctcagtatttatccgatctacaagaaaataggtcttcactcaagaaaacacttgagaatttagacctcgcttatcagattcaggatattgaaataaatcaaacctatgctccatatatcactgcattagaaagcttaagagaggaaattgatttagaaggcctcgctatatcttcagtaaacgaaaatactcgattaaagaaacaagtagaacaagttaacgcactcgctcaacttgggataactgtggagataattggtcatgaaatcgaagggttcgatatgactattgagcggggaataaatagattgtcatctacaaacctcgatgaataccaggaaaatgctttatcaagcattacccaagcacatcagtcattaagcgattcctggcgttttttaagtccgcttaaactatcaggtgataaggtaagagctttcttgagtggaaaagacatttttgattatgttaatcactttttcaaaagtaaattcgaaaaagattcaattgaattttcttgctctactaaattcttagatatttcactatacgatcaaccagccagaatttatcctgtgttcattaatttagtaaataattcacgatattgggttaaagaaactaaagaagaacgtcgtattattagattagatgtgcttgatggttttatttatgttagtgataatgggccaggagtcgatcctgatgatgtatcagagctttttactatatttttctccaaaaaacaaagaggtggccgtggggttggcctttatctttgtaaacaaaatttagcggtgggtggccatagtattttctacgaaacaagagcagataaaaaaatgcttaacggtgccaatttcgtaattaattttaaagggattaaaaatgcctag

SEQ ID NO: 142497 - DNA, 186 bp, Enterobacter cloacae
atggatttaaatctcctgacagaactaaaaaatgcctcaccttccgcttatggtgtgcttatcattgcatttgtactttgcactctagcccggcaggggtgtttgtcccgtttgtcatcccgtcaatccttttgtttattgatgacggcaattagcctcattggcataaaatcgtttctgctttaa

SEQ ID NO: 142498 - DNA, 942 bp, Enterobacter cloacae
atgctctcagaattagcattcaatgatgatgtcattgatctcccgcctccagagaaagaacagctacgcaaacatgctcgttttctcagaaatcactgtaatgttcctcttggtcatgctcaggaaatggttgcctggttttaccatttcaaaagctggagtgatctgaccgcccggcatagtcaaacgacagatattatcgccgagaataaaatagcagaagtgcgagaatctctgcaattgcatagaaacaacatatctgttgcggagttggcagagctttcagctctcaatgcgatgccgggaacactaaccgaagctgtggtgagcaatcgcatcgctcagcttaaccagcatgatctcattttgctttaccgctatatttatgacgaagagtattggggaacagccgtacctgtatcctggtctaaaggtttacgaagagcggaccgttgcctaattttattggctaagacaataggcgaaaaaggcaaagccagcagaattaatccacatctatatttcccgtggtttggcctgcgtatgtatggttacttagaggttaatggagccgagctaaattatgattgcacggaactggatagctactttttccccacaattgatcgactcgatgcattatttcgtagggaatggtttgtaccatattttattggatttgctagctatctcttacagacgttggaactatccggctatgtaggccgcttgtcatttggaagagttcataatgaaggtttgattgaaaaagcgatcagcggagtaaatggtaagcaatttcattacacaagatacagtcttaatggtaatgaattaactgacgggccgattgaaaaattggttgaagaactgcttgcaatgggagggcgtatcaacccaaccctgcaacgtattgaatttagttttggtaaggaggtttga

SEQ ID NO: 142499 - DNA, 444 bp, Enterobacter cloacae
atggaatgctatcagtgctaccgggttattcgcccggccactgctctgattaagctgctggcgctgtggctacaggccagaagtcagggagcggatgagggtaacaaagctgcgctgcccctaatatggaccgagcacctgatgtacacctcgttactggtaattatgttcacctgcgtgccactgctgaacatcgacctcgataccatcaaatacgacaccacgcgctcaaagcagtgcggaatgtcagtaccacaacccgccaatatcggctatcaaccgattataaactcgctgggcggtaaaaccgccgccgtcttggtctggtctggtctggtctggtctggtctggtggtactttattcatgtgttcagcaaaaacatcaccagcgcaacggtcgctaccctcccctgccagccagacctacgtcagatccgctttga

SEQ ID NO: 142500 - DNA, 237 bp, Enterobacter cloacae
gtgctctataatagcgatacctacagtagctggaatctggccgggatcaagaatacgcaggatgatgtgattattaatttggtgatgaggtcgatgtttctggtgttgccgatgttctggctaggggcaatggcgtgggctggagtgagggttgatgtggcggtgaatggcgctctggcgggtggggttaaggtggcgcaggacagtggggggaaggtatgggggaaaataacataa

SEQ ID NO: 142501 - DNA, 1731 bp, Enterobacter cloacae
atgccagataataacatattgaaagaatttttcaagtctctaaatgaacaggaaaagccatttcttcagcttttaaaagatgatcggctaggtatgattttacgttcagctgtaaacgaactaaatttaatgtattataaaaatcatagcgaatacaacgcgacatttagtcaggaagaatattattatatatttaaactgggagtttctcgattaattaaattagcacttgaagcgagaacctcgtttgaaacccctgctataatgtttctacaacgctcagaaataagcgctgaaacacataatattgtaagaggcttaggaatggttgaacatggcagaagagttgcgcagtcagtttattccggccatactaaaatagataaaacaggggggaatgagtttaaaataatcataccatcaacacttgtggatgaagaaagccatgaaaaacacatatctaatcattataaagatcaatacagacaaaatttcattgaaatttataagtcaaaattcatggaaaaattcaaagtagatgtcgacaataagttgtttgatttggtttatccatatgaaactcattttatagggtacgaatccgcacctattctagatgaattcttttttgggctcacctattcagagcttttcactcaagatggatttgacacttttcactattccgtaaaatttggaggaatagagtttcaaaaatataaattagctatcggatttataatgtcggtaattgaaaaacatttaaggttttcagaaaaactcacaataaaagattccacaataaagttagagaatattctaacagtttcagcaaatacagacgaatttatagaaagcatgtgtgatgcaattaattactttggatcattacaaaaaggatacactcagcttgaattaaaagacgcacgtaaaatttttgaagtgatttcttataacagaagaaatatcaaattattagacaaccccggagcggagctaccgatgctgattcaaagctctgatgaaagttttttcttctgtattgcagcaagatatagctcaccgttacaataccttcatgactccttaagattccattttagtaaggattatgataagcagcaacaatcacgagaaaaagtattacaaagagcaataaaaggtactttgaacaaaaatttcagcaacttacaataccaagaaaatataaagataaaagagaatggtaaaacattaactgatatagacttggttgttgtcgaaaaaaacacagggatagtttttctttgtcaattaaaacatcaagaactttatggtgctgatctacacgcgaaatatgttcgaaccaccagattaaaaaaacaagcatcggattggcttacttcgattaacaattggttaaacagaataacggaaatagaacttagaaagtcgttgcaaatcaccaagcatgtaccaaaattaaaaatatataaattattcataacaaaacattatgcctatccactcaaagagttatcagatgaagatacagcgtattgtaactgggcgcagtttatttatgcaattcaacttatcgacgatgataaggaggaaaaaaaagatagtatttcatctttaatccttaaattaaaaactttaaaccaaggagctaacattgaatatcttcatgagcctacatcgaaatggatgataaaaaatttaactttcagtttagaacaagaaagataa

SEQ ID NO: 142502 - DNA, 1197 bp, Enterobacter cloacae
atgaaggcaattgacttatttgcgggggctggagggtttagtttatccgcccacaatacaggcgctatagatgttgttgctgctattgaattcgatagcgcggctgcaaatacctacagaaaaaatatgttagaaaggcttgagcataagaccgaacttttacaggaagatatattactcgtaggcccaaaaaagttaagaaaaaaaataaagctcaagaaaggtgagcttgatatgatacttggtgggcctccgtgccaaggtttttccagccatcgaattaatgatgcaggtgttgacgatcctagaaacaaattacttttaaggtatttcgattttgtttgtgaatttaagccaaaagcttttttggtagaaaatgtctccggcttgctatggaagagacatgaaactcatttgaaacgctttaagtttttggcttccaaaaatggttatactttaattcattgcgatgtattaaatgctcgtgactatggtgttccacaaaatcgcaaacgagttttcattgcaggtgtcagaaatgacattttaaaaaaaagaaataatattgagtttccacctcaagcgactcatttcaaccctaattctaatgaagtaaaaaacagttcaaaaaatacgtggagaaccgcatcctctgtttttgaaaagatgaatgatagcttaattcaaagatatatatcagaatactttcttaaacatacttcttactcatttgatgaagcacaagagctacttgaaaccctagaatatcaagacgcaccaataagcgaaaaagatccatgcaatatacacatgataccaactgagcgtatggaagagcgtttcaaagcaacaaaactcaatggtagtagaagcgatgcaggaaaagaattcgagctaaaatgtcattccaatggatacgcaggccacaaagatgtttatgggcgcataatgattcacctcccagccaatacaattacaactgggtgcaataatccatctaagggaagattcattcatccatgggaaaatcatggcattactttaaggcatgcggcaagattgcaaacattccctgatgactacattttttggggtaatgcgacagagcaagcaagacagattggtaacgcagttccccctatgttaggcacaatattaataaatgcattacttaacataattgcacccaatggataa

SEQ ID NO: 142503 - DNA, 129 bp, Enterobacter cloacae
atgcgtaccatcgtggaaatgaagctcgctcaggtgagcaagcgcctgcatcgtcatgacggcttgtccacgaaaattgaagagagcctgtatgacgctctgactgctgccggataccggcgtgcgtaa

SEQ ID NO: 142504 - DNA, 177 bp, Enterobacter cloacae
gtgcgtaacgtcgacagcctgctcaatcaacaaattctgccggtgctgagtcagcagttgctgagacacatggctgcgaagcagaaatccgcttccctgactctgggatggagtgagaaagagggcatcgggctagagtttgatgtgcgctctggctctgtaatagagggggagtga

SEQ ID NO: 142505 - DNA, 642 bp, Enterobacter cloacae
atggacagcgcaaaagagattgccagagatatgcttgaggccattaatatcgatgggtccggtttttggggggcaataggaaaagggtttatttcatttccagtcagtcttgcctatctggggtatgatttcattgatactgagcatcgcagagataatctggatgataagttcaggctggcgcgattagttaaaaagggtgtatttaatcatcaggttattgagcaaatcattaagacctctctcgaagattttattccacgcattcacgccgaaaagatatcttctatcgtgaaaaatgtttccggttcgtttatggggaaaatggcgtttactgaactaacgggggtaaagctgggcgaagcaatagtatccagaggtgtatcagccttttttgcaggaagtttggcgggcttattgttatctgttggtgctgaaacatccagagcaatttatacatcaagagacctcgaagacagaaatcctgttttgcacaataaactccaatgtcggggtgacctggatcttctttattttattgtcgaagatatcgttaagccttttgatacagcttgtgaaataggagacagaaatcctgccgagtttgataaagtatgcgaatacttttttggaggcttatga

SEQ ID NO: 142506 - DNA, 213 bp, Enterobacter cloacae
atgaaaatcaaggtgattcttctggcaatcctttcccgattaattcgcggggcagggatggggctgggtgtttctggtattgcatttactatttggttttttttcttatcttcaagcgaatccagatacatctggggtatgttttcgatagcagaattttttgcaggctatcttatatatcggtttgcttatacatatgtttatgatgaataa

SEQ ID NO: 142507 - DNA, 1626 bp, Enterobacter cloacae
atgctaacttatttaatttctttgccaagaccggtaaaacggattataacactctctattgatgttgttctgttaatgtgcgcattctggtttgcattttgggtccgtattgactctatgacgccattaactagcgtatcacattggctattacttacatcagtaattgtcattactttggcaatattcgttaaactgggtctttatcgggcagtaatacgttatataacagcgaaaatactacttgttgtagctgttgggatgatgacttcatcgttgctactgattatcgccgccttttatactaatttatatctcccaaggacaattccgttcatttacttctcgtttggcgtcttgctcattgccggctcacgtcttggaatgagaatgttgataaaccgcggtttaaaattaggcactcgagtaattatatatggggccggagcttccggacgccagttacttcccgccttgagtcagatggacgaatactatcctgttgcgtttgtcgacgacaatcgctccttgcagggtcaggtcatccatggagtaagcgtattttcaccagaaaaattagcatggctgattgataagtatgaggcgaagaaaatcctgctggcaatgccaagtgcaagccgcgcgagaaaaaacgaggtaatatccaccctggaggggctcccttgcgaggtactttcaattccggggatggttgacctggttgaaggaaaagcaagaatcgattccttgcgtaaagttgtgattaccgaccttctgggccgcgatcctgtttctccaatccctgagttagtatcaaagaatattcagggtaaaacagtcatggtaactggcgcaggtggctcgatcggttctgagttatgccgacaaatcatcagaaataggccttctcaactaattcttttcgaattatcagagttctcactatattctattgattctgaactccgaaatttaattgtatcgaaatcgctcaatattaagatttacccaatcctggggaatgttcagaatatggaacatcttgaaaggctaattaaggcattcaacgttgagacgatttaccatgctgcagcctataagcacgttccgctagttgaattcaacgtaattgacggtgtccgaaataatatcttcggaacctggagttgtgctcaagctgcggaaaattgtggcgtcgaaagttttgttctgatctctacggataaagctgtgcggccaacaaacactatgggtgcaacgaagcgtatggcggagctcatccttcaggcgcgagcatcagagtcccgtaaaacctgtttcagtatggtcaggttcggaaatgtcttaggttcgtccggttccgttgttccattgtttgaaaagcagattgctgcaggtggcccggtaacgttaacgcatcctgatatcactcgttatttcatgaccattcctgaggctgcacagcttgtgattcaagctggagcaatgggcagcggaggggatgtcttcgtgctggatatgggtgagcggttatcctgtacaaaattacctttaattcctgcatcttcgtatttttctttatgccaggcttcaaggaaaaaaccacgggtatcaccaaaaacctga

SEQ ID NO: 142508 - DNA, 561 bp, Enterobacter cloacae
atgtatgacctgattattgtaggcgctggtggtcatggacgtacgctgtatgatacggctaaacttttagggtatgaaaatattgccttcctcgatgataatgaattgtgctctgacatggcagaaattcgtgttatcgggaaaacctccgagcttaagctctatgcgagcactgccaaatatattgttattgggattggcaacaataagcttagagagttgttccatcagcagctttactccttaaacattacccctataacgctcgttcacccttttacattcgtgagtccttccgctactttggggaacggcagtgtagttttagccggtgccgttattggcgcaaactcagtcttggggcagggaacgatagttaattgtcattcaacggtggatcatgattctactcttggtgattttgcgcacttaggtgtgggtgtgcatcttgctgggggagcgaatatcggtaaatcggcatttctccaggcgggaacagtgggtggatatagtgctacagtggacgagcatgtcatatgccctcctggtactattttataa

SEQ ID NO: 142509 - DNA, 1035 bp, Enterobacter cloacae
atgttgtatctggagattatcgtttttgcattctgtttatcatgtgcattgacctggggattaagattatacgccatcaagaataatgtgatcgatcagccaaaccaacgaagctcacacagtgtgccaacgccacgtgggggaggggtagctatagtattaacattgttagctacattagtttggctggtattcaccagccatctctctctggagacatttttaggtttcttcgtgccgggggtattgattgctgttattggtttccttgacgatcatggccatattgcagcacgttggcgtctgctaatgcattttttagctgcagcaatagggctctatttcttagactcgttccctgaaattgatatgtttggctatgtcgtgtccttgccatggattggaatgattctcggaagcgtctatttagtgtggatgcttaatctctataactttatggatggcattaatggtcttgcaagtgcgcaagctattaccttttcgctgtgcagcgtcgcgttgataacgctcaatcactactctggctcctctgatgcgatggcgatgattgcaatggcgctcgctggggctgcggtgggattcattgtctggaacttcccagtggcgaggatctttatgggggatgccggaagtggatttttaggcattaccattggcctgatgattctttattttgctaagctagatccccatgttttgatcgcggaactctgcctgcttggtattttcattgttgacgcaaccacaaccttgcttcgaagattactcgcgggaaaaaaggtatacgaagcacatgcaagccattgctaccaaatacttgcccggaaatataagagtcatgtgccagttactttggcagcgatcgcaatcaatatcatttggttattccccattgcatacctaatcatttcggcaaaaattgacggaatcacaggcctaatcattgcatggttaccgttgatttttattgctttcaaatgtggtgctggagtcaaagataaagagaacacataa

SEQ ID NO: 142510 - DNA, 945 bp, Enterobacter cloacae
atgaaagttttagtgacaggggggactggttttctcggtgctactttagtcaatacgctgagagcagcaggtcatcaggtaatatctactacgcgtcgagaagagaataccgagcagggtatgtacaaccttggagatatctctgcgcaaactgattggagcacaattttacaaggttgtgataccgtcattcatacagctggcagagcacatatccttaatgatgacgccaaagatgcgctgaccgaatttcgtcgtgtaaaccatgatgcgacaatgaaattagcgaatgacgctgcaaactgtggcataaaacatttcatcttcatcagttcaataggtgttaatggcaattccacttcagggatgcctttcagtgaattgacaccggccaagcccacgtccgattatgctatatctaagctcgaagccgaggaaagtcttctcaagacattttcagggagtgcaatggctataaccattgtccgcccggcattgatctgtggtccaaatgctcctggcaatattcaacgcttattaaaactagtatctcgaaatcttccattaccatttaaatcagtaaaaaacaaacgtgctctggtttctttagacaacgtagtcagctttgtcagcgaatgtgttacgaatgaaaaagcaaagaatcagctctatctattagccgaccaggaacatccttcgaccggagaaatgataaaagccttctcaaccgggatggggatgaaaggtcggatggtttattttcccaagagtatattgaaagtattgctttcagtattaggtaaaaaaaatatctatgatcaactctttggcgatctggaagtagattcaaagaaatcaagagagcaacttcagtggacgccacctgttacattgcaagaaacgatggtaaaaacagcaaagaattttattgaaggtaacaaataa

SEQ ID NO: 142511 - DNA, 363 bp, Enterobacter cloacae
atgagttttagtctgccggggtttaacttgttctacctttcaagggataaccttgaaccagagaagtatgaactgataacccgtccttctgttacatgggattacatcaggcaggaatacgagttcgatgacagatatcgcgatcattatcacgttgaagggctaagacctcgcccgtcatattcacgtagctatgcttaccaaaacaatcatacctatgggttcaatactgaaagacgcctgagataccttgtcttcagaggtgaaatcgtgatgttagaccgctatggttcccctggagagcttttctatatcgacgaccaaggtcagcttatctgtaagaagtaccaggcgtttaaatga

SEQ ID NO: 142512 - DNA, 783 bp, Enterobacter cloacae
atgaatggtgctgaacagatcctgaaagaatacaggagttctgtaggatgcaggtactactgttcaggaaagccccgcccaacttcgtttttactatctttctccggtggaacatcagcaccagcttctgagccgacataccagacgattaacagcaaggccgcaggacgcctactggcggctggcggtgtctacaatggtaatgttgagggcttcaggaaaacagcagagcagttaggtggagacgctgttaagggatatgatcaagtactgaatgagcaaacagcaggtacagctattgcggcggcttccattctgttagcgaaacgacctaacccacaactatatgatgaaatgacaagctatctggggaaactcagaggtgaatccagattagttaatggaattacagttaccgatattaattatactaaaagaaatccagcagaagcagcattattaagaaaagaattcgatagcacagtaagaaagaaatttgttaaagaaattgctgctactcctgatgcagctaatattttttcaccatcacagttacttaggatgaatagtgggaagtctccagatggatgggatgttcaccacaaacttccattagatgatggtggtactaattcttttaagaacttagtgttaatcgaaaaggaaccatttcataagatttttacaaacatgcagaggtcagcagttaaaaatttagtaccaggggaaagtagagtaacaccgtgggcaatacctactggttcaatttacccacttaaataa

SEQ ID NO: 142513 - DNA, 495 bp, Enterobacter cloacae
atgaaaatagaaaacattcttgcagaactgaaaagtgaaatgattaagtgggagtatccagttcaagacccaattgggaaatcatttcttaatagtattttgaacagaaaacctgattcaactacaacaccaatgttagaaaatttagtagacgaactgtgtgttttattttccaaccaacccgactacatcacatttttagagtatatggacggatttgaatatgacggtcttactctattcagtttgtctacccctgaaccattagttaaaaatctatttgtaatgaatgatttctatagagataatgaagattttatagatcctgatcttgcagaaagattagtaataggtgaaaatagcatatcattattcacatatgacactaaatccaatctatttgaaattagggataatatatctacagaaagtgtatttggatcatttgacaatttctatgattttctaaaagaaatacttgaagcagtcaagtaa

SEQ ID NO: 142514 - DNA, 681 bp, Enterobacter cloacae
atgcaatccattacaaatgaaaaagacaattcattacaaaacaatcacttccaaaaaaatatcgattattttgccgcaatattaggtgaagaagtttataaacaatcagctccaacagagaaacaattaactatattaagtgaagcatataagcaaacgctggatacaagaaaatttgagattgaattatactggaaaagggctacttttatgtggcctgtaaatggagcattacttgttcttattggtatatttgcaaaactattttatgatgccccacttgagaagcggacagaatactttttagcaatatcagttatttctttattaggatacctgatttccatgattagtagtggtatttctcaaagcgggaagtactggcaagaaaactgggagtaccatttagatatgcttgagcctttcttttgtggacatctttttaaaactcatatttcacgccgccctcagccatattcaatatctgaattacaagatacagtcaatctaatattgatattgttatgggttcttattcttacttcttcagcaacccaaacaccattctctacctggcagcaacttacagttttagtattttcttttatattgattacctacaagttaaaatacaaccctttcagcaagaaaaaatggaacataaagcagagagaggtatag

SEQ ID NO: 142515 - DNA, 129 bp, Enterobacter cloacae
atgtctaacttctacaagttagctctcaagcatagggtgggaaataacaaagttttttttaaccgcagttattgctttgataacattaaatattgtatggctaataatagtaatgtactaatactatga

SEQ ID NO: 142516 - DNA, 1077 bp, Enterobacter cloacae
atgcaacggaagataagagttgagtcagttaacctcaatgctaaatgctgggttgtgcgcccggggacgcgttataagtttgctaaagagtttatttcagaaagttttgttgcaataggccatttagatggatatttgtttggagagaaaagggaaatttcatctgctcaagatcttcaaacaattgatgaagtcattaactcccctaggtttacaagaaatgtaaagtcgcaagtgcttaattttatagatgatatgaacgttggagatgtcattttcacaatgacatccaatcagatcattcctggtgttattaagtctgaagcatattttgatcctactactattagattccaacaaaacactgacgaaacattttcaattagaagagatgttgagtggggctctataatagacagaaaggatgttcctctcacaatttctagaagttttcttgcataccaggccgtattctcattaggtgattactcaacagaggttttccactggctttcttcattctttattaatgaagatggttactatagtagtttgaggatcgagcagaaagattcaatcaatcatcatgctttaaaaacattatccgaagtaattgataggattcaagtaatatcattattagctgaaaatagcgaattgaacgatgatatttctcttgagtatctgcaagagcaaatggaaaagatgtatgaagaaggtaagctaactcttactgctcaacaaatgttgatgtctcctggggatttctggcttggattaaagacaaaatcaaaaagatctggtgtaatattcttgttgctaatggcaatgattgttggagaaatagacaatgttgcattcgcaagtgaagcttataaagcagaggttccagtagcacaggctataatcgcgaaacattcagatgttattatgaaagggattaatattgataaaatgaaatcccagttaatgcttgaaactaaaaagcagaacaacaaattcgttgaggcaaatcccaatgattatgatgaaggagatattcctaaggatatcgatcctcctatagtgagtaattaa

SEQ ID NO: 142517 - DNA, 675 bp, Enterobacter cloacae
atgtttatgacaataatagaggttgttgcatttattatattatccctaggggctattttcataataggaatattgtgttcaaattcagtaaattcaaattcagctagaaaaatttcagctgatgatttcaataagatagctgtggcgcttggtgctattgcgactgttgcatggggtttgttcacctacggggcattagaacaaagagataaggccaaagctgagcttattgatttaaagaaccgcataaaagatacagaatcaacctcatttgaagttgaagctccgtttataaaaggtgatggttttttttatattacaccgactgtgacagtaaaaaataatagcaataccgctatatatgttaagcttgaccaagactcattatctgtaacgagagtggttgctaagggagatcaacctatccccttagaaacattcaatccaattttttatcaaacaattactaaagacggtaaagcccctctttcaaatataacaattcctataggtgcagagcgtaaatttaattaccttgtgcaaacaaactatcctggtatgtattacattacattcacagctagtgcaatggacagtagtggtaatcttatcaataaaacatatgatgggaagccagtgaagtggttctcatcagcttatgtttatcttaaataa

SEQ ID NO: 142518 - DNA, 339 bp, Enterobacter cloacae
atgattcgttttccgaccaccaatgttaaaggccggacacacaatggtgtgctgctttataaacattattcggaactccagccggggaaacgctatcgcttcagccttcaggctcgcagggacaatgactataaggtgatacccgaactgtcactgcgggtggcaggccaggatattacctcggttacagcacttgccgtgaaaggcgagtgggtcacgctgtcaggtgagtttacggcggcacagggcgataatgtgctggaaattttcagccataaagccagcggcgatggtaacgatttcagcataactggaatcacagtaaaatcagacgattga

SEQ ID NO: 142519 - DNA, 1473 bp, Enterobacter cloacae
atgaaagcaaaattttttttctttacctctgtatttttgttaccccctgcattttctgacgaaaaacagcaatgcgatttcctctggggcactgcatcctcctcatatcaagttgagggtggttggaatgaaggtggaaagggcccttcaaattgggattactttacccataatgaagtgaccaaatatattattggtaccgctgaaaatggcgatgtcgcggctaatcaaatttcacgtgatgtttatcttaaagatatacaactcatgaaggaattaggagtaaattcataccgcttctccatttcctggtctcgaataatgccagatggagttacagtaaatcagaaggggttggcttattataatcaactgattgctgatttaaaagatgccaatattgagcctgtcattacactttaccactgggatatgccattagcgctgtatgaaaaaggtagttggtctaatcctgaatcacctgtctggttcgaaaaatatgctgaagtaatttttaagaactttggtaataaagctcatgatttcatcacctttaatgagcctgaaggttatgtttttactctggaacctcttgctgagaatctcattgcaaaaaaaacggacggatatcgtgacgttttgtctgcagcttcacgcggaaagcaagcggtagcactgcataatcttttgattgcgaatgcgttagtggtacgtaattaccataaggcgaaatatgatggtcgcgttggtattgctttaaacttatctccatgcatcgacagtggtcaaccaaacagtcctactgaacagttatgtaacgatctccataataactggatcctggatgcgctttataaggggaaatatccagatacagtattgaaaatgtatcagtctgcatatcctcaattcaagcctacctctcaggatatgcaacttattacccaaggcaaacctgattttatcggcgtaaattattatggccctacgttggtcaagcatgataaaactgaagcgtttgaaatagggaatgctcctaatcctgataaaaaaccctctgtcaacggtccggtttctccagaagcattggttacgatgatggaaaagatcgatgctaaatacgcccatcctacctttattattactgagaatggggctggttttggtccagatgatgaaaaacttaaagacggcgtcatttctgataagttgagagccgactatctcgttagacatgtgtctgcaattatggaagcaaaaaaggatggcctggatatccagggctatcttttctggagtttactcgataatttcgaatggctctggggctacaaaaataggtttggcataattggtgttgattttgaagataagacattaagacgaacgccaaagttaagttattataattatcaagaaatcattaaagaatataaaaataaaaactcatgtgtctcatcgacgaaaaaataa

SEQ ID NO: 142520 - DNA, 981 bp, Enterobacter cloacae
atgacgcagaacaactatagccaggtcaaccgaagcaatgacccggagcaaattgatttaattgatttagtgttgcaagtatggcgtgggaagtggactgtagtagcttttgtcgctctatttgtcgtgcttgcggggatttatattacggttgcaaaagagaaatggacatcatccgccatcatcgctcaacctgatgcggctcagattgctacttactcaaatgcattaaatatcctttatggcagcgcagctcctgctatgctcgatattcaaacgcgagcaattggacgttttaattcctcattctcagctttagcacaggctctaggaaatcaggaacaacctgagaaactgtccatcgggcctacagtcaaaaatcaagaattgcccctgactgtgacttatgtcgcggagtccgctgaagctgctcaaaagcaactagcacagtacatccagcaggttgatgagcaaactgcaaaagaactttccgttgatcttaaagacaatatcaaagagcagattaaaaccctgaacgactctctagagaaccaggagaaggtcgctcaagagcaaaaagatctgcgcattaaacagattacggaagcgctgaagaacgcagaggcagcgaaaatcacctctccgcaaattcagcaaactcaggacgtgacgcaggaaactatgttcctgcttggcagcgaagcgctgaagtcaatgattgaaaacgaagcgtctcgtccgttggtgttctcaggtgcgtactatcagactaagcaaaatttgctggatatcgaaaaactgaatgtgaaccctgacacaatccacgtatatcgctatgttatgaaaccggatcttccagtccgacgtgacagcccgaaaaaggcaattattttaactttggcagtcctgcttggcgggattattggttcgggtttggttctcggccgcaacgcattgcggaactacaaaccaaaagcgtga

SEQ ID NO: 142521 - DNA, 963 bp, Enterobacter cloacae
atgacttactctgtttcgccgtcatcactactcaccgagtacggcaacgacaacatatgccgtgttctcgcacttgatggtggcggtgcaaagggcttttatacactgggtgtcctcaaggaaattgaggctatgcttgggtgcccattatataagaggtttgatcttgtatttggtactagcaccggtgcgattattgccgcgctcatcgctctaggatacgaagtagatcaaatacacgcactgtacaccgaacatgtaccacgagttatgtccagccggtcggctgcggcaagaacaatggcgctccaggatttggctaaggaagtttttcaagacaagacattcgaagatgttctgatgggtattggcatcgtcgcaactcgatggatgaccgaaagaccaatgatcttcaaaggtaatgttgtgcaggcccatggtcgcaagggaaccttcagtccaggattcggggtcagcatcgctgatgcagtgcaagcgtcttgctcggcttatccgttcttcgaaaggaaagtgattgttaccgcagcaggagataaggttgagttgatcgatggaggttactgcgcaaacaaccccaccttgtttgcaatcgccgacgccactgtcgctctgaaaaaagatcacaaggatatccgggttataaatgtcggtgttggtatctatccagaacctaaaccaggtctccttatgcggattgctaagaaatggctcgcagtccagctgcttcaaaaaactttagagatcaatacacaatcgatggatcaactacgcgacattctattcaaagatattccgacgattcggatcagcgacacattcgaacggcctgagatggcgacagatttacttgagtacaatttagataaactgaatacccttcgacagcgtggtagggagtcttttggagctcgtgaggcacaattaagagagtttctgatatga

SEQ ID NO: 142522 - DNA, 894 bp, Enterobacter cloacae
atgggaatacctgaatcacagctcgatacatggtcccaccaaggatctattgcacagtctgcctcgacttatagcattataaagaatgcattagagagcgcaaacactaagtatcatggaaagaattttaaagtattccttcagggctcctatggaaacgatactaacatttatgctgaaagtgacgttgatgtagtcatatgtcttgatgatgtctactacagtgacctcacacagttatcaccagaagacaaagaggcgtatgaccgtgcatttgttcctgcaacctactcgtatactcaatttaagcaagatgtgcttgaggctcttacagagcgcttcgggtctgatgttaaggtcggagataaggccatagttgtagcggcaaatggaagtaggcgcaaagctgacgttatcgcatcaatgcagtttcgtcgttattggaaattcaaggggcattacgactcacaatacgatgagggcatctgtttctttaatggcgctggtgaacggattgccaattaccccaagcagcattcagaaaatctcaccttaaaacatcaggccagtaataaatggctaaagcccatggttcgcgtactgaagaaccttcgaagtaaactcattgctgacggaaaattgaagccaggacttgcaccttcctattaccttgaaggtctactctacaacgtgccaaatgaaaagtttggcaccagttatgctgattgttttgtcaatgccatgaattggattcagacagaagcagataaagacaagctgctatgcgccaatgaacagtattacttgctttgggaggggacacatacctcatgggagaaagccgatgcggaagcgtttatcgacgctgcaataaaaatgtggaatgaatggtga

SEQ ID NO: 142523 - DNA, 1746 bp, Enterobacter cloacae
gtggcaggtagcatcatcaacctttttatgtggggatatcaggacagctacagaattcacatccagattctggcacgtaatgtactgaaaaaattgggtgcaccggctgatgcagaagtgctacttgttggtgctcgccgccctggcagtaaaaatgcgaatccgatatgcgtagagccagaagatggtaagtggcatctatctttgtttgaaggattgctggattcagttgaatcgatttacaagaatcatcggttacagagtatgatttttggtgatgggccaagcatgcgcgacaagccagagtggatacgtcgcgactcagtgcgaacatcggttagtaaggcactcgaagcttttgataccgagcataacgtaacgtcattttgcggagagtctaggcgaatagacgactattatgtcaccccagtcatacagattccaaacgacactttcgagaaattccctcctttgctctccaagtctgttgacgaaagccaacaaggacatggatttcgcagtctgatacatgcagcgatgtatgcggttcttcgtgaggctaccgaggaattgcataaccctgatccaggacgatttatccaaggcagtatgagagatgccgaggaaataatacggattgctgcaaaggactttctgcacaccgcaggcctctcgatcgaacgaagatacattcatactgatcttttcgatgctttgaaccttgtctcctctcttatgtacgagggggcgaaaggcataggtcagctcattctcgtcgatccagataacgaggcggttgagttcttggcgaagtttgttgagccagttccctttcgtgagccacgatgggttcggaaagtcttgcagatggcggcatcaggtgtcggcattatcgcaaatagtcagtacatctatggacttgggagactgaaggagtcgcacgatcccagggcacaagatgcgttcacggtagattttatagatcattatcactggcagttgtactgcggtaaccaagcactgctactcagtcaatatgctgtgcccaaacttccacaggagccttttgacaaagctgccttcctggcaaattacgcgagactatttccgttgtcttcacaagatagtggattgcacttgtggaaccttctgatgacccaaaccagtcaggggcatgggagcatgattgtcgttgcggaagatgcggcctgcgaggcgaatcgactttgcaagcaaggtactagaatcgtgccaactaggctcactgaatcactccttcgaagtgtcagcggtattgatggcacaatactgcttgatcctgctggtctttgccatgctatcgggattattctcgacggtgaagcgaccgatgagtgtacgccatcaaggggatctcggtataattccggagtgcgttacgtacaaacgagcggcactcgaaggcttgcgatcgtcgtgtcggatgatcgaacagtcgatatcattcctcaaatcaagcgactgtgcagtcgttcaaaaatagaacaatgtgtcgtaacactggaggcggcaacgctcgacaactatcatgattctcggaattggttaaacgaccatcgcttctatatcaacgctgagcaatgcgctcgaattaatgccgtactcgacaaactagatgccgttccaaaagaagtaggtcttatctattttgaaactgagagatttgaagttgacccagagatggacgaaagctatctcatagactga

SEQ ID NO: 142524 - DNA, 669 bp, Enterobacter cloacae
gtgacagagcaagtcgattatcagattgaaaaatacaaatttaccgaggcgaatgaacctccgcgtcttacccgtcagtgggccgacgttttaagcgagtgcaaggcaatccaggccggggccgaggcgcgtctgcgtattgccctgaccaatgtcgattacgttaccagctttgagctgcctttccgcctgctgctcgtgcggacacctcagttaattgccggcttgcgtgatgaactgcagctcagccagaagaatgtcatttttaacgggaaacggtttggctgtgtctggagcgtgaagtccgatttgagcgatgtacctgatgtttttcaatatcatctgttcacacgtatacggcgaacggaagcgacacaattgaccgcggaaccttttctgcagatagccaaagaaattaagccccccacggaacgtctgaagcgtgctctgttaagtggtctggaggtaaccgcactcgatgcgctgttttggtttgggatccagcggattgctgctgaggtgtcgcgtctgagaaaggccggaatgagaattaccactgcggaaaaacaggtatttgataatcttaccggaaccactcgccttgtgccggtgtatcggcgcgccgatgagagcatggtgtcctctgcaggaatgcaacggcaggaatga

SEQ ID NO: 142525 - DNA, 633 bp, Enterobacter cloacae
atggacagcgcaaaagagattgccagagatatgcttgaggccattaatatcgatggatccggttttgtcggcgccgtggctaaaggcgttatttccttacccgttagctttgcctatcttggctatgattttatagacactgaacaccgcagagagaatcaggatgataaatttcggttagcaaggctgatcaaaactatcacttttgataaagaaactgtttataacatcatcaagccatttatcgatgatttcatctcccgggttgatatatctgctgtcggtcttcaaattactggcagtagtgtggggaaagcacttttttcacaattgaccggcgtgcagcgaggatatgtgatttcggatcgagcaacaacggcactgtttgcggggaccgtcattggatcattactttcgattggtgcagaagcatcacgtgctatttatacgtcacgatatttacgaggcaggaatcctaaagtttattataaattaaaaggtatgggggatgtggaccttttatattttcttgttgaagatacagtaaagccatttgaaatggcatgcgccattggtgaatgcaactcagaagagtttaatgagatttgtaaatgcttttttggtgacttatga

SEQ ID NO: 142526 - DNA, 279 bp, Enterobacter cloacae
atgggaggatcattattagttttattaggcacctggtttaaattgaacgttatgaacataaaagatttcatacttatcattgtctcacggatcattgccagcatcgggatgacaccaggaactatcagtatagtttactctgtatactgctacttcttttctgccaatccttaccgctttattccagtcggggaaggtgtagtggtcttgctcataggatatggactttataaacccgccctgaaatatatttatgttgagtgggtgcattatagatag

SEQ ID NO: 142527 - DNA, 147 bp, Enterobacter cloacae
atgtccgcagtgttacgtccttataaagatcttctcccccaaaaaggcgatcgcgtgatgatcgatgccagcagcgtggtcatcggcgatgttcgaatggccgatgacgtcagtatctggccgctcgtcgccattcgggggatgtaa

SEQ ID NO: 142528 - DNA, 186 bp, Enterobacter cloacae
atgactaacttcctaattgagatactcgctacactaatctacatgttcgtactattcccaatgttcatagtactgaatctcttttttatgattctggtagtacttctacttccactaaagataccagtaataaatagatgggttaggaactacctgaaacgggaaaataaacatggtataatatag

SEQ ID NO: 142529 - DNA, 1893 bp, Enterobacter cloacae
atgaaaaaatgttttatatatcatcgtgttagttcagagttgcaactatctggaacgggtattgagaggcaagaacaaaatctgaacgcatatgtagagcgtattaacttgctggcagaaatggatgatccagaagctaccattattagcgatcaaggtgtatcagctttcaaaggactgaacatgtctgaaggggagttaggccgatggatggatcaagtacgtgctggtatgtgggatgattcacatttagtactggaaagtatcgataggtttagccgtcaaaatccattccaggttgtcgggtacttggcagaactggatagacacaatattactattcatgatgtttcattgaatatgcttattaaccgtggcaatagtgctatgttgccaatagtcgctatgtctgctcagcgtgcgtatgaagagtcgaaaatcaagagtgaccgtatacgtgatggttggcggcggaagcgtgaacaagcattcaagcaaggtactatcgtcactaacaagcgtccacagtggatagatatagtagaagatagatatgaactgaatgataaagtagctattgtgcgtgaaatttttcgtttgtatcaaacgggtattggcacacctactatagctaaaatgcttaatgaaagaggtagtgaatggttgtttgtttctggtcgcttgtggcgtggtgaatctattcataaactactacgcaataagagggtaactggttcaatttttattagtgaaatcattagggattatagcagtacctccaatccagtagatcagaaacgttatgaaatggatgtatatccaattgctatttcaaaagaggaatttgatttagtacaggagttactaaaatcacgtcgcccaggtgctaaagtaactggtggtaaagcactcaagaaattctatgatccaaatactaataaaccatacttagatcgtgatggtaatgtaattgaattggaagtagatacaggaaaggaaatcatacagagtaatatctttaatggtatttgccgttgtgctcgttgtggtgaggcaatgtatcataatgtagtagtggctaaacgcgattcaaagaaaaaaggtaagttcaatgaggaatatagatacatccgatgtattgctgaacgcgacggactgtgtgataacaaggctctaaagtatgaagtagttgaacaattcgttatagaacatatcaagaatctggacttcaccaaaattctaaaaccgaatgaaataaatccagagattgaattagtacgcttaaaaattgaagaagaagaagctcacattgaggactataaactaaacattgaacggattcgcaatacgggtaaaaagataccctttgccgtgctggtcgaacttgaagaatcagaagataggttaaaggaactcaaagaacgacaaactacgttcacagaagtacaagtagatactgattaccttaaaacggttgatccttccgtactattcgatgttaagaacattgaagtacgtgcaaggatggcagcagagctatctaagatagtggatagtattcagctttaccgaactggtaagcactatgtgattacaatcaattataagaaagtggaagtactcaagcacgtcctattcgttgaggctaagaaagaacctgtactggtttctggcgttgcgatagagcgttttggcgatactgtagcgtattctacgccatcctttagtatcgttgttgagggtgttacatcaccacggctaatcaacatagaagaggaaccattgagcatcattgattactcgctattgctgaactatgtagatgctgttgatcctaataatgccgtaggtgtctggatgcgtaaccagttcaattttctgacgtctaactaa

SEQ ID NO: 142530 - DNA, 594 bp, Enterobacter cloacae
atgctgcgtggcggcgtcggtgagcaccagggtgtgcttgtcggcgtcgtggctgaagtggtatgcaatcccctccagctccatcagacggctgataaagtccaggctcgactcctgatactgcacgcagtagtcccacacccggtagctcccggtgagcttatcctccacgttaacctgatgttcacccagcagggttttcacaatctgcggcaccgtctggccctggaagatacgcaggttacggtcgcgcttcatcggccacaggtccggctccaccgtcagctgatacaccgcatagcgggtgcccgtcagctcgacggcactcaccgccacgcgggtgatttttccattgatatagcggggcgtcagcaggctctgcgtcgggatggtcaccgtgaccggctgacccagcagtttgctgcggtcaatgcgcgcatccgtgccaagcagggtcagcgtcagggcgaacgactcggacatcgcctcgcgacctgtgagtttccagaacagaagcccctccaccgggagctgaacggtaattcggttgagcataatctttattccgtaatggttttatgctggagaagataa

SEQ ID NO: 142531 - DNA, 1071 bp, Enterobacter cloacae
atgatcgaccttcatactgaagactctgtaatcaatcattatgccgatcgctatcgtacatacatgccaattaatgtccgtaaggcaataaaaaatgacggtattgatggtttgagttcttcacaagcctgggatgaaacattacctttaattacgactgaagatatttcacgtgataaagcacttggggcgctggtcggtttggctgttggggacgcagtcggcactactcttgagtttaagaaaagagacagtgaacatgtagcggatatgattggtggcggaccttttcatttaaaacccggtgaatggacggatgatacgtccatggcattatgtctggcggaaacttatctttcagaaaacagaatgcataccgatatacttagaaaatatctcgttaaatggtatcttaacggtgataatagcagtaatggtcggtgtttcgatattggcaatacgacgcgatttgcgcttgaacagtatttgcgtatcgggccttcctggtatggtaataccgagaaacacactgctggtaatgctggggttattcgtcaagctccggtgtctatctttcgtcgaaaatcgctgcgcgcgatttacttcgaatcccaggctcagagtcgcgcaactcatggtgcggtagagtcaattaatgcatgccaatttctcggattggtattgcactatttaattaacggttataaaaaagaagaagctttttcccctcatgttttcccactatgcgcgcgtgtaatgatcataaatgcgggtgagtataagcaaaaaactcgcgatcagattcgttcaagtggttatgtaatagatacgcttgaggccgcgatgtggtccgtatggaatacggataatttcagagatgctattctgttggccgccaatcttgccgatgatgctgacagcgttgcggcgacggcaggacaaatagcgggagcattatatggttattctggtattccgtcggagtggaaaaacaaacttgtacaacacgagcgtatcgccaaaatggcaggtgaactgtttgatagagctcctgaggataattttttataa

SEQ ID NO: 142532 - DNA, 405 bp, Enterobacter cloacae
atgaaaaatgatagccttgttgagtatgcgcgagaaaaaataccggatgaatttcgttcttatctaaatgaaaaaaataatatgcaatgtgcatcattcataagtcatactcaagatgagttgcgaacaatgaaagcgcataaagaaaatacgaaattcaccgaattgaaagtaaaggggcttgatgagttaattattgctcttgaaaactttgataaagaaaatgtttctgtaattaacatccctactaagtcatattcttttaaggtttattcagatgaaaaaaataattttctgctgggggttgtaatccttaagttaaaaaagaaatctgatgaagatattcgatttgggcgagaggttcttggtattgtgactcctcctcccgatatagaagatgattag

SEQ ID NO: 142533 - DNA, 717 bp, Enterobacter cloacae
atgttcgccgtcgtagcggtagtgccagcgggtttgtccgttatccttctccacggtgcggccgtggatgtcataacgccagcgaatgccgttcagctgcgccaggcggttgtgtgtgaccttctcagcagtaccttcgagcgggttaccggcagcatcccagcgccactgttcctggccgggcagcgtgccgtcctgaatcagcagacgcccggcgctgtcgtactgccagcggtaccagctgaacgggttatcgtcccgctcttcccgcaccaggttattgcggtagtcataatcccagcggcgggaccagcggcgcggcgacggacgttgggcattgccagtgaatacatcccggcgatgcagtcgaccaagacggtcgtactcactacgggtggtcagcagcccctgagtgcggctggtctcccggtggagttcatcgcgggtaaaatcggagaccgacagcttatcgagagcaatgctgagcagatgcccgatgccgtagtaaaactgcttcagctcgcggccatcgggcagcgtgacggaggtgcggttgccgagagcatcatactcccatgtcagctcaccgtgctcgcccacttcacgcgtgacacgccccagggcgtcatactcaaaggcaagttcctgttctgcctctgcactccaggcgtcaacggaaagtgccggatgaagtccaatacgactcagcaaacctga

SEQ ID NO: 142534 - DNA, 450 bp, Enterobacter cloacae
gtgccagaccatcaggccgtggtcgttatagcggtattcgcgcgtcactacgccagaggcatccgtcacgctcgccagctggccgcgcgcatcgtaaccccactgcatcagtggccaggtacggttgccgtcaaaatggctggcagaggtggcacgctgcgggaaacgctcatcttcatagcacagggtgacatcaatcgcccgtggctcatcgtgaagattgaccagcctgccgtgttcatcccactccgtcagcagcgcgttaccgtattcgtcgctgagggaggccagacgcaggatggtgggattcgcccgggtcggtttatacagacgccataccgcgccgtcatcgtcggcaatcgccacgtcgccgctctcattgcggcggatgatgatgccttcgctgatgctgtaaaacgcgcgatcgacgggcggcagctcaaagcttag

SEQ ID NO: 142535 - DNA, 2190 bp, Enterobacter cloacae
atgttcgccgccgttggccttacaatggataacgtagcggaccaaattaaggatagtaaggataagttgggcgatgccataactaataatgctggttctatgttaactgacgtaattcaaccattgaagttgaatatgttcgagttacagaaagcagcagaaaacggtgaagatattattgctaagatttactatcaggctaaacaaatgggattcagtcaatcccagatagtaaacatgatggaaacagttgcaaacgacgcgtcaaaacgcatgactatataccgagagtttaatagcgaacaagagtaccaaaacagtcttgctaatgaatctattcaactaaccgcagaacaatcacgacaatttgaagaatacagggctgcaactaataatttatccagagcatgggatacctggaagaactcaacgcttgcacctatcgcacagaaccttgctgaaattctcgacttaatgacgaaaattattaatagtaaacctgttaatgcagcggcagcagcagttagtaaagatggtattcaggctactcaacaataccaacagcagtttcaacagcagatactaaaaaattcttcaatttatggtactcagatagtagcagatcagcaaaagcaacaggaggaaaataataaaacctttgcaaacttattagcaaaccttgatgcggcacataacctacttgataaacagaaagaagaatataataaaggctcagatagaagtgttattgatactgctataaaaccttatctttcagcaaaacaaaaaacacaggcacagattgatacccttgatgcaactcatgcacaattacgagcgactattaaagattctttagtacgtgcttataagggtgatcaagcggcaatgaatgccgatctcgctaaacttgatgaagggtataaagctaaccgtgagaagttagtaaaaagcctaacagccgatgaagataaagcacgtgaagacaaagctaagaaagatgaagcagcagccaaaaaagcacaagccgctcaagacaaacttaatgaacaaactaaacgagcaaaggcactattagaacagacgctatcacaaatcggtactaatgaagcccaaatacgtattactcgttttaactatgaacaagaccagattgaaaagcgtatacgtgaagcaggtaaattagcgggaagtactgaatctgaaattacagatatgttatccaagcaatatgaaagccgtaaaaccaagtacaaagacatggttgatcagatgctttctgaaactaacagactcaaacaggcacagaacattgcagccattgctaacgatcctaatgcaacagcagatgctaaggcacgagcagcggcagcgggtactacctggatgaatgacacggttagtcagggcttagggtacaagaacccattagacttttcgccagatccggtacagaaccagaacatcaacaccgaagaacaagagaacaaagatggggctaaggctctatatgatgccaaagtacttggtttccaggagtaccaggatcagctaacagcgattcaggccaacgccgatatgaaacgtggccgattaaccgcagacgcactaaccagtactttagggatgtggcaaacgggagcaggtaacgtagcggatatcatggctggtgtattcggtgaatcatcagcagcggctaaggcagcatttgccgtaagtaaaggtattgccattgctcaggcagtgatcaacatccagcagggtatatccgaagctattaaacttggttggcctatggggatcgcagcaggtctacaagtagcagctcagggtgcttccattgtccgtactatcaaaggtacagctatccaggggcaagcccatgatggttgggattcactaccaagtactggtacatacaatcttgaaaaaggggaacgtgtagtaggtaaatcactaaatcaggatttaacaaaatacttgagtaatcaggatggtagtaaatcaggtgatattaagattgatgcaccgttaattattaatagtaatggtcagatttccaaaagatgtgtgataaacacgccgatactattgtacaggcaacacgtaaatcacagaagaataacgtataaatatcatatagcccacatggattgtgggctaactattaaaggaataataatatgttaa

SEQ ID NO: 142536 - DNA, 180 bp, Enterobacter cloacae
atggcaaaaacctattcaagttttgataatagaaacataaaagcactaataagccagtacaagctatacaaagatatcccatgtgaagatatcaaaaacattatgaaggattcagtggctaaacttaatgtgagagataagattagtgtctacgatgtttttacagtattattaaagtaa

SEQ ID NO: 142537 - DNA, 735 bp, Enterobacter cloacae
atgaacagaaaacaattcatccagtcgcatggtgctacttgtagtaactggacttggagttggtcatttgttaatcatgacaagaagatggttatctttggtgcatgggatgtcgagagcgagcaggagcggtcagtaattcttcgtgagagatgggaaactaactcaaataacaaaaagcaaccgggctatacgcaagcactggaacatatccgtttagtccatgcaggctacgaactatatacctttaacatgatattctctgaacatcctgataacccagaagtcgcagtgatcaaggattttgagcgaaaattaaacaggcgttaccttcgaaaagaaggtactgtttggtatgcagacttcttacctaatccgtttcctgatgaaattacctcacctgaaaactacgctgaaggtgcaaaaaagcaagttacagtaaactcctacgagcgtgatccaaaagcacgacaggcttgtattgaccatcatggaacttcatgcatgtgttgtgggtttgactttgagaaagtctatggtgaacacggtaaaggatttatacacgttcatcatatcaaaccactacatacagtaggtgagaactatgtggtaaacccgattgaggatatggttcccctttgtccaaactgtcatgctatggcacatcgcggtagtgaagtcttgagtgttgaagggttaaaagaactcttgtttaaaggcagtaatctaatttga

SEQ ID NO: 142538 - DNA, 321 bp, Enterobacter cloacae
atggataacttagaaaatttcccatgttatgatcattctgtactaacagatttttcttttcagacaatccaaccagtaagtgtaaccataccatatgataaagcaatatctggtagtaagctcataaaaaagaaagtagataaaacaaaaggcgatttagtcgtatatagctttcatcatcatacaaaacctaacgtaagtgatggtgatgtactaatggttgagttgctaaaagataaaatagacgttcaggtactgctatcttataaccacatctacaaaggtcatcgcgtattttcttgtgtttgccaaatacaataa

SEQ ID NO: 142539 - DNA, 1392 bp, Enterobacter cloacae
atgaaccactttacacgaattgctaaaccagatggtggacagtacttaaccgcagatatgcgtatgatttctgattatggtgataacaccgtaactaaacttgaatatcaaagcggtattgtagcagtaggtttctggattttcaataaagaagaacaggatttagtttctttcacataccgtacttatgctgatgattttaacatccgtattattgatgatcttggttggcgttggtgggctatgttacctgcaagtaatggtgcatggtttacacaaacattttcagtcttagattttaaattaagttcatatcaacctgatcatcaagaaggtgatgaacagccaggacaaccaacacttgccgcacgtaaagagtttacgttactacttgataccgatccggttgatggcgttagcggtcgtattgactggtactgcattaatgacctaccagcactctatgatgatggcggtacgggtgactattcagtactgctaagtcttacgttcaatgacagtaccggaaacgggtatacagcccgcttaggcgattgtgtgatcaagcagtacatgcttgatagtctcgcatacacaccaggcttgatacccttcagtaacatcacagacccgtatgctcagttgtattctggctggcgtggacttccatacccagggtatcaactacctgctatatggtgctttcagggtactgcaattgatgaaaccagattaaataacagtatgaggttcttatgtgatgctcagaactggttcacgaacaagtttcatcctactgtaccaggcccgtgtgcacaggcgtttgtttggaaccgtcaggacgcattagcgtacttatctgatggtgaacaaccagacgtattcatcatgcaacattggcacgctgaagcgtggtcaggttatgaacctcgtgcgttctttgcaggttgtgatgtagtacatgaactctatcaacgtggtgattacaccattccacagaacatacttacgtactgtaagaactggatgaactacttaaagtggttcatgaaaaataacgatggccatgcaccaacacgatttaaagataatggtgaagttatctatgatggctttacaggtcatatgtcagggctatggcttgcaggtgcatcaatgatggcgattgcaggttatccagatcatgaattacttgatttactctttgctgagatacaacaaaactacgatgtaattagtgctaatcacgtgatgaatggagcatggtcgccagccattaggagtggcacaccaacaacaagccaaaacaattcaatgtactttggtttctatactggtgaattactaagaggtttaactttatatatgaagtactacaacctacatacataa

SEQ ID NO: 142540 - DNA, 1488 bp, Enterobacter cloacae
atgaccgtagataaaacaggcataatccagattacagcgatttcatatgatgatggtatatatcaaggaaaagatccgggacaatttccacaagaggggttgaccaatctacctaatccaacatacgtagaaccgccaagtaacctacaggctcaacgtttaggggcaacggcatcaggtaacaccgttctattaacatgggatttatcacaggatacaactgtacgtggctataagattcgttataaacgcagtgattccagtgtttggatcagcattggtaacgtagggcagtactcaacgagttttgagattttaaatttactatatggtgtacagtacgattttgctattgaggcatataacacattaggttattcatccgatttagtagcaatctataatcaaacaccacaagttatatttgcattaccaaagataactaaccttgatatggtgaatgatgatgtaggtttaaaccagacgtatgctcaagattttattttccgttgggatgatcagaataacatagctgttaatggtaaaacatttgctgatttcttcaaacactatgaaatacgtgtttatgaccgatacaggaactacatcacatcgtactacaccactacaagcaactggacgtactcatattcaatgaacaccagtgatggccttagccgttaccgtgtgtttggaatcatcgctcatggttggggtactggtatctatagtgaagaagttcagattgaagttagtaacccacaacacccacagttgttaggtatcaatttgaagagtggttatgattctgtgttcattgactggactgaatcaaacgtaccggattatgcgggaatcgttctacagatcgcacttgatgaggggtttagctcagggtcaaagtactttagcagtgctaaccgctattcagcatcgtttggaattttagatggttcatggttcgcacgtgtagcagcctacgacgtgttcggacaggatgaattggtatggtcgcctactatcggctttaaccaaaacacgaaagtaccgtacagcaaattgaacgaagatgttattgatagcctacttaacagtgatactgctactggcattgttgagaaacagattgtagatgaacttggttcacgctggcagctacaggtatcaaacaacgggaacgtaacgggcattgccttagcagcagatgaaaaaacatcagtgtttaccgttatggcggatcgctttagtgtcatcagtacggacagtgccaaactatcagacagggtttatcctctggttgttcagaatggtaaggtttggcttaactcagcggtgatagcttcagcaagcatcaatgaggctatgatcaataaccttgccgtttcacgagcgaaaattcaggatgccgctattgataatttaaaactcgcaaatggggcagtgcgtaatattcaccacgaatacgcaacgctacatagtgttggttag

SEQ ID NO: 142541 - DNA, 306 bp, Enterobacter cloacae
gtgctcttcgccgcgcttgtcctccatccgcagtttattcaggccagctgtgcggataacgttacgcgtgctgttggcttcagtgacgtggtcaacgtggcgggagtcgtggagggcgtgagcgatgtatggacggtccgggtcaccttcatggaacgcaatggcgacttcagtaccctgtatcagcggaaagtgaaaaccgtacttgtcgcctccataaggtttggcaaagcgtaccggcatactttccatgccctgacgcttgtcgtcacggtcagcatcaaatttcacccggtacatgcctga

SEQ ID NO: 142542 - DNA, 252 bp, Enterobacter cloacae
atgtcattaaggcgaacacgattaatactaccaggtgtgacaaatggaagtgcaaaaatcaaacccagaacgatattaatggataaaaatacagtcatctcatttgagagcgagctgatattagtcgtcagcccaagtgagtacaataagattgtgaaaagccaggttgaagcatatacaaaccctggggacataaaaaaaatactcatcctagttcctcaagaatcgaagtcttccaccttcaatgtatga

SEQ ID NO: 142543 - DNA, 693 bp, Enterobacter cloacae
atgtttattgacatcgataatcttattgaacctaaggcgataaaaaagattgtttccttttttcatggtaagcaatacacagcagccagaattaatatacgaatcgatcccgccagactctacactagcaattatctccgctattttgatagtcgttacctgggggcacgaaatatacctgaagggactataagtacccgcttcttcgcaagcgatggcattatcctgacgcgggatattattgatacgattggttgttttgatgagacattttatcattacggctgtgaagatgaagaactcggtatccgagttgcaaaagcaaagtatgacttttattttttacccgatgcaagggcagaagacagcgatacacctacgttgcgccgagcttcagaaagaatgattgtgtatgcatctaaatcattccctgtgctgaaagaaaaacatccagagtgtgttaaggatagcctcttttcatcctatgaagtgatgttggacgataatagactcctcagtaaattgctcatcagtatcatacataagcttcctctaacaacgacaagaaaattccttcttcggttgtgcgaaatgttagataccaaagcaattaaaataccagatttcttatataagatcgtattggcactttcatacattgaaggtggaagacttcgattcttgaggaactag

SEQ ID NO: 142544 - DNA, 552 bp, Enterobacter cloacae
atggctatggcggtcgaagggaagaaggaactactgaaacaacaattagagactatagatgttcatgcgtcatggttcagagagcaccggcttttctgtaccgttaacgttgataccatacaggcacggctatgtgtgtttgacagggagattattcagctattggacaaaatggatttcatcaggcttgagatatcagagaactttgaagggcttgaactcggtatcaatcatccagtacttaaaacactgttaaacgttggctatcgcctgttccttgatgatcttggctcaggccgtgcgaataccgcagcactttctactggttgctatgaggcggtaaaacttgatagagcgttctaccgtcaggaagtacagaaacctacattcaacatactgataaagaacatcatgaagtactgcccgtatgtaatcgttgaaggggttgaggataggcaagagataccagtactacgtgatgctggagtaacagccgttcaaggctacctatatcgttcagtgaacttctctaaggtgacatctcttttataa

SEQ ID NO: 142545 - DNA, 573 bp, Enterobacter cloacae
atggactggtacgatgcggagaaatattgtgcctggctgggtaaggtgagcggtctgccgtttgccttaccaaccgaggcccagtgggagtatgcggctcgcaaccgggggcagttcattattgctggaaccaatagcggtgtactggagatggatgggatccagcgtgggattaatatttccggctctctggatcgtaaggagtttgcccggaagatggggcttagtactgaaatagatacagcaatgccagtggatcgttatccccccaacccactggggctctatgatatggcaggtaatgggtatgactggataaaggactggtatgatccagattattataagaattccccggttgttgacccccagggaccagaaaaaccggtatttaagcgtcgtgaggggatttacgatgcagaagaaaaatatcagaaggtgctgcgtggtgcgggaacttcaggtccctttaacggcttgacggtcgcccgttttaagcgcagccaggatacaaaagttacctttataacgacggttcgctgtgtcgttaacagtccacagccagtgaagtaa

SEQ ID NO: 142546 - DNA, 135 bp, Enterobacter cloacae
atgagtcaggtggagggattaaagatcaagtatctcctgctgaagctgctaacattaaagaaagcctttattttatttatgtgggtgacattactatttatacttcaagatggcaaaactcatgatttttcttag

SEQ ID NO: 142547 - DNA, 234 bp, Enterobacter cloacae
atggatttatggggattaaaacctaaaaacgaagtacacttcaaagaccttattgattcacatttaggcctggcatataaaatagaggaatcgctatctattggggcagatgaaaccagattacggttacaaaacagctttgagtatgacagacaaatcagtgaatattacaaaatccttcgtggctcccataataagataatgaaacactatagtgaattatttgttgattga

SEQ ID NO: 142548 - DNA, 393 bp, Enterobacter cloacae; identical to SEQ ID NO: 134520

SEQ ID NO: 142549 - DNA, 1239 bp, Enterobacter cloacae
atgaaaggaatgcaacggatcaaaaggcacaagagcttcgttaatgtcgtaaagtatgtgttgaagcctgggtctcaccataaaagagatcctgtggttattggtggaaacatgacaggtgattgtgcaaatgaacttataacagagttcaatactgccagtgaacgacgaactgacatcgcaaaaccagcatggcacaactcccttagacttcctaagaatgatgaacttacaaatgctcaatggataaagatcgctgacgattacatgaatcaaatggggtttagtgatactcaccttcgttgttatgtattacacgatgacagtgtgggccagcatatacacatcattgctaaccgaatagattcagtctcaggaagggttaacttaggaagacatgaaagccttaggagcggtcgtataatccaggaacttgaaattaagtacgacctaacgataacaaaaggatcagtaccactaaaacctgagaatacgggaaaagacaaaaataatgtaataccaacaaaagccaagaagctttctagaaatgaaaccatgtatgaaaaacgaacaggtgagatctgcaataagaagcaattacagatgattcttgacaagagtttggcagatacacctgaccttttaacttttatcaagaggctggaagaagcagaagtatcctggaaggccaatattgcctctaccggtaaaatgaacggcttctctttcgaatacacaggaatagctttcaaagcttcacaattgggtaagagctactgctgggcaaatcttagtaaccgactcaactacaaccccgaccatttagaagctctgcgaacgggtatagagaccaaggaagctcttcctgctcctgctcctgctcctgctcctgctcctgctcctgctcctgctcctgctcctgctcctgctcctgctcctgctcctgcaaaagatgttgcaacaacggatattccaagggaaagcataagtgaaaaaattgtcgaactagaactacggctcagagaagacaaacggaatgaaatcgtagaaaagattcttcaaaaaaatgccgtcaaaaggcaaaagcatctcaggctcatcggctggattccatttatcagaaggttcatagagcttctgcgaagctatggtaagagcattcttcataagacccctacaaacttctcagaagtctattcaacacatcatctaaaacctgcaagaaaaatttgtttatag

SEQ ID NO: 142550 - DNA, 381 bp, Enterobacter cloacae
atgagtaatacaataaccttatcctatacaaatgattttaaaccaatcaacaatcatatcccccctgctcaatcgttacgaatacactgtgtcagtgttcgattcaatcaagccgaattagagcttctgaatgctaatcgtggaaacaaaagtaaaggagaatggctcagattaacctctcttgataggcttcctcctgttgttcctgccatcaatgttgaagcatggaaatcactttctgacatatcccaaaagctaaacaaactaataaatcatcttgacgccaaaagcagcaatagtgagttaaccaaaacagagatcttcgcagtcaagaaacagatcaaagagcttcgttcgtgtctgatatcttctattgagtag

SEQ ID NO: 142551 - DNA, 735 bp, Enterobacter cloacae
atgagcattataattatagatagtgactggggggatatctcaacaagtgatatccagtgtctaattaattccgcaatagatttaatggacccattttatggtaaaccaattccctatgacatcgaaatcagtaacaccccaaatattgagtcaccaatggtatataacagcaggggagtatctgggcaatatcatattaacttgaccactaaggggcatgattattcacaattttattaccaattttttcatgaatattgccacatcaggacaaactatttggctgtcgataataaatatagttggttcgaagagtccgtgtgtgaattagcttcgatgtttggagttaaaaggatggcatttgtttggaaaaaagaaaaacttttgcctaatgcaaaaaacaattttggctatagcatagagaaatatatacaaagagttatatttaacccaaggaaaaaccttcccaaacaacaactattcaaaacatggcttgatgaaaacagagagtatttagaatgtgaaagatacgatagggataaaaatggaattgtagcaaatcaacttttatctctattcgagagagagccaactttatgggagttaatgacctattggaataaatgggagattagccataatgattcaatctatgaagcttttgataaatggttatctattcttcccgaagaaaaaaaagcagtggctcaaaaattaattaatgtattcttatag

SEQ ID NO: 142552 - DNA, 321 bp, Enterobacter cloacae
atgtcgtgggaaataatttgtaaaacagattatattgattattctgttgcgaataatgaagatgaatcattttttacgagtcaaatagtattatcaaatagagagatccaccaagagccaagcagcgaatataaagctccaaaagatgatgtaatggttgacacttatattgcgaattctgaacatggtatatttcaatggacagtgacagcccgccgcactggttttaattcttttgctgaaattgaggatatcattttaactgaaccgaatgactgtgaagcattaagctctgcatattttgatattgaatcggattga

SEQ ID NO: 142553 - DNA, 204 bp, Enterobacter cloacae
atgattaaaataaagtcaaataaattactggcaatatgtatggttgttttatatttgctattagttatcgctttaactgtttgtttaaaaataacaccggcttttcattttaaggatatattggtggctattcttatgttggtcgtcatactattcccttgggttataatcggtgcaaaaatggtatttgataaagaagattaa

SEQ ID NO: 142554 - DNA, 444 bp, Enterobacter cloacae
atgtccgaattatcatctgaaaaaaataaagaaaaatcgttattaagcatatatgttccagggtttattttttcctgtttagctctaatactttgtgtgttcgaatatgtcgatagcccattttatttattgatccccataattccggtggtatacattgtttttagaatcattagaaccaaaaataaaatagaacgcgatgttataaaatccttgaacgacagtattcttttctctatcagttttctaaccacttgcacccttacatttaaaacagtagattacctgaactatgatatctttaatgaattaatgaaaaaaaacactggctattacttaatatctatttatgccattttattttctataaaagcatcaatttcaatatgtgaggctattgaaaacaataaggctttgaaagaaagcttgaagccaaagccttaa

SEQ ID NO: 142555 - DNA, 165 bp, Enterobacter cloacae
atgagcttgttaaaaatttgttttttccagaactatacaaaagagataagaacagtctggtcaggtgggcaaagaactaatattccggagttcttcttcgtgccgattactatttttaatgaagcgacacacctcttatttttgaaatataaaaaccacctctaa

SEQ ID NO: 142556 - DNA, 201 bp, Enterobacter cloacae
atgttaacagtaaaagtgatgtcgccaggtggtggcgaagagattcattgcggcctgagtgttggctttaatcccacccagcagagcattgcggtatcgggaatggacaaaaatgtattcctgaaaccgggggaggtcgcctacgtgatgaatcagaacggaaagacggtttctcgctacgagcacgttaaccgccagtag

SEQ ID NO: 142557 - DNA, 447 bp, Enterobacter cloacae
atgattaacggatttggtcacctatactccgcaacggagcagcacattgcaaaaatcagagaaatcaaaaccatcggttttgttgactctaacgaattatccaaagtaaccaatcgcgccgttcaactgtgcgtcctcgacttattgcttgctgcacatcgcaataagcatgagaccacgattaacaaactccccggcgctaaagctctccaccacaaacttcttcagaaatataactggccactgtcagagattcgcgcgatgagcctttcagatgtttttatcgcacttcacgatgaactatcacttgaatctcttgagggtcaggctaaaagctacttttcaacaatgattgccgggagatacccaattacgtttactgattttatcgatgaggagtgggatccagatctggccgaaaaacttctattcgactctgcgcagtag

SEQ ID NO: 142558 - DNA, 285 bp, Enterobacter cloacae
atgagcaataaaccagataacttcgagttgatgagcactcgcgacatctgtttgcagttaagcatttcacccagaacactggagcgttaccgcaaacgcccggacgacagcaatccatttccggatccagactgctcgtatatgggcggctccaataagtggcttaaaacaaaagttcatgcgtggcagttacgtgaaatgtcgcggccggttcgccgccctatgtctcacctgaacctaccacgcgatgttaaaggccgtctcacccgacctgacgcggcgtga

SEQ ID NO: 142559 - DNA, 303 bp, Enterobacter cloacae
atgaaggaattacgcttttacggcgcaagcgatgaccttttcgaatgcgaaggtgccattagagaagaaaaaggatgttacgacagcccgggtgtttaccacttgatttcagaggaaggagagcttctggtaatcgcgaattatacaggtaaaggatgctggtctattgggttatgtcaggtcgacgaagacgttccaatccctcaatggcaaacctcattcagcatgcatgagaaaggctatagcgtggtcctcacaattcaagttcctgacgataccatgctgaaagatgaagacgaatga

SEQ ID NO: 142560 - DNA, 216 bp, Enterobacter cloacae
atggacatcatcgacaccgcagcagagattgaagagcttcagcgtaacgctgccctttccgctcaccgcatcgaccgcaacgccgtatcagctgagcattgcgcggaatgcggcgaggatatcccagcgccgcgacgcgctgccgttcccggctgccagacgtgcgccagttgccaggctgatttggaacttatccgtaagcaaaggggctcctga

SEQ ID NO: 142561 - DNA, 153 bp, Enterobacter cloacae; identical to SEQ ID NO: 134508

SEQ ID NO: 142562 - DNA, 420 bp, Enterobacter cloacae
atgttaagtgcatgtgtcgaacacaaacagaacagaaaatacggaattaccacgactaaggttaacggtaaaacggtatcaataaagcttcacaggaaggcttattgcgaggcaaacggactcacattggatgacattctcggcttgattgttatgcacgagtgtgacaacccaaagtgtatcaatccttctcacctacgaattggcacccatcaggacaatatgaatgatatggcacttaagggtagaagttgccaccgtcacggcgagttaaacccaagagcgaaattaagtagttctgacgttgatgaaataaaacggcttaagggaaagaaaacgcaaaaacagattgccgatatgttcaacgtcagcaaatcacatatcggcagaattcagaggggcgatcgctggggtggttaa

SEQ ID NO: 142563 - DNA, 222 bp, Enterobacter cloacae
atggaaaaatcaattacacgcaacaaagcggaggcgcgacgaatcgagagctggttacaccgtcagattgcagagctgggaacaacccgtatcgccgaggttatcggggtcaacaaatcaaccgtaagccggtggcgggaaaacctggttccgaacatgtcgctgctgctggcaatcctgatttctaaccgggatgaagtgaagggggatttcgaagcatga

SEQ ID NO: 142564 - DNA, 249 bp, Enterobacter cloacae
atgcacgaactatttgtgctggttttgagtacctgcgccagcctcagcaacatgtcaggttgttctttggaagtggtgaacttgaacactgaaaaagaaccggtgaatgtcttttacagcatgaaagactgtgaagagagcatgaagggaatcatgctaaatcatgcccagtactatgaaatatcaggtagagaaccatcaatggcgaagtgtgaaaaaatctttttacctaagaatgttagtaaatag

SEQ ID NO: 142565 - DNA, 642 bp, Enterobacter cloacae
atgaaatgcaaagttgaaggttgtgagcgtgaatgcaaacactacccaggaaagggtatctgtcaaatgcactacttccgaatgatgcgctacgggacctacgaactcacaaaaaacggtaaagggaaattcaggcataaaaatgcgaagggatatcaaatgctcaaaattcctgatcacccactatcaatggcgaatggttgcgtttatgagcaccgaaaagttgtttacgaccgctatggagaaacacttccaccatgcgaaaaatgcggcaagaaggtcacatggaaaaccgcgcatattgatcacattgacgaggttgttgataacaatgcggactcaaatcttagggtgctttgccgagcgtgtaatgtcatgcgatctcgagtgcatatccctgagcacacaaaaaaaggacgcacagccataactttcaatggcgaaacgaaaaccgccacagaatggtcaagggaccctcgcgtttcagtatcagaaacatccatcaagcgtcgactaaaaaatggaatgaatgtagaggatgcgcttttttctcccaaagtaacccacaggcataccaggccaagaggaagaacacctctgtatggtgaatatcgcggaccaaagcagaaggagtcagcatga

SEQ ID NO: 142566 - DNA, 348 bp, Enterobacter cloacae
gtgccagaaacattcacatggacaccgcagcgagcttaccaagttgaacgtaccccaaacgtagccgttgttaagctcggtgacagctacgagcagcgacaggtgaagggcatcaatccactaatggataaatactcactgacctttcgaggtgtaggcggcgcctgccagagtaattctgccaaggatgctgaggcgttccttaaagccaggggcgcggttgaatcattctactggaccccatcagataccggagtcaggaagttgtttgtctgccgctcatggaatatgacaaagaccgggccgctgtttgaactgacggccacttttgaacaagtaccacgataa

SEQ ID NO: 142567 - DNA, 1266 bp, Enterobacter cloacae
atgccaatgcaggtcaacatcaccactaaggtgaacagccagtctatccggcgcgaaacatacaacgggcgtgagcatctggttctaccgagttacacgcttcctgcgaacgtcgtcatgaatggcgggctgtacacgcaagaacaaatcgatgcccactataaggggctggaaggcaccctggcgccgctgggacaccctcaggttaatggtcagttcgtgtctgcattctcccctgaagggctatgcgccgggttcgtcggagcgtggaaccgcaacgtcaagaagtccggtaatcgcatctacctcgaaaagtgggttgatgtggctcgcgccagtgagtcggaaggtggcagggagctgcttgagcgagtcgctgccattgagcgcggtgaagacgttccgccgattcataccagcgtggccgctttcctcgaccagcttgaaccgaacgaacagcaacgcgccaccggtgctgagtgggtagctgatatccacggcatggaccacgacgcgatcctgctgcacgaagtaggagcggccacccctgagcaaggtgttggcctgatggtcaatgccgatctggcccaaccgcttaaggccaactccggcgcgctggtgggtgaatcctaccgggagcgcgaacagcgtctcgatcgcgcagccaaagcgaagtttgcggcgggcgcggatgaatacgcctggattgctgacttcactgactcgcaagcggtaatcatccgcaacggcggcaccgcagaggtgtttggctacaagtctgagggtggcgttattaccttcgacgacaccggcaccgcagtagcgcgccaggagtcgtgggtggctgtagtcgctaacaaattcaaagctctattcacaccgcaggaacagcctgcaacaaaccacaaaacggagggcgacatgcctttaaccactgaagagaaacaagagctgatcagcgaaatcggtaaaggcctggccgcaaacttcgccgaagccctgaacccgattaaggatgcgatcaccggcctacaggccaatcaggacaagcttactgaaacgctaactgcaaactctcgtgcggaagaaaaaacaaagcgtgatgcggttgctgcggtccatggtgacatcgtggccaacgctctgtctggtgaggcgttgaatgcgatgtttaaaactatcggtgaagccgctccgctgggcaccaacaatgctcagcgccagaaggaaaccggtgcgccaaaccctgacgaatacttcaaataa

SEQ ID NO: 142568 - DNA, 207 bp, Enterobacter cloacae
atgacaacgataatagggcctatcactttaactcttgatatgagagagcaggttgcacgctctcgcgaagtgctagaagaattgcagcgtcgagtgagtgagcttagccctcgaatttcagaggaggacgccctgcgcattctgctcctagatatgacctttgattatctcaagtccaagagcaaggcagaacaaacaacggagtaa

SEQ ID NO: 142569 - DNA, 210 bp, Enterobacter cloacae
atgtccgacatctaccaaatcacgctaaccacccaaacaggcgaaaccttcacgggcaagatgtcacgacgtcagcctgagctggttaacggctttgtgccgctggcgaccgaaacaggccagtggctgtatttcgcacctgctgatgtgaagcgtgtggagttcacgccagtaccggcagagggcgaaatcgaggaaagtgcatcatga

SEQ ID NO: 142570 - DNA, 1122 bp, Enterobacter cloacae
ttgccatacatcgaatcacccgaaccgcacctggcttaccagtttctcgatcttgctggccagaataagctcaatgacctttcggtgctttaccgtgacgatcagcatgtggcgtacaccgggcagcgcggagtgatgctctattaccaccgtagcgctatcgagaaggttggtggtttcgatcgggtatacggtcgcggcatgtacgagcacagcgatctcgccttgcgcatccataacgtaggactgactacgtgggcttacggtgatgtggtcggttcagaaaagctgattcattctctcgacgagcatgaagcggtagagcgttcggtgccgcgtcccgaccgacaggcgctggttgaacgtaacgtgaagatccacaacgaacggcgtgatgccgggtttactggttacgttgaataccgccagcagcgcgatgtggttatcacaacgctactgaccagtcagcctgacccgcagcgcggcacaaaaatggcggcctcgcctgacatgctggctaaatgggcctcatcacttcggaattgtggccgcatagcgctggtggatgagctgcatgcagccccggcagatgttgagctatgtcgcgttcctgacgtgaagatgaatgtctactttcgtcgctggttgcacatctggcagcacctgcgagaacaccctgaataccggttcgtctggtgtaccgatggtaccgatgtcgaaatgcttcgcgcgccgtgggaagaaatggaagccggaaaggtgtatgtcggttcagaaccaaagacctacgccgatacctgggcaaagcagaatcatccggagcgcatctatcaggagtttattgaagaacaccgcaacgatgtgatgcttaacgctgggctgctgggtggtactcgcgctgatgtaatggcgttcgctcacggcatcatccgtctttactaccggatcgagagttatcgtttctggaagaaagaacaggctggcgccgcggtgggtgacatggtggcgttcggcattgttgcgcagtcattcgctgacaggctggtcaccggccctctggttcacacggtgttcaaaactgagggcatcggtatagaaagcgcttggtttaaacataaataa

SEQ ID NO: 142571 - DNA, 1212 bp, Enterobacter cloacae; identical to SEQ ID NO: 129714

SEQ ID NO: 142572 - DNA, 1005 bp, Enterobacter cloacae; identical to SEQ ID NO: 31749

SEQ ID NO: 142573 - DNA, 1005 bp, Enterobacter cloacae; identical to SEQ ID NO: 31749

SEQ ID NO: 142574 - DNA, 285 bp, Enterobacter cloacae; identical to SEQ ID NO: 26633

SEQ ID NO: 142575 - DNA, 450 bp, Enterobacter cloacae
atgaaaaaaccgactgaagcaccgggcaaattaccggtctctcccggagtgaccggtcacccgggtaccgctgactctgtacaaacaatgcccgatgccctcaaggccctgcgaaaccgacatcatgtaccggaaccacctgtcgcctcacctctgagcatgctgcacagggcacgccagcggccggcctcttcggaaagcgatccgcagacagaggaaaacggcggtgagtccatgaacctcgacatgaaagtgacggcactgcctgacggcggcctgagtgtgacgacggcagggaagccagtgacaccgaaaaccccggatgaagcccacggtactcaccggcagctggcgcaggaagaagagaacattttaattcaccgtcacgcggacgacccgggttacgacgaaaacgaccattactattacgacagagagcctgaattatga

SEQ ID NO: 142576 - DNA, 582 bp, Enterobacter cloacae
atgcagagatattacccacactttaaaaaaatcactcccaatgatttcctgctgaatatgattaaccaccatttgaatcagatccttgaatgtcactcaaaaatactggcatttcgaatggattttgattaccaacgtggtactaaccgattcattcgtaattcctcatttgagatacaggatgatctccgggagttaactcaggctgtaatgcagatgcctgcactctgcggttgcttctgggtgttggaatggacaaaaacaaatgctatccatactcatgccattttttatctcaaaggacagaagcatcagaagtcatttccgtttattcagcagacaggtgaattgtggctgaagataactaacaacgaagggaaatacgaacgttgcaaaccgaaggactactgtcaggacaacatcaataacatcgttgattataacaacaacgaggacgttaatagcctgaggcgtattgccagctatctgacgaaagaatcccagaagaatggttgtctgatttggggatgtaatgaggttcctgaacctgcaagacagggccgccccagaaaaacagaataa

SEQ ID NO: 142577 - DNA, 198 bp, Enterobacter cloacae
atgtacgcaaaatcctttatcgctctcgacgggaatggtcgtctgaccggtgcccgtactgcgcagaccgccccttacgatcgttatacctgccacctctgcggtagcgtgctgcaataccatcctgaatacatcaccgaacgcccgtggtttgaacaccggcccgacgatctaacggagaatgggcgacagcactga

SEQ ID NO: 142578 - DNA, 1203 bp, Enterobacter cloacae
atgcttaatcaacaggcacgaactcactcaactacagtaaaaaaaactggtctatcatttttgctcattctgagcgccctgatggctgttacctctttatcaaccgacatctatcttccggctatgcccatgatggccaaagacttgcagggtgacgcagagctgacaatcacagggttccttatcggtttttgcattgcacaactgatttggggaccgattagcgatcgttatgggcgtcgacttccactgtttatcggtttaggtctattcattatcggctcggtgggctgcgcgttatcaacggatatcgtgcaaattgtcttctggcgtgtttttcaggcgttaggtgcctgtaccgggccgatgctggcacgggcaatgatccgtgacctgtttagccgtactcgtgctgcacaaatgctttcgacgctgatgataatcatggccatcgcgccgattgccggacccctgattggcgggcagatgattaaagtcacctcgtggcatgccattttctggctgctggcgattatcggaacattaatgctgatgtctttattctggttaccagaaacattacctgccgaaaaacgctcacaagcctccgtaaccagagcctttaacaactactatgccttgctcaccaacgccagatacatgcgatttactttgtgcctgacgttctactacgttgcagcctacgcctttatcaccggctctccgtttgtgtacatcacgtacttcggcgttgacccgcagcattacggttggctgtttgcagtaaacattgttggattgatggcggtgagcatggtcaacagacgtctggttcaccgctatccactggaagcgttgctcaggaatgccgtattcatcgccactattgccgcaatagtgctggcggtcaccaccggcctgggtgtgggtggaattaccgtgattatcggcgctgtgttcgtgttcttctctatgaatggcatcatcgcggcgacatccacggcatgcgctctggacgcagtgcctaatgtggctggctccgcgtcggcgctaatgggcgcgttacaatacggcagcggcatcatctcttcactgcttctcgctctgttcagtgatggcacgccatggacgatgggctggataattgcgttgtttacagcagccagcgccctgatggcactgaccgttcagataaaaaaataa

SEQ ID NO: 142579 - DNA, 681 bp, Enterobacter cloacae
atgagtacgcaagagccaacatttagtgaggtagtaaaaaacagatactcggctagagcctttcttccatctcccatccccagcgatatcctcaaagacattttgctcgaagcgcaatgcgcaccatccaactgcaatactcaaccctggaccctgcatattgttgcaggagataaacttcgtgaattaagccacgtactgacggaagatctgagggctgggaactacagccttgattttacgtttgataaagaagcttatcccgagccattcaggcaacgggcttcggagcaggggcgctcgtactatcaggcactgggcgttgcgcggggggataacttaagtcgctcagaagtggtcgagcgtaatgtgagatttttcggcgcgcctcatgttgccctgctattcattcctgctgtaggggacaacgttcgcgtagcctcagacgccggtatgtatgcgcagacattcctgctttctctggcagctcgcggttacgcatgtgttccacaggcagtactgagttattttgcccaaacggtgcgtaggctattgaatgttcctgaaggtttcaggctgctttacggtatttcttttgggatcccagataaaacgcatccctccctgagttacagggaagggcgggtatctctggacgaaagtgtcgtctggcatcaataa

SEQ ID NO: 142580 - DNA, 315 bp, Enterobacter cloacae
atggcggaatatggtgttcagacatgggacgcatcaggcaaggtaaataactatggcgttaagcctgtcagcgtttgcggctatctccagctggcccagaaccagaaaacaggctcttacaccgtagcgcttccaccgggttgcaggctgacctattttcagagcatgaacggcgatcagtttggtacgagtcggaggaagatcaccatttcagggggaacagcaacagtgtcagcagtaggcgataccgactactcagcagggactgagcctgcggcagcggcttatctcattttccagatcgagagggcataa

SEQ ID NO: 142581 - DNA, 672 bp, Enterobacter cloacae
atggcggagtatggcgttttactgacgacgaccagcggggaagtatgggtgaccgcgaacagctcgccaatcgctcttcaggcgcgaaagacagcggcacttcagggaacatcgggtttcaataccaaagtgacgcacacattccccgcaggccagcctgttgtcgccttcgttcattgcacggttgaggtcgaaatcactcagacgataagcgggaacaccatcacgattgaatttctcagaccgaatgcaaccggcacagcgtacgtttattttttctctattttcccgcagacaaagccagactacgggctggctgtgtgggatgcatcagggacgctgattttaacaaacgaaacgcgcacgctgagcgatgttgtcaccctcggtaccgccggggtggatgccagctcaggatacaacatcaatacaactctggcggggaagtgggcctgcatgcctgccatgctgggactaattaccggggttgtatcggctggcggtcaaccgcagccctactcggccatatacaagagcatggcaaagcttgagggaggcaatacgcggatattcgccaggccgcagacaaccccaggcggcaaccttcagaacgttgcgtattcgaatctgaggaacgtgattatggccattaactgcgccaattatgattga

SEQ ID NO: 142582 - DNA, 759 bp, Enterobacter cloacae
atggcggcatttaactacggcctgaaagctgataacgatccgattaataccagcgtgggtatcacgtttggtcttgaagttaacccggtctcggccataccgaaacagtcttcggcggaaaaagtgggtgatacatggctaacactggaagagttgcgtgttgtcatggaacagttcgccggggccaccaacgttgggccgctgatgcagcatctgattcgcttctgtgtttatgctggtgggcagcgtccgtttgaaatgattgccagccagtggagtgctattgattggcaacaaaagacgttgctggtcatagccgatgtatcgaaaaacaagcgtgagcatctgatcccgctgactgaatcggcactacaggaattagcctcagtgaaagaactgactaaggaaagcaacagtccctatatcttcccactctcgaccaatggagatcgaccggtacgcactgatagtctggcgcgttccatcatgtatttccgggcttttaatcctgagtttaaagttttcacggcgcgagatttacgtcgcacctgtaaaacgttgatgggggaggcggggatcagcaaagagatccgcgaccgtatccagaatcacgctttgaatgacgtcagctcgaaacactatgatcgttatgattacttgcctgaaaagcgcagggcgcttgagatttgggaagatagggtcaacaactatcagcgacagcaggaaaacaacgttgtgaacttgtttgggcggaggtaa

SEQ ID NO: 142583 - DNA, 318 bp, Enterobacter cloacae
atgatcacggaaagccagcttaaagtggctgacctctcggttgatctcgtatccagaaaagtcagccgcgccgggaaccgcattgtgctcaccagtaaagagttcagcttgctggaattcttcattcgccatcagggagaggttcttccccgctccctgattgcctctcaggtctgggacatgaattttgacagcgacactaacgcgattgatgtcgcagtaaagcgactccgcgctaaaatagacaacgattacgggacaaaactgatccagacagtgcggggcgtgggctacatgctggagatcccggatgcatag

SEQ ID NO: 142584 - DNA, 240 bp, Enterobacter cloacae; identical to SEQ ID NO: 129604

SEQ ID NO: 142585 - DNA, 639 bp, Enterobacter cloacae
gtgacacagactgaaatcgcactgagtcaggatcgaacccagaaggaacttgaggatgtcctctactccagcctggaagagtataaccggatgaccaaaatggtcagcgacatgctgttcctggcacaggcggacaataatcagctgatacctgacagggtcatgtttgacctcagagcggaagtcatgaaagtcttcgagtttttcgaagcctgggccgaagaacgcaatattatgctcaaatttaacgggatgccctgcctggttgagggagatccacaaatgttcagaagagcgatcaataatctgttatccaacgccctgcgttataccccagagggacaggcaatcaccgtctcaataagagagcaggagagcttttttgaccttgtgattgacaatccggggaaaccaatccctgaagagcatttatcaaggttgtttgaccgtttttatcgggtggatccgtccagacaacgaaaaggagaaggcagcggcatcggccttgcgattgtgaagtcaatcgtggaagcacatcacggaagagtgcaggtggaatcggacgtacactcaacgcgttttatcttatccgtgcccagactggagaaaatgattccggacacccagtgctgggaataa

SEQ ID NO: 142586 - DNA, 714 bp, Enterobacter cloacae
gtgagacttagcgcgcagtacggtgacagcaaggccagcatcgatcgtcttgataacgtcatggcaagcgacagggaggcaacggcgcgttcgctgctgagtttgcagactgacgtgaacggcaacaaggcatccatcaacagcctgaaccagaccttctccgattaccagcaggccaccgccacgcagataaacggcatcacggcgaccatcaacggacatacctcagccattaccactaacgctcaggccattgcgaacgtcaacggcgacctgaaggcgatgtacagcatcaaggtcgggttatccagcaacggtcagtattacgcggctgggatggggatcggcgttgagaatacgccttctggtatgcagtcgcaggttatcttcctggctgaccgcttcgccgttactcaccaggccggagccacggtgaccttaccgttcgttattcagaacggtcaggtaattatcagggatacggtaataggtgatgccactatcacgcgagcgaaactggctgaaacaatcagctcggttaactacgttcagaaccaggctgggctgtccataaacttcagaacgggcacgcttgagaactacggttcaaccgctggggaaggggcgatgaagcagactaatcaaacgatcagtgtcaaggatgccaacaatgtgttgagggttcagatcgggagaatcacgggaacatggtaa

SEQ ID NO: 142587 - DNA, 432 bp, Enterobacter cloacae
atggcggcattcaactatgggcttaaagccgataacgatccgatgaataccagcgtgggcattacgttcgggcttgaagttaatccggtatcggccataccaaagcaatcctcggcggagaaagttggtgacacatggttaacgctggaagagctacgtattgtcatggagcagttcgaccaggcaactaacgttgggtcgttgatgcagcatcttattcgcttctgtgtttatgcaggcgggcagcgcccgtttgaaatgattgccagccagtggagcgcaattgactggcagcaaaaaactttacttgtaatagcagatgtatcgaaaaataagcgtgatcatctggtgccattgacagaatcggcattacaggaattagcatcagtgaaagagttgactaaggaaggtgcgaacaagttcctgatatga

SEQ ID NO: 142588 - DNA, 246 bp, Enterobacter cloacae
atgtcagataagcaggttcaactgtctggtaaatgcgtcttgaagatagacaccatcaaaggcagcagcactatcgaaataccaaaagtgaatctcagcggcaaaaacaatgcagacgctttgcttaatgaagtgttccattttggagtaatgcgtcacgggaaaaacaagcttcgcgaaatgcttgaagagaagcttgatggctacggggaagagtacgaaaaccatggcctcacttacgactga

SEQ ID NO: 142589 - DNA, 303 bp, Enterobacter cloacae
atgagcaaattacgagtttggcatatcccccaggttcccatgaaggcgttcatggttgaggtgcaaagtgtcgaagaaggcgttcgaatgatggatgccctggctgactatgacgctttccagtacgacaacaacatcaagccagattactgcaacgctaatggcttgcagatgtgggatgaaagcctgacagatgaagaaatggctgacatggaactcactgaccgctgggttgactggtatagcgaatattacgacgacccacgcgaatatctcgagagccttgagcgggaggcctcatga

SEQ ID NO: 142590 - DNA, 507 bp, Enterobacter cloacae
atgatgcgaaagcacaagttgcctagtgcagaggagatagatgccttgctggattacaaccctgaaaccggagtatttacgtggaaagtgacgaaatcaggatgggttgtaaagggtcggcctgctggttcaaaaaacaataatggctatctccgagttggtattggaagaaggcactacttcctttctcgaatagcattcttcttatgcaccggggaatcccctgaagaagtagaccatatcaatggtgacagaacagataacagggcgtgcaacttaagagccgcaagtcgtcatgaaaattgcctcaataagtcggtaagaagcgacagcaggactggtgttaaaggcgtctcatggagaccggatgttaaaaaatggtctgcacgatcaactgattcatcgggaaagagagtgtttttaggttactaccgcaacatcagcgatgcggtggctgtccttaatgattttcggagagaacagcatggtgagtttgcaaaaaattag

SEQ ID NO: 142591 - DNA, 342 bp, Enterobacter cloacae
atgagcaaagtgacttttgtcgtagattttgaggatgggaaagagccagcagtgcattcccgcatgaacattcttggcggagagttagcggcagttgcgtggagggatgcgattaaatcagaggttgtttccgttaaagatggcttgcctgcccctaatcagcagtgtttgttatttgacgccaacggtgagggctgggtcattggctggcgctcagtttggctttcagaatgcatgactgaaacaggtgactgggactggagctatcagatcgagagcctggatgatgaggaaatgaacattactcattgggcacccactcctccggtgccagaggcatga

SEQ ID NO: 142592 - DNA, 1164 bp, Enterobacter cloacae
atgaaacataatattcttattgtttgccgctcgttacccattcatacacttggtggtatggagcttattacattagatttagtatcagagttggccaaaaattcaaataacgacgttactgttctaacaactgatattgaaccagaaaaaaaacaacagaatgaaaacttcgctgttagctatgtcgctggcagtccctcaggtaaatatagtcgttattggtggagtcgaagttctttagaagcacgaaaaataattcttgagaaaaatattgattcggtaattagtgtgagctctggagcttacgagattgttaagctcaaaaaagagtttccaaatgttaaatttattttccaggctcacggaacttcgttaggcgaaatagtatcgaagtttagatcgaaaaatattaaatcaataataggtagtgtcagaaacttctcctggattgtaaaagatatcctgagttataaccgattcgacaaaattgtagctgttggaggtcatgtatataagcagctaacatcaggtattttgtcacatttttttgaaaaaaataaatgtgtgtgcatcaataatggtgttgataatgccctatttggatatgacgaaaatcgacgtcttttgaaaagaagtgagcatgatatcgaaaccaacataaaggttttcctttcagtttcacgtttacataagcaaaagggcgttctaagtgctattaaactatttaatgaatatagaaacttaaacaaacactcgtttctaataattgttggtgatgggcctcatcgaaaacaaatacaagagtatgtacactctctgggagtaggtaataaaacaagagtgcaaataagcgagtacctttcggcttcagattgtcttttattcttaagcgatcgtattgaagtcggtctaaccttgaatatgcttgaggcgttgacttcaggcttacctattgtcgttggtaataattttaaaaccacgattgataatcctggtgctttaaataacttgattttttcaactaatgtaaatgaaatagattgtaaaattcaagaggggcttgaaaaaaggagctcttttgttactaacgattatagcttaagtacaatggctaataaatatcaaacattgctcgatagaatgatgagtaacaaatcacaatga

SEQ ID NO: 142593 - DNA, 1428 bp, Enterobacter cloacae
atgacatcgatacttcaaaaaatcgatgagtccatacaggcttccaggaaggaccctgactttttggcatcagaatctataaaaaatgattctgcacgagttctcatttctgcaaaaatggatgaggatgcacttactctttggcagtatgtatacgatcatgcacccgattggattgaaatcactgtaaaagatgattgtgctgatgagattatcccttcgtcttgcaattcgggtgataaacttgacataacactgaaatgtaatgcatacgattatacccggtacatttttacgcttgaaggctggaacgtttttcttcatgatgatgcacttgtatcagttacaaatcaggtaaatattctaggattaaaatctggattcgaaactcaaggatatgaaattcggccatggacaagcattccagcaaagattgagcatcttaatgaaacacgcaaccccattaacgcgcaaagttatataaaattctactctagcgaattcatgccaacatccgatatagcttcatggatcctaggtaaaaaacctgtagcggaggatgtatttttcaaaaaatggttacaagtatcttgtgccatgcttagtcgcactttggttaatgaactactagcagatgaacaaaaatcaatttgcttaactggaaagcctcccaaaaaattactttttggggacccagacttgatttccgattattcagttttacaagttgtaattaactggatttttattgaaggaaatgaggttgaactcaaacatactttcctaacaagtgagttggcaagagaatggccagagaatatatccttctgtgagggtttactaaaaaaactccctatggcctatgaatcagcaaaattactatacaaggcgcacattcgctcgagtagtaaagagactatcaagtcattatccgacctaaggaaaactttagctgaagacacgcaaaagataataagtcagtcaaaagacatcacatcctctctctggaaagacttggcacttgttataagcctatttgcgataaaatatgcgctggatgcatcaaaagttactatcagtaacaatatattcccatatatgttctttgcgttatctctatatatttttatatctcaggctactactctattcataaataataattacttcaagatacttgatgatacaaggattgcttggagagataaactatatggttttcttgatgataccgactacgagaatcttgcagtcactccattgagaaaggcctacagatcttataggattattgccgtacttgttgtaattctaactttcgtaatttcatttgcgatgatcgttttaggcttctcaatgcttgatgaacatgctaccaatgcaatcatctcttggataaacactcatatagataattattgcagttaa

SEQ ID NO: 142594 - DNA, 1059 bp, Enterobacter cloacae
atgagtttcctttctgagcaagacgtacaaaacttaattattaacagaatgatcttccacgttgttggtaaaaaccttcaagttccgacattattaaaagaaattaaaccggtccagcatgtcgacttctttcttgaaagaattaaatcgtcattaaaaggtaatttattcagtttcatcgacaaatctaacacagaaagaattttacgaattatacaaactcaagctgatacggttgccaactgttttacagatcaatcaaagcagttagccagcgattttcaatcgcatcactctagtggtaacacaagtatggggtgcttcttcctctttgaattaatttctaatcaggaaaaactctatgcaataataaaatatgacaatgaagatgtagttaggtatgttttaaatgaaaaagttacagttgagcaaatgcctacactagaaagatttcatgaaacatttgttaagaaagcggaggcgatgcaaaaaatcgcattcattaaacttgataagagtggtactggaggaaaagttatagttaaagaccggagtaaaagaacaaatatttcagggtattttaaagattttttaagcgtcaaaagggtgaattctgaaatagacctctgcaataagctcattgaagcattaaaagcaacttttaaaaaacataaagagttgctaccggaatccattcaaaaaagcggcgtaaataaaatatttgaagttcttagtagagctgattacgagtataacgctgatgactccgctccgttattgactagtatttttggtccattggaagagaagtctccaattctcacgaccttccaaacccaaaccaaaaatattggcattgagggtgagtcatttacgataaaagcggtgaacattcagaaaccagccaggagaaaaatagaaactgcggaaagcgtagttattagttataatgaagatgaccgtccacaaattaaacaattaaacgatgggcgtactcaaattataattactacagcgaggattgttattgatgacatcgatacttcaaaaaatcgatga

SEQ ID NO: 142595 - DNA, 288 bp, Enterobacter cloacae
atggtagatgtaaaaatcacttgtatcaccctctccagtacgaacgctcttcatgagcatatcacacatgttggaagtcctcagttcaccccaaccgggagtaaatggactgttgcccaagtggttgatgccatcgaaaataagctgcatacattttacgtgaaagatagtttaggtaaccgtgccgatgttggagtggtcgatcctggaggcggcagaaaaaaattcattagaacttatgcggacggcaagtggaataataatttactggcgttaccagtttgttaa

SEQ ID NO: 142596 - DNA, 321 bp, Enterobacter cloacae
atgtcgtatagatctcccgtcttcaaaagcacagtaacccccatgacgcttgccggcctttgccaccttgatggaaagtaccgcgctatcgaaacctcatcgggctttgctgtcgttgacataacccaccagcctcagcatggagacactgttgcgttctcgttctacggcggcatgcagtttgcgagagtgctgggtaactcattaatcatccctgagggtgatgtggtagaaggtgatgcactcgacgatgtacgggtagtcggagtggttatctttttgattaaagaaattaacgatgacgaactgccaacaatttag

SEQ ID NO: 142597 - DNA, 366 bp, Enterobacter cloacae
atgcgtgatatcaagatggtacttgaactctgggggggatgggctgcgagcgatagctctggtgtcgattactcaagcatagcagctggctttaaagggcttattactgaaacttgcaaatctcgaccctcatgttctgataatgatgccctgatcattgaaggctgcctggcgcggctaaaaaagaaaaaaccatatgagtattctttactagtagctcattacttgtacggcatttctaagcgaaaaatagcgaaagcacgcaagaaggatgagaagcttattcgcagcgaaattcaaatggctgagggttttatagatggatgtctttctatgttagatgttaaacttgaaatggaatattaa

SEQ ID NO: 142598 - DNA, 804 bp, Enterobacter cloacae
atgaacaaaccaattaatcctctttttgagtatacggtgaagagttggtcggaaatttgggaactggccacatactttgctgatgatatgggtttcatttttagggggcagcgttgctctagttggacgctagaaacttctctagacagacatctaaagagaataaaaccagaagaaataaatttagatagtacgtatgattttgtattgcaaaactttgcgttatccttacgtggccgctcagatatagacaaggatcatattagtaatatcgatgaattatgggctttagggcagcattatggcctcgccacaccattattggattggactcgatctctgtttgtggcattatattttgctttcgaggattataacatatcagattcgggttatcgcagtgtatgggcacttaacctttcgggcacagtattaaatgccatgaataaattcaatgaaggaaaggaagaaaacaaacaattcagaattgtcgaacccatttctgataaaaatcctagattaatttcccaaagtgggttatttacaaaacaacccatcaattttagcatcccagattgggtaaaagacaacttaccggatgatgcaccctatttaatgaaaatatctattaacgaatcagaaagaatgaaaatactatcttcattaaaattaatgaacattcatccggcatctctctttccggaaccagacggcgcagcaaaatattgcaatcagcttctagagttactgagccacaaaaacaacacatctctattcgagaaaaaaaaccaaaaggataagtaa

SEQ ID NO: 142599 - DNA, 537 bp, Enterobacter cloacae
gtgaatagcgccgtaaaaatactactgactggcggcctgttagtagttatcgctgccttagccattctgctgttgttaagccgttccgacctggcgatagctgagcgagacgcgaaggtgctgcgcagtgacaacacattacaggggaaggtaatcgccactcaggctttcaacttctctcgctttaatcaggttgcagaggaaacagggcggttaaattccctgattgactaccacaccgatgataacgttatcgaataccgcgagattctcagacgtgaaaaaacatgtgatttgcctgtgcctgcttctgtcgctgccgggctgctcgaatacacgaaccgtctacgtgccggggcagtgcacgccgataccggcagccctgacgaatccgatactggtaccgctgccgccggaaagctgacgtattgccaggctgttttgtggatcaatccgttgctggctgccatcgataaggcaaataaccagttgaatgggatcagaaagatagaacgagagcggcgaaacgaggggtag

SEQ ID NO: 142600 - DNA, 243 bp, Enterobacter cloacae
atgcctaagtttcaatttccagacccagatgaccgttccatcaacaacccaagcaccattgttgatagcgagcgagttcttaacttatacaaccaagaaaataatgacgatcgtgagcgtgtgaccgataacgtcaaaaattggtttaaggacgaagccaaaaagatcggttggaatgatgctgattttcacggcaatggctgtgttctcagcgtgaatattcaaaaaactgacaataagtaa

SEQ ID NO: 142601 - DNA, 477 bp, Enterobacter cloacae
atgagttttttagattatgcgataggcctgttttcaccaggctggaaagcctcacgcctgcgtgcccgcgcagttattaaggcgtatgaggcggtaaagcaaacgcgtacccacaaagcccagaaggaaaatcgttcagccgatcagctcagccagatgggggcggtttcactgaggcagcaggcgcgctggctggacaacaaccacgatctggtgattggcgttttcgacaagctggaagaaagggtggtgggtgcgaagggcatcatagttgaaccgcatccgatgctgactaacgggaagatagctaaaaagctggccactgatatccgcagaaagtggggcgaatggtccgtaagacccgatgttacaacccagtttacccgccccatgctggagcggctaatgctgcgaacgtggctccgggacggtgaggtatttgctcagctggttcgcggtaccggaaatggtctttag

SEQ ID NO: 142602 - DNA, 315 bp, Enterobacter cloacae
atggcggatttcggtgttcaaacatgggacgcatcaggcaaggttaacaactatggaattaagccagtcagcgtttgcggctatctgcagctggccgttaaccagaaaacaggctcttattccgttgcccttccaccgggttgcaaactgacctactttcaggtcatgaacgatgataagtggggaacgggaagaaggaagatcaccatctccggcggtactgcaacggtttcctcagtgggagataccgactactcagcagggactgaacccgcagttgcagcttttctcattttccagatcgagagggcataa

SEQ ID NO: 142603 - DNA, 672 bp, Enterobacter cloacae
atggcgcagtacggaggtttactggcgacgacgagcggtgaggtatgggttaccgcgaatagctcgccaattgcattacaggcgcgcaaaacagcggcactgcagggaacatcgggtttcaataccagggtgacgcacacatttccctcaggtcagcccgttgtggccttcgttcattgcacggttgaggtggaaatcactcagacgataagcggaaacaccatcacgattgattttctcagacctaatgcaaccggcacagcgtacgtttattttttcacaattttcccccagacaaagccagattacgggatggccgtgtgggatgcatcggggaccctgattttaacccacgagacgcgcacgctcggcgatgtcgttaccataggcactgccggagtagatgcaagctcaggctacaacatcaactcaacccgggcggggaagtgggcttgcatgcccgtcatgctcggcctgattaccggggttatatcagcgggcggtcagccgcagccttactcggcaatatacaagagcatggcgaagcttgaggggagcaatacgcggatatttgccagacctcagacaacccctaacgggagtctgcaaaacgtcgcgtactcaaacatgagaaacgtcattatggccattaactgcgccaactatgattga

SEQ ID NO: 142604 - DNA, 234 bp, Enterobacter cloacae
atgaaaaacatgattctttgcctgacggtggcggttttgctctccggttgcgctggcgttattgagaaacagcaacctgtgtgttctggtacagcccttatcggcgggcaggaaaacagtgtccagatttacggagtgcgtaaacaaaacaatcagacccagtaccgcgccggttatccctttaactggacctgggttagtgccaacacgttcatcagcaccacctgccaataa

SEQ ID NO: 142605 - DNA, 1344 bp, Enterobacter cloacae
atggcactcccagatagcctcaaaggaagatacgcatatcattttacttcgattgacaatcttaattctataatcgaaaacgggctgttatgtaccaacttaaaaaatgaacaaaatatttctcatcagaatattgccgaacttgggatacaaggaagaagaagtacgatgtcggtaccgtgttctgacggcaagtttgtccatgactatgtccctttttatttctctaaaagaaactcaatgcaactgggtgtgattaacaaaaaaaacattgatcaaatgtttcttatttacttcgctattcccataaaaatcattgaagaaaaagttggagttgttttttctgacgcttcggcaaacactgatataccaccaaatttttataacgcttcatcattaaacatgcttcattctttaaactgggatattattgatagcaaaaaatgggcttgcccgtcagaggaagctcgtcatcagaagatggctgagttacttgtcccagatagtatcaatatttcagatgtggcttatatagttgtttggaatgaatggatcaagaacaaagttttagaagtattcaaatccaaaggaatacaagcgcctccaatccggtatgatgaagatcactattatattaacttttatgctggtggaagagcatcaattgtaacaggaccctttcacctaaagcgcgccatgaagtcgacgattacaaaaatatgtgaagattgtaaaggttttaaaaagtttagtagtattcgtgatgcattaaaggcaatagaaaacaacttttcatctataaaagagcttggcgatatagacggtttaaaggcaagttattggccgcatactgatgatgtaggcacacatagcagaaaggtagctagtgctctaaatcagttcgttgaatatactagtttgtctgatgaagataaatatattgttcttttatccgcatatttgcatgacataggaaaagggccgaagtctcgctggggagaggatggaatgactaaagctgataatgaccatgccgcaaagtccttgcctatgctgaaacgaattcttactgaagatataggcgggctcagtgaacaatccgtgagaaagatagtaacattggttacttatgatgacttgatcggtgacattgttgcaaaagatcgtaatgaggagcaattgtttgacataattaacaatcaaaatgatttgcaaatgttaattgctctatcaaaagcagatatgtatgcaatcaatccagaatgggtaactatccacagtaaatcaatagagggcttagaagaaagatttatgcgcgggattaggagtaatagtcaatgttaa

SEQ ID NO: 142606 - DNA, 1131 bp, Enterobacter cloacae
atgttaaattttgttaaaggcaacttctttgattatgatgctgatataagaattaacacagttaactgtgtaggtgtcatgggggctggtgtcgctttagcatttaaaaataaatatcctgagatgttcaaggagtatgtccgtcaatgtaaggctagagaaatagcaccaggaaaacctagcgtgtggaaaaaggaagatatgttctctaaagggattgaaattataaatttccctactaaggaccattggcgtaacccttctgaatacgaatatattgaaaacggtcttgcctggctttccgaatatttaagtgataaggaaggtttaacgataacactaccagctctcggttgtggacatggtggattggattggagtaacgttaaaaaactaatacttaaatatctttctgaagataaaaacaatattttagtttttgagccggaatcttcaaaaaacgcaggtaaatcgacgattattacacctagtaaaattgcagaacttaaaaatttaggagtgaatttaatatcggttaaagatgatttctatccttttggattgatgcgctatacggaaaaagatctttgggcgctaggcaacgaaattaaagagtttgatatttctttaatcgccagtactaaacctaatgatcaggaaagagttgttatccttaaattaattgagtattgtaaggctaatagcctgagtattttgtttggtggttctgcgtttgataaaaaaatggctttgcattctattaaacaaggtgtgaaatcagggatttttttgccaagcggaatttcgtattcagcagagaaaatgcgaggcaaaggcgttacgggtaatatatctattctttcaataggtgatccttttaaatcatttgataaaaaagaatatataccttctgttatgggtcgtatgtttatttgcaagagggttatttttactacagaaaggctgaaatggcttgaaaaacaggcggataccataataaatggtaggttgaattcatattttatgaaatacgacaatcttcaaaatgaggattatttagctgctattaatataaacgcaaaacccttaaaaccgttcgattgtgaacaaatgctggaaatctccttttga

SEQ ID NO: 142607 - DNA, 657 bp, Enterobacter cloacae; identical to SEQ ID NO: 125366

SEQ ID NO: 142608 - DNA, 1104 bp, Enterobacter cloacae
atgaataacagaatacagtccatacactttttacgtggcattgcagcggtatgcgtagttttatatcattttaagggatatctgaatgatgtttatgcacagaaggatttggggcagattctctttggctcaggagctttcggtgttgacctattctttatgataagtggtttcataattgcactttctagccagaaagttacccctaatctggtgtttgcaattagacggttctttcgcatctatccagcattcattgtgatatttcttattggcgtcgcttttgtctatcgatttgatccgaatgagaatattctacgaggaatgttttttatacatcgagattactcaatagagtcccctggctttggttacaatgtgctagggccagcatggacattaacgtatgaaatatatttttatactgtatttgccatatcgatgtcattgagccataagtttagaacgctcattgcgtctatcatgcttgcttcgtctgttttcatcatccagtattattatgatggctcgatttctgttagtgggctggcttcagccagcgtcccgcatgatagttatgcttttggtctattgcgttttatgtcatcccctatcattcttgaatttgttgtcggcatggcgttttatgaattgttcaggaacatgaaattaaaagtcacttctggaatggcgacgtttatattcttttcaaccattggtatatctctaacaaattactttactggatattttactgggtttgggctagataaggctggcgctttctcaatcattctcctgttcggttttttaacatatgataaatatgtgggattcaaagaaaataaaacattatcatttttaggtgatgtttctttctcagtgtatatatcacattacctttttattaacttaatgaacttctatcgtcctgacttctacgttgattcaaatggaatcggtcgtttatctatgatgctaacaattaccttcattgctggtaccgcgttacattattgtattgaaagaccattcattaaggtaggaaaactgatagaaaagagggtgacagaggttattccatctaaaagacacatggcgtag

SEQ ID NO: 142609 - DNA, 2085 bp, Enterobacter cloacae
atggccgaacagaaagtaaaactaaccgacttacccgcagcaacagataccattgataccgcacagttgctgataaatcagaacaacacagaccaaaagattcctgtaacgcattttcttcgcggaaaaaacaacctttctgaccttgctgatattggtcaggcacgtgcgaatctggatgttccttcagtagatgaagtcaatgataagctgactggatttatcgacggatctaatacatttttagctggcgcatcactcgcatctcgcacagattttatctgggatgaagaaagtaagagttggtattactggagcggcgatttaccaaaggaagttcctgctgcatccaatcctggatcaactgggggagtttcccccggggcgtggattggcgttggggacacccacctgatatccgcactatctgcttcagatggcgagaagttaattggtgagtgtccagacattgctacgcttcgaactatagagccatcatatgacaagcaacgcatcactgttcgtgagcatacctctggaacaagaaagggcggaggacagtttcgagcggtaatggcaggatcttcttttaccgataacaacggaacaataatcaaaacatcatctggagcggcatggttacgtattaatgccgatattacgaaccccttaatgtttggggcgattggcgatggtgttgctgatgataacgccgcattaaccgcagcgattagagcgactgctagaacatgcgatggagtagggcttacatatggtgtaggctcaggagtacagcaggattcggcgaccactaaagaattcagaaatgcctacgtaaagtatcttccagcattaggaactggctctatgtggcgattcaaaaatgcagctccagtaatgagaaacgtaaactttgatggtagcggggggacaacaggttcatgcattatttgggagggagctaatacaagggatggtgggattgtcgaaaactgtgagtttaagaacataggcggagcaggaataaggatatcaggtgattataccaaccggatatttgcaaggtttggaactatacgaagttgtcgtttcattaaatgtggcaatactggagtggctaatgaccgatgctcactgattgcggacggcgtaagcaatttcacatttgatgatttaaaaatgactcagtgtaactggggtatctatgtgaggatggatacatctcttgcagacaaggccagaagtccaaacaatgtcatcagcaattgccttttccatggtagtggtagaacacacgccacctttactgatgctcagggtatctcagcgaacaggcaggaaaaccttaagataactaattgcgacatcagggactttgctgacaacgcaatcgataatggttctagccgaggctcagtaatcagcgatgtaacgatgactaagtgtaaagatgcaatctttattggtgatatagactgcgaagattatttaatatcaaacatctatgccactgattgcgacagactccttcgagtagtcatggatggtaacattcaggttgatggaactgtacggcgtgttaaagttgttaattgtcacgcaagaaacccaatattccatggtttttacgtagtaaatacgggagcatcgacatctatatctcttgttcaattagagaactgcggagttgactcttcaacttcatggagtggggcatatgattgtgcatatctcattaccggcatccaaaacatgacaatggtgaattgtttcgcgcaaggaagcaggacggcggcggttagaatcaaaggcgctgccgatatggtatcgatagttggaggtcagtttgtagactctaataaatcatcagggaatggagtattcgtcattgattgtgatcctgaagctaataggttgatgatagatgggaccatctgcaacggaggagggtcaacggctggagccatcagaacacaaggcgcagcaaaccaaatcattaacaatagggcaagagcgctttctgccacaccatttagtttgacaacagcaggaagcagctataacaataataatatatcattctaa

SEQ ID NO: 142610 - DNA, 642 bp, Enterobacter cloacae
atggctgacattgttctcaagtatcttacagacctgccctcagcatcagatgcagaatcaacagacctgatgcatatcaatcagaacggcaacgaccgctcaatcactctggatgccctggccactgccttattcaacatgcgctatccggttggaaaagtagagtggttcgcaaatgacgttaacccaaatgcaatctggcagggttcaacgtgggcgcggattccaggggcaggcagaactattcgacttgccaacagtacagggagtgacgttctccagcaaggtggcagtgattctgtaactctgacaggagcgaataatccaccgcatgtacacccggtggatttacgaaccggtcagtttgactatggtacaaaaaacacaagccaggatacccatggccacactgttccattgaagagtgtaggcaaatggacaggtgggtctcaggacggaagcagcgacgatatcagctcctctcaatctacaaacacatcaagttatcaacatgcccacacggtagcaattggcgctcacgaccaccctgtaaagggtgacacaggaagtgctggagatggtgctccattctccgtaactaaccaatacgtcaaacttgccggatggtacaggactgcataa

SEQ ID NO: 142611 - DNA, 237 bp, Enterobacter cloacae
atggaaaacgcgctgattattctggtagttcttatagttcttttcatcgtattcaggaaatttaacctgtggtattggaaaatacaggagcacattgacaatcagaagcagattatctcccttctggaaaaggtcagcttccgtgtaggctcaatggatgaggagataactgaattatcaatgatatacaaagggaaaaaccagcctgaaccaaagtctggactccttgatgattag

SEQ ID NO: 142612 - DNA, 510 bp, Enterobacter cloacae
atgcctgttcagacttcctacgataacgacatgcagatcgcaatgcccggcatgcgttcagattcaacccatcaaatcacagacggttgcaacgcagcacaaggcgctatcaagcctggctatgtggtagctcgcgtatcagtggctaacgacaagcgcgtagttaaacaagtatctgcggctggcgatgcagcaaacctgatgggtatctgccgcttcagccactacggctgcgtcacaggtcagtatgaagatggcgatgccgtcaacgtgatgacatggggccgaatctgggctgtaaccaccttatcagcagcaccaaccatgggtacaggcgttaacgttctgacctctggcgcagacgctggcaaggttgcagcaaccggtggctctctggctctgagctgggtgtttactggtaagttcaccactttcaaaaacagcgccggtgcaacagttaacctggctgaagttcaaatccgcaaccaggccacacagccaaccgcataa

SEQ ID NO: 142613 - DNA, 282 bp, Enterobacter cloacae
atgaatagcacatgcccattattggtgtttgacacatggcacccagagcacgctcagaaggtaattaaaaggttaggcattaagtacctatatgccgtccctcgccctattggtgattgttggcaattcttttgttgtgaggacatccctgaacaaatacctgaggatgataaaaagtatctttcgtttgtttttgattataaagacccggtaagccaggttggttacggcctaagtaaggaaatggctgaatctatacaggagtggatgaaaacaaattga

SEQ ID NO: 142614 - DNA, 1257 bp, Enterobacter cloacae
atggctaaacgcaacaacagacagcaaaagaaaatagacaagaagatgaacatggacagttatcaaaacgtgttcatgaacatcggtacaggtggcgacaggtcagcatacagccgcatccgtttcgcacatctgttaaccaaggcgacattagacaatatctatctcggcgacgggttaggtcgtcgcatcattgacgtagtagccgacgaaatgtttcgtgctggcttcaccgtagacggcgctaacaatgagcctgagattatgtctcgctgggatgagctcaacctcactcagcagtttacggacgccgtggcatgggctcgcttatatggcggttcgttgatgctattcggcgttaatgatgggggagaccttcagtcaccaattggagagggtgagcttgagttcgtccgtgtgtacgaccgctatcaagttcaacctttccttcgcgatactaaccctgaaagcgcaacatacggcgaaataactcagtaccaaatcaaccctatctcaggagcgccttactacgttcacgccagcagatgtcatgtgttcgacggcgagcgactaccaaaccagattcgccatcagaatcaggggtggggagcttcgtgcttgcagggggtctatcaggcgctgactgattacggcatgagccacgcacacgctacaagccttcttgagcgtaaacagcagggcgtgtggtctgctgctgacctggctgacctatgcaaagatggtgaagggcgtgatgctgttcaggctcgtctgaacatggtcgacatgacgcgcagcaacggcaacaccatcggcgtggatgcgaacacagagaagtacgagctgcttaacggctctcttgaaggcgtggtcgatgtacaggaccgcaagcagttacgcatatcagcactgaccggcatcgatgagcaaattctgttcaccaaaacaccttcaggtcagggcgcggataaaacaaccgttccggagtcatggaagcagctgattggccgcaagcagaaggatgaggcgagacctgcaatagaaaaggcggtcaacttcctcaccactgataaaacctggacaattaagttcaatcctctctcagtgccaacagagaaagagcaggcagagacggctaaccagtggtcacaggctgatgaacgctattctcagcttggctgggtgagcaacgatgaaggtgttgccacactgaaaaaacgtggaggctacgtctatccggagatgagcaatggctaa

SEQ ID NO: 142615 - DNA, 1560 bp, Enterobacter cloacae
atgagccaaatactcgaatgggaagatttgagcgaagcagaacgccaagccatcaaagtcctgtccgagcgctcatttctggcctttaaccgcatattctttcagttgttgcaaggtgagaagtggtcagttaactggcatcaccgatacattgcgcaggtgattgaagatatcgttgccggcaaacgccgtaatgtggtcttcaacgttcctccaggcagtgggaaaacagaaatgttaagcatccatgcgccagtgtggacaatgctgaactgtcagaaggtcaggaacctcaatatttccttcagcgacaccctgacaaagcgcaacagccgcagaagccgtgaaatcatcacctccgctgagtttcagacattatggcctcactcgcttggtgttaatcaggctgacgaatggcaattgctgaacgatgacggcaaggttaaagccgaagtagtaagccgtgcagcaagcggtcagattaccggatcgcgtggcggttatcagatgccaggcttttcagggtggataaaccttgatgacttcgacaagcctcttgatgttttctcagaggtgaagcgcaaaaaggcacagcagacattaacgaacaccatccgctctcgtcgtgccaataagtcaaaagataatccgacaccaatcgttgccattcagcagcggctgcacacagacgacagcagcgcattcatgctgtcaggtgcaatgggtatcgactttgagcacgtcattatccccgcgctcattgatgaagcctatatcgattctttacccgaatggcttcaggagcattgctggaatgacgtcaaagacagcgagaagatgcgaggctactggtcatactggcctgccaacgaatatgtaggcgacctttgtcgccagtgggacacggacgaatacaccttcatgtctcagggcatgcagaagcctatcaagctaggcggcaacgtgtttgatggttcgtggtggcagacatacgggcctgacggtgataagccagagcctgaacgcttcgaataccggttcactaccgcagatacagcgcagaagacggctaaccataacgactggtcggtactgtgcgagtggggcgtgtacaaagacgacctctatctcatccacatggagcgcggcaagtggaaagcgccagagctagaaacaaacttcaaggcgtttatctctcaggcatggcgtaagaatcgggaagcaggaacgctgagaaaaatctacgttgaagataaatcaagtggcacggctcttattcagaaccttgagaaaaagcttcccatcaagataaccgctcttcagcgaaacaaagacaaagttacccgggcaatggacgttttgccggtagtcaaagcacagcgtgtctatcttcctgctgaagcttccttctcctcagagtttatcgctgagcacagtgctttcacctacgacgacactcacgaccacgacgacatcgtggataaccttatcgacgccgtgactgaggaattactccttggtagtgatgccctacgcagactcaaggcgcttgcaagctga

SEQ ID NO: 142616 - DNA, 330 bp, Enterobacter cloacae
atgcctactaagaagcaaccaggtaggccagcaggaaccccaaagactggtggccgccaaaaaggaacaccaaacaaggtgaccgcagacgtcaaactaattgcccagacctacggcgaggaagcggttaaggcgttagtgaaaatactacgtgacgacgaagcgcctgccgcagcaaaggtgtcagcagcaaaagaaataatggatcgcgcctacggtaaagccactcagcctatggaacattcaggtagcggtggcggcccaattgagcacaaccataacgtagccgtagacgaaaaggcgcttaacagcatattgagcaaactatga

SEQ ID NO: 142617 - DNA, 522 bp, Enterobacter cloacae
atgaataatccgtcagttattccggctttcgattttcgtgaaatggtcacgactctcgataacaagataattaccacgtcactcaaggtggctgactactttggcaagcgacacaaagacgttttgcgtgccatacgtaacctgaaatgctccgatgacttcacccagcgcaattttgcgcccattgatttcattgataaaaatggcgatgttcagcctatgtataacattacccgcgacgggtgcatgatgctcgtgatgggattcactggcaaaacagctgccgcagtaaaggagtgttacatcaatgcctttaactggatggccgagcagctaagccgacgcatggcgatgggcgaagaaatgcagcaccgctacaccatcaaagaaacgcgctcaaagctcaagggaacgatcggcagccggttgatgaacgaacggaagaaagagaagcgcgttttggcattggagcatgaacacatcatgcaggtcactcaaccagaactcctcattgatagctaa

SEQ ID NO: 142618 - DNA, 228 bp, Enterobacter cloacae
atgagcttctatctcttttattgtccgtatctgtccattgcagatgtccagagaagtaagaaggttgatgttcatctggatgctgtcaccaaacgtcatctgcttaggaatttctggcacagggcattcaatcagaagatttgccggaatcggtatcgttggcgcttttaccgcttcgtactgaatctgcttgtcggcgcaactggtcaacgacagaatcaggaataa

SEQ ID NO: 142619 - DNA, 414 bp, Enterobacter cloacae
atgaacctgacattcatcaagaacctcatcccgttcttctttgctgcaatcatcattggcttcatcgttaagttaggcacggataaccgtcagcttaaaatcagcaatgctgcattgattacagaggctaagcagctacacagcaaaaacgacgatctggctaataccttgcagaacctcgcagaccgcgtaggcgacatgaataagcttgtagacaaagaagcgcgtcgccggtcagcagcagagatgaaatcacaacgcctacaggaagaagtgaaagatgcgctcaaaaacaataagtgctctatcgagcttattcctgattctgtcgttgaccagttgcgccgacaagcagattcagtacgaagcggtaaaagcgccaacgataccgattccggcaaatcttctgattga

SEQ ID NO: 142620 - DNA, 459 bp, Enterobacter cloacae
atgaagataagcagtaatctgcaagcgtttctcgacatgcttgcctggtctgaagggaccagccgaatcaagggtagcgataacgggtataacgttgtcgttggtggctcactctttaccagttatgcagatcatcctcgcaaactgatcagtttgccgaagctcggcattaaatccacagcagccggaagataccagcttctgtcgcgatattatgatgcatacaaaaagcagttagggctgaaagacttttcacctgccagccaggacgctattgccatccagcagataaaagagcgccgcgctttacctgacattgaatctggagacatcaaagcagctattaccaaatgctcaaacatctgggcatcactgcctggtgctggttatgggcagcacgagcacaaaattgatgacctggtggataagtacatctcctatggaggtgccctccaatga

SEQ ID NO: 142621 - DNA, 318 bp, Enterobacter cloacae
atgccatataaaagcgatccgaacctctggtcgatcctaatcgctttcggcatgactctagtcggcgcaatagccagttactccttcaaagtcctcaacggtgaagcgtttagttggaggacaatgtgcctacagctcatcgtgtcgatattcgcgggactcctcatgatcatgatcgcaatccactacggctggcctcaagaggtcaccggtggcgtatgcggcatggctgggtggtcaggttcttccctaatcaaagcccttgaaggtagattcctgaacaaggcgtctggagtagtcgatgaagataagcagtaa

SEQ ID NO: 142622 - DNA, 243 bp, Enterobacter cloacae
atggctcgttatatcgcagtaattcacggctggcatgtgcatagcaagggattcacggttcatcagcttgaagcaacatgccgagaatcggcagagaaagatgcggcttacttatccagccagcgaaaaaagccattctgtgaatgtgcttacgtggtggttgaggtcgctgatagcgagacacttcgcgcatcccgcaagctaaccattcgcgaacgcctgaccgggaggactaacccatga

SEQ ID NO: 142623 - DNA, 522 bp, Enterobacter cloacae
atgagcaacatcgacaaacaggctctgcgccaaacagcagagaaagctcaagagcatggcgtgttcaacatggacatacattcacaaaccgtgctggcgctgctggatgagctggaagctatgcataaatacgccaaagaccgtgatgcagaaaatgaaggcttgatgattacggttggtcggttgcgtgtcgagaaggaagccgcagagaagcagattgctgagctggaggtgctggcgtttagtcctgcaattctggatgtgatatcagaacgtcagcggcaaaggtctattgagggctggacttctgagcatgacgaccagtacgacgaatcgcagttattgttggcatcctcatgctatgtgctgaacaccatccagccatttaaccgcatgccgatggactggccgtgggcatcagaatggtggaagccgacaaatccacgccgtgacctggtgaaagcaggtgcgttaattctggctgaaatagaacgcatagaccgtcaggaggcctcccaatga

SEQ ID NO: 142624 - DNA, 1260 bp, Enterobacter cloacae
atgtataggcttgatagtgtacaaattgagggtttttgggggcgtttaaacgcatcttgttctttcaatgaaaacgtgaatattattattggacgaaatggtactggcaaaaccactttcatgaacatattgcattctgttttggctgtagagctagaatcaataaatgaaaataattttgatagggttactatcaaaataaaggatggtaataaagttaaaacaatcaaagtggagaagaagtacgatccttcacgtccattatctacattcgagtacgttatttcacgaaaaaggtatgtgatacgctcaattgatgatcgtaggatgcctttctctatgagaagaaaattccaagaagatattgataacttaaaatcagaacttcatgatttagtcgcactctcttcattatctgtatacagactacgtagtggtgaagatctagaaataagagataactatggttcaaaatttatcaacccgattgattttaggctggagcagttacttcaaaatttgacgaaatatcaactttctttgtcacaaagagcgcgagatgtctctacgaatttacaaaaagaagtattggcctctatcctttacagtaaagaggatacggtaagtgaagcttataactggaaatttgataaagaatcagagagaagaagcttaatatctgcttattctcaactaggcgcaatagatagcgacgttagaaaaaaaatcaattttcacattgacgccatcgataaaacttttcttgagttaaaagatgcagaaaaaaacaaaaaagaggtgctaaatattgactatagatcttttgaagccttaagaaagacacaacgaattattaaaatgtctttaaaggcagaagaggctgtcaaagaaatcttctctcccataaacttatttaccgatacattacatcaattcataacagataagaaattccacttcctttctggagagttattacttgaaaataaccatggattaatcaaccataaaaatttatcctccggagaaaaacaacttttaattctttttatcgaaaccttattacaacagaataaaccttttattttcttaacagatgagcccgaactttcgttacatattgcgtggcaacgtaatattattcctgccataaaacaattaaatccaaacgcccaagtcattgcagccactcactctccggaggttgcatcaaaatatagaaacgctatttttgatatggagaagttggttcatggatga

SEQ ID NO: 142625 - DNA, 840 bp, Enterobacter cloacae
atggatgagtttcattattcaagtgaagcagaaaacatcttaaatagattctatcaagccgagataatggtctacgtagaaggtgatgatgatatttgcttttgggaaactattttcagcaagactagttcttataaagtggaaatacaagaagttggagggtgtgaagaattaaaaaaattcatcacccgattgttagaagaagatttgcaagtattagttgcttgtgactcagatctgacgattttcaaagaacaacaaattacagacgccaggataataaaaaccacaggttactctatagaaaacagttacatctgcctggatggggtttacaaagctattaaaaccttagggaagatacctaaaaaggtcatggacactatcgaccttgaatcatggaacgatgatttttataataaagttgaaccgcttataaaatatgacatttataatttcatgaatgaaaaaggcattgcagtgatcggagacaatgcggataggtttatgaaatcaaagaaatccaatgtgatttgccctgaaaaaatagcgaatttcatagttcaacttaatgaaaagttcgaaggggttgatctttcagaagtagaaaaccttatagaggagaaagaaataaacattcgcttatggttaagaggtcattttcttttttcagcaattcatcgtttgatcagtacaattgcagtaaaaaacggaaaatcgatttcgttatcgtatgaagcactgtactccaacttaataaacacttttgaatcaaaattcacagtaaaccaccctgaatttaattattataaagataaaatcacagcaatcccgctttag

SEQ ID NO: 142626 - DNA, 456 bp, Enterobacter cloacae
gtggatgacctgcagagggtggatgactggctggcggccctgctggcgaatctggaaccggcagcccgcaaccgtatgatgcgacagctggcgcaggagctgcgccggtcacaacagcaaaacatcaggctgcagcgcaatccagacggcaccgcctttgaggcgcgccgggtgacggccagaagtaaaaaggggcgcatcaagcgccagatgttcgccaaattgcgcaccactaaatacctgaaaaccgcagccactgcggactctgccagcgtgcagtttgatgggaaagtccagcgcatcgcccgtgttcaccattatggcttgcgtgatcgagtaaggagaaatggcccggttgtgttttatgcaaaacgaaggcttttaggctttaataataaacttatatataaatttgagagtgttattattgacatgcttaatcataaaaaaaggtga

SEQ ID NO: 142627 - DNA, 1080 bp, Enterobacter cloacae
atggctaaaaaactatatttcgcaactgataaaaatatttatgatgcattacatcataaaaggataaccgctgcaaagttgcatgaattattgttgaatcgaggtgtgtttttatcaccagaactcgacaaggaaatactaattgaggaaatatccaaacttcctcacggatttaatgaattagaacacataaaaaaactggtcaaaacatatgacccaagggaaagcactactagtgtgagcttccaaacctcaacaaatcaggccgaattaaaaagtgctgctgaagcactaaaaaaaacatgctcccctagtaaaggtcaaagcctgaatattgtagctaaaaaagatggctcgcttacagtagaatacaaatatgaagaaatagacctgtctaaaactgctttacgccagatcgacaagcggaatgttataatagaacttcgccctggagctgacaaagttgaagtacgtatgcctcaaaaccccgaggcaaaaaaagttattgagagcttgcaaaacgagctatctaaaatcaagtccgaacctatcgagcgtttcgaaatatcattacttgcaataactgatcctacattgcgaagtcagttttttcaggaattaatgaatggtcttcgtggttatgagactgatgacgtaacaaaagtcgaattaaatcgcagtactgatgctggtgaggatgaagacaaggaagaaactattgataccggatttgttaagaaagccgtccttaatggtgaaggggtaaatagttcagctatattttctcaactacatgagaaaggttattatatcgggcgtattgcatggtcttcaaagccgacaagtggaattggagacagaatcaacgtcgaagcatttttcaaagactcagaaaaatgctgtgactttgcctatcaaattaaagggataaacaatcaaaaagaagacggtttcaatgtaaccattcgcgcggcaacggcacaagagaaaaaacatattagtgaattaattgagtccgccgctgaaaatgcctataatataataataggatcagaggtgaacgaagatgaaaaaggttaa

SEQ ID NO: 142628 - DNA, 684 bp, Enterobacter cloacae
atgaaaaaggttaaatggcttaagttaaacatacggcttgagtttgaaacagccgttagacgtctttctcttgattcttttacagaggataaagggaaagggttcatttttgacaaaatacgccatgattttgcaaatgggcgctttgtcgagcgtattgtttatcatgacaaaatagcaagctttgacggaagcgaaactaccgttgaaagaatcgaatatcgcaccacaaattttagcgtggctttagactctcttcctgtaatgcagattactaacccacccagaactttaaagcctttttcgcaggctttggtaaaaaatcttggcttaggcgttagtttggaagaaattgacataaaccctatagactggcttaatgaaatatcttcaagtgtaaatatcaatttaacacaacttgatatttcaagggttagagtttctgattacgctacagctaaaatgcaaataactggcagcagtgatcttaggaagtattataaagaagaattagagggtaaaaaaataaggattgacaggcttgtttgctctgttaattcattagaatattccggtaagctcaagatcaccaatagcggccttgcttatattgatgttagaaatgaaaatgagtttacgaaaatcgtttttgatacgttaaaaaaagtcacccttcaatcatag

SEQ ID NO: 142629 - DNA, 684 bp, Enterobacter cloacae
atgcaaaatcttttccaacaacttattgaactgctttcttgtgatgaccgtttggtgtctgaaggtaagttgacgaagaataaagtggtcgagttggcactcagtcttgatccactattgctgaaacagcttcttaaaagtgagtcattgaagaaacattttttttgcgaagtcgacggagtcctgatttttgacaaaatcaaatttcaaaaatttgtgagtaacaaaacgttcttgcctgatagctttacggcattcaagaacaagattggtcttttggctgacgatgaatacttaattgacaccaatgatgtcgtacttgcttggccttacaaagattgtgttttagaaggttctcaagacaatgaagatgcaaaaagaaaagaaattttctggaatgaggtgttggcaccagatcaaatagacaggcttctcgcccctaaagcgttgacttcatttaaacactttggcggtgggaaacataagggggttgttgactttggttgtgaagaaaacttgatcatcaaggggaataacttgctggctcttcattcgttgaaacagaaatactctgaaaaagtaaacctgatctacattgacccaccatacaacactggtaatgatagttttaggtataacgatagttttagccattcaacatggtttgaatcgccacgcgtttaa

SEQ ID NO: 142630 - DNA, 537 bp, Enterobacter cloacae
gtgaaggttgaaaaaagcgatgttctggcgtttaccatttcagatgttgaacgcctcgaccctgtcagggtgatgattgaaaactatgagcccggcaaggggcgcgtcaccatcacctgcttcggtaaggcgtggaccggggcttggtttgctatgggcggtgacactgttcaggagttcattaagcgtgtcagcaatgactacctgatcgggtgtttagctccccggcttgaaagctcggttgacgatgataacgacgccaaccttgaattcgttaaatcgcaaatcatcaagcttcgccgcgaacaggaaattgataagggtgatgcccgtgaaatgtggacagaggccgaaaatgcggaggatgtgaaggcaaactgctgtgattttatcgttggggacaagcttttgaaattgtttggcgacgacccttggtatgccggatggccgtctgtacccaatccgaaatatcaatatctggaacgcatcattgaagcggtacgtggcgggctcgcagaactggagtgtgtcgcatga

SEQ ID NO: 142631 - DNA, 219 bp, Enterobacter cloacae
atgacgccagcaaatgaaaacgccatccgcgccgcctgccgccgctgcaccgaggaaatccagcaagccatgcgcaagaagccaaagcctaactggaacgaaacggtgcctcccatcatcaacaagcatcacaagaaaattgaagctctgggagttagcctcctggaactcgtcgtatacacagggcggcctaatcgccgcttcggagttgaatcgtga

SEQ ID NO: 142632 - DNA, 198 bp, Enterobacter cloacae
atggttctggatgatgagcgtataagcatgaaaattcaggcgatggggcgggcggtgatggaattgtcactggctgatttacccatgacccagcaaaacatcatcgacaagctgaagcagtaccggaaggaaacaggaaacgtgatagggaagggagctaacagggatgctgctgagatagtgcggaaaggcttatag

SEQ ID NO: 142633 - DNA, 291 bp, Enterobacter cloacae
atgaaatatttaaatttatccttccttgcattggctcttgcctcgctcacgacaactggctgcgccgagctttccgattcaaaaattgagaaagttgattgtgttgcgaaatacacctctggaacctggccgggtggtgagcattgggtgaaggttgacgagcgccgtgttaatcacgttgggcatcgttacgttcacgcaaaaagtgatttagtcctgcacttctatggccgctggcagcgagaagatctgttcactgactaccagtgcaaaaaggcaggtgaggcatga

SEQ ID NO: 142634 - DNA, 288 bp, Enterobacter cloacae
atgatcaaactaggctcaaagctccttatcgccgctttggttttaaatgtcgtagggtgcgcggatctgcaaaagttcgagaggcaccaggtaagctgctacggcaagtatggttcgaactttacaggctttacccgttataagtggatcaagattgatgctgtaagcgttagtcaaaacggcactcgattcgttcacccagagctagatctcgatgttagtttcgaggcgaattgggtatcggacagagtgtttaaagaaatccaatgcgaaccccttcctaaataa

SEQ ID NO: 142635 - DNA, 327 bp, Enterobacter cloacae
atgtcaaatgagatgggaggcgtgacgccagaacaggtggagcgcattgcccaaattgtcgccagagaggtcatggggaacttgcgaaaggatctccgtgatgacatcggcgctgaagtgaaagcccagctaggggcctattttggtgacatgactgccgctcagcacagcatccagcattcaaatctggaaaagctactgacgcgtttagacagcatctcaagcggcttcttcggcggcatcatttctaagatcacatccattctaaccgccgctctcattttggggctggcggcgtatggcgttaaaaacggtttcggcaactaa

SEQ ID NO: 142636 - DNA, 693 bp, Enterobacter cloacae
atggctactccaagaggtatcagaaacaacaacccaggcaatcttgaccgcggcgcgccgtggcaaggtctggtggacaaccccgcagaaccgcgtttctgcacattcaaggacgctacctggggcatccgtgctctggcagtaacgctcattacctatcacgacaagcgcaaagctcgggatggctcgccgatcgacactgttcgtgaagtgattgagcgctgggcgccgccacatgaaaacgacactgaggcttacatcaatgcggtggccaaagcagtcggcgtctcttccgagatgattgtggatctccacgactacagcaccttgcgcccactggtggaagcaatcattcgccatgagaacggcaagggtccattaaagacggcaaacagctggtactcagtggaagcgatcgacgagggtctgcgtcgtgccggtgtggtgcgagtggtcaaagctgtaaaagcagttcctgtcactaaggaatctgctggcgcgacgattactgctggtatcggtgtcgcgcagctggtggacgtagcaccgcaaatcactcatgcgatggataaggctcaggacaatatctccagcggcgacaccattcgcatcgtgttcggtattgcgacggtagcaattgctgtattcatcgcctggtctcaggttcgcaaacaccagaaggggatcgcgtaa

SEQ ID NO: 142637 - DNA, 252 bp, Enterobacter cloacae
atgcttcttggcctttacattaaggccaagcagtacctgttgacggctgcggccgtcatcatggtgcttgctggtgcctattacttcggtggccgggctgctcgccggtcaatggaaattaaagcagagcgtgaggacaacaagcgcctgcaacacacactggatgtgaaaaatgacgttatcaatgccgtccgacgctcggatgatgctaccgttgatgctcagctttctgctgattggatgcgtgattaa

SEQ ID NO: 142638 - DNA, 399 bp, Enterobacter cloacae
atgcgtaactctctgaacattaaagaagcgaagcgctcaattcaaaccattcgtgattgtacgagtgtcatcgctactcacatcttcggtaattcgaagctgcaggtgcgcacactcaacaatgaagcgttggcacctaaagacctcaaattcatcgttacttttgctcacgatgtagagactgctcgcgccacggtaaaaccgctggctgaagctcgtttcctcgacggcgaaatttgctttacggtgaacccagctaagcaattccctgagatggctaataaaatttcctctttctcagaggcaattgaaacttctattcgcgactttttgagcaagcatgatagtatctttagcaccaattctgctaatgatactgctaaatggctcctacactaa

SEQ ID NO: 142639 - DNA, 762 bp, Enterobacter cloacae
atggctcctacactaatagcgtcatcgttattcgataagaacataggcaagtttgctcatgagggcgaaacttgccttcttcgtttcggctatcttatcactgatgatgcgctctacaagctctctcagctggaattagtcgatcctgaagatgagattcatacctacataacgattgaatgtgtaggtgctgctgacgacgataaagcccgtatcaccaaaaccatcgccaaaatggtagacgaagacgcctctgatgaagaaatcatcaagcatcttctcggctctggctacgttgatgaatccaaaaacgttgatgccggcagaattgcgctcagatcctacttcttcaccgatgacgctggccaagaggtggaagcccctcaagtcgctggcgttaaagttgagcgagctttccagcagcaaggtctcagcagccgcgcatacatgtttattctcaattggtttgatcacctggtttgcgacgaagagcaaacagtgccaggcgccaaaatctgggctggtcgcctgtatgaccaatgcgacgtgcgcatttataacggcaagggtcaagtctttgaagatcgcttgagcgaactcggtgttggcgccaaaggcttccttccatggaacaaaggcatgttggtcgatcttagcggatggacgccgaacgaaattcagcagaaggttcagaaattcatcgttctgattatctctcgcgacacttctccaccaatcggcttctgccccccccaatcctga

SEQ ID NO: 142640 - DNA, 666 bp, Enterobacter cloacae
atggctaagatcattgtgattggcggcaccaaaggtggccccggcaaatccacggttgcgcagcaggtggccggtgcgctggtacttaaaaagcagaagaaatgtcacctgaccgatattgatggacagatgacgaccgcaggctgggctgaagagcgccgcgaaaacgaagacctggctcttattccatttgagttcgtggatcatgacgtggttaagcacatcaacgcggtcagccagcgccacgacttcgtggttattgacgccggtggcttcgactccgaaatccagcgccaggcgatgcagatggccgacatcattcttcttccgttccgtccgaagcgccgtgacattaaatcactgcgtaacctcgacccggttctggataacgtgcgcaataccaaccagaaggttcgcatcattggggtgatgaaccaatgtccatccctgccaaaccaggctcagcgcatcattaacgcaaaaggtgtgatcgagtcatttggtatcgagccggtgccagtaaacctctacactcgtaacgtgtacgacgatgcagaagagtctggccgcaccatctttgaaatgaccggttctgaccgcgacactaaggctgaatcagaaattatcgaactggttgattacctgcttagcttggagggtgaataa

SEQ ID NO: 142641 - DNA, 393 bp, Enterobacter cloacae
atggcgaaaggtatgggcgatttgactaagcgtgtagcgccacaagcagcgccagaaacgcaaaaacaacaattacagccagcgacaccagctgcacctcttcgtaacccagtgaagccccaggggcgtcctacgcgtggaaaaagcaagattcagtctcgcaccatgtcaatggaagatgagtacatcgagctgattgatatgctggccgtcattcctcgctttgacaagttcacacgttctgacgtgatccgcgcggccatcttccagctatcggagaaaaccccggctgaaattgaagaggctattaagctgaacattgaagcggtgaacgcgagtgacgtttcattccgcaccgaagaaataaaacgtaagctgatgggtaagagctaa

SEQ ID NO: 142642 - DNA, 591 bp, Enterobacter cloacae
atggctatgcctagctattccccctatttcaaaaccgtctacgacgaacaagctccagttggaaatttaggacgtggaactcactattccatactaagtgccgtccaatggaaatctcccctctatgcaaatcatgctaagcctcaaattcataccttcgctctactctgggatgaagatcacgacgaaagagtgattaacgttcttgaggttgcttacatggccaaccttatgccggcagtgaagtatgtgggcgagcggaaaggcagcttgatggtcgtgtttgatagtagtatcaaggctttaggaaatacggtactctcaccaatgttcaaagaatggttccgaatttgccaggctggatatgcagatgatgtatggcactttgaatacgggttcgatgacaaccctgccttgacaggcatcgtaaacgataagagtgaaaaggttaatttgtacatggcaaacattgccaacctttggccattaggtcaggcagagtacaaacctgttaacttgatggaacgacaaaaacctatcgcccctccagtcttccccaatggaagcaactcgttattcaataagcaataa

SEQ ID NO: 142643 - DNA, 738 bp, Enterobacter cloacae
atgagcaattttttttaccagtgcttaggcaacgacgaccagtacggattcatggaagagtgggattcggccgtcatggatgagtgggtcgcaaagaacatagggctttcccgctgcaagggcgaagctgacctcttcgagaccaagtggtttgattaccgcgacatgcacccactccaggctacagctgtctttaccgaagagtacaagcgtcagtatgccaacatcatgctcacgcacggtcgtgaggacttccagagcgcgcctttcaacaccggtttaaaacgagtcccgtttcaggatcagtcagcggccaacaaaacatcgctttggaaagcgcgccagtttgccgatcgctactgcgtcaattacggctacttcattggcaccgttctctcgatcgccgcatcacgtctctgggacaagctgccacgccctcaacatctttggcagccagagctgattgagatcttcgaagacagattgaagaagcgcgcgctaacccgtctggatagctctctgtggggttctggctcttctggggtaatcgtgcaagggggcaacgctgaaatccagcgagaatactttgagtggcttctcacgcagattgaaaatcgtgagccatcccgtcgcgttctgatcatctactccgctgtttggctgatggagcttctgcccgaacacatagcactacagcgcttccctaacgaaaccatggaagcacggtcactgaattga

SEQ ID NO: 142644 - DNA, 1341 bp, Enterobacter cloacae
atgaccaccatttgccataccggacgcccattgtcagaagagtttgatgatgacttccagaaccgattaacagcctactactgcaaggatcaggagttcctgatgcgcgccggtgatttggttgatccgagccagtttgaaaatgcggccaacgcaattttggttaacctggtttcgtcctacttccgcatgtacaagagcgcaccatccagcacggccattctcgaccagctgaagcgcgcgaagaaagataagacgatccgcgaagagctgttccctgatgtggtcagtgccttcaagcgtgtgttgggtgagaaattgacagacaccaaatacatggttgaccgagtggccacgtttgcccggagcatagctttcgatgatgcactgatcaaagcggcagagctgaaggagaagggcgacttcgagcgcgccatggaagtgatggccaaggtgcagctggtgggcgcgagtgacaccataggcatctacaactatctgggcgaagctgctgagcgtttaaaacagcgtgagtatgaggcgtctgaagattacgtgccaaacagcatcaccaccggcattccgctgctggatcgacttctgtaccagaaagggtggggtcgtcgtgagatggtgctgttcatgggcttcgctaagtctggtaaatcgacggcgatgggtgagttctcaattaacgcgaccttaaagggcttcaacgtcctgtacgtctcgctggaagttcacacggcaatcttgtctgaccgttttgacgcgcgtctgtctcaaaccgaaatgacgaagctgatcgagaagcgcgacgacgttcacaagaagctggctgacctgggcgccagtaccggcgtgggtaacttgtgggttgttgagagaccgtctggcagtctgtcacctgcagacctcgaccgcttgcttgaaggcatgaagtcgaacgggatgattcctgacatggtagtggtggattacgccgacctgatgaagccaactcgacgcagcggcgacgaacgagctgatgtgaaaagcatttatacggatctccgtgcagtgttcgacaagcataacgccgctggcattaccgcatcgcagaccaaccgagagggtggggcgtctgaggtggccacgatgatgcacgccgcggataacatcgaaaaagtgcgtatcgctgacctggttatctcgatcaacaaaacggaagaagaagcgacgaagggcgaagcgcgtctttactttgcaggctctcgtaaccagaaaggcaacatcagcatccgagtgaagcagaacctggagcagatgcggtttattcaggaaattctcgacgttatctaa

SEQ ID NO: 142645 - DNA, 1116 bp, Enterobacter cloacae
atgagcgacattaaagagcttttgaccgagctggactttgagcagtggctcgatacagagggcatcatctatcgccgcggtggggtcagcgcgcgcggtcgtgaaataaacatcaaggagtgcccggtatgcggcagctccggttggaaggtgtatttcaatctgaccaacaacgtcggcaaatgctttgcgggtgatcacccagaagagatccaattcaacaagctggtattcctgaagcattacagcggcaagtcgcgccgtgcatttgaagagtacgtgaacaacgcgctgctggagcagggttgggcgccgaagcgagaagaggtgaagctggccagcaccgtcgagctggaagggccggtctcgttgccgcgtcattatgagcttccgatcgagggacagctgcccacttatctggtggagcgaaacgtaacgcctgagctggccaaatatttcgacctacgatactgcgtagaaggcaaacatgcttatgtggatgtctataacgaccaggttcgtggccaagatttcgggatgcgcatactcatacctatttacgacctcgatggcgtgatgaaaacgtaccaagggcgtgatgtcaccggcacttcagaccgccgctatctcttccccatgacgttgccggcgtcaggtaagtttctctataacggccacaacgcagtgggtaagcaaactgtcgtggtgagcgagggtgcttttgacgttattggtattaagcgagcgctgttcgatgagccaacgctgcgggattacgttgagccaatcgggacgtttggtatgcacttgtctggtgtaacgacgcaggacgaagaggatcagctgggcgcctttctgacgctcaaagcaaaggggctgaagaacgtcgttatgatgtgggacagcgagaagcaggctattcgaaacacaatggccgccgcgcgtaagctggtggggatcgggcttaacgtgaagatcgcctgtttgggcaaggagggtattgacccgggcgacgcatctgtcgagcaaatcattaaagcctacttccgagccaagccgtacacacgccagcttgaactgatggcaaaggtcaaaggaatagcggcattggtctga

SEQ ID NO: 142646 - DNA, 777 bp, Enterobacter cloacae
atgcacccgaatatcactcatgaaatcacaaagctggttagagactcaaagctgccgctgagcgaagaagagttcgactcggttgttgtccaggctatccaggctggagctgacagaattgcgaccgcagaggctggcaagctactgctggccgactacccatatttaacggtcaccatggtagttggcgatgttcgccccagcgtaggtaacgaagcgcctcgatgcgcggcgatcgtcagctttatcagccgaatgggtgattcacctgtcacccatacagctgcttattacaacggctacatcgtgcagacccagacggttcttgaagagcttcatcatgacgacctatggaagtttgttgagttcatggatgaaaaatgcgaaagcgttgagtcgtcttcggccatcaatgaactctgggcaacaagtgcggttggtgaagacaacactgcaattatgagtgtcccggaaggcatggttgacctggttctggaagggcggggaaccgccaccaaagcagctaatgagaagaacttcccagcgttaatgaaattgaccggtggcgaccgtcgcaagcaggatattatcaacgcctgcagttcagcctgcgatggcgtgatgggcgagtacgagcgccgcctggtgaagatgtcgaacgaaatgccaatgatgatgcaggaagccaaatcatacgctctgcacaccgctgaagagcttctgaagccattccgtgaccgacaacacgccgtcatgtctggctggggaagctggtag

SEQ ID NO: 142647 - DNA, 459 bp, Enterobacter cloacae
atgacagtttcaaagaccgacttttccaagatcccatccatctcgggcaacaacatgttcagcctgaagtgcgaggaagtgctgatccgaaaggaaccaacaagagcgagttatacggtctgccagcacacgattctggcgttcaaagagggtcggttaccgcctggctcatttagtgaatgtgtaacggctatccgcggcggcaaatgcaaagcgctgaagatgatggtcgaggaagttcgcgccggtgaatcactctatttcgaagattacggtgcgctgattgcagaggtggcatctcgaaacaaagagagcagcttcggtggccagcgcaaaaccaaatccgcgatgtcacttctgccgtcgcgtaaatcaaaagcagaagacacaacaaaaacgggcgagttcgaggctattactgacctccactcagccttagtgcaagaggaaaacacatga

SEQ ID NO: 142648 - DNA, 405 bp, Enterobacter cloacae
atgaaagtttcggatctcaaagaaggggagcgcgcttatttcatggtcgatttggaggggcaaagagcgtgggaagagtgtcgcgttctggctgtttcaacatacggctttgcgcttgagcacaagttgaacggccagattgtgcagaagtggtacgacgctattggagccggtgcagcgcttcgattccgacgccttatcgagtattggcatcagtggacgaacaaagaccacggtggggtttatgagctggtgatgttcgctaaccaaaaagccaccatggaaggttttgttccgaccgcagtattcaaatctacatcgaccggcgacatctattcgctgccgatcgaacagttccacgctgaatttacacaacacgagcaagtacaaggagtgccgttttaa

SEQ ID NO: 142649 - DNA, 1323 bp, Enterobacter cloacae
atggaaaagctgattacccttcgaaccaagctggatgacatcaaagcgatgggaaccaatgccaagaaagaggctttggccaagctggacgacttcgagcaaaacgccgtgtcgctgatgctcaatccctttatccgattcggcatcaagaagtacaacgttgccccggcgcagctggcgtccacaccaagtgaccagaaggtattggacgtgttggatcagctggcaacacgacaactgacaggtggagctgccgtaaccgcagttgagtcaatcgttggctctatgtgtgaggctgggcaggacgtgtttcgtcgcttcctgttgaaagatccgaaagctggtgtcggcatcagcctatgcaacaaaatcttcgcaaccccgattccagtgtttgaagtgcagttggccacagcctacaaggaaaagggtgacaagttcccgttcaagccgaacaaacacgctaaatggccgatgattggaagcatcaagctcgatgggatgcgcgtgatctgcgaggtaattgtgggcgaggaagaggttaacttcctgtctcgcaccggcaatccagtaacgtcactcgatcaccttaaaccggcaatgctggagctggctcgcactaccggccatcagcacattttctttgatggtgaggcaacggtcggctcattcaatggtactgtttcagcgatccgcaaaaagaatgtgaaagctgtaggcgctcagttccacatcttcgacttcttcttgccagagtggaaggcgttggccaagtccaaagagtacaaagccaatggcatgaagctgaaggagcgtaaggctgcgctggtgggttggtttcgcaatgagagaagcgaagagtcagctggtgatttggtgctggttccctttgaaatctaccatagccacgaagagtacatagctcgattcatgcagcgtttagacgagaacgaagaaggggaaatggcttacgaccccaactcggtgtacgaatttaagcgctctcgtgcctggtggaaaatgaaggacgagaacgaagcagatggcgaaatcattggcttcctgcctggcgacccggatgccggattcgcacatactctgggcaaaatcgttgttcgtctggaggatggcaccgaggttcgtgcgtcaggcttcaagcatcgctatctcgatgagatctggctgaatcaggataaatacatggggcgtatcgtgaaggttaacttccacgagtacacgccagatggaagtttacgccatccgcgtcttaagtggccaagctgcctgcgtgacaccgaagaccgtattggagacaaagagtga

SEQ ID NO: 142650 - DNA, 168 bp, Enterobacter cloacae
atgcacaacgtgattccatacatcctgttaggtttgatcggcggggtgctcggttcggcatatttcatcgtagatatgctcaagcaggagctgaagaccggcactgttgccatggggcgccgggtgtacaaggttgttgaagttaaggaatttaaacgcaatgggtga

SEQ ID NO: 142651 - DNA, 291 bp, Enterobacter cloacae
atgggtgacataactatttctgacggcctgttgatggcttactttctactgagcggcttttacgctgcgttcatggtgggcgggaaaaccaccaaactgattattttgtggctgttctgtcgcactgcaaagttagaagacttagcctggaagctgtttaccatcattgagatgaggtatggcgaattgaaggggcagcaaagctacacgattcaggggaaagaatactctgtacggatcatgaggaaaacgcctcagccagcagctgcgtcaccagaaccgaaaacataa

SEQ ID NO: 142652 - DNA, 342 bp, Enterobacter cloacae
atggatttcaaacgctttctgtctctcaagaagccctgcgcaaactgcccgttcctgaaagagaatggcattgcgatcggggaagagcgtcttgcggaaattaaacagtctttgctggacgacgacatgaccccgttccagtgccacaagacaacgcatcccactggtggccaccacgatactgagggcgtatatcacccttctgggaaagagaagcattgtgctggtgctatgggtttcctctacgcaaaagggcgcatgaatgtgccaatgcgtattggcttaatgactggagttctgtctctttcagaactggaagaaataacccctttgcttaggtag

SEQ ID NO: 142653 - DNA, 171 bp, Enterobacter cloacae
atggctgagctgaacgcaaacagcaaagcgaaagacaaccgcatcgagttcctcgaagcgcaggtgactcagctgcagggcgaagtgaaagctgaacgtgacactcgtctggaaatcgctaaagcggaatctaaccgccagggcgttaccgtaaacaccggtaagaactaa

SEQ ID NO: 142654 - DNA, 594 bp, Enterobacter cloacae
atggcaagaatgaacgattgggatgcttttgaaaggtacaaagcacaattacggggctacgaagatcacgccaataatcgcttcagtacaaggatgccggccagcttaacggaggcatttgaaaggtcgatgatgaacagtgatacctctttcacttaccagcgcatccaatacaagaacaccatgcctggccggttcattcaggtgatcggagatggcagagaaattcggccactgagctgtatgcagttacgcacaaactttctcagcagccgcgagcgctataacgttgctcaaatgccaatgatgccttcctcatatgaagaagagccatcagaccctctcgtaagcagagcgtttaaaaccgttgcgctctcttctttcgttaccatttcaatgtccacgctggatagcagaagtcgtcacttcacgctctacttcgcagacaaatttatagacggagctgttagcttcagcccgatattctttgagtctaacggcgcacgagtgccggacaacgcaccggctgaagaatatctaacctggcctcgtcgcacaggcagaaacgagtttctggctagatttaccagttag

SEQ ID NO: 142655 - DNA, 489 bp, Enterobacter cloacae
atgtcagaagttaaactgccagagtaccagagcatcaaggtggtcggcgccgcaaaaatcgcttcaatcaccggcaccgcaatcggactgggtctccacaaaagcatcgtagaaattgaagttggccgcgcctgggttgctcgccaccaaccagaagtcggtgggtactttgttcgctatgaagacggctatgagtcgtattcaccggcagatgcgtttgagaaaggttatctggcgctcgcagacgcaggtttcgcggcttcatttggcgtctcgtttggtatcgccatcgagctgcttaaagagggtgatcgtgtggctcgcaagggctggaacggtaaagggatgtggcttgagctgcaacgcccggacgctgacagtgacatgacgctcccatacatctatatgcgtactgcagacgggcagaacgtaccgtggctggccagccaaaccgatatgctcagtgaagattgggtgatcgtgaaatga

SEQ ID NO: 142656 - DNA, 243 bp, Enterobacter cloacae
atggtaaaagtgaaaatttatggcaaagaacagtgcgcctactgcaaaaacgcaaaggagctggccgagcaactacagagccagggcaagctgacgtttgagtacatcgacatccaggtcgccggaatcggtgcaccagagctgagtgaacttgttggccagccggtaagacaagtgccccagatcttcgttgatgacaagccggtgggcggctacactcagttttcagcgattaagttctaa

SEQ ID NO: 142657 - DNA, 339 bp, Enterobacter cloacae
atgcgccatagagatactttcgacggttggcctgatgagcaggtgatcgcattcatgaccgaaaaccattacaccaacatccgaaaattgcctgatggcgaatggtgtggattgttccgcctggcatttacgtggtcggtttgtatgggcgtaaccccactcacctctttccgctaccgttggtgctttgccgatcgcgaggaagcgctctacctcattgagacggctgaagaatatgacggcgtaccggttcgaaaaacgtcactgaaggggcatcgctatccgtatggccaggcgctatacaaagagaaagacgagcacggatttgaaaagtggtga

SEQ ID NO: 142658 - DNA, 174 bp, Enterobacter cloacae
atgattaagcaaagcaaacgaattacttctgataaggcgatggctggagctaaacgctctctggatttttggtcgtctatcgatggcaacaaacttgcaaaggtcggccagaaagagaaagacatggatatggtcggcccaaagaaaggcgtaaagccagtaagtatcggataa

SEQ ID NO: 142659 - DNA, 573 bp, Enterobacter cloacae
gtgagcgacttatccatacagcaaatccatgagcaatgcctggccaccacacaggaagccattgagatcatcggttggactaatatctcagtaggcattttgagtgaagaggaaagacgtctacttgaggctggaaccgttcatagcaacttgaattggcgatgggctatggaaacctacaacggcaacgccgttgatggaatcctcgatataacattgaagctgatcgaccgcgatgaacctgaacgtcttcaggcagtaattatctgcaaatatgatgtgctccgtgagcagtttgctatctgcatgttagagaattttatcgcccatgaagagacggaattaacaggcaatgtacttattattgcgctaatttacgcaacaaccttctgcgagatggcagatcttgacaccatttaccttaaagacccgacagaagaagcgaaaccgcgttatcgtagttacgggtttgcccaagtatggaatgatttcacaaagatgtctgccgatgtgattgatgttctcgacactattcgaatcaaggtaaatggaattgaccctgatgaagaataa

SEQ ID NO: 142660 - DNA, 1131 bp, Enterobacter cloacae
atgcgtagtgattttgatttggctaaggcagcagagaactgttccgcagagacgatcgcgtttttgcagaccgtcatcgagtcgccgttcgaccagttggaagatttcagtgactctgacccggtattcaggaaagccttcatgcttttcactcggctatctttgttagtgactcgacgccgacccgagcttggcgtccactgtattttgatacacgttctgcctaaaattggcgatctacctctgtcaaaaatcaccaaagtggtggtgaaccggctgactaacccgctgatcatggaaggtaaaattgttcagggtaaacgtgtcttctccataatgaagcagttcctcgcctggtgcgtgttccagggttatctggagaactcaccagttggcgacattccactgaacaaagttggtggctcgaaccctaagcccagggaacgcacactgacagacgctgaaatctgggtattctggcatgtatgggattacttcgaagtctgcgaggtgacgcgctgggcagccagattaacgctcgctgctgctcgacgtcctgatgagatcctacgagccaaatccgcagagtttgacctcaccaataacatctggaaccagggccgccgcaacaagtcgaaccgggatcaccggttgccaatcagccccattatgaaactctgtatcgagcggctgctcgccgcgggtgagggtagcgaatggctatgcccatcaaataagaaagctgggcggccgatgtcaaaggtggccataagccaatctctccgccgaatcctcgaaacaccagaaatgctggcggttgagccgttcaccccgcgtgacctccgcaggactgcaaggagctgtttggcaagtttagatgtgccgagtgatgtatcaagaaaggttttaaatcaaagtcttgaaggtatagaccgagtttacgataggcacgactatatagatcagatgcaagaagcactgtacaaatactcagtatttttgtttaatatagtcgaaagcgagggagtggaggacttaagccacaaatacaaaggcgaccgtctagatctatcaaacagtcgccttgggctgggagtcgttagctttggattgcagcaagtatcttcttga

SEQ ID NO: 142661 - DNA, 381 bp, Enterobacter cloacae
atggtcgctaaaaaaggtaaccgaatttcggcgtttattgaggggctgattttgacctcgccaaagtcgcagactcagatcgcatctgagattggctacgaaaacgcaaacaacctttccaatatcaaaaccggccggctgccgatgccattggaaaaagtctctcttctcgctgaagctcttggaacagacgagacccgctttatgatgctggttctggaagaacgatacccggtcatccaccaattcataaagaacaacctccctagcctgagtgacgaagagcgccagataatcaatgccttaagagacaacacaaaattatccggcactctatcagatgaaaagctcaagaagatacttgctgcaatccaaagctaa

SEQ ID NO: 142662 - DNA, 213 bp, Enterobacter cloacae
atggatgatctaatcgcctccttgaaggcacttggcgtgggtatgattatcgccgttccttaccatttaatttcggacattatccttcgttgcaacggtattgacgttgactgcggggataacgctgtcgcatgttttcacatcaacattgagcacatgaagtacactcttgcctgcactggcgaaaccaacctggtcacacgctttctttaa

SEQ ID NO: 142663 - DNA, 2295 bp, Enterobacter cloacae
atgaaaaacaatcagaaaataagaaaagaggttcagacatttcgcgaaagtgttcgcaaagttgttgtcatgctctccgggaaggatattcctgtggcggaacgtggcagccgtgcatacgtcgaatataacaaggatggtacaccttgcatggtgaaccttccatcgctaccagatgatgcgactgatggcctcatgaacgcgatccgtggcttccttgaccacgaagtcgctcacctccttttcaccgactcaaagctggcatttaagctgctcgaaaagaaagacggcccagcctttcatctctggaatgctgttgaagacaccttcattgagcgacgcatgggtgaggttttttctggttctaaacgtaaccttgtcaacacgcaacgtcatgtaattgagaaacttttcgttccgaaggttgatgacgcacttaaggctttatcacgcaacccccgagatctctttctcaagttcctgttaatgccagctttacgtgcctgggcaggacaaacgcctttcgtggaattcatggagccgtattggggctatgttcgcgatcctgtatcaaaactaactaaagctggtgtaccggctgctgtgtcaatgttgatgagcaccgaagactgcatcaagctggcaggccgcatatcattggctttgaaggaagaaatggagaagccagaaggtaaatctgggtctggtgattctgaagaaaatgataaggaaaatgattcgcctgatgatgtaggtagtaaacaacctacaaaatcaaatgatgaatctgttagtgataagcctggtagtgacgaagaacagcaggaagaagaagagcctgctcctgtaaataatagtaatgaggataatataaaagataaggaagaaggctctgaaccagatcctgactccagcaacgctaatgactcccagcctgaagatgatgacgcacacaatgatgacgccccagctaaagctggtgacggtgatgataagccagaaggtgaagaggaatctgagcactctgagggttttggtggttttgatggcgattctgacgacaatgatctagataatgagcagcctgaaagtggttcgggcggtgcagatgatactgattcagcagccaaccctgatgaccaacaaagcacaccaggtgatttagatagtgatggtcgtcaagaagccacccagagcgatttaaacgaagaagatggcggtactggtgacattccactggacgcagcatttaaggcgctggaaggcactgacatggctccagagcagggcatggaggaagcgctcaacgaggtaatggccaacgagttgaaaggtgtgccaaaaggctcatatcgcccatatcaacggtcatacgactttattgggccgattgatgatgtagagaaccatctccgcaaaactcataaagcctttggccgcatccatcttaaccgtggtttgaagagctggcgtatcgatgatgaaggcaccagattgtttacctcgaatgtcgagcgccgcctcgctgatgggtcggcctcaacactggccaaagaccttgaacgtgccattgcgagtcgtaacaaagtccagttcgtgcctggtcagcgtcgtggaaaggtgcatagcgccaacttgtaccggctgtctatgaacgatgaccgcgtattccgtcgcaaggaagaccataaggcagtgaacgcttgtgtgcagcaggtaatcgacttatctggatcgatgcaggattcgaaaatttgtctcgctctggcttgcgcctacacaatttctgacgcacttgatcgcatcaatgtgccgaacataattaccggttttactactgcaggctgtgacatcgatgcagcaaggaaaatgggtcgcgaatacaaccgctatgaatcgttgatgctccccacaatcaagggctggcacgaacgagcaaacacgcccactacacgcaaacgcttaggttgcttgtcagagagattcccccttgaagacaacatcgatggtgagtcaattatggctttggctcagcactttgctggccgcactgaggataagaaaatcatgcttgtcatgagtgacggcgcgccagctgggatcggccatgacttcagcgaccatctgaaagctgtggcggagtcaatcgaaggcagcggccttatcgagctaatgggtatcggcattcttacggatgctcccagccggttctacaagaaccacgtcgaggttaaaaaagtggaagacttgggcgccactgtcgtgaggaaattgtcacaattgatacttggctaa

SEQ ID NO: 142664 - DNA, 1224 bp, Enterobacter cloacae
atgagcgccgtccaagtccaagacaccccagcgaaggaaaccatcacctgccattggtgttcttgcgagttccaccaccttaaatcgcatcttcagagcaaatgcaccggcattcctgatgagcataagaatagcgcggtagaagacatcatcgcggcgtacaccactcagttccccgatgccccaacgatttcacccctggccatcaagacaattcaggctcgcaagcaggaaatacaagcagctgagaccaaagcgccgaccgttaaggttgggtacatcggcactgaggaatacaagatcgaaatggtggccgcgcacgagctgcttggcgtggatctgaaaaacctctccactgcgctgaaccagccgctcaaggtatcggtgaacgtaaacacgccattcccagagttcgttccggtggccaaagacaactacgtgtacggtgactttgagcttatcaaagatgttctgatgatgatggagctgggcattccaggctatctgtggggtcacgcaggcactggcaaaacctctctcccaacccagctttgcgctctgatgaatcgaccggtaatccgctctcagcacactgcttcaacagaagaagcacatatctccgggcagattctggcgcgagacggttcaacttatttcgagccaggcttattggcactggcgatgcgtcacggctgggtatatctggcagatgaatacgacttcgcattccctcagattttgggcatctaccagccagtgctggaaggtgaagggcttgtcatcaaagaagcaaccccagagtggcgccgcgttgcgccgcacaaacgctttgcattcatcgccaccggcaacaccaacggatctggagacgaaacaggactgtaccagggcacaaacctgcagaacgccgccaacttctcacgttttggaattgtctcgaaagtccattacatgagccagcgcgccgaaaccaatatgctggtcaaagcaggggctacagatgatttcgctcagaagctggtgcgcttcgcaactctcatccgtgaaggctacgaaaccagcgtgatctcacaaccaattgggccgcgcgagctgctgctgtctctccaggtggggattcgccgcggtgacatcccggctggtctgcaacgcgcattcatcaacaaactcccttctgcgtctgctcaggcagcgcgtgagattgcggatcgcattttcgtatga

SEQ ID NO: 142665 - DNA, 2358 bp, Enterobacter cloacae
atgaaagcattaatggtacgaactgacttctccctcggtgagtcgtctttgaaggcagagcgcgccgtagagaaagcccgcgaaatgggttactcgtcggttatctccgctgacagcatgaatctggcatccgtaatccccctgcagatggcggctggtgacgatgtggcggtcatttgtggtgtgaagctgaacctggttgacgatcctacatacgagcaccgcgctcgactcgctaaggagtctaagggatgtatggaatcattaacacgcgcacgtaactatagcttcacggcgcttatcaagaacgagcaaggctatgtcgatctctgcgaactgatgacgctggcaaacacacgcgagcagttttatcacgttccccgccttgagctggcgcagctgctggctacgttcgccaaaggcaacatcatcctgctgacctcggacatgggaagtgtattccagcgcccggacttcgcgaagattatcgcccagctggttcacgctggcggccgtgagaacttttactgcgccgtttatccgattgcgaccccactctatgaccagttgaatagcaaagcgttgaaggtggccagtgctcttaagatcgagccggtggcgttctaccctgcttactatgaggcgcccactgacgctgacatcaaagacatcgcgcatatggtgctgaacaacatcaaaatcgaccagctgcaccgtatgcgaatcccctatcagcgtgacaatggcgttaacgatcgccgccacttactccagctgttgaaggagttcgcggtacgcatgggtgtcaacgtcacgccagctatggtctcaacaactcaggacgcgatcattgaagcgtgtacatggcgctggcacccgctggaacccgctttaccaaccatggcagaagatgagccagccacattgcgtaaactcgctgtagaggggctgaggaagcgtcttagcaccaaagagttcggctatgcaccaccagccacaatgcaccgcgattatgttgagcgcctgaagtacgaacttgatgttttaacccgccttggcttctgcggctacttcctcatggttcacgacctgatgaactacgctcgcagcgccgggattcctgttgggcctggccgtggttcatccgctggctcccttgtcgcctggtgcgtggggatcacaaacgtagaccctattcgccatggattactgttcgaacgtttcattaaccctgaacgtctcgacttgcccgatgctgatctggactttagccaggcacgtcgccacgaagtcattgagtacctgggtgagcgttacggggaagattacgtagctggcattcccaacttcacatacctcggtgcggcttcagcactgcgcgacaccgcacgtatctttggcgtggattcagctgatatggcggtatcgaaagacctgcgctttgtcgatgacgattcactgtcactcgaagatatgcgcgaagagctttccagcctggacaaatacgcagccaaatacccggacgctttcaacgcggccaccaaactgcaaagtctcatgcgcggattcggccgccacgcagctggcatgatcgtagccggtgtgaaactgacggaacgtacaccggtcgagcgacgcggggatgcgcgtgtaatcgcttttgacaagcgttactgcgaatccatgggattgattaagttggacgtgctcggcctcgctacgctcgatctgctggcttatgcgcagcaatacgtgaaagaagccacgggcagcgtgattgatctcgatgcaattccactaactgacaaaaaggttcttgatggttttgccggtggccatacccagggcgtattccagctggaatcaggctcgatgcgtaagctgctgaaggatctgggcggcggcattgatccgatgagctttgagaccgttgtcgccactacagcattattccgacctggcccgatcgaatcagggatgttggacagctacgtatcggtggccaaaggcttcaaagaggctgactccatccaccaggtgctcgatgagctgacctctgagaccaatggggtaattctctatcaggagcaaaccatgaaggccacgcagctgctggccggcttcacactcgcggaagctgatggcgtccgtaaagcgatcggtaaaaaagacatggaaaagatgaagaaggtcggtagccaatttatcgagcaagcccaggctggctggatagaggtgaagctggaagacggaaccactcgccagttccaccgcgcggagcacttcaaatgtgccgatggcaagctgcgaaccatcgaagaagcaatgcacgatggcgccgacgttctgggcatctaa

SEQ ID NO: 142666 - DNA, 1170 bp, Enterobacter cloacae
atgaaagttttagagacgatttccacgaagcccggactaagcgacagcaaagcaaaagagatctgggaagcgtttgagaaaaacggggcgtaccagttcaacaaatctcactcagtggcttactcgctgattagctatcagtcgatgttcatgaaaacgcactaccctgcccaattcttcgcagcagcgctaaccattttgggcgatgacaagcatcaggggctggtcaaagacgcgctgagctttggcattcgcatcttgccaccagatgtaaatatctcgacaaaccgcattgagatccgccagatggaagacggtacgcaagtgctgtatgcgcccttctcagctgtcaaaggatgctcagagaatggatgccaggcgatcatgcgcgcccgggcaaaggtaggtggccattttaccgacatcatgcagtttgaagaggcggttgagaagcgcgcctgcaacagccgtgtacgtgactctctcgatcgagtcggtgcatttgccagcatcatccccggcagcgtaccagccacctcagaagaacgtcgtcgtgaccaggcggaactcatgggcaatttggtgatcgatgcggtaaaagcaactcgccagtttgaaatgaacccgaaacgccaggctgaagtaaacgtcttgatgacgaatatggccgctgaaatggggctgggtgatgagcttatccgcccgagcataggcatcaaaccacgactgatgatcatcctcgataacgccaacggtaacgatggcaaaaccggctacttcatggagaacggttacgatgacttcaaggcgaagttgctggttgccggcgatctgaagatgggcgatttgtacgttaccggcgtctgcaagaaggtgaaggacaaagaaaaggactacaccaaagacgagttaggccagtttaacgagttcatcaaagcagaggtggctctggtgcgaccaacgtacattcttacgtgcggcgccaagtccaccagcctgtttaacaacaaatcgaagccatcagatcttgttggccgcaaggagtatctgccggagctggacgtcacggtattctatggcttcaatcccaacattctccacttccgcccagaagaaggcgaaaagctggagctgatcctcgctgacgtagccgaggcagtaaattcgtga

SEQ ID NO: 142667 - DNA, 258 bp, Enterobacter cloacae
gtgagcaagactcacatcctctatagggcagacttgcgctgccctaactgcaaatcagcgcctgaagtcattcgaatgacggatgagaacgccgagcaattttggtgggaagagaatggcacgacatatcccgttttattgcgccatacagagctggcagcacgtcattgcacattcagaactgagatctaccatctgacccttccgctggctattggcgtttggaaagaacaaattaaaaacaggaataaacgataa

SEQ ID NO: 142668 - DNA, 381 bp, Enterobacter cloacae
atgactaccgaattggcaccggcgatgattgagaaagcgcgcgaagcaattactcgttctaacttctgggagtttatcgaccgtaccatgacgcttgagctggccgtggccagcgccaaatacgacggcgaacgagtacctaatcggctacgcaaggcggccaaagcaatgctcaacgtcgtttacgatcctcttatgcgtcgattcgttgacggcatcagtagttcgggcaaggcgctggaaaagctggatgaactaaaagcgtaccgcgacagcctagtgacaaaggtggccaatgagtttactgaggcagagaagtttggcgacgttggggagtaccgtcgccatcgagccgagcgaatgatgcagaacgcggcataa

SEQ ID NO: 142669 - DNA, 360 bp, Enterobacter cloacae
atgaattacgacattgggttagcgcagcaggcggttctcaacactcttaaggcagattttggtgatgaccttcttgaagtgtattttttgcacaatgtaactgcgtattcgaagctggatttcatggcggtaatttccgatgagagcgctgaaaagttcccaccgtttgcctcagcagcgtacatgaactggtacgataattcagaccctaagacgttgggcttctcgcaacgagccagtacgctttacaaagcattagcctcaacaaactaccaaaccctcccactttcggtgcgtgtgaagtcgttctccacatcaagagagagtgcggctgaggcagctattcatcgagtttattga

SEQ ID NO: 142670 - DNA, 429 bp, Enterobacter cloacae
atgaacaatattcttgatcaaatcatcatcgaccttgagtttaatcgcgacgaccttgaggccgtctggcagcggcagccggtgctgctcatgcagtacggcgcaaggctggcgcaagccgaaagaaaagtggctgatgcaaagcgcggcctcgatgctgtagaagccaagctgtatgacagccaccgtaaggatttgagtatgaacggcattaagttcaacgaatccatactcgatgccaaagttaaaaccagcgttaactatctttctcaccgtcaaaagctggatgacgcccggtacgaggccgacatttacaaacatgctgtttccgccttcaaccaccgaaaagacatgatcgtgcaggcatctaagctggccattctcgaaatcgaacgacttggcgccgagcgttttaatcgcccttcctga

SEQ ID NO: 142671 - DNA, 1005 bp, Enterobacter cloacae
atgtcatcagcattaatgaaccttctgagcaaagctcgcggcgacatcgcagctaagcgtggtaacaacgtcgatatggctcgcctgaaggatggcgataactacctgcgtctgttcccaaataaagacgatcctgacggcgtcttctatcaaacatggggtatgcacttcgttaagtaccagaacgacgaaggcaaagaagcaaccaccgcctacgtgtgtgatcaacacacccacggtcgtgcttgccagctgtgcgaaatggtcatggaaggcaaagctcgtcacaaaggcaacaaagcaatggaagaccgcattcaggcaatgcgcgccactccacgctatctggttaacggcgtactttctgctcgcgaagatttcgctgatgcgaaagaaacccagctgattgaactgccagcaaccgtgttcgatgacattctgaaagttatcggcgaagacctctccgatgaaattggtaacccgctgagcaaaactgagggttatgcgttctgcattactcgtaccggttctggtcgtgataccaaatatagcgtgtcgcctaagcgcaaagtcttcaaaggcaacatcgaagacaagttctggaacaagcagcatgacctgattgctttcgcaaaccaggctgacgaaaccaaattgctggctactacgcgtcacatgagccgtcagattggtatcgctgcgccttctgcgattgcagcggttaaatctaccaccacctcagcggcagcactgccaggctttggctccatcaccggccacgacgacaccccagcgactactcacggtgcagcagctgttgcgcgtgaagagaccccggcgccatcgtccatcgttgatgaagaagttgctcgtgcggttgaagctgagttcgtgccagaagttgaaacagttgctgaaccaacggcggcaacgccagcggcagaagcacctgcagcagctgacccggcactggattcacttctggctgagctggaaggtctgtaa

SEQ ID NO: 142672 - DNA, 951 bp, Enterobacter cloacae
ttgaactacttattcgtcgatggtaacagcctcggttactaccaccagcaacagaaagagaaacttcacaacggtgaaatggaagtgcaggcgatctttggcttcgtcaaaaacgttcgtcgttacgcctccatcctccgcgcgcggccaattgtcttttgggacggattcagcgatcgccgccgttcgttttacccagagtacaaagccaaccgggacgataacccagaaatgttgaagatgaaggaaggtttttcgaagcagaagccctacatcgtcaacatgatgaaagtgctgggcgtcaatcagttcacggccaaagacggcgaggctgatgatctggccggcatgttcgttgagaagttagttgattcacctgcagttgagcacatctatttgctcactggcgatcaggactggcttcagctggttagcgaaaaggttacatgggtgactgtacgagccgacgcccagcataaacagatcaacttcgagcagttttcggagcttactggctatgcaactccccgcggcttcctcgaaggcaaagcgctccagggcgacaagtcagacaacattgctgctgtaggtggcattggtgacggtggcgcaaaggagatcattgcagagtacggcagtgttgtgacgatggttcgcggcattatggacggcagcattgtcatcgacaaaggtcgccataaaacagctttcaacaacctggccaagaacgctttcaacgagaaaaccaaatgtcggatgctcgaagccttcaagcgcaacatgtcactgatgaatctcatcaaaactcaattcccgccgactgtaatcgagccagttaaagctgagcgcaatcagaaagcatttgagcagatgtgccttgagcttaacttccgctcgttcctcgaagatatggacgtgttcacgctgccattcgaaaggtactgcgcatga

SEQ ID NO: 142673 - DNA, 261 bp, Enterobacter cloacae
atgatccgctctttgttcaccggacacccatcaacctataccgcgctggccaaagaggtcgttttccttcatggggaaagtgcagtgacttgtctgcccacaattctgtcacgcgccggtatgagcgttaccaaacgtgagctggggcaggtttcagatcaggttgtgaaaatgctttcacgcgtaaagaaaaacctcaattgcgactcgattgagtggagcgaggcgaaagccgcagaacgtataaaaccacaaggataa

SEQ ID NO: 142674 - DNA, 1080 bp, Enterobacter cloacae
atggctaaatcaaaactcgctcaggcgctaaataaggcgctgggtaaaaacgacagcattcagaaagtagagcaatggctggacactggctaccctccattgaaccgggcgatctccgggcgatatgatggtggtcttccagctggccgtatcgttgaaatcttcggtccaccatctgcaggcaaaacgttcctcgcaaccaaagcgatgatcgcggcgcagcgcatgggtggcgtagctgcattctttgaccacgaaaacagctttgatgttggcctggccgtgggcatgggcttagacgctgacgaagacgaaggctattgggtgtacaaacagccaaacacctttgaagaatcagttgagaacatcggtatccttctgaacacgatccgtagcaacgagctgattccagccgatgcgccgatcgtcatcgtcgccgactctctggcatcaatggttcctcgctctaaggcagagaagttcaccaagatggctgagggtacagcgaaggataaagatgagctgaacatgaacgacaacacggctctggcgcgcgcgacctctgcgaacttccctaccctcgcccaatggtgccgtcagtacaactgtcttctgatcgtgctaaaccaggtgcgcacaaaactcggcgtgatgtttggcgacccaacaacttcacctggtggcgactcaccgaagttttatgcgtccgtgcgtattcgtctgggtgcgagccagctgaaagacggcaaagagaagatcggtcaatgcgttggtgctgaggtcgttaagaacaaagtagcgccaccgtttgagaaatgtagctggaacttctactacgacaccggtcgcggcctcgatgttgttgagtctctggtagagcacatgcttgaagatggcttgctcccgaagaacgccagtggccgtgtggaaatcggtgataagaaatacactaaatcccagatcgttgaactgtatcgccagaagccattagaggaaatcgtggcggcgctggccaagatcgacagtgataaacgtgcaaaagctgaagcagaaaaggaagccgttgctgaagctgaataa

SEQ ID NO: 142675 - DNA, 189 bp, Enterobacter cloacae
atgattaagttctacaccttcacaattggagtgattgcatctgccttagcggtgtatcgattcattgtgccagcactgttttcactgagtgacgatttcgccatggttttggccgctgtcatcgctctctcttatccggtcgccctggcggtcatctctaaaaaagtatggaaacgcaaaaagaaatga

SEQ ID NO: 142676 - DNA, 843 bp, Enterobacter cloacae
atgaaaaaggtaattgtcgcgctgctattggcagcatcagcattcacgctaactgcgtgtgatcgcgaaactgtacctgcgggctacgtgggtgtgaaagtcgatttgtatggcactgagaagggcgtacagcagcaggttgttggcgttggccgctactggctgaccattaacgaagagctgtacaagttcccaacgtttaaccagctgcacacgtatcatgacccgttcgtgtttcagacttccgacagtatgaccatctccgcacatgttggtgttgagtacgctgtagagcctgacaaggtggccaaagtcttccaaacgtaccgcaaaggcgttgatgacattaccaccagcaatctacgtcagaacatttcagacgcactgattaagcactccaccgacatgaacatcactcagctggcggcgggtggaaaaaccaagctgctcgatgaagtgaccaaggatcttcgcgccggtcttgagcctattggcattcacatcgtgaaactgagctggacgactgacctggattatccaaagcaggtcaaggattccattaacgccaagatcgaagccaaccaaaaggcagcgcgagtagagaacgaagtcgctcaatccaaagctgaagcccaaaaggctatcgagttggcgcgaggtgaagcagaatccaatcgcattcgtgctgaagcagaggctaacgctatcaccctgcgtggccaggcactacgtagtaaccctgaagttctacagctggaagcaatcaatcgctgggatggcaagacgccagtttatgtcgctggcggcaatagcgccccaccattcgttcagttcaagccgtaa

SEQ ID NO: 142677 - DNA, 237 bp, Enterobacter cloacae
atgaaattcaaacacatacccctcattgacgttacaacgccccgctcttttcggatcgcgatagttgactgctactggctgactaagggagagaacgttgtaactaatgagcgttacgggaactacatgtacaactcagacaaacgcattgttgaacgagtgttcgcacgtcacattcaagaggaaggttacagtgtcacacatatccccctcgcgtttattgaaaggagagattaa

SEQ ID NO: 142678 - DNA, 669 bp, Enterobacter cloacae
atgacccaggttcgcggcgataacgtttcaaaccaccctgcttttgggatggtttcagtaaaccgcatccactcaaccggcacgactttatttgcttccgaccttcgccatgcggaaatcatagagctggagatctacgaaggccagatggtcgaaagagatggtgtgcaaaacccggcacgctctacacgacgccctatcacttctatcagcctcagttcagctcaatgggcgactctggtttgcagctttggcctgggcgaaggtgttccctgtacgctcaatcgcatcaaaaccggcgatagcgtccgcatccctccgatcaaacgaatggagtccacgcgtcagcgctttgaccgaaacatcgaagaagcagccaagcgccagctggcaaaccttgccgaagatcttcaatccgtccaaaacctgctggccaaggggaaagccggcaaacgcgaattagaagaattgtaccgttcaatgtctgcccatctggggaacctgcctaaaaacctatcgttctctacccaactgatccaagagtcgatggacagcattgtgtcagccggtaaagccgaattagaagcatcagccgttggcgtggcacttcgtctggggattaaagagattggccgcctggccgaactggagaacaaaactgatgagtaa

SEQ ID NO: 142679 - DNA, 357 bp, Enterobacter cloacae
atgagtaacatcgaaggcatcaaatgggtcgctgatggtgagcctaatttctacacgctgctttcaggcaagaactggttcgggaaactccagctgaacggagagatgcacaccgtagctcaggagaagtttttaaatggcctgttcccacacttgaaagaagaggcgagcaagtcagcaacaccactcacaccggtaaaaatcatcgaaatcatgatcgattggctggagtgcaacgtggatatgggcacaccgatcatctttgacaatgatgatgacaaaactgattcggcaaaagccttacctgccatgtacgaagctctgcgcgtacttcgaggtataggggggcaatcttga

SEQ ID NO: 142680 - DNA, 165 bp, Enterobacter cloacae
atggtaagccagcagaaagatgacaaggcagctgagcaccagagatggattgcggaaggcgtagaactagccataagtcaccttgaaaggtctgactttggtgaagaaaacgacattcgcctacttcgcgaattgtctctaaaactcaaaaaggaaatgccatga

SEQ ID NO: 142681 - DNA, 447 bp, Enterobacter cloacae
atgaccagtaaaccaaagggaagcgctctgacagcgctatacagcgcttctaacgctgcgcttgatgaagtagaccagctaagagcggatggcttcccgcagccattgtgggctgaatccatgcgcactgcgattggggaaatgggcgcccccgatgtggctgagaatgagcagccctggcaaaagctgatccgcgtgtatgccgaagagattgggccgacaccagaaccagagcaggcattgctgctgaagctgttcaaggaggcaggtgagaacttaccaatttggccaggcacttgccacgaggtttttcattcgcaatttagaaaaatcgacatctttgaaaattcagtagatggcaaagaggcgatcgtctggttcctccttcacctggatgattgcttcccccgagtagccgcgaagatgtggcctgtagataacaattaa

SEQ ID NO: 142682 - DNA, 270 bp, Enterobacter cloacae
atgaaaacgcttgtcagaatccactcaagttgtgatttctcagtcttccctctgttcattgttgaagcagagaatgaggaactgatggacgaggccattgaacgcgctattaacaaatgcaccggctatgacgatgaccagataaccatcgacgagagcaatgtacgctggcgcggcagccaatgttggtatcaggaagatacccaaccgctctccaatgaggatgcagaaacactggtgaggatcttatcgttagaaacctacagctaa

SEQ ID NO: 142683 - DNA, 150 bp, Enterobacter cloacae
atgacagtagctttgcaattaacctctctccttctggtagttttatgccgtcagatgaagaaagccttcgagccaatgcccgggcgcgtttattacgccttcatgctcagcaccgcattattcatgttcctgtcgccggtgctgaaatga

SEQ ID NO: 142684 - DNA, 234 bp, Enterobacter cloacae
atgaccggtgtgctggtcgttgacagcggtatggagttttacgccctgctcggctctacgatttacaagtctcccccgctgaaatcgcggaagaagatgaaatttggtgttggctcggatggccagacctttattaaaaaggatgccgtgtacagcgtgtcttctcaggacaccagtatcatatttgacgagtgttccgaggttagtaatgatttacaccatgcagaaaagtga

SEQ ID NO: 142685 - DNA, 213 bp, Enterobacter cloacae
atgatttacaccatgcagaaaagtgagatccaaaaagagagcggttactggcgcgcaaagggctttaagcgtgaagggaacgaagagcttctggatcgctgggactgcaccatcaccttcaagcgcaagcagtggcagcacttcgataagctgaaaaacgaaatgacggtcaccgcaccgacactctttgggcttcttaagaaaatcatctaa

SEQ ID NO: 142686 - DNA, 1011 bp, Enterobacter cloacae
atggtcaagaaatccaaaaccttaccgatgaatttggaagaaacaaacaaatcgacaggtgagattgtttcactggatattaacagctccagcactgttcagccggttcctctcatgcgtctcggcctgtttgttcctaccctaaaatcaacgagtaagagcaagacgaaccgtaaaaatatcacagatgcgaccgaggaacttgtccagttgtccatagccaagagcgaaggctacaacgacgtgaaaattacagggtcacgtttggatatggacactgatttcaaggtatggctggggatcgttcgctcaatggctgagcatggggtgcagggaagtgcgcttaagctcacgtttgtcgagttcgttaagatgtgtgggttcgatagtcggcgttccaaccagaagatgcgagatcgtatcagtaactccctgtttaaattggcatccgtaacgcttaagttccagaacgatacgaaagggtgggtgacacacctggtaaaatcagcctcatatgatgtcgttgaaaacgttgttgaaattgaagctgagcctaagctcttcgaactctatgacatggacaggcgtgtgctgcttcgactcaaagccattgatgcactgccacgtaaagaatcagcccaggctctatacaccttcattgaaagcctaccccagaaccacgctcccatttcgatgaagcgccttcgtgaccggcttaacctgacttcaagcgtttacacgcaaaatcacactgttagaaaggccatggagcaactgaaagaaatcgggtacctcgaatacaccgaaaccaaacgcggaaactccaccttcttcgtcgttcactaccgcaatccgaagctgatccagacttctaagctgcctaaacaaaaggttgaagagcagccgccgtcagaagagaactacgacgaagtcattaaggctttgaaaactgcaggtatagatcccgtcaaactggcagaggctctcgctaaatccaaacccgaaaattga

SEQ ID NO: 142687 - DNA, 645 bp, Enterobacter cloacae
atggatctgaaacgtacacgctgggttcgccgtctcgaagatggcacctataccattgagccagatagcaaacttaactcccagaaagaactatgcgacctctgtgggattgcgtcaaaatgcccaatcaatgcggcgcggcacaagtttaaggctacaggggctgacttccacttaaattcttgtctgcggtatgtgccacttatcgcgtttcgtaaaccgatcatcggattgaatgagccttacttcaacacgctccgcagcggagttacctgggttaaccgtgtagagccaggcaaaatcgtgtgtctggtagacgcagcgaacggagagcgaatcaggttcgcaaaagtggatcgagtctgttcggggccatacgaagaaatgcttcgcaaacatagtcgattcaaccacctttgcatgggtggtgaaagcgtagaaagggtttctgaagtgatccgcaaatcctatgggcattttctgaagcctgacagccagctgacggccatttatctacggagcatcagccgtgaacatgacgttgagtatcacacggatcatgagcttgaattagaagatcctcgtgcaaaagcaccagtgatagatatggcctcgcttcgcagaaagcacgagaagacgatttaa

SEQ ID NO: 142688 - DNA, 1086 bp, Enterobacter cloacae
atgactataccgtatggcgtgatctctgatccccactaccacaactggaatactttcgcggtttctgacgccaacgggcttaattcccgcctggccattctgcttgaatcgacaaaggaagctgcgattgccatcaaagaggctggcgcaaagcatctgcttgttgcaggtgacacgttccatgtacgcggcactataacgccatctgtactgcactacgtgacggaaacctacaagtggatcatcaatgagcttggccttgaagtggtcatgctggccggcaaccacgacctcgaaactaacgattctgtctacagcgctaacgcagctgcctcactgcagtcgatcggggtgcatatcgtttgtggccagcagccgttcagcgttgaagtcggtgatgtgaatgttcatttcatcagctggcgtaactcccatgcagagcttttgagtgacatgaaggcgctgcgaaagcgtcttgaaggcgacaaccacgacatcgtcattcatacctcagtcaataaagcgattccaaccatgcctgatgtgggcatcgatgcgcaggagctgaaggacattggcttccgcctggttttgtctgggcattaccacaaccacaaagaagtcctgcccggtgtcgtcagtgttggcgcgctaacgcaccagaattggggtgatgtagggacattggccggttacatggtggtgcaacctgatggcagctttacccaacatgaaacctcggcgccaaagttcgtcaatctcgaagaaggcgttgatgacagcgaagtgcgcggtaattacgttcgattttacgcgaccattgaagctgatgaagaaggtgtgaagatcaaaaacaccctcaactctatgggcgccaaaggcgtcgtatgcaacttcgttcgcaaatcctcaatgatgaccggctcagcgagcacttccgcaacgtcaaagatagacagccttggagagtcagtgagcgcttactgtcagatcatgcacgacactgacggcggctttgatgtgaaggcgctgggggcgctttgcggcgacatcctccttgaagctgaaaccggtacttcagaatga

SEQ ID NO: 142689 - DNA, 237 bp, Enterobacter cloacae
atgatcaccggcaaataccaatgggctgtaaacatcctgaacaacggagggacggtcacgctccatcgttttacataccgcagtgaacgagtgcgctacaagctcaaccgtttatatcgtgacggcgtcttagagcgcgctttgtacaaaactcacctggagtttcgtctcaagaaagatcagccaaagctgactaacctggcatccaaaataaaacatacagagaaaagcacatga

SEQ ID NO: 142690 - DNA, 1917 bp, Enterobacter cloacae
atgaaatttttgtcaatgaaggttgagaacttcatggcgctggccgaagcggaagtcgaactctccgaccgcgggctggtgctgatccagggcatcaatactgacgactcatcagcatccagtaatggcgctggcaagtccaccctcatgaacagcttaatgtggtgcatctatggcgaaacagcccacggtgtgaagggtgacgatgttctgtctacgggcaacgagaagaactgtcgcgttcaagtgactatcgaggacgaaggcaagaaattcgcgatcatccgtcaccgcaaccacaaagagtttaaaaaccgtctgatcgttcgcggcgaagatggcgacatgaccaaaggcaaagacacgcttacgcaggaacttgttgagcggctgattggtgcatcaaaggaagttttcaccgcatcgatctacgcgagccaggaggcgatgccagacctgccgggcatgactgacaagaacctcaaagcgatcgttgaagaagctgccggtgttgaccgactgacccgggcgtactccattgctcgcgaacgtgccaacgcagccaccgcgcgcgtagataacgttaaaaccaaaatggaaggtgctttgtctctggtggactcggccgaaacagagctgaagtcagccaaggtatcttccgaagagtgggaaaagagccgcagccaacgtttggaaaaggctcgtgaggatctgactggcgctgaggttgaactggcagaggctgagctggagctgcgaaccattccagagcagatccgcgataagcagaatgccattacctctgaacgtgaaaagctggcaaccaaagatgatcacgacaaaaagctggttcgtgtccgggctgttatttccgaagcggaaggcaacatccgttccgcagagacgttgaaagcgtcagcggttaaacgtgcccacaataataaagcgcaggcagatgccattgactccaaagttggcactccgtgcccaacatgcggaaaggcttattgcagcgaagatctatcaaccgttaaggagaactatattggccaggcacgcagtgaaattgcagaagcgcaggcatcagcagcgacagtggttgaacagcaaggccgtcttgataaagcgcgcggcatcgagcgagcacttatcgacgcaacaccagatgtctcagccatcgttgcccgaatccagcagctgaatggcgagctaagcacattaaacaagcgctccggtgagctgggtttgcttgagaccaccttccgccgtgccaaggctgaagtggatcgtatcatggcagaagtgaatccgtttctggcgagcattacgcgccatgaagaaagcctgcgcgccaataaatctaaatacgcagaacttaaaacagaacttaaaaaccatcaggagcaggctcagctgcttgagaaagcgcgccaggtttactccccagccggtgtccgttcgcacattctcagctcagtgacgccgttcctgaacatgcgcaccgccgaatatctcaacacgctgtctgacggcaatatcgttgctgaatggtcaaccatggagaccactaagaaaggtgagatccgagacaagttcaacatcaatgtatcgaaagccggttccagcaaatcattcatgggcttgtccggtggtgagaagcgcaaggtgcgaatttcgtgctcactggcattacaggatctggtggccagccgcgccagcaaaaatatccagctgtttatcggtgatgaaattgatgatgcgctggactcagcagggcttgagcgcttaatgggcatccttgagaccaaggctcgcgagcgtggcaccgtgatgatcatcagccacaaagagatgaaatcatggttccgtgaaaccatcaccgttgaagtgaaggacggccgcagctatgtcagttaa

SEQ ID NO: 142691 - DNA, 717 bp, Enterobacter cloacae
atgtcagttaatgagctgagttacatccagttccgccaggtggtctctgtactggcgtccatcaacctgctatcggattacgtggacgaaccggtacgaccgaagtggtatttcgagcaaagcgaggtggatgacgcgcagcgcgccgcattaactgagctgcttgatgccagcccggtaatgacgacgctcactcatgaaagcaacgtaaagccgctcatgatcaacttagcagatccgagcggctatctgcctcgcgaatgtggcctggttactctgagtgacgtgaacactctgaccatgagcattggtgacccgtcactgtatctggacagtcagcaaatcagcgcgttcaacacttttatccgccgtctaaagaacaaatcggagctggtggccagcggcggcgctgcattcgaaagcgttgctatcaaattcgaagaaggtgatgacctcatccgaaacacaattgttgagttcaaggatggcaagggggagaccctttttgtggctgatggcgacacccacgagaatgttaaacacaatctgccgaagaactacctaagtgaactatgtgagttcgttgcgcaaaccatgatgacctcggaggatgatgattcattgttcaatgagctgctgggcgtaccatcaaaaagccagcaaaaatatgaaccagtaataacgcaggaagcccaccctcagtggggaacatggtaa

SEQ ID NO: 142692 - DNA, 570 bp, Enterobacter cloacae
atgagcaagttgattaaaatcgtcgggttagaccccagcatgagcaattttggcatcgcagctggcaccctcgatctcgacaccaatgaagttaaggtgacgcgcttcgagctggcggaaacgaaggccggtggcaagaagaaaacagttcgtgtgaatagcgacgatctgcgccgcgctggtgaaatttgggcgaaagcaaagcccatgatcgatgaggctcatattgtttttgctgagctgccggttggcagtcagtcatctcgtgcccaaacgagctatggcatttgcatcggcgttctggcgagcattcaaaagccgctgattcagatcacccctgacgaaatcaagaagtatgtcggcggcaaagctagtgttgccaaagaggacattattgagtgggcgactcaggagcaaccagacgcgccctggctgcgccacaagtccaaaggtgagatggtgctgaccggtaagaatgagcatcttgctgacgctgtggcggcgatttatgtcggtttagatactgatcaattcaaacaggtagtaagcgtactgaaagcaattttatga

SEQ ID NO: 142693 - DNA, 2325 bp, Enterobacter cloacae
atgattaacatccagaaacgtgacgggcgagcggagccactgagcgaagagaaatataaccgcgtggtaatgtgggcggttgaaggcgttgaaaacgtcagtgcatcagccatcgccctcggtgcttctgcaagtatttttaacggcatgaccaccagccagctgcacgaggcgctggtgaaagccgcagctgatttgatcagccctgaaaccccgaactactcccaggttgcagcccgtcttaatctgttcaaaatgcgcaaagacgcgtttggtcagtacgaatatcctgacctgtacatgcacatcgtgaacctcgttaaccgcggcatctacgatgaagatctgttgaaacgctatcatctgaacgagattaacgagctgggcaaatatctcgataccgctcgcgatgatctatttggttacgcggccaccgtgcagctgcagggcaaatatcttgtccagaaccgcgtcactggaaaaattcacgaagcgccgcagcacatttatatgctggtgggaatgtgtctgtttcaggattggcaagacggcaccagcgataaaactcgtctggaaatggtcaaaggcttctatgatgtcaccagtacattcaagctctcattgccaaccccaatcatggcaggcgttcgcacaccgacgcgccagttctcaagctgcgtactgattgaatctggcgacagtctgaaagccattaatggtacagctgccgcgatcgtcgattacgtttctcaacgtgccggcatcggcattagctttggccgtattcgtgcgctgggcagtgaaatccgtggcggcgaagcgactcataccggtgttatccctttcctgaagcacttccagacagccgttaaatcttgctctcagggtggcgttcgcggtggtgcagctacagcctattacccattctggcatttggaaactgaaagcctgctggtgctgaagaacaaccgcggtgtggatgagaaccgtgtacgtcatcttgactacggcgtgttgctgaaccgtctgatgtaccgccgtctgattcgtgaagagaacatcactctctttagcccgaatgatgtgcctggcctgtatgacgcgtatttcgaagatcaggatctgttcgaagagctttacctgaagtacgaagctgacccggctattcgcaagaagagtgtttctgccgttgagctgttctcttccatgatgcaggagcgcgcttctaccggtcgtatttatatcggcaacgctgaccacatgaacgagcatagctcattcattcagagcattgcgccggtgcgtatgtcgaacctgtgtgctgagattacgctgccaaccaaaccgctggtgaaaactgacgatcccaacggcgagatcgctctttgcacactgtcagcgtttaacctcggtgccatcaattctctggatgacctgcaggaagttgcattcttcgcagtcgcggcgctcgactcgctgcttgattaccaaaactacccaatggaagccgcagagcgtggagcaaaagcgcgccgcagcctgggcattggtgtaaccaactttgcgtattacctggcgaagaatggctttaaatactccgatctcgaaggcaacaagctggttcatgaaacgtttgaagccattcagtattaccttctggacgccagctgcaaattagctgaagcgaaaggcgcgtgtgagtggttcgacgaaaccaaatactctctcggccagctgccaattgaccactatcgcaagtccctggatggtcaggagatcaatgcgaagcatccgctgctactcccatgggaacagctgcgccaccgcatcaaagtgcatggtctgcgtaactctacgctgacagctcagatgccatgcgaaacgtcgagccagatcaccaactcaacgaacggtatcgagccgccgcgcggcgcagtgtccatcaaatcctccaaagaaggcgccatcaaaatggttgtgcctgattttgagaacctgaaagggaaatatgaatatctgtgggatatgccgagcaactacggttacctgaccaaagtggcgatcattcagaagttcttcgaccagtctatttcgaccaacacgaactatgaccctgagcgcttcccaaatggcaaagtcccaatggaaacgctgctggatgatctgctcactgcctaccagctgggcatcaaaactctctattaccacaacacgcgcgacggtgccggccaaacggaagacaccagcgacgtgaccagcgcgctccaggctaatcaagagccaattcttgacgacgagcctgattgcgacacctgcaccatctaa

SEQ ID NO: 142694 - DNA, 1134 bp, Enterobacter cloacae
atgagccaatattcaacgttccggcttggggcgaacgacgcgaccaaagaacctatgttccttggcctgtcagtaaacgtgtctcgctatgaccagcaaaaatatcgcctgtttgagaagctgatcgagaagcagctctctttcttctggcgccctgaagaagtggacatctctaaagaccgcattgagttcaacaacaaactgcaaccgcatgagcgtcatatcttcctgagcaacctccgttaccagacgctgctggactccgtacaggggcgtagcccgaacgctacactgctaccgctggcttccattccagagctggagacgtggattgaaacgtggtcattctcagagaccattcatagccgcagctacacacacatcattcgtggcatggttgataacccggctgaaatcttcgacggcattgtcagcgatgaagaaatcgtgagccgtgctgcatcggtgactgagcaatatgacgccctgtaccagctgatctgcgctcgcgagtatctttcagaacaggaaggtcgttttgatgaaatctatggcgagcttgccatggagaaacaggtttaccgcactctggtagcagtgaacgctctggaggccatccgcttctatgtcagctttgcctgtacgttctcatttggcgagcgtgggcttcttgagggcaacacaaaaattatgcgcttcatcgcgcgtgatgaagccttgcattgccactccaccgaaatgatgatcaagtacatgcgcgtcggcaaagaaggcgagctgtggaaggcggtggcggatgaactggagccattcgtttaccagaccatgaaggatgtggccgaacaggaaatgcgctgggcggagcatcttttcaaagacggctcgatgatcggccttaacgctgaaatcctgaagcagtatgtgaaatatcgcaccaacgttagcctgcgtcgcatgggtctgaagcctatttttgaggacgcgctgaacgaccctctgccatggatgaacaaatggcttttgagtgatcaggtgcaggtagctccgcaagaagttgaagtcggttcatacctggttgggcaaatcgactcaacggtgagttccaagagcctgaagaaattcgccgatctttga

SEQ ID NO: 142695 - DNA, 858 bp, Enterobacter cloacae
atgtttactggcattatggacaaggtgaagctgttcggtgacaaagttgtcggcttcaagccagatctgtacgagctgcatccgggttatggtgatcatactcttgacatttatgggatggttaaccagttccacggactgttccagcatcctcagcgagtagctgcaacaccggcgttgcttcgcttacgtgcaaaacttattcgcgaagaagctgttgaagaaggcatcccagctgccgataactcaaatttagagaagatattggatgcgatggccgacttcctctatgtgggtatcggcactatggtggctatccgcggcggcgcaccaatggggatgagtatctatacccaggatcaaagcgtaggtcgattccatgagactttgtctatgacttccgcagcgatcgatgatgtgaagctaccgttttatgaagctggcaaagtcgctgatgagcttgaggctcttgcgaccaaaattgagtcagagaatttgtcagaaggtgctcttattaacgagctgcgccgagtcctgaacatgctttatgtcgcctgcagcatgacctatcgcctggcagatttaatggacatcaacattgtagagctggtggcggaagttcaccgttccaacatgacgaagctgtggccgggtgacgatgcagagcgggctgtggcggtggatcgctgccagtacgaccattcagatctgggcttccgtgcttgtgaaggtactgatttaagaatcggattccgcatctcagatggcaaaatcctcaagtcaccaacctacagtgaagctgatctggttggctttgttgcgacggctaagacgtctactattgtgaaggaattatga

SEQ ID NO: 142696 - DNA, 1086 bp, Enterobacter cloacae
atgacaagtttactcaacaaacctttcactaatggcctggcgacggattacacataccgttcagtaattagccgggttcaatcagaaggcatggcctctggcgacagaactggaaccggcacaaaaggaacctgtttcttagcaaccgattacctgctgactggtgcgtcagtgccacttgtttccagcaaaaaaaccaacctcaaacctcttctggttgagctggagtggtatctcaaaggcactggcaatatcggcttcctgaaagagcatggcgtcaaaatctgggacgcatgggccgatgagaacgatgacctcgggccggtctacggaaagcaatggcgcagcctggaagacacccggattatcctcagcagcgatctgcaaaagtatcttgatcgtggttacttgcttgaaactgaaattgacgaaaaacgctcccttgtcaccagaaacgttgaccagctggcgcgtatcgttgacacgcttcgcaccaacccatccgatcgccgaatgctgatgagtgcatggaatgtggctcaactggaagacatggcgctgccaccttgccactttgcgttttacgtgtggagtcgtgagctggatttcccaacccgtttgtcgatggcgagtgatgtcggccggacgcactctcaatacgggcatgaaagcatgtatagccgcctgcttgagctgctggatactggcactgagattgatgatgagctgatggacagcctgggtattccaaagcgagttctgtgctcttctgtaatgcagcgcagcgttgatgtatttgtcggtatgcctttcaacattgctgggtacggcatcttgactcacttcattgcccaaattaccggccacatggccgcgtctctgactcattacggatgtgacgttcatctctacgacaatcaccaagaggcggttgaagagttccaggcgcgcgaactcccaaaaagctctgacccggtggtcatccttcccgaagcatgggaagagattgacgatttccgctgggatggcgtcgtggttgaaggctatgaaccactgccatggatcaaggttccggtggcggtgtag

SEQ ID NO: 142697 - DNA, 504 bp, Enterobacter cloacae
gtgtttatgattgctgcggtggccaagaacggtgccatcggcaaagagaatcagctgccatggcgcagcaaagaagatctgcaaattttcaagcgcatgacaaccggtaagattgttgttatggggcgtagaacggcagaaagcctgggtaagccactgcctgaccgtgtgaacgttgttatcagccgtgatgcagctcgtgtaccggctggattcgtccatctcagaggtatgtcagatgtggctaagttgtcggtctattcaaactgcgaggtggccatcattgggggcgctgagatttatcgtctcgccctgccatacgctcatcgtgtttatctgacgcaccttgatgttgaagtgcccgacgcagatacctttttccccatggaagaaatggcagccgcaaatctgatttcgcttgagacgttagtggtgcaagaggaaacggaaacaacaccagcctttaaacaagttgtttatggagataaagaatggatcgcatag

SEQ ID NO: 142698 - DNA, 636 bp, Enterobacter cloacae
atggatcgcataggtttggccggcgcccagggaacgggtaaaacgactttagccaagcgtctcgctcttaagtacggttacaagtttgtcgatgctggcgtcggcgcgctgatgagtaagttgggtgtggtggtcggtcaagaaatgcctctttacgagcgcctgcaggtgcagctggccgtcgcaaaccacatcgctgagaagtcccacggctcaggcagtttcgtaatggatcgaacgccaattgacgttatggcctacaccatcgacctcttccaccaggttaatgatgatcgttgtgtttcgctgtttgatgagattcaacaggtgtgttcgcgaaccgcaattgcgaattacaacgtgatcgttggattgcgcccggggatcgaactttctcaagatgacagagaacgagaccagcgaggctctctcgaccctttgtatgttcgcagaatcgatgcgctggtgtgcggtgaactgaacaatctcaaccactttggagacaagcgaaaccttacagtcggcttcttcccgccaactttaacaaatctggatgcgcggattacttcatttagccagtacatccgaacctcagcagaagcgcacaaacggccatccgatagcgccttgcactaa

SEQ ID NO: 142699 - DNA, 420 bp, Enterobacter cloacae
atgaccaccgaccttctcttgcaggatgaaatcgaccggaagacggttgaagcgctcgaacgagtggtgaccgaatttgagtcaaaacttctgactgctcgtgaggcaagaattgccatccgcgcagtgtttgagagtgtccaggggctgctgactgaatccatcagcgaaattctaaatcaggtgatgactcagtttgctaacgaaccaggtaagcccattttccctatgcacctggcaatgccaggcggcaacactattttcatcagcgttgatctcgacgacaaaacgatgcgtgttctaaacgtcaccaccggtgctgaactggcaaaggtggcatgtgacacgcagaccgagacaatcaaaaaggcagctgcgtttgcaaaaaacgccattgtcaaaggagctaaaaaattatga

SEQ ID NO: 142700 - DNA, 549 bp, Enterobacter cloacae
atgatcgcaaccgggctggacattgaatcaaccggactggatttccgcggtggccatcgagtcatcgagatcgccctatcctcctacaacatcatcaccaaagagaagatagcaagcctggaaatgcgctttaacccgcggcgaaccatccagccagaagcgcaaaaggtgcatggtatctcattagagatgctggccaccgccccactctttgaagacaaagcccctgaacttatcgcgatgttggacgccagcgacttttacattgctcacaatggggaaggctttgatggcccgttcctgcaacatgagttcaatctctcaggtcacaccatgccagacaagcccatgtttgacacgatgttagaggggctgtgggctacagaagatggaaagcgccctcgtctgcaagaactggcttttgcgttggggctggtctatgacacggagaaagcgcatagcgccctctacgatgtagatctgatgatggaatgcttctttcttgctcgtgagaaatacaacttattccagcttccttttgcagcgtaa

SEQ ID NO: 142701 - DNA, 804 bp, Enterobacter cloacae
atgtccaacgcagcccaaacaaacgtttctgacctcgatgctctgtctgcgatcttggcatcccttgatgaaaccccagccgccgctgacactcagatgaaaggcatcgattctttgctcgatgagctggaaacgaacgcagctgaggccgccacatcgacaccagagagcatcgtagcaaagatcgaaaacgaattaccggttacgccagctgctgcttcaggtgatatggagcaggtgatcattgatttagaagagtcgaacacggccacaccgccagagaaatcaacggagattttagccggtggcgaagagaatattctcccggtgattgaagaaccggccgcacctgaagttcagaaggaaaagcaacctgaacctaagcctaaaaaagccagcacacctcgtggcgctcgattcacctttgacggtaaggacgatgccttctttgagaaagctggcctgcagcgcgaggttttcatgaagtgctacaacgaggctccagtgaaggcaatggacaaaatccaaaacattatgcactggttcagtggtggcccggatctgagcgtatatacccgtatttcgttgcactcattaatcgctgacaaaacggccagcagcaatagcctcaaactggctatgatgagctatccagagaagccttatccagttggcactgcctccacccaggctggccaaatgatggcagtatttccggcgctgggtattgctgcgaaggatgggaaatcgctaaccctgaatgctgattctccgatcgtcaaaaaattcatggcggaagagtaa

SEQ ID NO: 142702 - DNA, 615 bp, Enterobacter cloacae
atgattgccgcagagaagattaaaaagcgcgagcgtgacaaagagctgcgcgacctgtggcgcaccccacggtggctatttgaggccatccagaaatacctgggcgtccagtttgacgttgacgtggcttgtgatgccggtaacgcactgctgcctgacttcatcggcaaggaaagagacgcgcttgtttgtgagtggggcgagccaggcaccaatgcttttctcaatccgccttattccaagattaaaccctggatagaggctgctatgcgtgagcagcgtcgcggcgtatcgacagtaatgctgatcccccaatcacttgataccgcctggtatgagttcgccactgaatcagctaatgagacggtggtgctgaccggtgggcgtgtagcctttctggaaccagacgtggagctggggctggtagaagtacgtgaaaaccctggtgggagtatgctggtggtcttccgcggccactgccaccaggctgggcacattcttcgtaaggtttcactgccagtaatgaaagagctgggtggttatgatccttcaaaagcaatcagaaagaagcgcccctccaagaagaaacaacccacgttggatctggcagcttag

SEQ ID NO: 142703 - DNA, 234 bp, Enterobacter cloacae
atggcacaccctaccaacgtagtggcactgatcgacactgattttctcgccaatgcgcgccagctactcaaaaaccgcgatcagtcattcacgctttatgagtgggcgcttaaggcgatccgcggtgggcagcataccaacgaagtagagcagctgatcggcgagttaatcaacgaagttcatgggctgaatgttcagcttcacggccgcactgagcagaaagccaccgcttaa

SEQ ID NO: 142704 - DNA, 306 bp, Enterobacter cloacae
atgttgttgtcttacgcagacgttttgaccggcattaaaaccggcgcctccttcgcacgtcagaaatggcctgccgacacatccatacgactccgcaccggggtgatcagctcaagcgaataccagaaaacagaaggcaccgtgttcttcggtcttccactcaaccttttcgaagtccaccagccagacggttacaccgtatttcctggtttagagatggttcttccaaatggcaaagtggttgattacctggcttcgatgattgaccagctcgcctgcgattggaaacgagtggaaactaaatga

SEQ ID NO: 142705 - DNA, 522 bp, Enterobacter cloacae
atgatcagctatttgttcttcaagcgccgcttcgaacgccagcttcgccagatggaaatccgcatccgtgaacttgagtcacgttgcgatcgcctgtccgatgctcttgttacgttcggcaccgcagccggtgttaagcatgtcgagaagcaacgtggccgttctgaagtggagttgtgggggttgtccgatccgcctgtatttctagggaaggaaaaatctcatgcagcagcattaccagcttcaacgacttcgtcgcgcagcgcagcccctgttagcgacgttagccatgtgccttttgtgtacgtcgataacaacgatgttccagctcgcgccagcgtctctcaaagcgccagcagttcgcaccatagcagccccgcaagcagttgctccgtcagtaatagttccagccacaccagccaccactcttcccacgggagccatagtggattcgaccatagcggtggaagctatgactcaggcagttccttcgattcaggcggatcgttcggctgtgattaa

SEQ ID NO: 142706 - DNA, 174 bp, Enterobacter cloacae
atgtggttcaaaggcttagtgctttttggttttgtagtgattgtttcgtggatcaccaatctagtgaaggttttcacgactgacatcccggttcccctctggggaggcaaggaaattgccagagtaatcggtattttcattccgcccctgggcgccgctctcggattcttttaa

SEQ ID NO: 142707 - DNA, 426 bp, Enterobacter cloacae
atgtttggtttgctgaaaaagaaaactcgtaaagcagtaatcgaagttaagaagatggagaaccgcgatgcagttgaagcgactgtctggggcggttactacatttcttattttgatggtgactgctcgcctgcagaagttgctgtgcttgaaaagactatggctgctaccccttcatttgcgccgttcgctggtgagatcgctcagctcagctctaacgtgcgccagcaattcgaagcaagcgcgcgccgggcggctgcccaagctcttcgtgagttagaagatattgccggcactacggatgctgtggacgttctgtgcctgtgtatcgatattgctgacaacgatggcattggtgaagacgaaatgaaagccctgaagaagattgctcaggcacttcagctttcactcgatccgtacctgtga

SEQ ID NO: 142708 - DNA, 153 bp, Enterobacter cloacae
atgatccgaaacattcgtctcggcgctgccggattttttgctctactcgcggtcatggtggattttgccagccggttgatgtcagtgctcaccgatggcgcattgctggcggtcgcagttgtcattcttctaccgctactgaaaaagcagtaa

SEQ ID NO: 142709 - DNA, 540 bp, Enterobacter cloacae
atgtgtattgtatgcgaattgaaaaaagctgccgccaagcaatctgaagagcgcacctctgaaatcagcctctctgaagtggccaaacatgctcgcgcgatcgtcggcaaagagaacctgcatccagtgcaagctattgcagcactgcaattcctgatgccggtaatgaaagacccggagatgatgcttgaactgcttattaaagctgacgatgaagcgcaggcaaacaaagccccccgtactggtgatagcactgtaggctcaatccaacgtgttgaagaactggaaaaggaagtcgcccgtttgaactcccagatcaatctgcaggccacaaatggcaaagcaatgggtgacgctctggcatcgttgagcgcaagcatgaatatcgagctgccggttctggatgggtcaaacccgcgctctaccgtaaaagccttgtcggccgtggctgataaactcgaaagccataaagcaggcattgagttctggatgcgtgaaatcaccaaccgccacgatctgaataaaacagccactcattaa

SEQ ID NO: 142710 - DNA, 603 bp, Enterobacter cloacae
atggacatcatcatcgataaagctcgcacttatgcgaccgctgcccatggcgctgttggccagcgccgcaagtacactaacgagccgtacatcacccacccaaccgccgttgccgagctggtacgtgcgcatggcggcacaagagacatgatcgcggccgcgtatcttcacgatgtcattgaagacactcagctgacctttgacgatctgaaagaggcgtttggcgaaagtattgcgtggaaggttgatgcgttgaccaataaagccggcaaagaagatggcaaccgcgtacagcgttttgttatcaactgccgcgcgctaattaatagcctcgatgaagaaacgatggtgattaagctgtgcgatctgctgcataacacctcttccatcgttgagcatgatcacggattcgctgcgatctaccttgctgaaaaagagttcatgatggatgaaatcttcggcctgatgaaaggcggtctggctgacatcgtccgtgcaaaattagtgtggggttatgagcaactgagcaccagcttcaaggcgcgccatttgaagcatctgcgcaccatccagactgcgtggagtgaacaagatgcagcatga

SEQ ID NO: 142711 - DNA, 741 bp, Enterobacter cloacae
atgcagcatgagaccaccagcaccctcgatcgccaagcgttgatggaggcgtttctaagaggggtgccaaccgaagagttgcttaaccacgacattaacagctggtatgcctacaaagctcaggagcaggctgaggaaatgcgtgatgaaatggactcgccaggcggtgggcttctgaaattcctcagcaatggcccgatgtcaggtatggcggcaatgatgttcgccaaggagttcagggacacaccggccactaactattatgagctggcgtatcaagtgcctgagatgggtgctttcacggtcacaatccagcgtaacgacggagagacaccggctcttcagctggccgcagccaaagagcgaattgccatgctcgaagagtcacacgctcaggtgattcaggcgcgtgatttgtacaagcagagttggcagctgtcatctctacaatcgatgtctcgatcattccgtgaggcagtgagagctgcgcgcaaggtatggcttgaagagaacgacccgaaggatggtacggattgcgttacgccgttcgaccagttcctctatacggaggttgtttctggtgaaggcgtagatttgccagatctcttcgaattgatggagtgggctaaatatccagccgatgggcgtgatctaaactcagtggccaaaggcaagatgtcacgtttcattcttgccgcgaccggtttgggtgatgcctcacttacagtaagcgatcggtaa

SEQ ID NO: 142712 - DNA, 1116 bp, Enterobacter cloacae
atgggcgatcctctattcaaaaacgagcgtttctttgaagagaatggcgtagtggtcttttccagcaattacgccttgtatgccgacatgagccggcgaatgatgactatcatgggtgagatggctccaggtcaggaaatttacagcattgacgaaagtttcctcgatgtatcaggcgtttctagatgtatgcctcttgaagattttggccaccagcttcgggatcgcatcaaaaaggaaacgtttctaaccgtgggcgtggggtttgcgcaaagcaaaactttggcaaaactggcaaatcacgcagccaaaaaatggtcaaaaacaaacggggtattggacttatccagcccggtgcgacagcgcaagctgatggctctggtcgatgtcagtgacgtatggggtgtcgggagccgattaaccaaaaggctcaaccagatgggcattgaaacggcgctacagctggctcaagccaacacgacaatgatccgcaaacagttcggcgtggtgcttgagcgtaccgttcgcgagcttaatggcgaatcctgtattccgcttgaagagctgccgccgccaaagcaacagattgtgacctcaaaatcatttgggcagcgcgttgagcacctggaagacatggaacatgctgtttgcacctatgccgttcgcgcgtcagagaaattgagagagcaaggatctcgctgccgacacatcactgttttcatcgccaccagccgctatgccaatgaacctcagtatggcaacagtgcgtcattaacctgcgaataccccaccagtgacacccgcgacattgtcgcgcttgcaatgcagtgcctgaagaggatatggcgtgatggctaccgatacgcgcgcgccgggataatgcttggggacttttaccagggtggggtcgctcaactcgatatgttcagcgaacataggccgcggccaaaggcagatgaattgatgggggtgatcgactcaatcaacaaaagaggaattgggaaagtttggttcgcagggcagggggttgataaccagtggcaaatgaagcgcgagatgctatccccgcgctacaccacttgcctgaaggaattaccgatcgcttactgtaagtga

SEQ ID NO: 142713 - DNA, 651 bp, Enterobacter cloacae
atggcaatggggtttgaggtatacaacagtgcaggggcacttcaggttgattcgcaacaccgaaatacactagtaagtgatgtacgtaacataaccggtctgactgatattggttattacatgatcaaaaatccatttgggggcgattacccatttggctttctgaagccggccgataatccagtcccgggatacttatattgggttcagcttaatccgggggcgttctgcttccctggcgcccagtccttccagaacaacagcggtcgtatcttacgaacaagccgaagtgtacctattcaaagtggctatcttgatgttcttgatcctaatggaaacttagtgtggagtgccaaaagcgctaaccttgcaccacgcatccggggattccttgagctgaagccaaactcgaacgttgacaatgtaacagtctctacgtctcccggcttcaacccttggttcttaatgaatgcagtaccaggcaatatttcagatgatggcacggttactggatattctggggtgatcatccgctggacaggttctgagttacaagcccgctacgtcagcaaataccagaacacctttgccaactctttcggcaagcgcgttgggcttcgcattccatatgctcagttcgctgactactaa

SEQ ID NO: 142714 - DNA, 291 bp, Enterobacter cloacae
atggctttcgggcttcaatgctgggatgcaagcggcaagcttgtcgtcgatctcagtgattacaactgtaggtatattggaacctatgacatcacaattcctcgggggcagaactcggcgactgtcggagtagcaggcatctcagcaaccaacgcgtttggggcgatagtcaaaccgaacacttttattgaggcatttgctgaagcaagcacgaatgcaattacagtctaccggttgtttgggacgagttatggcgagacctatacggtcgaggtttacagttacgcataa

SEQ ID NO: 142715 - DNA, 1686 bp, Enterobacter cloacae
atgagcacagcactttcaatcatcgaagcatcattccctggaagtgacatcacattccgcaaggagctgacgatcatcaataacattgtggccgagtgcgacaaagagatcgctctgatgcacgaggttcacgattacgtgtatggggatgaccggtatcagatgattaaccgtctgttagagctgaaccaccagccagattgcaacgcgcgccccggcagcactctctccaaagttaacttgcagcatgtgaaggaaaacatacacgcccgttactggcagcgggtgacggaaatgacgaacgttctgatgatcatgccagctgcgcgccgtgaagaatggcgtgagcaattcatctacgggaagatggaagtaagcgaggaacgtaaaacgggtatgttcaaggacacgtaccgcgccaaaaaatacgtgggcgttccagagttcacccttaacactgttgtgccaaccatggtgtcattgctcaacgaccggcacaaatatctggttgagcgtgtgcatgggcttttcaaggcgctgagtccgaaccacaaaacgaacaaggtgtttggcttctcggaaaagatgatcatctcctatgtctttaccgactactggaatgacagcgtttcaatcaaccaccgcaaagaggacgtgctcgacgacctgcgagtgatgcttcacttcttcgcgcatcaggaaattactgaggtggcgccgtcgcgtcatgtattcagcgcgctttaccgtgataataaagaaatgaacacctggtacagcatcgatggcaatctgatgcgggtgaagatgttcaaaaatgggaacctgcacattcaggtacacccagacgttgcctggaaactcaatgaagttctggcggtggccatgccagcttcaatcccgtcagagttacgtaagccgcctgccaagagcgcccccccgaaagagtttgggcacgttcatactgaagttagcagccaggccagaagagcgttatcaacgatgagtaatcgttacggcagctggtcatacagtcatcatggattgtcaaaatcagagatagagaaggctgacgctgtcattaaacggatcgggggcgtccagacgagcagccattgctttaaattcccatatgagcctggcaacatcattagcatgatcatggccaccggtcagataccggatgtggttgcccaccagttctaccctaccccaaaaataatcgcggattatgtggcggcggcgctcaacatgaagccaggcgaaacactgcttgagccttcagctggtcgcggtgatttattggcgtccgttccattggcaaacgagttcgctacctgcgttgaagtggctccgttgtttgctgagatcctcaaggagaaaggctatcaagatgtgcataacgccgacttcatggcctggtcgaaagactatgcccaaatgaagttcgacaagatcgcgatgaatcccccttactccgaaggtcgagcaaaagctcacacacttaccgctcttgagcacctaaacgttggtggccggctggtggctgttctgcctggagtgccaaacctgactgagtggattgatgagcgtcgatttgtgtgtgcgatcgggaagactttcgagagagagtttgaggacaccggcgtaacagtgaccgtctgtatcttcaagcgcatcagctaa

SEQ ID NO: 142716 - DNA, 351 bp, Enterobacter cloacae
atgtgcattatggcagcagctcaggcagtacgtgcggatcgtcacttaaacaaatacatccgctacaacggcatggcgttatcaaaacgtgaactggtaattcgcctggtgaatgaaggcagagtgccagaacaggtagaagtggacaaggtgcagccagctaccagaatgcagatgtttcgttgggacaacgagcagcaacgggaacatgagcgtaagcgcgctgccggtggtaagaagaccgagtatcgtcttagccggcacgacggtgttttcattgaggtcagcaaaaccatgcacgactttgcggcgcagctgcttgcggaaaagggggttgctcatggtcactga

SEQ ID NO: 142717 - DNA, 252 bp, Enterobacter cloacae
atggtcactgaacagatgcactatgagttcctgaaggcgaactatagacatgatcgcttcgaggggaggaatgggaacggctgggatagagactattcggcttgtatcgctcgcagctctttccaggcattagaaagccatggctatacctgcatctctcaacacgaatcgaagaccggtgatgcaatttggtacgatcggaatcttcacacagcaacctatagcgaaatgaaaaggaagtatggcgtatga

SEQ ID NO: 142718 - DNA, 216 bp, Enterobacter cloacae
atgacttatgacatctacgcaatcgaccgtttatatgtcgtcgattcttgcttgaaggagttaggcattgagcgcacacctgagaatcttaaagcagcccagacattttttaccgacgaacttcgtcaggttgcttccaaaaagggttgggatgacaaggccattgtcacagaagcataccatctgattaaggtcggttttgacctcaataattga

SEQ ID NO: 142719 - DNA, 189 bp, Enterobacter cloacae
atggattggctttatgaacacggctttttgtcatggagcggggtgctggcgatcataattgtcgtttacctcatatggacagaacgcaaacatgccaaaacacctatgggtaagcggcacgccgaatttaacgctgagatgaaggaacgagcgcgcaccctgcgggaagaaaagaagtcacgaaggtag

SEQ ID NO: 142720 - DNA, 207 bp, Enterobacter cloacae
atgtataaacatttaaatatcagcatcacgcttgagggtgtggacactgacgagatctcacttgatgacgttatccgctctgaggatgtagccggacgcgttggagcacttattggtgaaggatacagagaagggtcattcccgttgccgatgggcgaccagcaaatgtcagtcgcttggaactgcaccacttccgaatcgaactga

SEQ ID NO: 142721 - DNA, 243 bp, Enterobacter cloacae
atgtctattaaaatgcctgggctgctcaactactggagcgtggacgagctggccgaatgcttggatggtgtaggcgaagagctgtacaagaaactgtggtcatatattcccgccgaaggagatggcccgacaggagctgagatctggaatgatttgaccgaagagcagcagcagcgtttgtcggatgcggtgtatagagagtttcccgatctgaaaaagacagacgaagaagattcactgtaa

SEQ ID NO: 142722 - DNA, 411 bp, Enterobacter cloacae
atgctttgtgccctcttgagacactgtattatttacaccaacgagaaaacaaattgtttacatggtgtgaatatgaatctgatgcaagctatcgctaactaccatcgcagcacgttcaatccggttaagcgctctatctcccgcgtgaatctggtggacataactgcgaacggcgtagtcatcggcgtgtttcgtgagaagatttttgagcataagtcgtttgagagcggcgagtgcaaacgctacaaagtgggtgagcgcctgtccatttctgttacgcgcacaaatcgaaagtacagattcgcaaatattcagcacttccctaaagaccaacttgagcgggtgctggttcttgttaaccagattgcccagatggagattcagcgagcgacgatcgccgtagcagtataa

SEQ ID NO: 142723 - DNA, 339 bp, Enterobacter cloacae
atgaacgaatcaatgtctgatttccgcgagatcactaaagaagagtacaacgattatgaagagctggtggatggtaactttactgtcattgatgcgcgttgggtggtgagcatcgacatgcgcgatgatgagccaaccttggtcattgcagattggaataatggcgataatgatgaaattggctcgttgttcgatatgagtcatgctagtggcgaatattacaaaacacttaagcgtcgttattttactggatgccaagcgacggatgctatctggacaacttatctcgacctcatcgctcatcatgatgtagaagcattcatcaagtcatttgactga

SEQ ID NO: 142724 - DNA, 423 bp, Enterobacter cloacae
atgacatacaaggcaacagaactggtttacgacatgtattacgcctctgagcgcaccgaagatggtggcaaggtggcaaagattactgtccagatccgtgacgcatccgtagggcttgagaagcagattagtaccctggttcgtacaaccccgaaagacaaagcgcaacctgcggtgtactccatcggtgcgcagactgttatggatggcagcgacccgctgctggtggctattgagggtcattaccgtgcttctggtaaagacctgttcgaaactctgatggatgaggtcactgacttcattgaaacgggtatcgacaacaccagcacctggatcggcgcatatggcatgaaaattacctccggcgtaacgctggacaattatctacctgctgatgtgctggccgcaggccagactgcttaa

SEQ ID NO: 142725 - DNA, 186 bp, Enterobacter cloacae
atgaaaacgattattcaagtccagcaaatctgggcgcagctggtgaatgagcctgtggatggcaatcaacaacttgagcgcgcatttcaccatttcgaagccggtgacagtatcactgacgtgtggttgtggatcgacgggttatgcccagacatcaccgttgctcaattgcagcagggggcatga

SEQ ID NO: 142726 - DNA, 285 bp, Enterobacter cloacae
atgatgaccgaatttaacgttacacccaaagcagaaaacgtccacctgctttcctggctcgacctgaacgaagccgagcagaaggaaatggatcacgtcgaatatgatgaccagggcagcacccgcttcttccatcacgacggcgcacttttcgatgtggccgatttcatgattgatgaccgcgcccctgaatggcacgccggttatccactcaatgccttcgcaatgctgatgatccgtctcactgatggcggcgacagcgtagacatcggcttaatgcactga

SEQ ID NO: 142727 - DNA, 237 bp, Enterobacter cloacae
atgaaattccaaccgataccagaaatcaaaaactctgaaacggaatcattcgcgcagaagatggcgaaagagtatcagacgcacgtacagcgccaccagaagggtacagacatctacgcccaagcgtatggcatctggaagaccaaaatcgatatgtggctcaaagagcgcaccctcgtgcgttgggaagtattggcattaagtgatcgcatcgcatcgctcattgggaaggcgtaa

SEQ ID NO: 142728 - DNA, 303 bp, Enterobacter cloacae
atggaagtcgtatcaatcaaaacagcaattatcagcaccgctcacgttcgcgaagaagacatgcgcctcattgagtgcaaatgccacgacgttaattacggctggtggattcacgacactgagggtggagcaattatccgccttgatgcgacccaggggagtgggctggacgatctgaagtccgatggcctgaccgatttcggctacgccaaccttaaagcgatttgggacgccggttatggctacatccacctcgatatggatgcggcggtaatcgaagagcttccctacgaagaatggtaa

SEQ ID NO: 142729 - DNA, 327 bp, Enterobacter cloacae
atgaccaaaccaattacccctgagcacatcgctgtattgggcttgtattcgatgacacctgctgaccgcgatcgaattgcgtgtgcgatcgtcaccggagagcagggcgctcacgagtgggtatacatgtcatcaagcgcaataattttcgattttggtttcaaagataacccataccaatgcctaaaagagatgggcttgtcagatctgctattggggaacgtagcgacagcgcgggagcaggggcttaatttcctcaaatttacagcctatttcgatgacgaagaatacgaaggctacaaaagcattccgtgggaaggtcaataa

SEQ ID NO: 142730 - DNA, 480 bp, Enterobacter cloacae
atgaatcagatttaccagatggacacccgcctgggtaacgcacaagtcctgtttaacaccattcaccacgacgtgcgaagcgtgacagtggacgggaaggacgttacaagcactctgggggcatatgagattaatgacctgcagctggcgctcaagtccgatcgattctacaagcgggatattggcaatgcgctggtggttcgtaccggtactggattattcgtcttcccactgcgcggccgcaactgtgcatctcgtcgatttgagatggctgtccagatcgcaatgcacttctacaacacgcgtaccggattagacccagattgggtgacatccactgcaaagcgatacgcggatcaagcagaacgctataccggtgtcattctggaagcgggtgactttgagtggaagctgaaattgccagaaatcacatttaagacccgcaatagccacgagctgatcatgctcgaagggaaatag

SEQ ID NO: 142731 - DNA, 204 bp, Enterobacter cloacae
atgactaaacaagaatatttaaagcgccaaaataaagcatatttgaaatttaaagcggaactttgcgcggagttacaagcggaaattgacgcaatgaatttaaattttttcgatgtcgtcaatggttatatgacggaaagaaaaaaacgctatatgtttttagttgatacaatcggaaagttaaaacgcgatctttactgctaa

SEQ ID NO: 142732 - DNA, 654 bp, Enterobacter cloacae
atgtctaatatcatctcaaaaaaatctgttatcgaagctgctaccactgttgcaactgaattagctgaaactgttgcaagcgtcgaacaaaattacactactcgctataacgctggacaagatacgaaagcagataaaaaagctatgcaagctgctaaaactaaacttgcatacttcactaacaacgtttgcaagccactgactgacgataaagcaaatagcgtgttttattatgcgattaaagcaagcaagcaaacgccagagcagtttttccgcgaagcaatggaaaatagctatagcttagaaaaactggtttacttaattaattctatccgcgctaaacgttgcgaatattcattagcggatcaatctggttcacgcgtttttgcaattgttgaaattatcaaagatgaaatggaagttttcaccaatggcgcaattaaaacgcttatggatgaagcgaaaaaagaaaacgagaagcaagcggatcaaacgtatacgcaagccaatcagttaatcgctatgtgtgaacgtttgggcttgattgagaaaatcaaaggagctggcgcagccaaaaacggatcacaacaatataaactgttagataatgattttgtgtcttatatccgtgatgctttcgcagtagctcaataa

SEQ ID NO: 142733 - DNA, 423 bp, Enterobacter cloacae
atgaaaattgcctatttcgctgcaacagctgctgcactccttctctccgcctgctccaaccaaccagtagcgaccggtgaagcaaaagaagtaccgtcgaagcagatcatcgatcgcacccttacacaatccgcaactggtacggtgctgacggtcgttaaacgcgattctggaactaagggagcattctgcaccgcgacggtggcagttgatgggaaagatgtggccgaagtggggatgtctgagaaggtgagtcttcaccttgcccccggggaacacattatcggcgccagactttcaaacgcatttcccttttgtgccggcgagacagctgaggttacagcaaacgttagcaaagaggctgtttaccgattcggtgtgaatgccggggcaaacttctatatcaacaaaacagcttggtaa

SEQ ID NO: 142734 - DNA, 525 bp, Enterobacter cloacae
atgactatcaccgacattacatatggcattcccgccgaggtctggccgcgagactacaaagatgtagagcgctcgcttcagtattaccgcgcaaagcgtgttcctgtaaaagtgactttagaggatgggcaggtattctctctcttcgtgtatgggctgctgactgcgcgcaacaaacttgacctgacaccaagatacgatgccaatgatcaccgcgttcgtgtgccgctggagcgtgttacgacggttgagacgatcaagcaaggagaggtgcaggtggattttgaaggcagattgacgatcaatgctgatgattaccaaaaccagccatcaaagcgcgacttctttaaaatttgccgtcaggcacatcaaaacgagatgttgatccgtgtgtacatggccgatggtagagaaatcgaaggtgaatcagcgggtgtgacagccagccatgtgaatgtccgacaggagggcggcaagcagctggtggtgttattcgattgggttgatcgcatccttccgttttaa

SEQ ID NO: 142735 - DNA, 270 bp, Enterobacter cloacae
ttgagtcctcgcgctaacgacaaagtcgaagcgtttaaagacaaactcaaagaatctggtgtcaagatgaccaagtctgaggtaatcgacatgatcatcgcagaagtaaatatggccgacttcgcgcggtactcgaaaagggcaatggcctccagtaaagccgcacaaaggattattgaactgtacaacaccaccgacatgaccgaagaagatcgggatattctgctcgctggattggaacactcaaacaccccagaaccgaagccttaa

SEQ ID NO: 142736 - DNA, 1575 bp, Enterobacter cloacae
atgagcgttagaattgtatcaaacgcagtgaacgcgttaatttcaggggcggatgacaacgtaaaaaagatagttcaggacatgttgagctacgatgttgatggcgcctcattttcaggtagtggtggatgggatggtcgcagcaccatgttcaactggtcaaaatgctcgtttccggctggatttgctcgatctatcgcagcaaagctaaaccgggctggtattcctgcaactcacattcggaaaccgatggtttctgctcttggcaagccaaatcccgcggttaacccattcccttacaatcccgattacgcatatcaagatcagacagtggaagccatggtgaaagtgggcggtatgattgcccaggtcgcaaccggtggcggaaaatcaaatatagcctgcaaggcagctgctcgtattggtcgtatgacgctgttcatcacgactcgatcagttcttatgttccaaatggcggaaaactttcaaaaatccatcgactatcgagctgaaaatggcgagccgtggcttaaggggcagaaagttggtgtgattggctcgggtgaactgaaggtatcacgtcatattaacgttgcgacagttcaaacactctccagttttctaaatgagcctggttctgacctttctcccgagaaacgcgcccagcatctcaagcgaagagagcttatcaaacagctgcttgccagcgtttccctcctgattttggaagaagcgcacgaatcatccggctccagcttctacgacatcgcaagactctgccacaacgcagattaccgtttggctttaaccgctactccgtttatgaaggattccacggaagccaacatgcgattgatggctgttgccggccgaattgagattaaggtgacagaaaaatatctgattgataaaggtattttggcaaaaccctacttcttataccataaaatcgcgtacactccagatgaggctaggattaaggctgaacttgcatcaaaacacctgaacttccgggttgttatgagcacgccataccaaaaggcttaccagttaggcatcgtttacaacctaaaccgcaatgccgcaattgttcgtgccgctgttatgtataggtcacaccagttaaactgtatgacgttggtaaagcacaaaaggcatggtcagatcttaatggagatgatgcaggcagagggattaagggtcgatttcatatatggtgaatcttcccaaaaggtacgacaggcaaaactgcagagcctggctgcaggcaaaatagacattctcattggctccaccatactcgatgtaggcgttgatgtcccaagtgtgggcgcggtgatcctcgctggtggtgggaaggcagaagttgagatgcgtcagcgcgtcgggcgtggtctacgagccaaaaagaatcaggcaaatgtttgttttatctctgactttattgattgttccaataagtacctgatgtctcattcctacgagcgcaaaaacatcatcgatacgacacccggctttgctgaaggcgtgttgccggtcgatggaaagtttgattttaatgttctgggcaactga

SEQ ID NO: 142737 - DNA, 699 bp, Enterobacter cloacae
atggattatatcaaaaatatggacgtaaaaattaacatcttgcaggtggaagtagggcgactgcagccaaacccgtggaatacgaactccgtgggtctccagaatttcgaaaaactgaaaggctcaatcgaccgcctgggtttcttcaagccgatcctggctcgtgagctggcagatggttctttccagatcctcggtggtgagcaccgctggcgagcagccattgaacagggcatcgccactgtaccagttatcaccgttggtcagattagcgacgtagtggcgaagcaaatgtccctggtcgataacgagcgctacggtgaagacgatcaacttgctttgcagcgtctgattgaagaaatccagtcagaaactggcttcagcctttcagaaatcgccccatttgatgacgagatggcagcgacactggcccgaactgcggctttcgatatggcggaactggagcgactgactgatggcgacgagaaggcggcagaagaggataaacgcgagaaggtcgagcgtttgggtgtggagcaccagacgatgcgcttcaaagttaccttcgactctgctgattcagtcacttcagccattaaatcaatcattgccgagcagggcattaatactggcagcgacatggaagacgctggagaagccctggtgtggctcgcagacttttacaaggaacgtaactga

SEQ ID NO: 142738 - DNA, 678 bp, Enterobacter cloacae
atgagcactccatttgagatcgtgtatctcgaccctaaaacactggttccgtatgaggccaatgccaaaaagcacgatgaaacccagattcgtgatttggctgcggcaatctcaaagcgtggatttgaccagccaatcaccgttgataaagaaatggtgatcatcaccggccacggccgccgagaagctgcaatttatgctggtcttgacctggtgccggtaattatccgggctgatctcgacgaagtctctgttcgtgcgaaacgtctggaagataaccgtctggccagcaccgattatgacgctatcaagctgcaaaaagagctggaagagctggtgctgggcgatgaggttgtaattggcttcgatgagcgtgagctgagcgttttggttggcagcatgacggaagacatggccaccgattcattggtaatggatttgggtcacgaatccgtgcgccagcatgaagagcatgaagagatctcccgggaagtagcggaatcggaattacgagtgatcgacgtgctgggctttaaaacactccctgctggctctgcgttggtcgttggggatttgctcgcccatatggaagaagtgacgggagagagcggggcagaagcatttgtcgcttatgcgaagcgtgtttctgaggaagctgtcgatggggaagaagcatga

SEQ ID NO: 142739 - DNA, 642 bp, Enterobacter cloacae
atgagcaattacctcatcaacgtagccttccaaacgcgtgtaaccaaaaccacccgaacgctggagatcgcggagtcatttggtctgggtcttgatgaaaaggagtggtcgctttacgacaacctggagctggaaatcagaggcggtgatgtcgtgtacattaccggtcaatctggctctggcaaatctgtagtcttgcgtgagcttcagcgtttgatgagggaagaagggcaggatgtagcgtcaatcgaagactttgcctttgatgacagcaaaaacgtcatcgaccagctgggcaagaccaccagcgaggcgctggggctactgtcaatggctgggttgaacgatgcctatttgttcgttcgcaagccttctgaaatgtcggacggccagcgttaccgcctgaaaatcgcaaagctgatcgaaaccggcgcaaaggtatgggtggctgatgagtttggcgcagttctggatcgagtaactgcccaggtggttgcctctaatctccagcgcgccgctcgcaaagctggggcaactgtcatggtggcaaccacgcatgaagacctcaaaaatgctttgcgcccggatgtacagatcactaagcactacaaagaacgtgtgaaggtggactatgcagcttaa

SEQ ID NO: 142740 - DNA, 549 bp, Enterobacter cloacae
atgcagcttaaaaaggttttcccgatttatgagggggctgagctgcgccgccgctggacgcatgaggctgagtggcaagattggcttcgcgcccatggcgcctacggtttccgtgtcgcgccatattacaaccgctgcgtcgtggtgtttggtgagaaacgctatgtagaggtgatcaaacaactctatgggctggatgagagcgaatatgtggccggggttggtggcatggttactgacctgggctacatccagtacgacacgaatgttcactgcgtttatctgcctgagaactacaacgagtctgtttactggcacgaagccttgcatatcgcgcttatcaccggtcagcaccatgatttgatgccttcggatcaggaggctttcacttatctgcagggctacatcgttgaagagttcgtgaaggctcgcgtcaagttccttgccgataagaaggcgggtggtttgccggcgatcgaggatattgtgacgcgtcacccttcaaccattcgtcgcggtggctatggcactcgtaaggtggtgcgatga

SEQ ID NO: 142741 - DNA, 267 bp, Enterobacter cloacae
atgattttgacagataagcagaaagacattctgcgcaccatttaccttggtcacgatcgcggccatttacttgatctcgatgagctgctggaggttctgccatacaaaaccacaaagcagagtatgcagttctctcttcgagcgctgattaaaaagggacttgtcgagaaaggtgagtttcgggcgcgcggagatgatggctaccaacgtcgcacactcggtctgaccgttatgggtagagcaagcgtaaagctgatggtggcatga

SEQ ID NO: 142742 - DNA, 639 bp, Enterobacter cloacae
atgacgaccgaagctgaagaggtaaaggtcaaggtcacgcctgctatgtgggcggagatcgaggcgaaatgggcgtccggtgagtacacgctttccagattggaagacgagtatgggctgcgccgcgagacattctctcgttatttcaaaaagaaggggttggccaaaggcgccgactcagttggcaagatggtgcgcgaatccctgaagtcagacgcagagatccgcgcaaaagagcgcgccgacaaaattgatgatcgtcgtaacaagtatgacagctgggcgttcacacttggcagaatggcaatggggcaggttgccgaggcgaagtccaaaggtacatcgcttgctgttatcgagggcgatctaaagtcaattcagcgcgccagcaatattctggctaagtgctttgatgtgtcttccaaagccctgggcatggataaagacgaaggcttggccgacgaaatcccgaacctggtgtttggcgaattgacaccaaatcaggtggcagagctgcgtaaatcagaagaaccagatctgattgacgatgatgagcttgaggcacttgaagaggaagcagcaaaagacgctgagagcgttttagagagcgaagctgacgatgacagtggggaagcataa

SEQ ID NO: 142743 - DNA, 1569 bp, Enterobacter cloacae
atggaattgactgacaaagtaatcaaggatctggttaagcgccggcatcctgagtacgacaagaaaaaggagcattgggactttatttcggccacctacgcgggtggccgggcatggttcgatgacaacgttttccgctatttcaaagaaggcgatcaggaatacaaagagcgtgttgagcgagcataccgattcaaccacacgcgtgaagttgtaaacctgatcaacaaatacatcttccgcgaagatattcaccgcactgaggaagacgcaccagagttcatccgggatttctggcgccgcgcgactcgtcaaaacgtttcagtaaacgagttcatggccgccatcgatctgcaatcctcaatctacgggcgaatctgggttgtggtggatagcacaatggaagctggcgctgagtcggttgaagaccagaagaagcaagatggccgcgcctacgcttactggatttcgccgcagcagatgctggatctggcatgggatgacgacggcaatttactgtgggcgctggtggttgaagtcgcccgtgacgatgccgacccgtttgcttctaccggacaggagttccagcgttatcgcttgtggactcaaaacgaatggtatctgttccgcgaagaagtgaagaagggtggccagaaaggtaatgctaaggtttacctcgaagatagtggtgagcataacctgggtgttgtgccggtgttccctgttgactgtattggtcaaagcgaatcgccatacttcagcccatcgctcattgatgacatcgcttaccttgaccgtgcggtggccaactatctgtcgaaccttgatgcaatcattcaggatcagaccttctcccagctggcgattccagtgcaggcaatgctgcctggcgatgagaaccacggcaaggtattggagatggggactaaacgagtgtttacctttgatggtgaaggtggctcgcagccgttctacatgtcgccagacccgaagcaagcccagatgatcatcaccacggttcaaactgtcatcaacgagatttatcactctgttggtgttgccggtgaacgaactaagcaggacaacgccaagggcattgataattcctctggcgcagccaaagcatacgacttccagcgcgtgaatagcttactggtgacgaaagctgaacgtctggaacgtgcagagcgccagatgcttgccctggttggcaaatggatgggtgaagagctggaagacgatcacacattggttagctacccggagagtttcgacatccgtggtttgactgacgaatttgctgttgctcagcagttgtcagagttgcaggcgccggaaagtgttcgtcgttatcagatggaaatgctcatcgataagatcttcccgaacgtcacggagaaaatgaaaaaggaatttgaggcagatctcttgaaatttcctccaaaaaatgtatctgcgggtattgaaaatagcttgccaactacctatgataaggcatcttctcaagaaaccgagaaaacttcttcccaaggatcagggaactcatctgctcaagcaaccgagcgataa

SEQ ID NO: 142744 - DNA, 897 bp, Enterobacter cloacae
atgaatctgtggcaaatgatgatggcccgtcgtggcctgatggacgtcgctggcaaggaagagctgggcggtggcggtggtgaaccaactaaagagcaaccgggtgaacagcctggtggcgaaggtggcaaacacaaccctgacactgatggcgcacataaacaggcacgtcagccggaactggacgatgaatacgcaggtctgtcgcaagaagagctgatcgcaaaactgcgtgatgccaagaagtcaggcgctgagcttttgaaagagagcatgaagcgcaaggaaaaactggctgcttatggtgacatcgaccctgaacgtgctcgtcgtttggtggatgctgaagctgcggcagaacgtacccgtcaagaagcggagcaagctgagcttgagcgccgtggtgaatttgacgcggtcaaaaagcaaatggttgcagcccatcaaaccgatctgcaggtagagcgtgatgctcgtacccaggttgaggctgagaatgccaccctgaaggcgcaactgctggagatgaccgtaggtgcatctttctctggctcttctttcttgcgtgacaaagctctgatgacaccagctaaggctcgtgtgatttacggcaaccattttgaagtaggcgaagacggcagcgttgtaggttacgacaagccagctggtcagaaagaccgtgcggtgctggtcgatggccatggccaacctctcgcattcgaatcagcgattgagcgtattttgcgtgcagatcctgaagccgacgctttgctgcgaagcgaggctaaaccaggtgcaggctcacaaagtaagccaagtgccaaagtaaccaccccggtgaacaagtcaacgattgacaagttaactgcggggctgggaaaaatcgttacaaaataa

SEQ ID NO: 142745 - DNA, 873 bp, Enterobacter cloacae
atgccattactgcgagacgaagctgaaaagctgtctaacaacgaactggaacagggcgtaatcgaaactatcatcgatcgcgatgacctgtttgccgttctgcctttcatgaagatcaactctaaggcgtatctgtacaaccgcgaagattcactgtctgaagccagcttcattgacgtgaacgatgtggttccagaaggcgctgcaacgttcaccgagcatgtggctaagctgcgtattctggctggcgacgttgacgttgataaattcctggcaaccaccatggccgacaccaatagccagctggctatccaggttcgttccaaagtgaaaggtctggcgcgcgcattccgccgcaacctgatccagggtgactccactaaagacgcgaaatccttcgacggcattgctaagctgatgtctgccgatcagggcatcgttgcgaacgcgtccatgaccttctccatgctcgatgagctggtggatgcggtgaaagatctgggcgcagactgcctgatggttcgttctgagcatatgcgcgcttaccgtgcgttgctgcgtaccgttaacgtcggcccgtctgaagtgatgatcgaaaacttcggtcgtccaatgctgactcacaacggcattccgttcatcgtgaacgacttcatccctgttgttgacggcgctgccgacatctacggcctgcacctgtccgaagagaacggtctgaccggtctgtacggtggtgataatgccggtatcgtggttgagtccatcggcaccgttcagaacaaagacgccctgcgtactcgcgttaagtggtactgctctctggcgaacaagcacgacaaagcgatcgctgcgctgaaaggcgttaagatttaa

SEQ ID NO: 142746 - DNA, 471 bp, Enterobacter cloacae
atggcagacaaaaaagtacgtatcaccgaagaagtgctctcggattacacgggtcacatgttcggtgtgcctttcgtcaatagtgtgagcgcgaatcctgtcagtgagcgccgtcaggcacgaatgttggcggctcttcgcggagaagtgattgacggtggccagcagtctggatcaggcaatgccgccaataccggtggttccagccagcaaaaagtggcgatcaacggtatctacatgaacccggcttctactggtctgaaagtgggtgagtctcgaactctgacctacaacacggcgccagataatgccactgacaaatcaggcgtttggagcactaacaacgctgcgatcgttacggttgatcagaaaggcaagattacggctgttggtgtgggtaatgcagtagttactttcacctcaaacgatggcccgtcttccacctgccaggttgcagtgaccgcggcttaa

SEQ ID NO: 142747 - DNA, 435 bp, Enterobacter cloacae
atgaaatctgcaaaagtacgactgctcgaatcatgctttaagggttataccggcatgttgtgtggcatccagtttgaagatggcatctctgtatcagaactgccatttgtggatcagcagcgcatttgctcatctatgcgcgcagaaaccattgagggcgccaatgtgtctccttctgggatttatagcgaacgccatgggttatccgctgacagcgtaaaagagaccgctgcgccggttaatgagcgtatggagcgagtgaccactcaagcccatgtaagcacacatccgaagttctcccgcgaagagctggaagcggtagctgatagcgaaggtattgccggtttacgacagatcggaaatgagttgggcgtaaagggcaagggcatcgttgagatgatcgaaggcattgtgaaagcccagggcggtgaatga

SEQ ID NO: 142748 - DNA, 834 bp, Enterobacter cloacae
atgatggctcagctcggcacgtttaaaagcggcgaagatgtttcgctgtcattcactctcaatgtgctcgatgcggcttccgcaacgtacactctgaaggacggccgggcgaacattgttgcggaagatgtaccagtggagtttgaggctggccagatgtccgtcactgtagtcgtgccagccgagtacaaccagcttgcagaccgtgaacgggatttgcgtcgtttggtcttgacggtcaatgacggcactatcaatcacctctctgagcagctttatgttctgatggcagactttgagctggcggttccacgacattcgtttgccacaatcgccgacgcccagatgcaggcaatagacatgctgaatggggatgcgttacttgccgatggtgacagcttgatgcgcaagcgtcttattgaggccacaaatcgcatcaagacaatgcctttctcaattcgtcgtatctttggcatcgactatgacgattacgaccggcctcaaaacatgctgaacgtgaccacaatgccgtttggcgcagctgggcagtaccgcgtcgatatggtggattgggatgagctgagcgatgaagattttgccgctttcccggatgtcttcaagcgcgctgtgatgttggctgtgataaacgaagcctgtgaaattgccaacggcaatgatgtagctgccgcgcgcgaagatgggattctctctgagtcgattggcgagacgaccaatatgtaccgaaccggtaaaagcgcacctaagacggtggctagaaccacctggcgtttgctggctaagtataccaataaccggtttatcgttcgtcggtag

SEQ ID NO: 142749 - DNA, 345 bp, Enterobacter cloacae
atgcacgtagcctggcaaacggaactcgctgtttatcgaaaaggtgggatgaacatctatggcgagtcgaaataccagtttgtgagaagcaccaaagtaggcgtagtgaattttacagaaggagtcgttcagtcgtcggtacgagctgatagctctggcagtcgtggcaaagctgacgttgagacgttcaatgctgtgctaatcgtgcccctggctgctgatgtgaagctggatgatgtattggtgatgtctggcactaagttgctggtggcgagcgtagagcgtcgttgggggcttcgtgggcgccctggtcatctggaagtcggggctaacgtatgggtctga

SEQ ID NO: 142750 - DNA, 471 bp, Enterobacter cloacae
atgggtctgagttacgacgcatcaaagttacgacgccaggccaattctctcgatcagcgtcaaaaagcgtttaagcgctatttgcttcgcgatatggagaaggtggcgaaagtgatggagcgattagccagagcaatggcgccgattgaaaccggatcattggaaaaggcgatctacgcgcgcgtcatcaataacttctctgaggtgaaagtcgagctttatgtctccggcgcaacatcgcgcgaggggcatccgggcgtgacggttgggcaatatgcggattacatgcacaacgatcactaccggcttggccgattatcgagaatgaagagcgttaccaacccgccgatcgagggaatgcgagcgagggtagggcgtctctacatggaacgtgcgattgaaatgggtgaaaaacgattcagggaagctgtgacggaagcagcgagaaaagctgggttcacaagggggtga

SEQ ID NO: 142751 - DNA, 381 bp, Enterobacter cloacae
atgtttattgaagcgtttgccaaatttcttcaggacaaaaagttaggcgtgattggtaaggacacttttgcgcatcacatgccggcttcagtcaaaagcggaattttgctggtgaatcccaacaccggtattgcgattgaccgtgaactggatggtttttatcaggatgttttcactgtgatcatcagagagccaacattgtctgcagtgtcggccagagctaacaaaatcatggctgttctgccgcttattgatacagaagtgcagggcattcggtttaaatatgtaaagcctctgtctctaccgattatctacccgcaggatgatggatcactgttcgaagcgggtattcccgtcgaatttgcagcatatccggtgtaa

SEQ ID NO: 142752 - DNA, 762 bp, Enterobacter cloacae
atggctaacacccatgttaaaaatatcaaattaggcgcttgcaaagtgtctttcggtggccaggatcttggctacaccaaaggcggcgttgaagtcgaggtttccactgaaaccctaaaagtcaccgttgaccagctgggtcagaccactatttctgaactggtgcagggtcgtaacgtaaaagttaccgcgccgctggccgaaagtgttctggcaaacctggtcaatctgatgcctggctcaaccatgtcggctgacaaaaacaccctgtctatcagctccgctcagggcatcaacctcgttgacgttgctcaggaactgatcctgaccccgcaggatggcactgacttcgtgctgactctgccgaaggcggcaacggcgggtaacttcaccatggcctacaaatccgatgacgttcgcgtgttctccgttgatttcaacgcatacccggacgacgacggcattctgggaaccatgaccaacccaaagcctaatgctggtggcgcatctgtcgcagtcactggcgtagctgttaatccaaccacggcaaatattgcagtgggcggcactactcagctggccgcagtatttgcacctaccaacgccaccgataaaacaggtacgtgggtatcgagcaacactgctgtagctactgtagatagcaccggcaaggtaactggtaaggccgctggtaatacccagatcaccttcaccaccactgacggcgcgaagactgcttcggcagcaatcaccgtcgcgtaa

SEQ ID NO: 142753 - DNA, 318 bp, Enterobacter cloacae
atgaccaaattactcgatctggatgcaatctcgcctccacaaaaagcaatcaaattcggcggtaagaaatacccgatcgtcgaaatgaccgttggtctgttcgtcgctattaagcagatggaagggaaggatctctccgctctgtctatggccgaccaggtaacctcatacgcggatctggtgcagaagttactgccaaccgttacccctgaagcacttgaaaagctgtcgctgcctcaactgcagcaggtgttcaccttcgccatggaagttgttgaagaagagaacgaaaaagctgccggtgaagaagcaaagtaa

SEQ ID NO: 142754 - DNA, 330 bp, Enterobacter cloacae
atggtgacggtttccatcgatctcggattctatttcagtcgtgttgttgctcactatgccgtctcaccaagagaactactccagctgccgttggccatgttttggatgttaagtcgaaacattgatcgtctccgggctgaagaggatgtccgtagtttccaggtggcaagagtcgcccaggcagatgcggatagcggcaaggcgttcatggagggtttgcaacaccgtattggaagaccagtcgttaccgataaagtctacgatccaagttatgcgaaagcagaccccgacgccaaagagcaactgatgaaaatttttggcgcaggatga

SEQ ID NO: 142755 - DNA, 4575 bp, Enterobacter cloacae
atgtctgacaacgtagagtttattctgtcgctggacgataaaaagttcaccgcggcaatcgaccgggcgggaaaactgctggtcagttttggcgagaaggccacaaagccagcccaaaaaatcgcaacacttgagcgttctctgggttccgtcgccgggattctgggtacgctcgacaaaaagctggaatcggtcgccaatggtcttcaggacttaggtgccggtttcgagcttgtctcaaaggctatgcgagacaccagacaagagctggtggcgttcaatgccaacctcaagacctacaccacacgcattgatgcagccgacaaagctacgaagggttttcatcattccttgcagactgttcagtctgagctgagcgacttctctgattgggctaatcacgctggacgtgccgcctcatcctttggtcatgaagttaaagaggcgaatacagccacctctggcatgaacacccgtttgtccaactccagcaagcgaatggagaattgggctgcatcgtccaccaaagccgctacccagatgagaaaagttgtggcggaaatggatgcgctaatcaaccgccaaagagaattgggtaatctcagagcagatgtacgtggccctggccgcgctggttctgggggcggatctggtcatggtggcggtcgccattcgagcggcgggctgatggacggcatgaaaggcaacatcttcatgctgggtgaaattggtgatgctgcatacaccgtcaaggagatgcttttcggttggcaggagccgattgtagaagcagctgcccagatgcagaagatgcgcatcttgcttgaaggtatgaacaaagaagctgccaaccctaaattggctgctaccaatgacatgaactacatcgtggacatggctaaaacagccccgttcgcaatggaagcgctgacagacgcattcgttaaattcaaatcagctggcatcgatcccgccaatggctctctaaagtcgctggttgactctgtggcgcgttttggtggcgatagtgagctgttgaagcgagcagctgtagcaatacagcagatgtccggtaagggcgtcatttcgatggaagagctgcgtcagcaattaggtgaagccgttcctaccgcgatgcaggcaatggcggattccgctggcgttaccatggggcaactgaccaaggcaatttctaccggtactgtctcagcgaagcagggtttagagctgttattccaggggcttgatgctcaaagccgtggtgcagccgaaaatctgatgcaggcatacagtggcgcgctggctcaactacagacctcattcactctatttgccgaccgcattggtaaagcaggatacctcgactcaatcaccaatgctttcaaagagctgtccacctacatgaacagcactgatggcaaagtgtttgcacaggacttaggagaagggctttccaaagcggtggatggcctgatggatatggcgaagtgggcggagcggaacaaagagcttctgttaacacttggccaggtcgcgcttggtatggtggggttcaaggttctcaaaggaactatttcaggtgtagccacagctggcgccgagatgggcggtggtctgaaaaaggcatttgaggttgttaatggagccggtgctaaaaccattggtgcaattggcaaagtcattacctcaatcagaacgttcggcactactgcgactctgatcattggcgtaggtgaagcaatcaagatggttcgcgccgcttggctcgctttttcagctgtagttgtcgcaaatccagttggcgcagctattacagctatcgctatcgcggtaggtggcctgattgccgtcatgtcttctctgagagataaaacagcggagactgttgccgagattcgtaaaatcccggaagcaatgactgcggcgcagcgttctcaaatgactgctcgcgcaagtgaactggatcgcaaaaacgcgctggatcagcagacgctggatatggtatcgagcggcaaaatgtctggtgtcggcgttgacaccaaacttattcaagaccgtttagccagaaacaaagccgaatcaacaatgctgaaagaaaccatcggcatgggggataaagctcaatacgagaacctggcgcgagacatcgtcaccaaacgccttgaagacgtagacaatggcatcaaagcaggtatggcgaagtacagtaccaccaccctgaaagatgcgcgcaacaagcgcaccgttctctctcaagatcagaagatgtcgccgtctgagaagagtgcgcagctggaagcgattaacaacgccgaccgagatgcccatctgaagccattcttagaaggagcagacaagactcagaaaatcgttgatagccttgggcaagaagtcgttcgcatcagcaaattgctggaaaacccagccctaaatgaaagcgatcgttcccgacttcaagggcagctgaatgggcaatctcaggcattcagcactgcgcaagattctctgaaaggacttcaagagcagattaagaacatccgcgagcaatccggcaaaggcttgcagatgctggatggctcttattacaccggtgttggcggtaccaaaaagcaagatgaccgtctgaactcgctgtttgttaattcccagctcggtactggtaagcaaactcgaatgaacccagacggcacgatcatgcgtgacattgccggtgatgctgtgatgggcgatgcccagctgaaggccaacacgaagttgcgatctatctacggcgaaaccatcaagatggagcaacttaccgcagaccagcgcgagaagatctcttccatcctgaccgcagcaaagctgaaggatgagcaaaaagcccagcgcgcagctgagcgagcgggtaaatccgctgaatcagcggctaagcgtgaggagagtacgcgtcaaaaggcaattaaagccaatgagacgtggatcggaaaagcggagcagatggccggccagctggggctgtcatcgaaagcgagcgttgagttcgaccagaacattcaggaagtcactaagcacctgactgagatggctaacgcagtgccaagcgataccctttccaaggggatgatcgacaacgccaaaaccatgcttgcgttcatcaaccagaacaaggacgcctactccaagcgactgaatcaagacgctgccgagcagagcattaccaagttcgccccgatgaccaacaaggtggttaactccggctacaccccggattatcagtctgcggcggccgagtggaataagaagtttaacgaaagcctggcttacctgcagagtcagtcgaagaacgctcaagaccagggcatgaaagaggtgtacgaccgtgcaatctcacaaatgctggctggccgaaataaagcgtttattgcagaggttggcacgtcccagcagaaattggcgcaggagtacagcgatgtagcctcgcaaatggaatctgtgtggacgagctgcttcgaaaatctgactgataagctgaccgagttcgtcaaaacaggcaaattcagcatcgctgattttggcgattacatctttgacgaaatgttgaaggttagcaccaaagcactggttgttgagccgctgatgcagtcgctgggcatgggtacaaactcaggagccagttggggcgataagctgtcgggtgccaaagatgcggttatggggagcttcacaaaaacgcagcaatcaggctcgccagttgaggcaatgtcttcaccagccagcgccggaaacgattctggcagcatgtttgatgggctaaagaactccttcaagtcactgaccacatccgtatcggatctggcgtcatcaggtttgaaaagcctgaaagatggcttcaacgaattgacgggcagtaccaaaaactcgacaaccgcggtgacgcaaaatgcagtctctacccaagaggcgacatctgcaacgcgtggattcactttgtcagcaagcacggctgtaactgcgatcggtgcgacgatttcagcgctgggcgctgctacaggcaataagtggatggggtatgtaggggcggccgcgagcattatggggttggcatcatctgcgtatggcgcgatgtcctctgccggttggacaggaaactcggccagcacggtgcaggatggaaccaaaggttttcaggtcaagccaaacgctaatcagtttcaggtgacggcacacgccaagggcggggtgttcggtccagacggtgtggttcctctcaaaaagtatgccaaaggcggtatcgcttcatccccgcagctggcgttgtttggcgagggcagtcacaaagaggcgtatgtgccactcccagacgggcgttcgatcccggtgacgtttactggcggtggcgagggtgctggcggcgacagtgtggcgatttctatcactgttcagaattacggtgacggtagcagcaagtcatctgagaacacggacaacggctctcagtggaacgatatggctcgcaaagttaaggcggtcgtgcttgacacactgaccgacgaaagcagaccgggcggcatgttaagcagcacaagcaaataa

SEQ ID NO: 142756 - DNA, 333 bp, Enterobacter cloacae
atgtcacggacgacatttacctggttcccgttgtttgattccgagaaggaggtgaagccggaagtaacccggctcgccttcaacgaagggtatgagcaacgtgtaaccagtggtttgaactggcgcaaatccagctgggatctgcaattccagggaacacgagctgagatgcaggagatcgacgacttcctgtatgcgcgcggcggggtggaatcatttaattggacttccccaaatgggcagaaggttgtcgtggtgagcgatagccacaaggtcaaaagctcacgagggtacgcgaccttgaccacaacgttccgccaggtgtttgagtaa

SEQ ID NO: 142757 - DNA, 699 bp, Enterobacter cloacae
atggaaactattgcatcgagcattcagtcactgcaaccgagtgcgctgattgaagtgtttgagttggatatgtcagtaaccaccagcggtgggaagctgtactttcacgcaggcactaacgaactctctgagccaatcatttggcagggggtaacctataacccatggccaattgcggcatcgggcttcgataaaaatggtcagggtaagttgccacggccaaaactgcaggtgagtaacctcgatggcattatttcggctgaagtgcagtcgaatgaggatttgatcggctgtaagctgattcgtcgagtcacgctcgctcgatttttagatgctgccaactttactgagggcaacccaacagctgatgcgaaccagcattttgccgatgagatgtggtacatcgaccagaagacttttgaggatcgcgagattgttgagtttgagcttgcctcagccttcgatctgatgggggttatgctacccaaccgccagattgtcaaaaactcatgccaatggcggtatcgaagcgctgagtgcggttataccggtccctactttgacaaaaatgatgcgccaaccaaactggccagcgccgactattgcaccaagcgattgtcatcgtgccgtgctcggattaattactttgccaacggcatcattgcgtttggcgggttccccggagcaaaccgcgcatga

SEQ ID NO: 142758 - DNA, 777 bp, Enterobacter cloacae
atgatgaagaatgaaatgatgaatgaaaagttgcttggcgctatgcgccttgccgctttgcaggaatatccgaatgaggcttgcggcctgcttgttaatacaagagcgaacaaatatgagttaattctttgccgaaacgtcgctgatgatcctgaaaactattttgtcatgcacgccgaagaccaagttgcagctgagagagctggcgaggtagtgggtgtttggcattcgcatactgacgaggataatcaggcatctgaggcagatatgtctggttgtgaagcatcagagttgccgtggtttattatcaacatcagcaaaaactacaatcctgaaattgatgcagagtatcgttttagtgatgtaaatgtgatcaagccatctggatttgaaatgccttatgagggaagaccctacgcatttggggtatttgattgctggttgctgtgccgagattatttaaagcgtgagaaaaatgtggctattggcgtctgccctgagttgcatatcccatcgtggtgggaaaagggagttgatattttaaacgacaacttccagtcgcaggatcttataagattgccaccgggaaccccacgtcaaaatggcgacattttcttcatgcagttagcatcgcaagttcctgatcactgtgcagtttacattggcgatggtatgatattgcatcatcaaatggatagattaagctgtaaagcaatttatggcgggatgtacgaaaagcacactacgcaccatttgagacacaaggatttaatgtga

SEQ ID NO: 142759 - DNA, 630 bp, Enterobacter cloacae
atgagtgaaatggctatggataagcctgaacttgtcactgtcgaattaggtggagttttaggtaaaaattttggcaaggttcatcgcgttgcggcaaatactgtccggcgcgcagtaagtattattgactgtaatcgccctggtctcgtaacctggatgaagatgaatgctaagaaatatcagaagtatcatatttccgtcgagcgtcatgatggtgcagtctacgatatgagtgaagccgagttccaaatggaaaataacggcagtatgaaatcgatcagaatcacaccaatttatcgtggctctggatcaaaggttgtcggtgcggttcaggttgttgttggtgttattttgatggttgtggcagtgtttgcatcttcagtaaccggtggtgcttctttggcaatgttttctgctggttttgctatggccttcggtggtgtcgcagcgctcttgtccaagcagccatcaaataaaatgacgacggttgataacaaagactcgtactactttgatgggccgcaaaatacagtatctcaaggcaaccccgtaccgctcatttacggcaaagagattttagtcggctcccagattgtcagcgtcaagatgtctgttgagcagatgctttag

SEQ ID NO: 142760 - DNA, 4587 bp, Enterobacter cloacae
gtggcaactgttaaagaaagacgcctgctcgccggttcaggcggtggcagcaagggcggcggttccgcgcgcacgcctgtagaagacaaagataatgttcagtcgcgatcactcgcctcaatccttgaccttcttggtgagggaaagattggtggattgatcaatggcggccagtcaattttcctcgacaatgtcccaattctaaacccggacggcaccagtaacttcaatggggttacctggtggtttcgtgatggaacccagaatcaggcagtgatcgagggctttgatgcggttgaaacaccgcatgatgttggcgtccaaatcaagctgtctacccctcgtaccattcagatcgacaacgatgactctgaccaggtgcgtgtcattatgatgttcccgaaactgaccaaaacggatcagaagtcgggcgacacccacggtacgaccgttcaattccagtttgagatcgcatacggcactacctcgtttaagccaattaaaccgcaaggttattcctcacatgtcgttacgctgagcaaaaagtctagcggcaaacactatcgtgaatatctttttgatctgcccaagccaggctctaactatcgcatacgcgtaagccgcgtgaccgctgatagcaccactgattatatccaggatcagacctggctcagtcagtacggcgaaatcgtcagcacaaaacttaactacccgaacagtgcgcttgttggtcttaaaatcgactcgcagcaatttggtagttctgtgccggcgcgttcctacctggtctcgggtatggaaatccgcgttccgtccaactatgacccggtgcttggtacgtattcgggagattgggatggaaccttccgtttaatggtatctgaaaaccctgcctggattttgtacgacctgctcaccagtaagcgctatggcttgggagagtatgtcactgaatcaatgatcaacatcggccagctttaccagattggtcgctattgcgatgagctgatcaatgatggattcgggggcaaagagaaacgcttcgcaattaataccgtcattaactcccgcggtgaggcttacaaggtacttcaggacatcgtatcgactttccggggaatgattttctgggctggtggcatggttaacgtcatgcaggatagccctagcagcccggtcatgcagttcagtgccgcgaacattattggcaaagtatcctacaagggctcatctcggaaagaccgcgcgactgttgctctcatcacttacaacgacaaggatgacctatacaaacagaacatcgagtacgttgaagatgaagaaggcattaagcgttttggtgtacgtaaaactgaatcagtagctttcggctgtacaagccgtggccaggctcaccgtgtggggctttggacgctttacagcaaccgcatggaaacagatctgatcaccttcacctctggtatggacgcatcgttactcatgcctggcgagctggtgaaactgcaagataagttccgatcagggaaacgaaattccgggcgtctggttaactacaccaaaaacagcatcacactcgacgcttctgtaaaactgactaaagccgggaacacagtctctttcctgagtgctaaaggcaagatgattgatcgcgaccttattgaaggcgctggcgaatacactgttgtcaccttcaagaaggcattaactgaagaagaatacccggcgattatggggatctggtcagtcattgagcctaatctggagccaatgctgctgcgtgtgctggccgttaaccagaatgaagagaagggcgcctttgacatcgttggtgttcagcacaacccaacgaagtttgccgcgatcgacgaaggggcgactctcgttccgtcgaagacgaccattctcgatccaactttctcaactcctgaaaacctgcaggtgaccgaaggcacatatgtttcttctccaggcaacctttcggtaaaactgatggtgagttgggagggcaagtcaccttcgtatgtgctgcgctaccgtcgttccgatgttgttgaagattgggttacaacagaagttaaaactgagcagttcgatattttaaacgctgctgagaatggcatgtatgacatcgagctgtactcgatttcagccactggaagacgttccagcgtcatttccatggtgtacaccactcttggaacgatgacgccaccagacgcgcccacgcttctcacagcgatcggggattatcgcgtcaacgttctggcatggcagttgcctggcacaatcgacatcgacaaaattaacgtttatgcctctcgcaccaacgatctcaccaccgcgtctcttattgcggcggttgcctcaacgacatttacccatagcgggctgggcgatgacgaaacttggttttattgggtgcgcgcagtaaacaagcgcggaatgctgagccagccaaattcctccctcggcaccgaggctaccaccaaagatgttctgtcgttcctgaagaacaaaatcacctcttctgagcttgggcaggatcttctggctgacatcaaccaatcagcggcaaaagaagctgttgaagaggtcagtaaaaagatcgacgaaagcgtgggtgagctgcataaaacggtcgatgaaattgagctgtctgtcacaggtgttaagcagtcagtgatcgacatgcaaaattcgttcgacggcatggagaaagagcagagtgatctgaaggcaaacgttcaggacacggcagataaagttagccaggcgctcggtgaagtagatgatgtcaccgccaatgttttggctcttcaggagaccgtcaagaagcagggcgagtccgttgccagcactctcgatgcggcacaggcagctttggacggtagtaaagcgcttatcgccgaagagagacaggctcgtgttgatggtgatacagcgatcggcaaaaaagttgacaccatgcagtcagtggtggacagcggccaggcaaacattgatgaaatgaaacagacggtggccggtgtcgagcaaacagcatcacaatggtcaacgagtttggaggcaaatgctaaagcgaatatcgatctggcacttcgtcaggaagaagacaaaaagcagcaggcgtcaactaacgcatcggtgaccactagccagcaggctttggcagactctgtttcatcggtggccaagcgtgtcgatgagatgaaagctgaaatcggtgatgacatcgccgcacagctgcaggaagaaagggaaactcgcgccagcgctgatgaggcggtcactactcaaattatccagctgaaggcgcaggttaacgatgatgttaaagcatcgttggcaaccgagcagcaggctcgtgctgacgctgatagcgctttgtcgaagcaggtcacaaatctgcagtcgcaggttaatactgacgttaaagcgcagatcgcagcggaggccaagacgcgcgcggataaagacagtgccttatcaagtcaaattaccgcacttagcgcgcaagttaatgacgatgtgaccgcccagatcgcaactgagtccaaggcacgagctgatggtgacaccgcaatcagtaccaaagttgatacgctggcaaccaagactaccagcgacatcaaagcagcggtagccacggagactaaagccagaacagacggcgataccgcattgggcagtcagattacgtcattgaaaacccagacggcttccgacatcaaagctgcggtggccactgagaccaaagctagaactgacggtgattcagcactcagcagccaaattagctctcttgagacgcaaacggcagcaaatattaaagccgctgtagctactgagacaaaagcccgtaccgatggcgatactgcgttgggaagccagatttcgtccctaaaaacgcagactgcggctgacattaaggcggctgttgccacagaaacgaaggctcgctctgatgccgattcggctatggccagtgacatctccgcgcttaaaaccagagccggcaagattgagtcgtcagtgacctctgagcaaacagcgcgcgctaatgcagatacagcattgggcaagcgagtggatacggttagtgccaaagctgattcggcatcatctaccgtccagcaaacttctcaagctgtggccgatgtgaacgctaaagtttctgcttcttggacgttgaagatggaaacctccacctcaaacggccagaagtatgctgctggcatggcgctggggatcgacggatcagggctatcacagttcctgatccgtgctgaccgattcgggttggttaactccgtcgatggcaaggtgaccacgccatttgtagtggaaaacagtgttgcctacatgaatggcgcctacatcaaagatggcacaatcgtgaatgccaaaattggtgatttgcagtccaccaactacgtttcgggaagaacgggttggcgtattgcaaaaggaggtgccttcgagatgaatggcaacagcggaagcaccggacgcatggtgatcaataataaccgaatcgaggtttatgacgagaatgggcgtcttcgagtacgaatggggttgatataa

SEQ ID NO: 142761 - DNA, 3678 bp, Enterobacter cloacae
atgtggtacagggaaggtactaaaaccttgatcaatggttctaacatcgttaccggtgtcggcaccagttggtctaaggctgaaaatggcgttctgccgggcatgatcttgcttggtgaaaaaggcgagccatacgaaattaagtcggttgagtcagatacatcgcttaccctcgtagaaccttacgatggcaaaaacgtgaacgacacgccatgccgcatcatcaccacctatcagggtgacatcagtcaattttcagcgcgctttgcggctcagttgcaacgcatgaatattgattcaggtgttattcgctcttggcttacttcggggcaggatgcccagctgttggctgaggatggaactctgatcacgctgaaggctttgcgtcagatcatatctgagcacgaaggggcaatggcttggttttccgcaaacaaggattcgatcctgaaggccgccgctaacgcagcagcagctgcttcaagtgcgtcagcagcattggcatcccagaaggcagcaaagacttcagagacaaactcagcgggatcagtaagtgcggctgcatcctccaaaacggcagcggcggcttccgcaaccaaagcggcagcgtcagagaaaaacgctaaggcatctgaagttaacgccaagacatccgaaactgccgcaagtggttcggcaatcgctgcagccacctcagaaactagcgcaaaagcctcccaagactctgcaacttcctctgctgggaaggctgcaacttcagagaagaacgcggcagcatccgccaccagcgcagccagctcaaaaggttcggcagcaacgtcggcaacgagtgccgccacctccgcaactaactctaaaacatccgagagcaacgcgaagaagtccgaagcaaacgcgaaggcttctgaaaatgaagcagctggttctaaatccgctgcggcggcttcagaggctaacgccagtacctcggaaataaatgctgcatcgagcgcgactgcggcaaaagcatctgagaccagcgctgccagctcaaaatcggccgcggccacctctgctaccaacgctaaatcttcagaaacaaacgcagccagctctaaaacagctgcggccacctctgcatcgaatgcggccacctcggaatcgaatgcctcaacctccgaagctaacgcaaagaaatcagagacaaatgctaaagcgtctgagaatgccgcagcgagttcaaactctaatgcaggcaaatcagcgtcagctgctaaaacctctgaaaacaatgctgccgccagtgcctcatctgctgcggcatcggccaagagcctcgatgccgataacctatggactaaatcagctttaacaaaagcagtattggtcggcttagggttggctccaaatgacgccccatccttcactggcggtgttgccgttgccggcactattaagaatagcggagaagtgcaaactacagccgctaactcataccgtatggttggcagtaactacggcttattccagcgcattgatggtgctaactggtacatgatgctgaccgacctgaaagacaattatggaacctataacgccttccgcccaatttctatagcgcttacaagcggcagagtgactatggcaaatggtttgagtgtagcgggtgatgtaaggctcacttcaggcctatctgtgacgggagcacttagcgcctcaaaaggggccatcgtgaacgcgccgggagctggcgcggtggctgactcgactggtgcggcgctatttgtgaatggctctgcaaatgatggctctcaaggtgtcacgatcaacagctatgcgcccacgctgtccttgattgatcgtagcgcgtcaagcgctggtttccgctggcgtggtgacggcaactgtttgcgcttagatgtcgataatcgtgacaatggcgcaacatggaatagcgatatagttcagattgacgagcagggtcgattgagcattggtggtgtagtaacagctgattatgctgagtcatttacctatcgggatcagtggaaaaccaaagcccctttctttaacgagttttcttcgagtggggcaagcgagtatcacccactggtgaagcagaaagtgaccgttggagataatagctatgtagcttctctcggctggctggttaattcaatggtgtttgagttgggcattactgaccaagcaggtaacactaaaaacttcacattcagacctaatggtgagttctcaacacctgccagagtgttgccaggcgattattccaacttcgacacccgctatttgggcattagcgcgaatgcggccagcgccagcaaattggtcacgtctcgtaagattgcaggcaaggcttttgatggcacatctgacattgcgatcagcgctggtgacgtgaaggcgttgcctaatactggaggcactgtaaccggccaagtgaccgttgcagcaaatggcgccgctcttgtactgagacgcttggcggcttctcaggcggtttacctcatggggcgtgacgaaaaaaacgctgcacgttggtacatcggcaatggcggcacggatgatggtgttacgattcacaactacatccataacactaccatgcagcttaacgccagtgagctgtacaccaacagaaacattcgtgctgccggcacaattacgttaaatggcagtggtgagtcgaatgcagtagttggctcaggctcaaccgatgtttttctgtcaaactcaaaatcgggtaagtatcttcagctaaaagacactggcgaactgatgtactcgaatcagaagatttatcacgctggcgacaaacctactgctactgaaattggcgctttacctgggactggcggcacggtaagcggagccatatcttctacagagtcaaatgcctttcgtattaaatatggaaacatcggatctttcatgcgaagcgatgggggtaacacttacttcctcttaactaattcaggtgatccagacggaagttggaacgggttacgcccgatttactggaacaataccaccggcaacgtatcgatgggtcatatcgttactgtaggcggcacattgaatgcaaacagtggtgtggtttcaggcagtaatgtgtacgtccctactgctagtggttcatggatcagtatgcgaaccggcacagctttgcaaggtaatggcgctttaaataccagctctgccgcagcaatcgtccgtcaggagcacgccgatcgccattacgttttgggtggcttgggcaactcacagttcggcatctacatgatcaacaaatcgcgtactgacaatggtactgatgcgtatgcgtatctgggtagtgatggcacttggacgtgcagcggcaatggtaactttaacgatgtgtatatccgttctgaccgtcgcaacaagcgcaacatcaagaagattgatagcgcactggacaagctggagaaaatcgacggtgtgctttacgaaattcagaacatggacggatatgatcaatcagctggtctcgttgctcagcaggtgcaggaagttcagccagagttggtgacatcagacatcgatcatgccactcaggaagagcgccttcgcctgaactacaacggtgtcatcggcatgttggttgaggcagtgaaggagctgcgcgcagaggtcaaagaacttaaggaggctatgtaa

SEQ ID NO: 142762 - DNA, 363 bp, Enterobacter cloacae
atgacaattgcttctgggtggattggctcaagtgcagttggggaaaccgctcagcgttggatgtcggccgcagggccgacaatcaatgtcggcgtacccttctggatgagtgctcttgctggcaaaagcaaagggctaaaagttgcggtggccagaacacaaattgggattttgcctcctggtgtgaggggacctcagccgtacccgattctagcttttgggtacttgcaaggtaagggagggtctgttgttgggaactatagtggcagagaggtgacggcgttctatttcgagaacgccaacaattacgtaaggttcattgtctctggcggcatgtcaggctcagtcagtttggtggtttga

SEQ ID NO: 142763 - DNA, 249 bp, Enterobacter cloacae
atgaaaaaagtattagctctggttgttgccgctgctatgggtctttcttccgctgcattcgcggctgaaactaccgccaccgcagcgcctgcggcatccaccgctgctccggccaaaacggttcaccataaaaaacatcacaaagcggctaaaccagcggcagaacagaaagcccaggccgcgaaaaagcatcacaaaaaagcggcaaaacacgaagcggctaaacctgctgcacagccagcagcgtaa

SEQ ID NO: 142764 - DNA, 243 bp, Enterobacter cloacae
atgtttgttgaactggtttatgacaagcgcaattttgaaggcctgccaggtgcaaaaagcatcattctggatgagttaacaaagaggattggccgcgttttcccggatgcagaagttcgcgttaaaccaatgatgacactgccagcaatcaacactgatgcgagcaagcatgagaaggaacagataagcagggttgtgcaggagatgtttgaagaggccgaaatgtggctggtatctgaatga

SEQ ID NO: 142765 - DNA, 672 bp, Enterobacter cloacae
atggcgcagtacggcgttttacttacaactacgagtggcgaggtatgggtaaccgctaacagctcgccaattgcattgcaggctcgtaagacagcggtattacagggaacatctggttataacataaaagttacgcacacattccctgcaggtcagcctgttgtcgccttcgttcattgcacggttgaggtcgaaatcacccagacgataagcgggaacaccatcacgattgattttctcagaccgaacgcaaccggcacagcgtacgtttattttttctctattttcccacagacaaaaccagactacgggctggctgtgtgggatgcatcagggacgctgattttaacaaacgaaacgcgcacgttgagtgatgtagtcactctcggtaccgccggggtggatgccagctcaggatacaacatcaatacaactctggctgggaagtgggcctgtatacctgccatgctggggctaattaccggggttatatcggctggcggtcagccgcagccttactcggccatttacaagagcatggcaaaacttgatggaagcaataccagaatatttgccagaccgcaaaccacaccgagcggaagcctacagaatgttgcttattcaaatttaagaaacgtgattatggccatcaactgtgcaagttatgattga

SEQ ID NO: 142766 - DNA, 471 bp, Enterobacter cloacae
gtgaacaagttactgatcatattgcttgcctgtgtttttttatcaggatgcgataagaaaagtgatgatgtgttattaactgaggcgaaatcatcggtaaaaagaactcttgcaaaagattataagcaaggtgaatgccgaagatggcagagtatgagcagtaataaaatagcgcctaaggcaagaatgattgctgtctgtgattccaacttcaacataaacaatggagttacattttcagaaatgaaggtttaccgacacaaaagaggtagcgctgtatgtggcatggtttctgggaaaactgatataagtaagataggggcgaaatttgtgtatgtcgatagcaatgaatcaccttttattaaaatgtctaagtacccagtgcaattgtctggaagtgaaacttcaagaaaaattgtcgaacaactagttggcgtgtttaacgattcttacgagtcttggtgtaattaa

SEQ ID NO: 142767 - DNA, 495 bp, Enterobacter cloacae
atgggaaaccaaaaagaacagacagtaactatcaaaatcgaactgaacgctaccgacgtacagaaaaaattggaagaaatcgatgatagtttgcgcaattatgacgggttcaaaattgaccgcggcggtcgagtattcatcaatgatgcattcattagtggtgtagttcacgctgtgaaccctgaggatgatcagtcggtgaccaatatctactacatcagccttggtgttcgaaaaaataagccagtccagaatatggtaacgttcaccgctgataggttcgaatgcaaaattcactcaggtgttgatgataatattgaagcgctgatagaaaatgctgtgaaaaatcaggtgcaaagtgccgtgctggatatcaaaaaacagatagcagcagaccggatgacaatggaagacctgacatctcatatcaaaaacgtcatgctgcttgaatgcttccctaatggcattttacatcgaaacttcgggcgtcggtaa

SEQ ID NO: 142768 - DNA, 456 bp, Enterobacter cloacae
atggcagcattatcgacagaggttaaagccttcatcgttcaatcgctcgcctgctacgagccgccagtaaaagtcattgagcttgtaaaggctgaatatggcattgatgtctcacggcagcaggtgtcgcaatatacgccaggcaacgcaatggcggccaagttgagccagaagtggattgaccttttcaacgccacccgtaaacgattccagaatgagatcgccgacatcccgatcgcaaataaagcgtaccggttgcgcgtactcgaccgaatggcgaccaacgctgaaaagatgaagaactacggcatgacctcgcagcttatcgagcaggccgccaaagaaatgggcgatgcctacacaaatcgccagaaagtcgagcatacaagccctgatggcagcatgacgccgcagccgacaatcatccagctactacccgttgagccgaaagcatga

SEQ ID NO: 142769 - DNA, 144 bp, Enterobacter cloacae
atgattggcaccctaacctataaaatgacacttcgcccatacatgaagccgatcctgattctgtcagctttactccactgggactggctgactaacaagtgcttcaaaatcgaaaccgtaaccagcgatacggtgcagctttaa

SEQ ID NO: 142770 - DNA, 462 bp, Enterobacter cloacae
atgagtcgaattgttggagttacctgtgcggtaatcatcgtggtaatcagcgctatgggttgggctatcaaccactaccgcgacaacgccatcacctacaaagaccagcgcgacaaagccaccaagaacctccgtctggctaacgacaccatcaaagacatgcagacacgccagcgagatgtggctgcgctggatgcgaaatacaccggagaactggctgatgcgaaagaaaccattgagcgtctgcatagcgatgtcattgctggccgtaagcggctgcagctcaacgcaaactgttccgcgagcggagcgaccggcaccggcggcatgggcgatgcttccggcccccgacttactgactccgctgaacgggattatttcaccatcagagagcgaatcgtcacagtgacgaagcaggtcggctatctgcaggactacatcaaagagcagtgcctcaaataa

SEQ ID NO: 142771 - DNA, 285 bp, Enterobacter cloacae
atgcgtagcacctaccgtaataaaaaatggctagccgcagtcggccagattgagcaatgcgtcctatgcggagcgtggggcgtacaggtggcgcaccgcaatgaaggtaagggaattggcatgaagactgacgactgcgccaccgccgctatctgtgtcacctgccattctgagattgataacgggaaggggctgagccgcgacgaacgccgccagttaatggatcgagccattgtcttgaccgttatccagatcgcccgtcgtggcctggtggtgcccgcatga

SEQ ID NO: 142772 - DNA, 870 bp, Enterobacter cloacae
atgagcaacatcgacaaacatgccgtccaaacagttgccgatttgaaagctggttacaccctcggtcacgctgatgtggcaatcctgaacgagctggcgcgtatcgcgctggcatcgctcgaagcggagcctgccattcatcgctggcgcagggtgacctttgagccatacggcccttatccttggcattacggtaattttatcggcttctcaaaaccagttgatgggattgaggacgagtattattacgccgccccgccagcaccggtatctgtgcccgctgcgatggaaatggatgatgactttgacagcgcgtttgaacacggaaaagctgttggctggaacgcctatcgcgccgccatgcttcagggtgccgatcgaccacaaaacgaaccgcaaaatattccggaaaatattccagccacacagtttaagccggtagcagacctgtacggcttaacctcaccaactggtggcgaaacatcattcactttcgacgctgttgaagctcgcgatttcattgatggcggttggttatgtcaggagtacgtggagcttggacgctttcaagaagccatgcttcagaatggtaactctccagcgcaatccgattgctgtccggagcaaaactacattgctccggcgcaagacggcgactctccggtgattccggatggttggattccagtaagcgagcggatgccaggctcacaagagtgggtaatcgtgttcgctaaatgggataatcagcaggtcttgtgctgggatgatgtggcaaatcgctggacagattttgaagaccaatcctactacgccgatatgttcacccactggatgccgctgccagcagcaccgcagcaggaggcatga

SEQ ID NO: 142773 - DNA, 213 bp, Enterobacter cloacae
atgagcaagccaaccgacgaagaaatcattcaggcactgacagcgcacggtcgatgcatgacctacgttgttaccaacattctccgccgaaaatactggcctctggataccgcatacatattgcgccgcctgaagaagttagaggcagcgggaaaagttagacgcgttagaagtagctacgcagtccaaatctgctgggaggccacccaatga

SEQ ID NO: 142774 - DNA, 714 bp, Enterobacter cloacae
atggaagaattaaagaaagcattaaaaggtaatttcccattagtagctattttgacatcggtagggtatttggtatcttatttttatcagttgtcgatagctaactactatggatacccagaggagtatatagcgttcgatctcgatgttttattgcgaacttttgcttatttctttgctcttgcgcttattatctttgcacctatgctgctatacccttcatctatgagtaaagggtggttggtattaatatttgggattattttaatatcattgtatctaagggttttttctgccgttaaccccttttctttcttcaatgataaaaaagcaatcggcatgagtaccatatttggttacgcaacagtacccatattgtctttttatattattctttcctacttcgatgatattaagcatcccaagtctggtgtttttgtattggttgtttctgcttttcttcttaatacaggacctaaccttataggttccttttcgtcgtacgctaaatcacagtactttcaattaaaacaagatgaaaaatacgtgttattaagctcaaatggcgggcgtatgatctttggttcttgcgattcctctggcgttagttttttacttaaagacgtttcgtcagtaggtgagttgacttctattaaatcaaaagaacagttaaataaaattcgtgattgttttttcaatcgcgatttcaaataa

SEQ ID NO: 142775 - DNA, 525 bp, Enterobacter cloacae
atggaattaacaatcccaatttcaacgatattaaccgcagcattaggttttttaggtgtgtacataattatgcctatagctttgattgttagagatcaattaataataatttatatagaaaaatgtattcttacgcctaaattttgggctttcatacatgagctaactatagaaaaggcgtattataatgtgatatatactaaaaaatatgaagttagggcgcctgaaggttttgagcatattgaggagaaaagaacttattttattgacgatgtagaagttagtttgaaaactttcagcgattttttaagtaaccaaaagaattatgttgataaaattgccaaaaaagaacctaaggcattagctaaaactaatttaatgaaatggataagtaagcatttcaaaatggaagctaaatttgtagatgttgtagatgactatgtcaaacatgtttatgatttgaccgtttccgatattaaaaacaaaaagaaagatgttatttattcagacgtaaatccaaactaa

SEQ ID NO: 142776 - DNA, 915 bp, Enterobacter cloacae
gtgtggggcgcagcatttcgccagaataacctgctgggtcagatgttccgccctgcgaagcagtttgagccggtagacgggtacaatccgtatgttgataaaaacgagctgcacggttatgaacaatggggatccacttttgccgactcccgctcgccggaagaaactgcctggctgaaacagcagatcgacgacgaaaacgaggaccgtcgggtactttccgaggctggcggggagggggttctcgccagcattgccgccggggttgtagacccggttacagtggcttcgatgtttatccccggcgctcaggggggcgctgtggcccgtattgcgtcacaggctgcaatcggtgcagctgcaacagcagcgagcgaggttgcgctgaataaccagcagattacccgtacgtggggggaaagcgcttcccacgtcgccgccggtgcgttgatgagcggtgtatttgcggctgccggtgctgcgctttcgccctctgttcgcacagcggccacgcgtgaagtggctgacgcgctcgataatatgagtatcacgtcagcgacggacacggctgccgcctcactcccggaagggggcagcgtcggcgcggcgcgaatcagtgaagccacgctcgaggatctcaccccggcagctggcggaccggtcggtaaactggcacgtaaggcagggagctatctgacaccgtttacccggctgatggagtctccgtcgaaaacctcccgccgtacggcgctggagctggcagagaataactacacactgcagggcaatgcccgcggaattgagacacctattgcggcggaaacccgtgttcgcgggtggcgtcgtgaagaagccgctgtcgtggtgaccaacaagcaggcctacagccagtataaagccgccggggcgacctga

SEQ ID NO: 142777 - DNA, 2085 bp, Enterobacter cloacae; identical to SEQ ID NO: 105639

SEQ ID NO: 142778 - DNA, 315 bp, Enterobacter cloacae
  misc_feature (238)..(247): n is a, c, g, or t
atgagtaattcaaatcttataagttctatagagctaacacgtaaaaatttacgtgctcagattgaaggtttgcgtgttgaggctgaagatctcattacaaaatactggatcaagtggaaggaacgaaaccaccaagagattaaccttacccgacatagcaaagttccaaagagggagtacctgggttcttacgcaccaaaagttgagctaattggtaatgccagaaaagtaacgatcnnnnnnnnnnttggcatcagttcagcccttataaaacaagagcgcctagccacatgtcaaaacgggtgcaaccaatga

SEQ ID NO: 142779 - DNA, 435 bp, Enterobacter cloacae; identical to SEQ ID NO: 32303

SEQ ID NO: 142780 - DNA, 2406 bp, Enterobacter cloacae
atgagcgaatgcgcttcaaaggggtgtggctgcacgactgagccgatcatccaacccacggcaccggccccgctggcaaccggatcggctcaagcggtgtaccgcatcgagaacatggattgcccgaccgaagaggcgctgatccgaagcaaactggccggtctggcgggggtggcgggtcttgaattcaacctgatgcaacgtaccttgaccgtgcgacacgaattgccttcgttgtctcccgtcgagcaggcgctgaaggccatcggcatgcaagctgtgcgcatggatcaggcgtcggccgagcagacgaccaagctgtccattgccaagatggattgcccgaccgaagagacgttgatccgcaacaagctcggcaccgtggccggtgttgctgatctcgatttcaacctgatgcagcgcacgctgtcggtacgccatgcgaaccaggttctgccagacgtgctcgtggcactgcaagcgcttggattcgaggcgcaggtcgtggacacggcagaggtcgcatctccatccgccgcccctgtgaccacgccgaccaactggtggccgctgggcatctccttggtcactgcatcggcggccgaggcggtctactggctccacaacggcaatcactggtcggttgtcgttctggcgcttgtcgcggtcttcacgggtggcctctccacctacaagaaggggtggatcgcgctcaagaaccgtaatctcaacatgaacgccctcatgtcgattgcggtcacgggtgccatgttgatcggccactggcccgaagcggcaatggtgatggtactgttcgcgctggccgaggtaatcgaagccaaatcgctggatcgcgctcgtaacgctatccgtggcctgctcgacctgaccccggaacaggccacggtacagcaggctgacggcacatggcgcgaggtgggcgccaagcaaatcaccatcggcgcccgcgtccgggtcaaaccaggtgagcgcatcgcccttgatggtgaggtgctggaaggccgctctgccgtcaaccaagccccgatcacgggtgaaagcctcccggtcgaaaaatcccccggtgattcggtgttcgctggcacgatcaacgaatccggctcgttcgagtaccgcgtcaccgccttggccaacaactccactttggcccggatcattcacgcggtagaggctgcgcaaggtagtcgtgcgccgactcagcgttttgtcgatcagttcgcccgctggtacacccccgttgtattcggcgttgccatcgccgtcgcgttgttgccgccgctgttcatgggtgcggcatggctcgactggatctaccgtgcattggttctgctggtggtcgcctgcccgtgcgcactggtgatctctacaccggtcagcatcgtcagcggcctggccgccgccgcccgccacggcattctcatcaaaggtggcgtctatctggaagaaggccgcaagctgcgctggctggctctggacaagaccggcacgatcacgcacggcaagcccgcacagaccgactttgtcacatggggcaatgcactcgcctcggacagccgcagcatcgctgccagtctggcggcccgctcggaccatcctgtatccaaggcggtggcacaggccgcgcagacggacggggttgccttgctcgacgtggccgaattcaacgcgctgcccggtcggggtgtgcaaggccaaatcaacggtgcgacctaccatctgggcaaccaccggatgctcgaagagctggggcagtgcacaccagagctggagcagcgcatcgctgcgctggaaaccgctggcaagaccgtcgtgatgctggtgggcgcaaaaggggtacatggcttattcgccgttgcggacaccatcaaggacagcagcaagagagccatcgccgagctgcatgctctgggcatcaacaccgtgatgttgaccggcgataacccccacacggcacaggccatcgccgcacaagccggcattgaccgcgcgcaaggcaaccaactgcccgacgacaaactgcgcgaagtggagcaattgtccagaaacggcaaggttggcatggtcggtgatggcatcaacgacgcaccggccttggcgcgtgcggacattggctttgcaatgggagcggcgggcacagataccgctattgaaaccgccgacgtggccctgatggacgatgacctgcgcaagattccgaccttcgtgcgcctgtcgcgtgcgacagcacaggtgctgatgcaaaacattgtgctggcccttggcatcaaggcggtatttttggtgctcaccttcacgggtcacgcgaccatgtggatggctgtgttcgccgatatgggtgccagcttgcttgttgtcggcaacggcttgaggttgttgcgccgatga

SEQ ID NO: 142781 - DNA, 1077 bp, Enterobacter cloacae; identical to SEQ ID NO: 32301

SEQ ID NO: 142782 - DNA, 360 bp, Enterobacter cloacae; identical to SEQ ID NO: 105552

SEQ ID NO: 142783 - DNA, 1161 bp, Enterobacter cloacae
atgagtaggtggagaaatttttgtataactgaattagcagatttttgcaacgcacaaagaattcctttgagtgctatggaacgagcccataagaaaggaaattttccatattatggagcgtcaggaattgtcgattatatcgacaattatatttttgatggcagctacatccttatttctgaagatggagaaaacttaaagtccagaaaaacacctatagcatttgaagctactggaaaattttgggttaataatcacgctcatgtccttaaagctaaaaagccccatttaacggcattgataatccaatatttttcacaacttgaactatctccttatttaacaggtgctgctcaaccaaaattaaataaagcatcgctaaatttgattcctctttacttaccaattgatgaatctgaacaaaaagccatcgcctctattttgtcctctcttaaagacaaaatagacctgcttcattgccagaataaaactctggaatctatggctgaaaccctgttcaggcagtggtttattgaagaagcacaagatgaatggcctgaaaaaagcctcaatcaatatgttgagctaaataaatcatcaataagtaaaaagtatgatttcaaagagattcaatacttggatacaggttccttaaccaatgggaaaatatctgaacttcaaaaaatattattatctgacgcacccagtcgagctaaaagattagtgaataattttgatataatcatatcaacagtacgcccagatcaatgtcattatggtatttgtattgaccccccctcaaacctcgttgtttcgacgggattttgcgtcattactagcaaatcacttagcccgttcttcatttattatttaataacttccgaagatatgactgaataccttcactctattgcagaaggttctacgtcaacctacccttctttaaaaccagaggatattggcaatattccattcctttacccaagtgaagaaaaattaaaaaactttcatgatcttgttggctcttactggaacaagattcataacaaccacaaaaaaatacagaccctagaaactctccgcgacaccctgcttcccaaactgatgagtggtgaagtacgagttcagtatgcagaagaaaaacttgaatctgtagcataa

SEQ ID NO: 142784 - DNA, 222 bp, Enterobacter cloacae
atgggcagaactacttatgaatccttaccgttcaaagcatctgctaataggcagtttatagtggtaagttctggacttatgcagcccgaaaacgccaatgtaattatcctaagaccagaaaacctctacacctttttaaggagtacggggcgcaatattagtttaattgggggtatgtccttgttgacagaggaaaacctggtaatgctgtcaacctgttga

SEQ ID NO: 142785 - DNA, 513 bp, Enterobacter cloacae
atggcttctttcgcaattacattcggcattgctgaacgtggcatattacaaggtataggacagaacgttaccttgattgctagagatgagatcctgcacgctaaaggcggctcagtagtgttgggtatcttaaaacagcagtggccagaaacatttgaatctttgcgtcccacttttgcagcgatgttaaagggtgtagtaagcgacgagcatacttgggcagaccacgcgtttagcaatggtcgtcagtgtgtgggtattaatgctaagagaatcaaagactatgtggactgggttgcccaacctgtagcagatacactaggagttcctagactaactaatctcgcagaaaatccactaccgtacatggatagttatactgacgcttctaagattcaatcagcagcacaagagatacaattaaccgcatatttagttaattccgtaaaatcagtatcagatgcagaaatggaaaaaacattagctaacttaagagaggaatacctaaattga

SEQ ID NO: 142786 - DNA, 633 bp, Enterobacter cloacae; identical to SEQ ID NO: 30074

SEQ ID NO: 142787 - DNA, 633 bp, Enterobacter cloacae
atgaaaaactactttgacagccctttcaaaggggagcttctttctgagcaagtgaaaaatccaaacatcaaagtaggccgttatagctattactctggctactatcacggccactcatttgatgaatgcgcgcgatacttgcatccagatcgtgatgacgttgataaattgatcattggcagcttttgttctataggaagcggggcttccttcatcatggctggcaatcaggggcatcggcatgactgggcatcatccttccccttcttctatatgcaagaggaacctgctttctcaagcgcactcgatgccttccaaagagcaggtgataccgccattggcaatgatgtctggataggctcggaggcaatgattatgcccggaatcaaaattggagacggtgccgtgataggtagtcgctcgttggtgacaaaagatgtagtgccttatgccatcatcggaggaagtcccgcaaagcaaattaagaagcgcttctccgatgaggaaatctcattgctcatggagatggagtggtggaactggccactggataaaattaagacagcaatgcctctgctgtgctcgtcaaatatttttggtctgcataagtattggcgcgagtttgtcgtctaa

SEQ ID NO: 142788 - DNA, 648 bp, Enterobacter cloacae
atgcctcgggcatccaagcagcaagcgcgttacgccgtgggtcgatgtttgatgttatggagcagcaacgatgttacgcagcagggcagtcgccctaaaacaaagttaggccgcatggacacaacgcaggtcacattgatacacaaaattctagctgcggcagatgagcgaaatctgccgctctggatcggtgggggctgggcgatcgatgcacggctagggcgtgtaacacgcaagcacgatgatattgatctgacgtttcccggcgagaggcgcggcgagctcgaggcaatagttgaaatgctcggcgggcgcgtcatggaggagttggactatggattcttagcggagatcggggatgagttacttgactgcgaacctgcttggtgggcagacgaagcgtatgaaatcgcggaggctccgcagggctcgtgcccagaggcggctgagggcgtcatcgccgggcggccagtccgttgtaacagctgggaggcgatcatctgggattacttttactatgccgatgaagtaccaccagtggactggcctacaaagcacatagagtcctacaggctcgcatgcacctcactcggggcggaaaaggttgaggtcttgcgtgccgctttcaggtcgcgatatgcggcctaa

SEQ ID NO: 142789 - DNA, 150 bp, Enterobacter cloacae; identical to SEQ ID NO: 32306

SEQ ID NO: 142790 - DNA, 678 bp, Enterobacter cloacae
atgtctacccctgcaaacttcaacggtgcacgtcccgttattgacgtcaatgatgccgttatgctgcttatcgatcaccagagcggattgttccagactgttggagacatgccaatgcctgagctgcgcgctcgtgcagcagcgctggcaaagatcgcctcgctggcgaagatcccggtgatcaccacggcatcggttccacagggaccgaacggcccgcttatcccggagatccacgccaatgcgccgcacgcacagtatgtggcacgcaagggtgaaatcaacgcctgggataatccggagttcgtggcggcggtgaaagccaccggacgcaaaacgctgattatcgcggggacgattaccagcgtttgcatggccttcccgtccatcagcgcggtggcggacggatataaagtatttgcggtgattgatgcctccggcacctacagcaaaatggcgcaagagatcaccctggcgcgcgtggtgcaggcaggcgtggtaccgatggacacagcggcagtggcctcagagatccagcgcacgtggaaccgtgaagatgcgggagaatgggcagaggtgtacacacacatcttccctgcctaccagctgctgatcgaaagttacagcaaagcgcaggacgtcgtgaaaaacagcgaagtgctcgattcgcagcgttga

SEQ ID NO: 142791 - DNA, 930 bp, Enterobacter cloacae
atgtctaatgccgctatgaagttaaatgaaacatcttctgatgcttatgaaaaattagaagctcttctttccccggatgttataaagttaaaacattatgtggataaaggtgagtatcttttagttctagcaaaggacctttttggtattccagaaatggatccaaagatggctgtgcctgttttcaaaactaaaacctcgtatcgagctccgctgaacaaagactacataccaaatccccgaatacttgaacaagtggttaaactgcttatcagtccggatatagatttaagtgtgtgtcttaaaggtgagtccggttctggcaagactgaaatggtaatgtacattagccacatgatgaattggccgctgacaattaagcagatcaacagcaatattcgagttgatgagcttgaaggtgagcgcagtcttaatggtggtaatacaggttttgtacacagcgatttggtaacgggatttcgtaatggtcacctcattcttctggatgaagtggacaaaatcgatcctgatacggcagcaaaacttcacatgcccattgaacgtaagccctggtcactcagtgctaatggtggtgaggttataactgctaatggctacacgcgatttattggtactgcaaacacaaacatgagtggaggcgctcgccggttcgtttcttctcaacgtcaagatgcagcttttataaagcggttcttgatagttgaaatggagaagcccgacaaagttgctttaaccaatgtgcttactaaacgatatagctctttgccttttcaggtcattgagaagttcgtaagagtagcgattgcagtaaatgactctggtacagaagacagtgtgatggatattcgtcaattagtagcttgggttggcattgtctcttatacacatctccgagcccacgagacgtag

SEQ ID NO: 142792 - DNA, 810 bp, Enterobacter cloacae; identical to SEQ ID NO: 26634

SEQ ID NO: 142793 - DNA, 216 bp, Enterobacter cloacae; identical to SEQ ID NO: 10294

SEQ ID NO: 142794 - DNA, 567 bp, Enterobacter cloacae
atggattacttcaacgagctaacgggtagtcgttgtgctgcgctggcacctttcgagaaagctctctccacggtgaagagcaaagaccagtgctacaccgctgaagagctgaaactcgttatccgctgggcccatgtgaactggggtcacagcttcaagccagagaacctgtgccgtatgactcgctttgatggatacctgtcagacgccctgatatgggcagatggtcatggaagcaacccgaaagcctgtccgcacgaagagatcatcaagctctggaatgaaaaattcccttcgaaggccgtttcactgcatgagtggaaccgccgccgtccggcctatcgagacctggaagctgtgtggaacggcaaaaccacccagggcaactggcgagaactgaagcacatgggaatggccttcgagctgattagcaagtcttccctgttcggcaccagaggcgatcagccatggctgactctcgactggatactgaatccgaagaactggggatctgtctacgagcaggccatcaacgagcaccgtgagcgcaagggagtcaaagcatga

SEQ ID NO: 142795 - DNA, 2688 bp, Enterobacter cloacae; identical to SEQ ID NO: 128574

SEQ ID NO: 142796 - DNA, 1023 bp, Enterobacter cloacae; identical to SEQ ID NO: 78996

SEQ ID NO: 142797 - DNA, 183 bp, Enterobacter cloacae
atgttcgttgaactcgtttatgacaagcgaaatttcgaaggcctgccagccggggttgacctcgaaaacgatgatctctcagttgacccaatgggtgctatctccaaactgacccttaccatccagcatatgcagggggaactggtagagttgagagagctgctcaagacacagaaaccataa

SEQ ID NO: 142798 - DNA, 543 bp, Enterobacter cloacae
atgttctttcgatccatgagcaacggtagttataacgcatggcgggagctttaccatacagcaaacacaacgaaggccagcgatggcaccctgaaagcagcgtctccggttgctcgcatcgttgccagcgctgatacctgcctgcgctcagatattgctgaggatggttttacctggtgcggctgcggtgcggcgaacgccgaggctgagggcattactatttcacggcttgatgtcggcgtttatgttctcacaggttcggcaggcctggcgtcagagggatggcagttactgccgccaatggaccctggcggcatgggggaactgggtgtagttgaggcagaacaaaccgaaaacggaggactgactatccgcctgtttaagcgaaaatacctgctaggcgatgacggggagatcgtcaaaacgaaaggggaaccgatggacgtgccagcgaacagctggatcgatgttcgcctggatatgcccactgattcagttttcaggcgtgaacagtacagtctgcaaagtgacggagaagattag

SEQ ID NO: 142799 - DNA, 300 bp, Enterobacter cloacae
atgctgctgtgttcacattcaatagcggggatatttccatacccacccaagagagagccacagatgaaagttcaggatttaagtcatgcctatagcatctgggaaaacattcgagaactgcaaaaacagcgcgatctcatcgctggcggaggtggtctcggtgtgactatccagtcagcatatcaggatgctgcctttgaagaggcaatccggcctcatgctgtagcagagctggaacgtcgtattgagaaacagaaaaaagtcatcatcgacctcggtgtttctttttctgacggctag

SEQ ID NO: 142800 - DNA, 195 bp, Enterobacter cloacae
atgtccgaatatcttttaacctgggaatattatgaccaggactggaatttgtgtgagaaaggaaattttgtgatgagggttaataaaggtgattctttcttagatagcctgactggttacaccgaagcgatggctgaagccagaggtgcagaaaagaacagggtagtggttagctactgcacaaaaataaattag

SEQ ID NO: 142801 - DNA, 828 bp, Enterobacter cloacae
atgtcagaatcttcaatcgtcccttacgtaaaaaccactcccaaaccttttggtgtgaacgtcgaatggaaatggccgggtggatgcgcggtgctagaaatgcaatgccttcatgaagatggccgacttgtgaaagaacgcatcttctggccagctaccgtataccttatttccgggctcaaaactggtgagcgagttcaggtgcgtctgcgtccaattgcagaggatggctcagcacgagattggcgagccggtgactgggtcgaaggggtttcttctgtcgatgccggagaaattgtaggggcgttggaccatgaaatccgcaacagcgatgcattcaaagtcctgaaagatggctggtctttcgaaaagaacgggacgctgattattaataacggtcaggtgttcattaacgatgcgaagattggcggtggcgtattgtctacgaactataacgtgaagttgaatatcaacaacgttggcaaatcacacgaagctggcatgaccctcggtgttgaagatggccagagcaacgttgagtttatggctgatcgctatacggtgcatgaagccgcttcatccataatcgagaacgccgtcgcaacaagcgcgaagacgaagattaggcttggcgatgaaatgaagcaggccgtcattaatgctgtgcgtgaaagcgatttgttcgcatccctccaggcaaagattgatgcgcaaacagcttcagtagctggcctgcaacaggcgatgcacgatgcggtgaacgatgctcttcgcaatgcgctgaagcctggcggcatcctctggaatacacggtcgagtggactctga

SEQ ID NO: 142802 - DNA, 210 bp, Enterobacter cloacae
atgctgaggaggtacgctataacaaacgccgtgtatcagccgcggcagtgtgatgtaatcagcctgagtcttatcagcaactatcagccgttcggctatctgcatttgatactgaggtggtctaccagtacccaggtaaaaactcaccagcgattccgggaagcggttaagccattcgctaacctgctcaataaaatctggaacaggtga

SEQ ID NO: 142803 - DNA, 1212 bp, Enterobacter cloacae
atgtctgaagtaaacgaaattctgaaaaaagtcactgccagcattgaagatgcaaccagcaaattcaacgcgaaagcagaagaggcactgaccgaagcgaaaaagaatggtcagctctcagctcagaccaaagatgttgtagataaaatggcgacagagctcaatgctcttaaggaagctgaaaaaacccttaaggccagccttggtgagctggaacagcatgttgcccaaatgccattgaacaacgctgctaaagttaccgaaactgttggacaggtggtgattaatagcgaggcgttgaaggcctttgccgcgagcgttgaaggcaataagcgcgtaagcgtcccagttcacgcggccttgctttctacagatgttgcagatggcgtggttgaaccacagcgactgcctggcatcgacacagcaccaaaacagcgtctcttcattcgtgatctgattgcgcctggccgcacatcttcaccggctattttctgggtgcagcaaacgggctttaccaatgcagcgaaagtcgttgcagaggggactgccaaaccttacagcgatattgaattcgcaactaaaatcacgccggtgacaaccatcgcgcacatgtttaaggcatccaagcagatccttgacgatttcgctcaactccagtctacggttgacgctgagatgcgttacggcctgaaatatgttgaggaacaggaaatcttgttcggcgacggaactggtgtgcacctgcacggcatcgttcctcaggcctcagcattcgacccggcattttctgttgagagccagaacgggattgatgatctgcgcctggcaatgcttcaggctcaactggctcgtttccctgcatctggccacgttctgcacttcatcgactgggcgaaaattgagctcacgaaagacagtctgggccgctatatcctggctaacccggcatctctgactggccctacgctttgggggcttccggtggtagcaactgaggcagcagctttccagggcaaattcctgacaggcgcattcaatgccgcagctcaactgttcgatcgtgaagatgccaacgtggttatctccaccgaaaacgccgacgacttcgagaaaaacatgatctccattcgctgcgaagaacgtctggcgctggctgtgaaacgccctgaagcgttcgtgtacggttcattcagcaccggcgcgggtagctga

SEQ ID NO: 142804 - DNA, 186 bp, Enterobacter cloacae
atggctaagaggtttaccgtagtgatctccggcagtaatggatatcgaacatatcaggttaaagcgaatgactggaaagaggcggaccagatcgccattaatctccatcggagcaaagaaccggatgagccggagtatgaaattggcgtcgctgccgtaatagcaggctggccaaaggtctggtaa

SEQ ID NO: 142805 - DNA, 732 bp, Enterobacter cloacae
atggaaaccgtaattcaggcactggaaaaaatgggccgggcgacataccgcgaagttgctgcccgtcttgatatcgacccggtcgatgcgcttaccatgttacgtgagcagcgtgatcaggggttgtgcgattttggcgatggcggctggttcctcggtaccgtgacaggacagcctcagcagtcaacgccaaaggctcctgtgaatccggccccgcgtctgaaaggtgaggagccggaacccgttgatcctgatgtcgtccgacagcagctgcgtgagcagggggcaatgacgacagtttcgctggccgcggccgtcaatcgcaatgcccgtgggatggtctctgtacttcacgcgctggagcgccagggcgttgtggtgaagaacgggcagggcaaaggcgtaacctggtcgctgccggcgtcctcgacagaaccggagccagaacctgctgctgaatctgtaaccgcagtcagtgctgagcctgaattggccgctaccgcgcagccgaaggatatcgcgcagattatcagggagatcccctcgttcaccgaagggcgagcaactgcccagaccattccgaccgctcgggtgatctcccgcgaaatccgccgcgccagaaacaagctggcgagcctggagaaactgcgcgatgcggtgcgcgtagttggtcggcataaacatctcgttcagcatctggtaaacgcggaggtggaaaatggcaaggcctaa

SEQ ID NO: 142806 - DNA, 261 bp, Enterobacter cloacae
atggcaaggcctaagacccaagaggaacgcagcctgttcatcgcctggatcatcgagatggtgaagaagcatggtcacgcgacgaccaaagacatcgttgcaatgtttggtctgcatcgcaccaccgctgagaaatacatcagagttgcggtggaacgggggaatctgatccgccacggtcgctgcggcatcttccgcgaccagcgcgcagttatcgactttgacagggagcgttttacgcaccggggagcaacagaatga

SEQ ID NO: 142807 - DNA, 480 bp, Enterobacter cloacae
atgatcaccgagaaagataacgttttttattgtgactgcggattttcctttgagagagggcgcagcgggaatcatgaatgcggtgacggtcttcgcgtgaaacttgaattattccgaaccgcattcatggaatacagcgataagacagattgggtgcagactgataaacgttttgacgttattaagccctggggtaagcaccgcgccgacgtgctgagggaatttattgaacatttggaatcaaagctggtagcagcagaaagtggattccccccgctcaccgttgagcgattaatacgcgagaaaggcgctcttgaaaagcgcgtagcagaactggaggcgcgggaagtgaggctgccgcagcgctttgacgtgcagtcatattcttgctcagaagaacctgacggcgaatggtatgcacgcgatgatgtattggctgctcttgctaatgccggtgtccgcttctacgaggagggctga

SEQ ID NO: 142808 - DNA, 258 bp, Enterobacter cloacae
atggacccgttattgcaatacgcctgcaggcgggtagctgaactggaaagcctgctgcttgtggaggtatcagaaactgtctggcctgccgaagtcggaatggtctacagccagattgaaaacgccggggatctcccggcgcaccaccagcgccgcctgcagcatcacatcaatcggatgtggctggaacgaatgccggtaccgtcaattgtcgatgctgcccgttcgctggccgccgccatggaggaatacgtgtga

SEQ ID NO: 142809 - DNA, 759 bp, Enterobacter cloacae
atgactacaacagtttatgaccgtatcagtcgtttgatagctagtgattcccgttggtcttgcgacctaactgagcaaggttatcctggacatgtcttatatatcgacgatacaggtttcggcaagattgccgacagaaacgtttttgtcatgaccttagctggaaatggtcacctaatcgaacaatggaaaatctggtggtcgggtgatttatcggaccaagaacctccagttgttttacctacaggacaatcggttgtattgcatatagtcaaaaaatccactaacgaagtgatttttgacaagggtaatgttattgcggccacctgcactcagacccgtgaattacaagctgtattttcaggttcaggcggcggcattgcagcacaaaactggttatcttcacattgtgcccggacagccattagtgaagctaaagagttagatccgtacactggtggagaggtaaggtttgtcgactttaccagcaacaaaaccaatttagaaacatcagtgactaccattgcagaagttaaccaagctctattgatgagggggcttattatggataccaagaatccgcatgtacaacacgtttcgatcagcgctcaggaagttgcggacgttcgtcaaatgttggtgaatggcaacatatccccatgtgctccaatcggaaaaaaaacccaggattgggacgatgcatccaaacagcgtctaaaaagtgcgatcaatcgtatcagagaagaagaatcagcttaa

SEQ ID NO: 142810 - DNA, 606 bp, Enterobacter cloacae
atgcggctcctgctgaatgatagattcgaacaaaattacgaaggatgcggtagtccaccagcactgatccccggtagcggtaaatgcgaaggcgctgccagcgcgcgcgtagtacctcaagcgtttctggcttcatgtggcctccccgatgataatttgcccggtttctccccagattttggtaacccgcccgtcccagacatggctatcctcgtcaaacactgcatccagcaaagctttttccaagttgtctttgtccggcttttgttgatgaggctggccgacatattgctcccgctttgccttgctccagctctttggcatggggataacgaaagtgacgtgatatccggcttcaggcaatttaatgcccagcagccggacctgctctttgtatgcccagtaagcagccgttgccgggcgtttatgccatcggtctcgctgggtcattcgtggtttgccaatcggcgtaatttcgtaaattttcatgcgggcaccaccagcccgcggcgggcaacttcaatcactgtcagaacaatcgcgcggttcataagctgccggcgctcttccctgttcagcttatttccgttatcaatgctgtcatga

SEQ ID NO: 142811 - DNA, 237 bp, Enterobacter cloacae
atgaaacgatttattttggccctgggtatctctagcgtgctttcaggttgtgccggcctgcttgataaacaggaccctatttgttctggtgtggccatggttggcggacaagaaacaacggtgcaaatttatggcattcgtaaggtggttgaacaaactcagtatcgagctggttatccgtttaactggcagtgggtcgcagccaataatttcaaatccaatacttgttcaaaatga

SEQ ID NO: 142812 - DNA, 1641 bp, Enterobacter cloacae; identical to SEQ ID NO: 128415

SEQ ID NO: 142813 - DNA, 690 bp, Enterobacter cloacae
atgaaaatgacacgcttagaagctatcaaggcatggggtagagcaagccgtgaaggtaaacctattcccgatgatgttagaaaggttctgatcagcactcaaaatgatagccttcatgatttcggtgtagaagctcctacagctaaagttagagttagaaaagagcaagtaaaaaagaatatgaacggcaagaggccgttcgctacatcaggtactatccgtagtgcgggaggtgctttaactcctgaaaaaatggaaatatacaaccaaaaacgcaagttagataaccaaaagcgtaaaaacaaccctcaactttattcaaagctaatacaagactttattgtatctggtttatctaaaaaacaagccactaagaaagctaaagcaattattttaagtgcaaccctagataaactcaataacgataaaaaacctccttcagtcagaacaaaaagaattgttaaatctaatactttacttaatgagggaaagattaaatctgatccctggcacatagcaaaagttaagcaagatgagatcaatttatctaaagtagaacaaagacggatcgacacggcattattaagacgtcctatttcatgtattgaatgcaaaattgactttaaatcatttggtggatttgtagatcatactaaagatgttcatcatgaatcgccacggataatctag

SEQ ID NO: 142814 - DNA, 1095 bp, Enterobacter cloacae
atgaagaaggccattgccgttgctatcatctcaacctttatggtcgtcctgtcgctgtatgcggttaacgccattatcgctgagcagcaaaagaaccggcagagggagatctcccacacgctcttaagctattctgaagagttaacgcaaaatatcgccagtacgcttaaaaatacctccgcgcagggatgcgatagcgccagtctgaacgtctaccgaaaattaaagatgcgaagtctctatttcgccgatgtggggtttattgaaaaggggaaaatcacctgcaccgcgttttggggcaagctggcaaatcccatcgcccttccctctgagctgcataatacccagaacggattcagcctggcgcagttttcgcagaaagatttctttgtcggcaatgcgacaatctataaccaccttattatcttcacctcccgttcagcctacgataaatttgcccccgttaccgccaactattcgcttcgttcttccactaaagatttcggccgcacctttttcaccgttacgccgccatcagaaaacttcagccgcttacagtctctgttatttacgctggctgtgacagagtgcagtacacgctgggatttgtgcgttaccgtcacacaccatgatgccggactggcttcgctctcccacgtagtgatggtgcttctgtgcttgtttttatactttatctgggtatccctgacgctgttttctcttcgactttatgaagaccgacgttctctggaacgaacgctggtcaaagcggtaaaagcgaataccatcagcgttcattttcagcctgttattcgggttgctgataagaaaatcgtcggggttgaagtgttatcaagatggcaggataacaatcacaaagaggtttctcctgagctgtttatcccgttaattaaaaaaattggcctgtataacgtttattatcagaacatgataaagaaatccctggcggaaattgccgcgctggccgctgaacatcagttaatgatttcactgaacgttggccggacggaaattgaagacggcaaattcctggcggtattacgtcatgaatgctcagagaacgcgattccctga

SEQ ID NO: 142815 - DNA, 360 bp, Enterobacter cloacae
atggtcgtggagattaagtcagcagccaccgtacgcccagagatgattgagttgcgtcggaaaatgttgggtatgagccaaaaggatttggctcatcgtgtagccctgtctcaagggacgttgtccaaaattgaacaagggcttaaatctgcaactgaagaccaaatccgcagtattgcggaagcgcttaactgtcccgtcgatttttttatgatgtcagaaaggctttatggtggaccaatcagtgcaaacccgatgtaccgtaaaaaagcatctgtcagcatgaaagtgctggataaacttgttgctgaagtgaatgtacgggtaatccccccgaaaaaccagtgcatgaataagtag

SEQ ID NO: 142816 - DNA, 216 bp, Enterobacter cloacae
atgcctgccatgctggggctaattaccggggttgtatcggccggcggtcagccgcagccctactcggccatatacaagagcatggcaaagcttgagggaagcaatacgcgaatattcgccaggccgcagacaacccccggcggcaaccttcagaacgttacgtattcgaatctgaggaacgtgattatgggcattaactgcgccaattatgattga

SEQ ID NO: 142817 - DNA, 1596 bp, Enterobacter cloacae
atgaaaagcacattcacaatgataacgctggcgcttgctgcgctgacggtcagttccaccgtcgcggcaaaaacgctggtgtattgctccgaaggatcgccggaaaacttcaatcctcagctctatacgtcggggaccagcgtggacgccagcgccgtaccggtttataaccgtctggtcgatttcaaaccgggcactaccgaactggtgccgagcctggcggaaagctgggaggtgagcgaggatggtaaggtctacaccttccacctgcgcaaaggggtgaaattccacagtaataaactgttcacgccgacgcgcgacttcaacgcggatgacgtgattttctcgtttatgcgccagaaggatgtgaatcatccctaccataacgtctccaacggcagttattccaacttcgaaagtctggagttcggcaacctgattaccgccattgataaggttgacgatcgcaccgtgcgcttcaccctggcgcacccggaagcgccgtttgttgccgatctggcgtggtattttgcctccatcctgtcggcggagtatgccgatgccatgctgaaagcgggcacgcctgaaaaggtcgatatgcagccgattggcaccgggccgtttaagctggcgcaatatcagaaggattcccgcatcctctttaccgccttcccggactactggcagggaaaatcgaagctggatcgtctggtgttcaccatcacgccggacgcctcggtgcgttttgccaaagtcgagaagaatgagtgccaggtgatgccgttcccaaacccggcggatctgccgcgtatgaaggctaacaaagacatcaacctgatgagcaaggacggtctgaataccggtttcctggcatttaacacgcaaaagccgccgctggataacgtaaaagtgcgccaggcgctggcgatggcgattaacaaaccggccatcattgaggcggtcttccacggcaccggcacggcggcgaaaaacctgctgccgcctggcgtctggagtgccgacagcgagctgaaagactacgattacgatccagaaaaagcgaaaacgctgttaaaggaggcgggatttgccaacggcgtaagcatcgatctgtgggctatgcccgtgcagcggccgtataacccgaacgcgaagcgtatggctgaaatgatccaggcggactgggcgaaagtaggcgtgcagaccaaaatcgtgacctacgaatggggcgaatacctgaagcgcgtgaagggcggggagcatcaggctgcgctgatgggctggacaacggcgacgggcgatccggataacttcttcggaccactgtttacctgtacgtccgccaacggcgggtcgaactcggccaaatggtgctataagccgtttgataacctgattgccgaagcaaaatcgataaccgatcgcgaaaaacgcgtggcgctgtacaagcaggcgcagcagatgatgcacgatcaaatgccggcggttatgattgcccactcgaccatttttgagccagtcagaaaagaggtcacgggctatgaaatcgatcccttcggcaaacatctgttctggcaggtagatataaaacagtaa

SEQ ID NO: 142818 - DNA, 390 bp, Enterobacter cloacae
atgtgtaactgcttttccaaaaaccttggtttgggggaactggcaaaaacgcctcgttttctcgtaagcaaaggctcaaatgcgaacggctggtatgagatttatagtgacgggtttaagcgagttggtcaggcgtggtctaccccattgtctattcctacacctgcaagcggtgtcagggttaactacccgataagtttcacctcaaaactgaatggcctttttgtcactgagaacgggaatacctctaataactttgaatttgcaaacccggcgcaaattggctttaccggattcaatatggcgacaatggaggtaacactcagttcgtcaccaatagcaagttatggctcatcttttacgggtttttatgtcgcggagggatattaa

SEQ ID NO: 142819 - DNA, 399 bp, Enterobacter cloacae
atgtggtactggaatccagtcgattgcaacgaagcgttgccgggtctgtacgatttaactcactgcgtagaaattgaggatgataaccacccatttaaaacgggtgatttacctgctggtaaaatgtggtcgaacgatgccagcaatcacccgatattagtagacatccccccaccatcgcctgaagacgtaagggcggagaacgaggctataagaagtcaactacgcgcaacagcagatgctgaaatagcctggaggcaggacgctgttgacgccgaaatcgcgacagaacaggaagccgctgagctggttgaatggaaaaaataccgggttttgttgatgcgcgctgatacaacaaaacccgtatggcctacagttccgggggaacaggccagttaa

SEQ ID NO: 142820 - DNA, 600 bp, Enterobacter cloacae
atgacgcaggcaaaattaaacagcgagcttattgccacggtggcaggatatattactgtatataactacgaagatgaaacgcgcgaatatctttccacatctgttgaatatctggcagtgggagttggcttgccagcaaactcgtgcaccgacgagccgggagaaagaaaagaaggctttgcaatttgccgtacagacgattttaccgcgtgggagtacctccccgatcatcgcggtgagacggtatacaacattaaaacaggcgaagcggtgattgtttctttgcctggcaattatcccgaagacaccaccacacaggcacccgagacgccatatgatacgtggaacggcaacagttgggtgacggatacggaagggttacacgctgcggaaattgttgcagcagagcagcagaaaacggcattgctggctgaggccagggctacaatcagtctctggcagaccgaactacagttaggcattatcagcgataaagataaagccagccttattgagtggctggcttatatcaaacgactgcaagccgtcgatacgtcgacggcccctgatattaactggcctgttcccccggaactgtag

SEQ ID NO: 142821 - DNA, 981 bp, Enterobacter cloacae
atggcaaacctacctgaaaccccgcagtgggaagaaggcatctaccagattgaggtctctgaccccgttctgggcgggcctgacggaatttctaaccgtcagggtaaacaactggccagccgcacgctgtacctgaagcaacaggttgaaaaaggcggttctgaccttgcgaaacatatcgcggcagcagacccgcatacccagtacgcaccgaaagccagcccgacattcaccggcacaccaacagcgcctacgcctgcaaatagcgataacagcaagaagctggcgacgacggagtttgtggccaaagcacttgcggcgcttgcaggcagcgcccctgagacgctggatacgctcaaagagctggctgatgccctcggcaacgatccgaattttgcgaccactgtgttgaacaagctggcggagaagctggccaaagaccagaacggcgctgatattcctgacccggcgctctttgtcaaaaaccttggtttagggaaaggctctgctttgccggttggcgtccccattccatggccgtcagcaacaccacctacggggtggctcaagtgcaacggagccgcgttcacagcctctcaataccctcagttggcactggcttatccggtgatgagattgccagacctgcgtggtgagtttttacgtggctgggatgatgggcgcggggtagatactgggcgcgctttgctttcatcgcaaagccatgcgttcactgatcacaggcacgcgttgagcctctggacaggttcagctttaagtaagagtgatacggtggcgcagaaatacagcccgcaggcgtcaaaaggggatggtggttctatggatgaaagtgtaaatactggcggggctttaggtttttcaaacttaacaaatgaggttgcatcttcttataaaacatatgcatcaaatgagactcgtccgcgcaacattgcatttaactacatcgtgagggccgcataa

SEQ ID NO: 142822 - DNA, 321 bp, Enterobacter cloacae
atgtcacaaaccaaatctgaagctgaactctttattctgaaataccctttcaccacagcggcgggtgaatcaatcccccagctcacccttaaacgcctgacggttaaagacctcaagcaggttaaaaaagtccacaaagacccgaatgactgggatgaaccactgatttcccgcagcaccggtctgcttcctgaagacctggataatatggatttagcggattatctggatctacagaaacgatttcagcaaatcactgggctgggcaagagcaacgaagacgctgatgcaggcgcaggggctactggcgaggtggtttag

SEQ ID NO: 142823 - DNA, 1098 bp, Enterobacter cloacae
atgtcagccattcatatttttaaagccggtactcataccgacatgcacggcacgaaactgccgttcacgcaaagcgatcttgccgcctgcgtaaaagcctatgacccgtccgtccatgaagcgccgctcgttattggtcaccctaaaacggaagacccggcgtggggctgggtgaaatccctgtcactcagcggcgctgacctgctggccgagcctgaacagctcgacccgcagtttgccgagctggtaggcaacggacgcttcaagaaagtctccgcctcgttctatctcccggactcacccaataacccgaaacccggcacgctttaccttcgccacgtcggttttctgggggcgcagcctccctctattaaggggctgaagcaggtgtcatttggtgagtcagaagaaggcgtcgtcgagtttgctgactggggcgatatcaccaatgcctctctctggggtcggctgcgggactttctgattggccagttcgggctggatgaaaccgacaaggtacttccgtcatggcaggtggattccctgcgtgaagaagcgtaccgcgatccagtgaaagccgtgccggacttcagcgaaccaaaccctaaccctcaacaagagaatgacgcgatgaccaaagaagaaattgaagcccttcaggcggaaaacacccgcctgaaggcagatgccacccagcgagccgcgctggatgcgaagaacaagcaggagaagctgcacgctgacaacgtttcctacgctgaaaagctggtaagcggcggtcaactggccccggcagcgaagcccgttgttgtcgccattctggatgcggtctctgctggcgataagcctgtggaatttgccgaaggcgatacccgcacaccgcttgccacggcgttcaagacgctgctggatggcgctgcaccggtgctgaactttagcgaacacgcgaccaaagaccgtgtggatgctggtgtttcaacgtcttctgcagagtttgccgaagccgatccagagcgtctggcgctgcatcagaaagcgctggatttgtcgaaaaaagaaggcatcagctacgacgctgctgtctcccgctgcctgtaa

SEQ ID NO: 142824 - DNA, 654 bp, Enterobacter cloacae
gtgtggactagcctgataaaaaaactgccgtggcgcggcatgttaatcgcgcttgctttagtgggagtgctgtatggcctgtaccactggggttatcgcggtggccacagtgatgcaaaacgcgacggggatgtggcactcagcacgctgcagtcagcattcgatacatacaaaacagaacaagcaacgcttgagaacgctgcgctgcgggcctgggtaaaacgctatcaggagcaggtggccgcaggccatcaggcagaggcggcttaccttgagcaggtatcgctgcttgaaaaccagaatcaaaaacttaaagagaaaattgatgatgtcacacagcgctggattgatgaaaaaggcaagagccatcccattgagtgcgtgtttactcgcggtttcgtgcgccagtacaacgcagccctcggatatgacgacgcatccgtcgacagcggtcatgcaggcagcgctaccaccgctatccccggcactggcacagcgccccggcctcctgaagcccctgacgccgggctacgcaactcaggcgtctcccagcgtgacgtcctcgccaacatcatcgacaacgcgaagcagtgccgcatctggcgcagccagataaacgggcttctggacgaacgggaaggattacagaaatga

SEQ ID NO: 142825 - DNA, 258 bp, Enterobacter cloacae
atgacttcggcaacggctaaatccagctcactctgcctgatggggatcacctgcgatgagtatgaaactgcggcaaaaatttacaccctcagcgtcaatgctgacaatcttgcagaggcaataagagagatgcaagccgcgcttgagcaggtggagaaaacgccacgaatgctccctgaaaataagctgaaaggaatactcattggacagataagactgaccatcagcgccaatccaaaaagcagatcggcttgctaa

SEQ ID NO: 142826 - DNA, 573 bp, Enterobacter cloacae
atgtaccttccgttggaaaagtattacacgcttgattccgctaatagcctgcgttcactccatgagataccgctgcgtcactacaccccaaaacagccagagctggctgatttcctgaatcaaatgtatccagaagggttgtcaaagcacggccataactacctctacaaccctgcgcttttcgatgaagaccatcaaagggacagcgccttactgattggtctcatccttgaacttgtacggcgtagcgactttcctgataaaccgtcccgatatcagtcgatgtttgcctgtcaggaaatcagtgaggttaaacaattcagggaattgctggccaacgagcgtggtgatgatggaatacggacagcgccgatatatgaagtaaggaaccagaaccctgttcaccgtggtgatatgagactgcttaacagtgatggtccgcttctggatatatatcgtcgggcgcatctgtactggtcaggtgaaagtcttacctatgcaaatggtgaagatccattctgggagatactgatcccacttccggcatcaacaggcaggcgggtaacggaatga

SEQ ID NO: 142827 - DNA, 267 bp, Enterobacter cloacae
atgaaatttaaggtcgctgtattagtttctgcacttttagttaccgggagcactctcgctgatagcgtgatgaaggctgaattccattcaatgcaggagtgtttgtcagctatcaaaactaatggtggagaacccctaaaaatcattcaggataagcctgacatggtcacagggcggctaccaaacgataaaatgttcgcttgtgaaaagaaggaaacaggatctaaaggaacctattttgaaggctggtttatggtcaaggattaa

SEQ ID NO: 142828 - DNA, 366 bp, Enterobacter cloacae
atgtgtatagctgagcgattaaaagaaatcctgaaagaaaagaaaatcagctcaatcaaggagttctctgagatttgcgagctgccttatcgtacggctcaaagctatttgaatggtgatagggaacctaatattgcagggctaacgaagctatgcacacagttgggtataaacctcaactggcttcttactggagttggtgaacaattcattttgggtgaaaagacttcaccaatgaaggaagtatcatcagacaaacaggcgttgatggatgcattcgatgatatgagccctgagcagcggagggctattcttgaggtcggcaaagtcctcactcaacctaaaccgagcaaatttgctgggtag

SEQ ID NO: 142829 - DNA, 189 bp, Enterobacter cloacae
atgactgcagaacaagtcaaatcactcttccgccagcgtggagtcacgttcacccgctgggcagaagaaaatggctacagccgcaatgaggtctaccgtgttcttaacggcttcaccaaagcccgttacggcaaatcccacgaaattgccgtaaagctgggtctcaaaccagattcaaacgcggcataa

SEQ ID NO: 142830 - DNA, 909 bp, Enterobacter cloacae
atgggacgtacaaaatcacaatcaattgaattagttgaagatgtgccactagcagacggcctcaacgtaaatcttaatgctatgaccgagcatcgccttgaaatcatgcagcagtttggtgatggcctgccctatgagcgtgatcgtatcgttcacgagacccgtttttatatggctcagagcgctgaggccatgctggaggcaggtagacgacttaccattttgaaagagtgtgagccacatggtgagtttgaagctattgttcgcgaagaactgggtataccggaacggactgctcagcgcttgatgcaagcctctatcaagttcatgaatccacagcttcaggcaaaagcgccaacgttggcgcttttgggcaaatccaaactgtttgaattaatgacagaagatgatgatgaacttgcagaattagcggatggtggaacggtagccggtttaacactggatgatgttgagcgcatgagttgccgagaactaaaggccgcactgcgcgaagcccgcgaaaccaactcagcacagcagcgtgttctcgctgacaagaatgagaagattgacgcgctctccaccaaactggagaaaaaatcccgtatccagccacccaagcctgacgaagaggtgaagaaactgcgggctgaggtaacagcattatccaccgaagcggaatcagccatcaccgttcgtctgttcagcgcctttgaaactctgtgcgcatattgcgcagaaaatcagattgatacgccaaaagattttatggccgggcttgtttgtgagctggaatatgctgcccgcagccttcgctctacctttgaccttccagataccccgacaggcaaggcagcaccagcctggctgactgagccagtacctgagattgaccggcaggaggcgtaa

SEQ ID NO: 142831 - DNA, 480 bp, Enterobacter cloacae; identical to SEQ ID NO: 15594

SEQ ID NO: 142832 - DNA, 231 bp, Enterobacter cloacae; identical to SEQ ID NO: 15595

SEQ ID NO: 142833 - DNA, 429 bp, Enterobacter cloacae
atgatgactaaacagcgtcttattcaactcatccatattgcccgcagcgacctccagatggatgaggatacctaccgccagatgctgcaggggttaaccggcacagcttcaaccaaagggatggatcttccgcagctaactaaagtgctggattccatgaaaaagaaaggattcagggttaagcctgccggaaacgctaaaaccggtattgcgctggatgaccatccacagtctcgcaaaatacgcgctctctggctggatatggctactgcaggcgttatccgtgacagttctgaactctcgctggcacgttgggtgaaacgggaaaccggtgttgacgggttgcgctggctgaactcggaacaggccagcagtgttattgagaagctcaaaaagtggcattaccggacaacggggaaacgaacatga

SEQ ID NO: 142834 - DNA, 390 bp, Enterobacter cloacae
atgagcgaccatagccagtttcgcagtaaagggcctgaattgctggttgaacttgcccagcataccgctacaacggtgcgtgaaatcatcgagattgacatcgcagtggctgaccaaatcggcgaggcagtagccaaccgcatgatgcaggtctggggcgggcagaacgtgtatttcccgatgggcatggtctggaaggtcagccagcgcgacagggaaatctttctggagttcgacggacgcaaccatcacgagctggcacgcaagttcggcgtttcgctacagtggatctacagcgtggtgaaacgggttaaaagggaagaactggatcggatgcagggtaagctgtttgatggtgaacctgatgacgatgccgggacgagggaataa

SEQ ID NO: 142835 - DNA, 2208 bp, Enterobacter cloacae
atggatacactcaaatggaccgggagaaaacagcttcctctcacccgacagacagagtcagcggaatgtggtctggcatgcctggtcatgatggcctgctggcatggtctgcaaacagacttacccacactgcgcgaacgtttcagtatcagctcacaagggatgaccctgcagagactgactgaatgtgcggccggtatcggattatccagccgggcagttcggctggagcttgaggacctaagatccctttctctcccgtgtattctccactggaacatgaatcattttgttgtgctacataaagttcgcggaagcaggctggttattcatgatccggaaaagggaaaagtaacgctctccctacaggatgctggaaaacatttcaccggcgtcgcgctggagctgatgccagccagtgattttaccgctcgggatgaaaggaaaaaaatccatctgcgccaactgacaggtaaaacaccgggtctgttgtcggcaatgtcgcgaattatcgtttttgccgtggcactcgaaatcctgacactgggaagcccgcttctcaaccagctggtgattgatgaagtcctggtggctgccgaccagagtttgttgaccgtcattattattgcgcttctgctgatgtcactgacccagatgctgctgtcactggcccgccagtgggcgagtattacactgtccgtcaattttaacatgcagtggacagcacgggttttccatcatctggtccatcttcctctggcctggtttgatgcacgcagtaaggggagtattaatgctcgttttgaggcggtagataccatccagcaggcgctgactacgcaagtgctggaaggtattctggatgtgttgctcgtggtgactgcgctttgcatgatgctgctgtacagtcctgaaatgacattgatcgccgtacttgcagccattttctatggtgtgttgagggcactgtggtatccgtcccttcgacagtcggcagaagatgcctgggatgcaggtgccaaggagtccgggcattttcttgaaacactcaacgggatcctcagcctgagaattaacggtgtgacggcacatcgtgaggccgcctggctgaatctcaacgttgcccgcagaaatacgcagttgcgtcagagccgtctgctgatgtgctatgacattgctcacactcttaccggcagcgtggtatcagcaatcattttgtggaaaggcgccggggaggtattgaatggtaccttcaccgtcggcatgctggttgcttatttatcctatcagacgcgtttttcttccagtatcagtagcatgactgataagtttttttcctggcgtatgctcgatgtttacaacgaacgactggctgatattgtactgaccccgacagaaggccttcagcaacagccttttcgtgagcataacaacgcttcgcacattccttctgtatcccgcagggagatggatgaatatgctcatgctcctctagtacttgagcacatcatcttcagccacaagggaggggaaaatccgataatcggcggggtgtcgctgacactcaatcccggagaagtcgttgccattacaggtaaatccggatgcgggaaaacgacactggtgaagcttatccttgggatccacatccctgatgagggcaggatcagggcatttggcatattgcatacgcatccggattattttcaggttcgtcagcgtatcggtaccgtactgcaggatgaccatcttttcaaaggttctgtagcagataacattatttttttcagtgatgaccgaaattataaacgaatgatccagtgcgcaagactggcacttatcgacagcgatgttatggcaatgccgatggggtatcagacgctgattggtgaaaccggcggagggctttccggaggacaaaaacaacgcattctgctggcaagggcgttgtacaagaaaccgggattcctgttactggatgaagcgaccagccaccttgatgttgagagtgaaatccggataagccagaccttacgtcaactggggcttcctgttctgctgatagcccatcgcccggaaaccatagcctctgcagatcgggttttgtatctggcagacggctacttaacggagctgaatctccagcatacagtcaataatggcgagtctgtttgtgaatatactaatgacgtgatggcaaaaaattaa

SEQ ID NO: 142836 - DNA, 627 bp, Enterobacter cloacae
atgaacatattatttggcatggaaacaaaagatataattatgacagcagcagttattgttggccctgttcttgctgttcaaatacaaaaaacattagagcaattcagagaaagaaaacaaagccgcttatcgatattcagaactttaatgtctaccagagctcaaagattgcatagagaacatgtgcaagcattaaatatgatcgatctagaattttatggaagaaaactcccaataataagaatcagatatcaaactaagaaagaacaaactgttactcatgcctggaaaagttataatagccatctaaataaaattaatgactacccagatattaatatttggatatccaaatccgatgatctttttactgacttgctctacgctctttcacaagcaatgaattacgattttgataaagtacaattacaaagagactgctataggccaattgctcatggcgatttagaaacaacacaagcaaatatcttaaaagggctagaaaaagttttctctggagatacagccttaccgatgttcatcactaatgcccccatgaataattcaaatcagaatgatgaagtcatgcctgaaactacaactgattgcgatacagaaacacgctga

SEQ ID NO: 142837 - DNA, 165 bp, Enterobacter cloacae
atggtcgcctggccggtgaactacggtcagacgggggtaatgagctttgtaattaaccaggatgacgcggtttatcaggcagatctcggcaacgattcggcgcagaaagcgcaggctcttagtgaataccagcaggataagacctggcagcctgtcacaccctga

SEQ ID NO: 142838 - DNA, 621 bp, Enterobacter cloacae
atgactgttaacgattccctcttcgcattctctctcgcagcattgttacttaccctgactcccggccttgatacggcacttattttgcgcacagcttgtgctgagggcggcaaaaaggcttttcaggctgcgcttggcattgatgctggctgttttgtatggggcgcgctggtggcgttaggtcttggtgctcttctggcggtttcagagatggcttacactgtgctcaaagtttgtggcgcggtctacctgagctggctgggcttacaactgctggtacgtccccgatcatctttcagtaatggcgatgacaacaacgattctcaggggaactggtttatcagaggaatgctggggaatgtgctcaatcctaaaatgggcattttctatgtctcttttttgccgcagttcatacctgccggtcactctccttttatatggacttttatcctggtcagcatccacgtagcgattgggactatatggtcactcacactcattttatccacacattttgcgtcagccgtattgaagaaaagtcgcgttgttaaggtgatggatagagccacaggcggcttatttttatgctttgcggctaaactcgctatgagtacgagatag

SEQ ID NO: 142839 - DNA, 492 bp, Enterobacter cloacae
atgaacgtggatggtctgaaaacgggacacacctcgggcgcgggctttaacctgatcgcctctgcggtggatggtcagcgtcgactgattgcggtggtgatggggacagacagcccgaaaggacgtgaagatcaggcgcgcaagctgctccactggggacagcaaaatttcgatacggtgcagatcctgcataacggcaaaaaagtgggaaccgaacgcatctggtatggcgataaagagcagatcgcgctgggcacggatcaggatttctggctggcattacccaaaacggaagtgccgaacatcaaggcgaaatatgtaatggataaaaaagagctggaagcgccgatcgccgcgcatcagcgggtaggggagatccagctgtacgatcgtgacaaggtggtagcgcactggccattggttacgctggagcgcgttgaaaagggtggccttttctcccgcctcggcgattatctgcatcataaactctaa

SEQ ID NO: 142840 - DNA, 837 bp, Enterobacter cloacae
ttgcgtttggcgggcttaacgtgctggcgcagcctgcgctttgacgactaccgttccgtcaccaccaactatctgcaaaacggtgacaaagcctgggtatcgcaggatcgcctcaccaaacgactgggggcgctttatgccttcgacaatggtctctcgccgtttatcagctattcggaaggcttcgcaccggtatcgccgcagggtacgctgaccgcgaaagacgttaagcccaccaccagtaagcaggtggagggtggggtgaaatatctgctggcggaatatgcaactaccttcaccgcctcggtgtttaacattcgtcagaaaaatgtggtgaccagcgatccgggcttcctcaactaccgacagaccggggaagtggaatcgaaaggcgcggagctttccgctattagtcgtccaacggataacctgacgctgattgctaattatgcctacacccacgccatcaatactgaagatgacaagtaccagggcaaacgaccgacgcaggtccctgagaacgcctttaatctgtggggagatttcaccttttacagcacgccgctgagagggttaacgctgggggctggtgcacgctacaccgggccgatggagatctcgccagccaatgatgcaggcaagctgggcggtacgacgcagtacgatctggcggcatcttaccgcatgggcgaactggcgccatcgctggaggggctgacgctgaaagcgagcgcgcagaacgtcaccaacaaagagacgctcacctgctatgacgcgaccaactgctggataggccgcgaccgcaccttccaggtcggggcgagctacagcttctga

SEQ ID NO: 142841 - DNA, 906 bp, Enterobacter cloacae
atgaaatttaaaaataaagtatatgaagatttggttaaggatttaattaatgatgccttttatatcgagtccagatcaaatagaggtaagatttctacagttagacaatattcagaagttgtcatacggaaattactagacattcctcaaggtacgcaagttacgcttggtgattttgaggtcatcaaggcgttaaaggttgcaagttcaaatgataagcttttaatgaaagccgtaagaaaactgcagaaactcggaaataaatgcactcatacggaaaacctatcacctatttctgattgtgatgtagactctgcaattaacgcattgtttaatttatatgctggcttgtttgtattgtacttcaaaaaatataaatttggttccagtaatgaagttgtaagagccttttctatacttcctccgattattagatgtattgttctcgaaaatctatatgaaaatgacaagagcaatctgttggttattgataagttatgtctagtactgcttaaagcgtatgacaaaaatgatgctttgaattggctaaatcaaagaaaatgtgagttatctagcacgttaccatatacacctgaagctattgctgatattgaagctgttcatggaaaactacaggcggagttagttgtagcaaatgctcctgctaatatgtacatttgttgcttggaacgtatagaagaagtatcctcaattcttgagcagcaagggttgctttacaataactttgagcaagcaaaacaactttatttagatgttggagttctcgatcaggacagttctgagaatacggagttcaatgacataatggagtttgtttaccttgggcgaaaagtagaagaaaacgataagcttaaaaataagcatttatacaatgttacgttttaa

SEQ ID NO: 142842 - DNA, 315 bp, Enterobacter cloacae
atgaagaagcgtattattaccgcactgctcatcacaacagcatccgtccaggcgctggcaacttacccagcaagtcagcccgctcaggccgcagaagtaatggtcagaatgtgccagcaacagcgtaccggcattgagaagaacaaggctatcagtaaagtctacaatactgtgagcgactggcccatagcctcaacgacagaagttgctgcggctatggatgagggctggggttttgcggtaaagaatcgcgggaccaaatgcgaccagatttatcccgtgatgattgacatgcttgtcagaaaaaaggggtga

SEQ ID NO: 142843 - DNA, 519 bp, Enterobacter cloacae
atgaagaaaaccactgccatgttgcttctggcattttcaggttgtgccggggcaaaaacactccccgcagaaaatttgcaagggctgtatgaggcttatgccaccctgaatacctgccaccagtatggttacactggcgatgagtccttaaccgcactggacaaacttatccgcagcaatcgctatcaggataataccggcaatatcatgacattaacgaaggacaatattaactattaccattcccttcaggaccgctttattcttgagcagcaattcaaaagcaaaggaataaaccagagcggtatccggctccagataaaaaccctgtgcgaccagatgaacgccgttgttggtgggaagctgggtgtgaaaacccgtgttatttcaccggatgaccttcccgccagcgcaaaacctgtttttgacaaaccggccactaacagtgctccggaaattccagaagaccgaccgatgacatgggacaacagtccggtccagagtattccgattaagtga

SEQ ID NO: 142844 - DNA, 390 bp, Enterobacter cloacae
atggcgaccactattaccgaagtaacggaatgctttgagtacctttttagttccctttaccggaaagcgtttgtcaaccccctgcgccttaacgaatgcaatgagcgggagctattaccactggtgcgttgctacctactgggcgggtttgctgacagcctctcacctgaggttaggggaaaactaccgggcagtttgtccgggcatggctacattgatttcgtcattgacgatgtggctgtagagttcgccgtccgtgagccgggagctgcccgttcaacactgtcagcctccgtcaacagcacggaggtgaagaaactgatgaagtatgacggcaaagccctgctggtactgttcgatttttctgacacgccctataccgaaaaataa

SEQ ID NO: 142845 - DNA, 489 bp, Enterobacter cloacae
atggcttttaccgcctgcgaccagagcggtctttaccggaccaccggaccggtgtcccgcgaggatattatctgctttgcccatacgctgctctcccgccggtttcgcaatcgccgaaaaattacgtcctctgatgatgttcaccagtggctggcgctgaagctggcagaggacacccgggagagcttcggaatgatactgctctcgcagcagcaccatcttctgggctaccacaccctgttcaccgggacgctgaaccagaccatggtgtacccccgcgaaattgtcgctctggcactgacgcatcatgcagccgcagtgatactggtccataaccacccaagcggtgagcctgagccgagccacgccgataaacacattacccaaaaaattaccgatgcgctttcactccttgatatccgcgtcgtggaccaccttattgtgggtggtgatgatgcatactcttttgcagagcatggcctgctttga

SEQ ID NO: 142846 - DNA, 432 bp, Enterobacter cloacae
atgaacatcaatgccgttattcaaccggcaggctttgtgctgcctgtcagtctgcagctgttcgacatgttgatggcagaggcgggcgaaatacctgccagtaaacatcgcgtcaccgccgttacgctcaacttccgggacccggactacagcgtggagcggggcggttatcacccggtggaaatccggctagttcaccagggggacgagtggtgtctggactacgccaccgattttggctatgtcggcaacgtttatcccgagcttgagaaaatcatcgatatcagctggtcgcagggctatgtctggcactgccgtacaggggatttgtccccgtctgaggcccgggcgctatacaccctgtgggagcgcaacttcctgagctatcacgccagcggggtctacaccacccgcgtgatgtgggaaagctga

SEQ ID NO: 142847 - DNA, 366 bp, Enterobacter cloacae
atgacccattcaacacatacaccgtcgccagcaaccccctggtgggggctctggcgtgatgtgacgccgctgtttggtgcacgactggtacaggaaggccacaacctacattttctggccgaccgggccgggtttagcggtgtgttcagcgaaagcgatgcacgccatctggaccaggcctttccactgttcatgaagcagatggaaggcatgctgttgtctggtgagctggagccgcgcagggcgaagggcatcacactgcaggcgaaggaactgacttgtgaggctgatacgcttggctcctgcggctatgtatatatcgccatttatcccactcctgtcccggttccagcaacacaggactga

SEQ ID NO: 142848 - DNA, 618 bp, Enterobacter cloacae
atgaaaaaacaacctgtctcaccgacacgggtggcatcgtgctgcctgtcgcctgctgaagtctggcgcaccctgctgactcacctgttggcacagcactacgggcttaccctcagcgatacgccgtttggcgaggaagacaccattcaggcgcatattgaagccggtgttcccatggcggaggccctgaatgctgtcgttgagatgtatgatctggtacgcacagaccgggacaatgcgggctttatccttggctccccattgattactactattgatgttctccgggcgcgaaaagccaccgggcttctgaatcggggaacgtataaggccgtcagccatatcacgcaggggcgcaggtctgccccggaccgcgccacaatcgctgaacccgaagcgccgttgccgttgctgccatcggacacgttcacccgacaggatgcggagcgtgttgtgtcagcgtatgaccgtgtcgctattgaggatgaccagcatacccactttcggctggcaatacgcgatgctgaaggtcagcttatctggcgggtctggaactttgagcccggagccgggcagggtcttaaccactatctgcaacgctatggcgtgaaaaaatga

SEQ ID NO: 142849 - DNA, 948 bp, Enterobacter cloacae
atgacctcgaaccacaagggcaggcgcgcggaaactgtacgcctgcaaaacgtctccaccaccaatccggcacagctttggctggcaggtctggcgcctgccgggcgcaaggggatgcaaagccagcttcggcgctgtgccggtatcctgcttccgggctcggatatcgacagttacccctggcagatgctgaactacacgggggtgatgctggtgcgctcggcgctgctgaatgagggctatgctgttgctaccgtgaacatggcgctgtcggcgctgaagtcagttgccggagtggccttcagtatggggatactggatgctgatatgctggagcggatacgcaacgtcaggcgggtcagtggtgacggttgtcggcaggggcgtgcgctggcccgccatgaaatccggtcaatgctgacggcggcagcgacgtattcctccgtgcgctgtcagcgcgagcgggccattttattgcttctgtgtggtgccgggctgcgtgcgggtgagctggttgcccttaatgttgaggatattgacgtctccacggggatcgtttgggtcagggaggggaaagggcgcaaaagtcgtgatattcaccttgccgtaaaggtttggacacagctgcggcgctggctaaagtgccggggagggcatgaggggccgttattcagtcgtatcagcttggcagaccggcttgggccacgtaggcttaccactaccggattgacggggctgttggcacagctacgccaggccgctggcgtggactattttaccccgcacgacctcagacgaacgttcattacacaactattggaacagggaaccgacctcaacgtggtacgccaactggcaggtcatgccgatatcgccacaaccacccgctatgactacaggggccgaggtatgctggacagggcctcccgagcgttctgttgctggtaa

SEQ ID NO: 142850 - DNA, 495 bp, Enterobacter cloacae
atggcagggaaaaaacagatgagccgccagcagcggtcgacaaagatgcggacagatgcgggactgacccaggtgaaagtttatcttgacgaaaccacactggaattactggcgttacttcaggaaaacttgtcagaaggtaaaatgaagggcgatgaaatcaatatgttccgcagtatagctgtcactgccggtatccacagtcaggcagaagcatgcttaggggaaaaagtggtatcagacattgtggctaaaaatctgggcactgagtgcagagccagcgaagcgacagacaatcctcataagttctttctccggacgatgattaacaagctttacgagaaaggtcagcgtaatacacatagacgcagacttgcagaggttgctgaaatcatgaatgaaagcagctacagagcgccgaataggaagaaaggggaatggagtgaaaatgatattagtcagtatgtaaataatgacatacaactggaaaaatga

SEQ ID NO: 142851 - DNA, 195 bp, Enterobacter cloacae
atgaacgagatgaaactggtgaaaattcgggtcgtactggagcgctgtgcggtgagccgcgccacgttgtaccggatgattgagaaaggcacttttccacgccctaaatccctgactggagggcgagcggtagcctggctggaaagtgacgtcagtgaatggattgcttcccgcgtcactacaggaggctgctga

SEQ ID NO: 142852 - DNA, 876 bp, Enterobacter cloacae
atgtttggtgcaaaagaccgcattgcgcgatcagtatacgtatcgctgacagaagaagagcgccaactggaaaagctggctctcaccattccagggtttgaaacccgggatcggatggagaaagagcgccagtaccgtataagagcaatacaaaaagctgtccagcaggacaggaatgataacgagaatgaaagcaaagaagtcagaaaagcacacaaaaagtggcgaggaaaggctcttcggctaaagagggaacttaaagcctgtatgttagataagccatgtggcagtgctgcgtgcccacagtgcttccgcctgcacaggttacgtaaactggctgaactggccccgctgcgggggtgtatgagcgcgtacagagtggttacgctggtgtattacgatgccatgctggaagaagagcagatcagttgctgggaccataagaaattccgggaacgggtctacaagatggtaaaaagagccggatttacggacaaaatagtggggggctatgagctggattttcacaccgatattcagcgctggatgcctcatttgcatctgctgatgccaagagagcctggcgcgctcaaaacgctaaggaaggcgatgaaaagagacaaaaatatacgggccagagcagggataattagtcgaccaatgaaaagccaaaaactaagggattttgatgcgcaggtaacttactgtttcaaggggatgtggcaggaagtaagaccctaccctgatgaggttggcaaaaggaggacccgcaagcacaggctgccacctgttctactggcacgggcgctatgtaagcaggatgagatggggtttactggactgacatttacttctggggtgagaacccgtaagtag

SEQ ID NO: 142853 - DNA, 1923 bp, Enterobacter cloacae
atgactaatttttcttcaatggcggctttcttatggtccgtcgctgacttactacgtggtgatttcaagcaatctcagtatggcagagtgattctgccatttaccgttcttcgtcgtcttgagtgcgtgcttgcgcctaccaaacaggctgtacttgataagttacctgtggttgaaaagcttgatgagaacgctgccgatgcaattcttcgccacgcttccgggcaacacttttacaatacttcgccgttggacctcagtaagttgggggaaacacagccacgacttaatcttgaacgttacattcgctcattcagctatgacgcgcgtgagatcttcgaacactttaaattctatgagtttatacagcagcttgatgatgccaatttactctacaaagtagccaaaaaatttgccgaggctgatttgagcccttcttctgtcagtaaccacgatatggggctgatatttgaggacttgatccgccggtttgcagaaagttctaacgaaacggcgggtgagcactttacgccacgggatatcgtgcgactgacaacctctctggtgtttgcggacgacgatgcagcgttgactaaaccgggactgatccgccgcatctacgatcctactgccgggacaggcggcttcctttccagtggtatggaatacctgcatggaataaatcccagtgccagccttcgggcctatggtcaggagctaaacccagagtcttacgctatctgtaaagcggacatgctgatcaagggacaagatatcagcaatatcaagctgggtaataccctctctgacgatcagctctggaatgagcgttttgattactgcctgtccaacccaccgtttggcgttgactggaaaaagattgataccgttatccgcaaagaacataaaaagggctacgatgggcgttttggacccggtttgccgagagtatccgatggttctttgctgttcttgctgcacctgattagtaagatgaacgatgacagccgtatcgggatcattcttaatggttcgccactctttaccggaggtgcgggcagtggtgaaagcgagatccgccgctttgtgctggaacaggatctgctggatgctattgtcgcgttgccgaccgatatgttctacaacaccgggattgcgacttacatctgggtactcagcaatcataaaccgaaagaacgtaagggcaaggtgctgctgattaatgccacggagcaatttgcgccgatgcggaaatctcttggtagtaagcgtaaagagttaacggaagcgcagattgacgagattgtgaatcagtatacgcgctatcaaccttcggctaatgttaagctgtttaaaacctctgattttggctatcgccgtattacggtggaaagaccgcttaagctggcattttatccacgcgatcttgatcgtcgcgtagcgttgctggcggataaagactggtccaaatatggtgatttagagttattagccgctctggatgcaatggatgataaatatttaagccgggaaaaattcaaaaaagcattgccgaaagtttctgctgctcagtttaagctgttgataaaacacttaagtgaaacagatgagaatgctgaagtttgtaaagctaagggtaagccagaacctgacgccagtttgcgtgattatgaaaatgtgccgttgagtgaatctgttgaaacgtatttcacacgcgaggtattaccctatatacctgatgcgtggatcgatatcgaaaaaaccgatccttatgatggacaggtcggtttagtgggttatgaaattccttttaaccgctatttttatcagtatcagtcgccacgttccttggaagagattgatcgcgacttggatgaagtgagcagagaaattatggtcttgctggcggaggtccattcgtga

SEQ ID NO: 142854 - DNA, 1338 bp, Enterobacter cloacae
gtgaagtacagagcatattcagaatataaagactcttgtgtggaatggcttggagagatccctgctagatggacacttgagaaattcaaatacttgttccaagtaagtaatgaaaaaaatggtgtggagcctgtagggcagatgttatctgtatccggttataggggagtagaagtaaaagagtacaatgatgaggcaaagaaaagaacgcttgaagaagtagcagaataccgtgttgtgagaaaagggcagttagttgttaatacaatgtggcttaactattctggcctaggtgtttccgattatgaaggatatgttagtcctgcatatagggcatataggtttacaaaaaatgttaataagaaatatatacattatttgttgcgttcaaatccatacgtcatggcttatacttcgcaaatgcaaggtataagaccaaattcattacaaattaaaacagatgattttcaatcattgcctgtacttttgccttcagtagttgagcaggagtgtattgcgaaatttttagattacgaattggataagattgacctattaatcgacaaacaagttcgactcattgaacttctgaaagaaaaacggcaagcggtgatttctgatgtcgtaagaagagggttaaatcatcgtgttaagctcaaagtttcaggaaatgagtggttaggtgaagtgcctgagcactggggggtatcccagataggttggctttgtaaagttggtaatggcagtactcctaatagagataatcaatcctactggctttcaggtgattacccatggcttaatagctctaaagtaaacgatgatattgttactaatgcagagcaatttgtcacttcaaaagcattgttggagtgcagtttacctttagtaaaaaaaggtagcgtcatcattgcaattacaggggaagggaaaacgagaggtacctccgcgttattgatgatggatgccactattaatcagcatattgcttatatgactcctttgtcaaaaaataaaatattaccagaatatcttcatttatggcttcaaagtaaatatgatcagattcgttttgaatcatctggtgggggcagtacaaaggccgcaataacttgttctgacgtgaaaaaatatattatcccgctaccgccattaaatgagcagaaagttattgttgctgatgttgaagaaaaaaaacgatgtttcaatacccttgtgatgcattgtgaacagcaaatatctttgctaaaggagcgtcgttccgccctaatttccgctgccgtaacaggtaaaatcgatgtacgcaactggcaacccgctgctaaggacgctgcatga

SEQ ID NO: 142855 - DNA, 918 bp, Enterobacter cloacae
atgagtgatatccagctcttttgttatggtaaaaacggtgtctctgaacttccgggaaaatcagcagccattgaaaaagatcttcagaaactgatcgagtctcatatggaggctttccttggggtacgttttttggcgacagaatacagcacaggcaagacccataaggggcgcattgactcattggggctggatgaaaacaacacgccagtgattatcgaatataaacgtcagagtaacgagaacgtcattaatcaggggttgttctatctggactggctattagatcatcaggccgagttccgttggctggtgatggataagtttggcaaacaggttgctgacgatatcgattggtccaatgcccgtgtgatttgcattgcggcagattttaccaaatatgacgagcatgccgttgcgcagattaaccgcaatatcaatcttatccgctataagctgtttaaccctgatctcctgatgtttgagctggtgaatgctgctaccgagactcacaagcctcagcctgttgcaatagagaatcaggtgccgaagcagaagaaaaatgctcaacgctatcgtctggataagtcttcccctgaactggttgcgctttatcagaatatctgtgattttgctgatagcttgggtgatgaggttcagcgcaaagagttactgctttatactgcgtttcagaagataaagaattttctaagcgtcgtgatatggcccacagccaaagaaccacacgtcaagctttacctgaaactaaaaccggagcaggtgatcatctctgatatcgtcagagatgttactaatttgggacactggggaaccggtgatattgaggtggttgtccataatcaggcagatttagcaaaagctaagttactgattgagcaagcgtatcaagagaactga

SEQ ID NO: 142856 - DNA, 3105 bp, Enterobacter cloacae
atggtatctaaatccgcagaactattattccagaatcacattattgagcaactatcatccagtggttggttatttggaagctcatccggctatgatcgtgaaagggcgatttatccagaagatgcgcttgcttatgtacaggaaacccagccggaagtctgggacaagttttgcggaatttatccaaaagatacagatgtacattttctcaacgcggttgagagacatctttcggctaaaggaaccttgtggacgctgagacataccttagcggatcgcggtgctcgttttcagctttgcacctttaaacccgatcatgaccttaatccagacttgctggttcgctattgcgctaaccgtttacgagtagtacctgaactgatttattcgcccaatggttatgatggccgcattgatttgacattgttcctgaatgggttgcctgtcgccacacttgaactgaaatcggcgtttaaacaatcgcttgatgcggcaaaactacagtatatcaatgaccgccagccaaaaaccggaaataaaccagaaccactgttgaccttcaaacgcggtgcgctggtccattttgcggtcaatcagtatgaggtggcgatgaccaccaaactggatggaaagaaaacctttttcctgccttttaaccggggaaccgcagaaggcggggcgggtaacgatcaaccattagaggggtatgcgacagcctatctatggcaggaaatcctgcaaccggataactggctgcgtattttggggcgctacttacatctggagcaaaagcgcgttgatgatgcgcttggtcatcaggaaatcaaggaaaccctgattttcccgcgttaccaccaatgggtcgctgttcagtcattgctgaatgccgttcgcgtggagggaacagggcaaaagtaccttattcagcatagcgctggttccggtaaatccaactcaatagcttggttatcccatcagttagcgtcattgtaccgcccggatggtaacaagttttttaattcggtaatcgttattacagaccgcactgtgttggatggtcaattgcaggacacgatttaccagtttgaacatcaggatggtgtggtttgtaaaatcagccgtgagtcgggtagtaagtcttcgcaactaaccgaggctttatcgtctggtacggcaattatcatcgtgacgatccagactttcccgcatgtgctcaaagctattcaggaaagtactggtctgaaaggacgaagctttgctgttatcgctgatgaagcacactcaagtcagacgggaacgactgctcgacagcttcgcgaagtgctgatggcggaaaaaatagatgaagaagaaatggatggtcaggatgttatcaatgcgacgcttgaggctcgcagaggttcctctgatataagctattttgcctttactgccacgcctaaagccaagacgttagagctgtttggtagaccgcctcatcccgaaatgcctttggcgaatgacaataaaccgaagccatttcatctgtattcaatgcgacaggcgatcgaagaagagtttattctggatgttctgaaaaattacaccagctatgggcaggcttatcgtctggcacatgatgccgaagataaagaagtcgaccgcaaaaaagccaaaacgcagttgagcaagtgggttcgcttacaccctcacaatattgcccagaaatcacaggtcatcattgaacatttccgtgagcatgttgctcatttactaaatcacgaagcgaaagcgatggtagtaaccagcagtcgcctcgaagcagtaaaatataagcaggcgtttgatagctatgtgcgagaaaaaggctataaacgtttaacagcaatggtggcgttctcaggtgaagttgtcgatgagggcgaaagctacacggaaaactcgatgaaccctggcctgcaaggtcgggatatgcgtaaagcattcgatactgatgattatcaggtgatgctggtcgctaataaattccagacaggctttgaccagcccaaactggtcgccatgtacgttgataaaaaactcaagggcgtggattgtattcagacactatcccgtcttaatcgtacgtatccggggaaaagcagcacatttgttcttgattttgttaatgatcctcaggatattctggctgattttaaagagtattatcagaatgccgaactggtgcaggtatccgatcccaaccttgtttatgccattttccataagctgaatgaacagcatatatggcaatggcatgaagtgattaatttttctgatgcttattttgacccgaaacgtggtcctgaagcgctaacggggtattgtaaaccagcggtagatcgttttactcatcgttaccgctccgcgatggatgtattacgaggggcgttatcgacactcgaagatgcaaagaaaagcggcgatgaaacttggcgagtaaactgcgaacgtagtgttaagcaagctcgtgaagcgaaggacgtgctggatacgttcaaaaaagatatgaatagctttatccgtttttacgagtttgcttcgcaaattgtcgatctggcagatgaagaactggaacgcttaaatgtctttgctcgccacttgctgccgttgttaagagaggagcggcttgatgacgatcttgatatcagtcaggtacagctaacacactataaactgtgggaaaagcgcacccaggatctgaaattacaagaagggggagaaggacttaaagggatcaccagcgtcggtggctcaattgctgaaaggccgaaagatctattatcgcacattctggaacagctaaatgagttgtttggcgaagaaacgactgatgctgacaagctggtatggcttgatggcgtggcggctaaagtttccgaaaatgattctgtgatggatcaacttcgccataacgatatcgagcaaatcatgcttggggattatcctcaggccgtacagaatgctgtcatcgaaagcatgggggcgtttgagaaacattcagttgcttacctgtctgataaggatgttgcccgtttagccaatcgtttcatacttgatgtattacttaaagggcttggccgatga

SEQ ID NO: 142857 - DNA, 171 bp, Enterobacter cloacae
atgagcaacaacaaaaaaactcaggcaagctatgctaagccgtctcgtgctgacatcgttcgctcagtagcaacatctacggctgttgaaacagggcagtcctccgcgaagatcgaagcttcccttgaagctacacgcaaaaaatttgctcatttacgtcttgcggtttag

SEQ ID NO: 142858 - DNA, 702 bp, Enterobacter cloacae
atgagcgtgccggttcacctggctgacggttctctgtacggcacgctttgcgctgccagcaccgcacagaaacagttcagcgagcgtggcgagcaggtgatcaggctctttgccgggttaattggtcagtacattcagaaagagtcgcttgtgcttcagcttcgtgaagcaaatgcggcgctcattgcccactcttacaccgacgcccttaccggcctgccgaatcgtcgcgccatttttgaaaaccttaccaccctgttctcactggcgcgccatcttaaccgcaacgtcatgattgcctttattgacctcgatgatttcaagcgaatcaatgatcagtacggtcatgaagcgggcgatcggttcctcgttcaggtcggcaatcgactgactcaccagcaaacgcaggacgaaattatcggccggctcggcggcgatgaatttctggttgccagcctgagtcacagcaatgatggcgacgccagcacagaggtcaacgctatcaaaacccgcctcaacggccgtatcgcgggtgaatatgggttaggtaatgtcactattctctatcccggtgcaagctatggcgtcgttattgttgatcctcactgcacagatgaagatagtgccctgcgcaccgcagacctcgcgatgtatcaggataaaaaaggaaaaaacaaaacaggctttgtcgcgttagattaa

SEQ ID NO: 142859 - DNA, 558 bp, Enterobacter cloacae
atgaccatccacgataaaaaaaaggcggatcaaaaagaagaaaaggaaggttcgctgcggttactgacttcaggagagattgttctggcgaagtcggtctacaaatcgacgatcccttaccataaggtttggatccattatgacagttatctgccgtttggcctccagaataaaaatacggcgatgtccccgaacggtgagatttattttcgtcactggtacagggatgattacgcgtcgactttaccttttctgcaacatctttttattcacgaaatggcacatgtctggcagcgtgaaaaaggaatgaacatcatcgggcgggggctgttcagctgggcggtgagttaccgttatgtcctggatggacgtctgttaagtgaatatcccatggaacagcaggcacaaattattgctgaccattttacgttgcaggttgaaggttacgagacatggtgtgatctgagaaaagcaggtgatgtcacgcttgacggcaacatttctgagcccgttatccaccacctgtataccagcacgctgcgggggttcccatggtga

SEQ ID NO: 142860 - DNA, 543 bp, Enterobacter cloacae
atggtgaaagcaatgacctttcgccacaggcatgcttttttgctcagcctgacggtactgaccggttgccccggccacggggattacattcggcctgatgaaataacaacggtcagcacaagaggcgacaatgtgtgtttcagcgttccggagccagaggactaccagccagtcagtatttccatcgttccaagaggaacccggttcagggagcggaaaattacgtttgatcccacacttcgtattgtgaacggccagctatgtatcccaccttcatttcatcattttcctgataaaggccagttcattgtcagatacgttctgcactctgagcgcgataaggatacgccgcgcaaaatggtcgccggggtagagattgtcggcgagtgtattttcgacattccgcttaatgacatggaggcagtaagaccgtacggcgagctggacaacagtgaatttcagcctgatcaaggcgaacgtgagggttcctgcagatcgccttttagaaccgttcatggagtgaaaaattatgaatctcactga

SEQ ID NO: 142861 - DNA, 2523 bp, Enterobacter cloacae
atgaatctcactgactctttgcaaaacgttttaaccggggcgggaaccctgaaccgctacaggctggatattccttcctgtccttctccacttgatgtggaagacttcagcggtattgaaggcctgagcagaatttacaggtatgacatcatttttacgagtacggacaaacatcttgatgctgcctggtttttgtgtaaacccgcaacccttacgatggggggcgggttactggagagcccgactgaacagaaaaaagtgcacggtgtcattactcatttcagacgcatttccggctctgccgaccagacacagtacctgaacacgcttaagccattcctgtttttgctggataagcagcaccgcagccaccgtttctttgtcaataagtcagtacccgaagtagtcgaacaggtgttacaggagcataacctgcatggctgggaatatgaatttaacctcaagcagagctacccgaagcgcgagcagataaaccagtatcaggaaagtgacctggcgtttattcagcgcctgctggcggaggtggggatattttactggtttaccctccaggaagacgcgcagacagaagtggtgcattttgccgatgcgcagcgggcgctggtatttggtaaaaccctgccagtcaacagtccgtccgggatgagcgacagcggggctgactcggtgtggggcctgaacatcacccataacgtggtggaagccagcgtcaccacgaaagattacaaccaccgtgacgcacagagcatactgcagtcggcaccggcggatatgacccggggagacggtgaaggggtgaactatggtgatgtctaccattaccggctgcgccatctggcgcgcggcgacaaaatagaccccacggcagaaacggctaacttttacgcccgcctggaccacgagcgttttctggcaaaccagacgcaaatcacaggctacagcactgcagcgtggctggcacctgctcaggtgctgaatattaccgacggcctgccacccaccctgcctgctgtcttacaggaaccggtgctggttatcagcacgcattttactgccagtcgcaagagcgcccttctggtggatattttgggcgtgccgtacagcgaaacggtgtgctggcgtccggcaccgctgccgcgcccgaaggtaaccgggacgatgacggctcgcgtaaccagcgcaaaagccaacgatatctacgcctggcaggatgcatccggactgtaccgggtgaaatttgacgccgatcgtgacgagaaaggacagggtcaggagagcatgccggtacgtctcgccaaaccctacggcggcgacgtgtacggttttcacttcccgctcattcagggcacggaagtggcgatagcattccatgaaggcgaccccgaccggccctatatcgcccatgcgctgcatgactcgcggcatgttgaccatgtgacggagaagaacagcacccggaatgtgatccgcacgccgacgaataacaagctgcggatggaagataaacggggtgaagagcatatcaagctcagcacggagtacggcggcaagacgcagctgaacctggggcacaatgtggatgccagccgtgaattgcggggggaaggatttgaactacgcacggataaatggggggcgatacgtggtggcaagggaatttttattagtggggatgttcaaccaagtgcccagggcaaaactcttgatatgaacgcggctattgcgcaattacaaagtgctttagaattagtcactgcattagcgcaaagtgtcgctgtgtctggtgctcttgatgccgatcgttcgtcacaaaaaaaacttagtctggccctgaatcagttaaaagaagcgggaatactggcatcagcgccagcaggaatcgcattaacaacacccagaaatattcaactgtcgtccgggcacacattgacggctacggctggtgaaaatattgatatgagcattttcaaaaggttgacggttgcagcaggtgaagctataagcttgtttgcgcaaaagatgggcattaaaatatttgcagcaagaggtattgtagatatacaagcgcaaacagatgcaatgcgccttcagtctgataaaacgatgactctcaatagtgttaatagtgaaataatattgaacgctgcacagggtataacattaaccagtaccggcggggcatatataaaaataaaaaatggttctgtagaaattggtgctccagggaaaatcgatcttaaaagcgccaatattttatggggaggggtatcttcactcgaaaaggcgttacaacccatgatggtagaggacccgcaattcaaataccccatgaatgaacgttttcaggtattagataaaaataccgatcaacctaaagcattaataccatatcgcatagaaactgcggatggcgtgacgcttagaggtatgactgacgaaaatggttatacacaatgccattacggagtagatcctaaatccattaaattgttttttgagtaa

SEQ ID NO: 142862 - DNA, 2235 bp, Enterobacter cloacae
atgagtgaacatgacactccggttgctgaatggacactgaataaaaaagaaggaagttcagttgtagcacatcacgaatcaacattgatttattttagtaccgaaaatgaagagctaattcttcttaacgagaaaatagcatcagctctggatgatcacgccagaaatcttatgatgctggtggatgaagttcataaagcaaatgaaatatattcggcggcaattgaagcctatggaaaagttctttcgcatcccgacagagccgctgaactcacttcgcttgaagctaaggtatcagaagcagaacaaaaattagcagataagaaaaaggatttacagaaaacgctaggagattttgaatctaaaggggctggttataaagaggtaacagaactgataccgataaaaactaaaaaaaatcagggagggcgtaacgggattggtggtcgttatgtatatgtaaaaaaatcgtatattgataattttggaactggagatatacatcgggtaagtttacgaggacgagatcgtactactggaaaagaaagtatatttgaacgtgacaataatggcaatattaaaagtataaatacgcaaaaaattaaagaacagttaaaaaaactagaatctaaaagcaaaggaataaaattttttgaagtcaaagatattggtaaaatagacaagacattgtgtgactgggcagattcctggaacagcagtgtggtgttggaaaaggaaattggtcagaatattgatgtatctgctggtgcacaatttttgcgttttacatccaatactggtgcgtcaggagagtgggacccttataaaggaaaattaacaattaaaggtgaacatagcaccgtcctttctgtagcatcgggtacagccagtgctaaattttacatacccgatcgcattggctggtctttgaaaatgctgccacctcctggaaaaactaaagttctcaatatgggaatgtggcgtatgtatcttgagacgtcacttatcggctttgctggagcatcggcccaggttgaagctcaacttcaggttactaccattgggacaaagcaggttataatgggagatcgcgaagggcgcctgcctcgtttcagagatcgacactctccaacaggtgccgcgtttcatcaggcaagagaaaaaaatgaagaaggcgcgtctgcaagcgcagagatatttgccggcgcgcgtgctgaattcaagatgaaagggggcgttcaatggttacaacctctcgagttaacggtgcaccagggaaaaaaaggcgatgatgcgaaagaagctgcaaaatttgtcgacttttgctcaatttcagaagcatttgttggaatggttggggctggtgcagggggaaaatttcagtgcgatttcattaatggacgcttctgtttcagtatcgctgccagtctgtgtttaggtgcaggcgccaaaggttcttttgaagcagaagttgactacgacaaactttacgattttgggtactggctggtttatcaattatatggccttgattattcttttttggaagtaatttccgagcgtgcatttatttcttttactaagatcagcattttgcttctcactgaaatgaaaagtgaaattgaaaatcaattaaaaaacatgaaaattactattagagatattaatgaagccttcgaagcgatagtcagtttttttgaagatggaatgaaaggttctcaaaaaaggaatgatattgcatcaaaaattttggctgatccgaaagttttatttaaaatgacgccggaagcaaaaggtattctaatttatttgttaactcgccatggttttaatgaccactttgacctgaataatcgtgttatgttggatatttatcacgatcgcaaagaagcaatattaactatcttagatagtatccaaacacaacgtgaatggttccaggtatttagccattgtaacgctgatgggagtgatttggccgctgggaactcagcattaaaatatatggttgcccaaagaaaaatgaatgagctgaaggagtttttgcaagaaggtctcaataaagataatgagatggataagatctatcggaggttaaaggttacgccttcctggggatacgcgctcgctatgaacaatacggaattttacaaactatacagaatagataatgaattctatcccaaatccagaatatttagtcctgtaagtgacaacaatattattgaagtttaa

SEQ ID NO: 142863 - DNA, 966 bp, Enterobacter cloacae
atgaaaaaattagtgaaaatagggttaatgatgctgacagttgcaccactgatgtcatgcgaccagcagaattcctcggtcatgccagcgaaaaagaacagtaatgacttgtcaaaatttgttaatgagattaaggccgatctaatctttgtacagggcggggaattccttatgggagattatggtgaacaatacggaccagaaggtttaccctacgatggtaaacaagacagtaatccgttacataaagttgaactcaccgcttattcaatcagtaagttcaaaaccagtaataaacagtatcagttatatttgacctacaacaatcagtataggagaacagtcaataaagaaaaccccggtgcaaaaaaatgggatgaattaagtatgacgccacaaactccggcgcatgtagactggaatgaggctcaacaatactgtcagtggttagcgacaataacaaatttacctttttcattaccaaccgaagctcaatgggaatatgcggcacgtagcaggggaaagtttgttatagctccaactaatgatggaactatacaaattgataaaagcggggggaatgtagcttcggaaaaagatagtaaggaatatgcaaaaaaaatgggaacatcattgggggtatattctccgttgcctggcaatctctttccaccgaaccctttaggtatttatgatatggccggtaacggctgggaatggatgaaagattggtacgacccggattattacaaacactcaccactgaaagacccacaggggccagataatcctgtctataaagattacaaaggaaattatacaaaagttgttcgctcccaggatttttccggccccagacgaggccttaccataacccggtatttctcagacccaaaagacagtggccacttgccgagcgacaaaacggttcgttgcgtagtcaacagcccgaaaccggtcagataa

SEQ ID NO: 142864 - DNA, 969 bp, Enterobacter cloacae
atgaggattttatacagaacggggggggttctgattaccgttttgtcactaatctcttgcgaccagcaaaagcagttggtgccacactccccaaaaagcagcgttgaactctctaaatttgtaggtgagattaaggacgagctaatctttgtacagggtggtgaatttctgatgggagattatggcgaaaaatacggcccggaacatttaccctatgatgcaaatcaacatagtaaaccattacataaagtcgagctgacaagttattcgataagtaagtttaaaaccagtaacaaacagtaccagttttatttggcttataataatttagctggaagaaatgttgatttgaaaaccagaaatggacagcgctggcgggaaaaaaatatgacacccgatacacctgctcatgtcgactggtatgaggcggaaaaatattgtcgctggctgtctactattactgagttacctttctcattaccaacagaagcgcaatgggaatatgcagcgcgtagtcgtggacagtttgttattgctcctaccgatgatggaactataaatatcaaagaacgtacgggaattaacatcactacttcggatgatcgtgaaaagttcgcaatagaacaaggcacaactttaggtatttcgtctcccatgccgagaaattctcgaccaccaaaccccttaggtatatatgacatggccggtaatggatgggagtgggtaaaggactggtatgatcctgattattataaatactcaccagtaaaagaccctcagggccctgaaaaaccagtgtttaaagatagtaacggtaattacacaaaagttatccgctcacaggatttctccggaccaagacgcggcgcaacaatattccgcttcgactcagaccctgctaatgagggatatctcccaggcgacaaagcggttcgttgcgttgtcaacagcccgaaaccggtcagataa

SEQ ID NO: 142865 - DNA, 1185 bp, Enterobacter cloacae
atgcctgttgatctaaaaaaaatcccagcagaagaacctttgccagttgctccggataaattccgttggctgcttacgattgttctgtgtgtgattgctggtgcggtagtagtgctggctctatggcctaagcacctttctacgcggtctgaatggttttggttttgtacgttgatgctgcctttatccgttggaattatggggtatatcatccggctgcgccgctatgaaaatgaacgagatcgagtgctatggtggaaccacttatatcaaaaacaatatgaagaaaaaattttattgggacagaaggccgtgggtgtgcttggaatgagttacgtcacaccagttgccagaaataaacttgctgtcgcgcttttacaaggcgggagtggacttcagacgcactattcaccagccattcagtcgacgttaacaacggcatcagtaatttttccatcagtaaccttattcactgaagcaaattaccagactcgactggaatcaatattggcaagcgtcatcgggcaattgcacgctgaactggttcagtttactggtaacctgttcgttcgtattcatcatgatggtgtgctgaacaatgagcacatcctcaccatctggcgaaagattttcccagcgtcatatgctgtcaatgatattactgtcagtactgataatagtgggctgatgtggcttgatggctggctggacaggagggacgaggcgcttgttctttctgttgaaatcaatttatttctgcaagcgcgtgaccaagaggcagagtccgtatcagcgctgctgctggcctctccggcatggctaacttgttatcgtgtaatgccgcaaatgtggatacatcgcccggtggtgatcgcaaaaacggaagaggctgtagcggatgttgcactttggggaaaaataacatcagcggtgccctggttcttttggcgagctcaggtaaaaggtagcgcactgactggggctcttcttgcaatggataaattggcattcttgtctgaaaaaaaaggagagatggtactggaggatacttttggcagaccgggggcggcggtaggaaatatcacgttaatttgcgcctgcgaacatgcggtgatttcagagcaaacccagtggctgatggttggtgatgaaaccacacaaatggtaattgtccgtccggcttaa

SEQ ID NO: 142866 - DNA, 741 bp, Enterobacter cloacae
atgcatttgattatgaaaataatattgtcggttatatttattcagctttcaggctgtacagcaattctttggggagaaaacagtgttgctgacacaaagataaaagaacgtactttgatttcagacgaggttacagctgcgttttattatgaaaatctttctgcttcggctattcagggaaagacacaggtcagggtagaaatacctcgggatggtgtcgctttcaagggtgaaaaaaacatctatatattaacgacaggggcaaaagagttacttgcgctggataaactatccacacaggtaacgctggttaccggttatgagaaatttgatggtttaaggctaaaactggatatgccgcgtggaaatgaccttgtcatgcatttttccgatgcgcttgcactgcaagttaatgaaagcgacagcaaccttaccactcaggatattgatgaccttaaaaaaacggggttctggaatgagggtggaaggtatgttaagcaaatacgcctggaaggggtaattattcccagagataagaacgacagtctgtttaataatagcgagaaattggttaaaaaacataatgtggaattttattctacagaagactcaactcactttcatcctctgcgactggcaacaaacatcgtgttaacacccttcacggccgttgcggatattgtatttttcccaatatcactgcgtgtattagggctcatcacccaccctcctgtacattaa

SEQ ID NO: 142867 - DNA, 369 bp, Enterobacter cloacae
atggattacagcaagttgactgacaaagatattaataagcttgtggcattcgcattaggctgcaaagaagtcgttcccgatatcttcatgagcgatgatcgacggtacgaattcgacaagccaaagaataaatcaggtaacaaattcttcttcgacccgtgcaacaacccggcggatgcttggccgattatcacagcaaataaaatcagcatttacgcaatgagcgaagcggacaaaagaggcggttggggggctgaggcttttcatcccaacgatgcatatagctttaacgataacccacttcgtgccgcaatgattgccttcctcatgatgcaggagtcagccaatgttcaggataatccagcctaa

SEQ ID NO: 142868 - DNA, 216 bp, Enterobacter cloacae
atggacatcatcgacacagcagcagagattgaagagcttcagcgtaacgctgccctttccgctcaccgagtgaaccgtaacgccgtatcagctgagcgttgtgaagaatgcgacgaacaaattcccgagccgcggcgcgctgccgttcccggctgccagacctgcgccagttgccaggaagagatagagttgaggaataagcaaagggggatgtga

SEQ ID NO: 142869 - DNA, 285 bp, Enterobacter cloacae
atggaagattttaaaggcactaaaggtaattggtcatatagcaaagagaccggaacaattcgcggtgatggtggccttctcgctgagttactgattaatggttccgaagacgataacggcacgctcatggccgcagcgccggatttactggaagcgcttcaatccctgttcgataactataagcagctcgctgattcaggtgatgccggtaactggcgactcgaagatgaacctgccggaaagaaagcgctgcatgccatcaacaaagccctcggtaaggaatga

SEQ ID NO: 142870 - DNA, 744 bp, Enterobacter cloacae
atgctatttcaacgatcaattttatgtctcgcaatctgtgcagcatttcctctgcatgccagcgagactgaaaaaaaagctgtagacacctcatccgaaacagaatcggccattgaatttaatgaccagttccttatcgataatggtggaggtatcaatgtcgatcgttatgcttatggcaacccagttatgccaggtacttaccgtgtaaaagtgaatttgaatggcaattcaaaatccacggtcgagatgacattcattgataacaaaacgccacgtgcctcagcatgtctgactaaactcacgctgacacaggcaggcgttgataccagcatactaggcgatgatgtcaaaaacgacgaaacgtcttgcgtagatatcaaaaaatattatcccggtgcttctgaaaattttgatagtagcaagcaggaaatggatcttaatttcccgcaaatctacgtgcttaagcttccagcagggtatgtcgatccttcattatgggataatggtgttccggccggattactctcatacgatcttaatacctggcacagcgagtcaaacggcaccaattcagataccgcttatgcgggcttgcattatggcctgaacgtggggccgtggcgtttacgttctcgcggcagtctgaactgggacagcgataatggcacacattattccagccaggatatctacctccagcgagacatcacaccacttaacgcactgaatcgccacggataa

SEQ ID NO: 142871 - DNA, 249 bp, Enterobacter cloacae
atggaagactgtcaggaatggtctgagtgtggtgcgttgtttcgccgggtggcggcttcgcttacccggcctacggttcgaggatcttgtaggccgggtaaggcgaagccgccacccggcacaaccccattagctaaacaccacctgcgcccagcgggccagtcctgccgtaacggagccaaagtcatcgccgccggcaatcgggatccccggcagctgttccgccagcgctttcttgatcagcggtga

SEQ ID NO: 142872 - DNA, 222 bp, Enterobacter cloacae
atgattgaccagtctttttcagcgaggaattttagaaggatatacgacctagataggaaaaataaaggtactttagaagttgaacactttcctgacgcttataagatcgggaagaaaataacaatgttaaaaggttttatttattggctcgcaagaagactgagaagtggtcagattagcacggctaaatttgaagaaaagaacaatataataatgaagtga

SEQ ID NO: 142873 - DNA, 2034 bp, Enterobacter cloacae
atggctgagattttccagttcaagccaaaggctattctgaaggcagcagagaaccttgaagcattcatagttaagtgtcgagatgagttgacggtattcggctctaacctcaattgggaagatcctgtttggccaaatataactgtgtttgccaagttgggcgttattactcgcaaaccaaaacctcaagaagtgcaagaccccgtattcatcgattttgccaaagcttatttccgttaccagcagggacatgcgccaacggggactaagaatgaaagtaaagccttgcgagcgattgaggcgtctttacttcaagtaaacgggaatgcaaatattgatggcctgtcaattactgtgcttgatgaagcagctgaattggcaaggcagcactactcagatggttcagcatatagttgcggccgagagattgagcggctggctaagtttgtagttgaaaaccagcttgtagaaaacgttgtacaagattgggtcaatccaattaagcgtgctgaagacaagaacaaaacaggcagagaggcgaagaaaaatagagaagagaaacttccaagtgatattgctctcaatgcgttggcagaaatttttgccaacgacccagttcatgagcgagatatatttacaacatcggtatttgccatgttgatgtcagcaccgtcacgcattactgaggtgttatcattgcctgcagattgcgaggtattcgaaaaggatcgtgaaggtatagaacgctacggctggcgtttttttgcagggaaaggctatgagggtgatatcaaatggataccaaccgtgatggtcgacatcgctaaaatagccgtagctagagttagagtgctctctgaaaatgcccgacagctggctaagtggatagagaaacacccggataaattttaccgccatgctaactgccctgatgttgctgatgatgtgccgttgacgatggttcagacttgtatggcgctcggttttgcacatcactctcaaaaaacgtgcaggtcgtgtcttgatagccggggcttagctaaggaagatggtgtgcatacgctaaatagcctgtggcaacacactatgaagcgtttgcccgaaggcttcccgtggtttgataaagacaaggggattaagtatagcaatgccttgtttgtactgaatgttaatcagttccacggaaaccgaggatgtcttccggttgaattacataagccaatcaataacttttttaacaatgatctgactcctcgcgaggttctgtatggaaaacatgccactatctttgatcgccatggttatcgtactgataatggagaacgggtcaaattgacctcgcatcaggctcgacacctgctcaacaccattgcccagcgtggaggactgtcaaacttggaaattgccaagtggtctggacgggcagacgtgaagcagaatcgaacctacaaccacatgactgaatacgaactggttggcatggctgaacgccttgatcccacaaaagcgctatttgggcctgttggcgaagtggcaaagcatctgcccgtgactatgcaggagttcaataccttagagcatgccgcagtccatgtgacggagtatggctactgtgtgcatgattacaccatgagtccttgtgagaagttccgagattgcgtcaattgtaccgaacaggtttgcatcaaaggcgatgatactgaaaagttggatcgcattaagaaacgtctggagaagtcggagcgactattttttcttgctgacgcagcggtagatagtggcgagataggaactgatcgctggtatcagtatcacaagaaaactgttacccggctttgtgagctagtggatattttagagaatccggacattgaaaatggtgctcagattaagctccggggcaatgatttcagccagcttcgccgtgttgtcgcaaagacgtctattgaggccatcgagcaaaaaggcaaagaaagtgaagaagctgtgatgttagatgatttgacaactttgttagggggtggccttggctaa

SEQ ID NO: 142874 - DNA, 1248 bp, Enterobacter cloacae
atggaaaagaactacagagttacatcatttgtcatggatagtggcgagcgctattgcatggtagtggatcgtgcttctgggcttcccatgtattacccaactttgtttttaacaacccaaatccgcaataaaggcaatgccttctcaacgacgctagctgctgctaacaacctagtcttgttgttacgctttctagatagtcgtggcattaaccttgaacaacggttattgaccaaagatttcttcaagtcacatgagatggacgatctgagagactttgctcagcgcaagcaaggcaggatgccatcaaaggtgctctctaccctttggttggatgatgagttgaccaatatagtggataacggaacacaacattcccgcctaacaacctttgccaactatttacgctggtatgcgatgcatatcttaaagatgcctgagctggatgttgtcgaacagatcaagactatggcgacgcaaataaaggtgcgccgaccgtctaaaaagagcagaaatagtacattgcaagacaggtctttgagtgacgttcaattggatgtgctatttgagacgattaagctcgaatcagagttgaatcctttttcaattgatgtgcagcgccgcaatcggctgatgatcttgcttctgtatcatctgggcatccgaggtggtgaattattgaacatcagaatacaggatatagattttagctctaacaggatccttatcgttaggcgagcagatgaacgagctgattctagaaccaatgagcctaatgctaaaactagagaacggctcataccgttggctgaatccttagcccaagaactgcacaattttatcaccaaagatcgccgcaaagtccaaaatgcaaagaaaaatgactacctgtttgtgacttacaagcgtgggccaactgtcggaaaacctatctccaaggcggcttatcacaaaatattttccttggtcaaagatgtatcgccgcaattgtacgcaataactggacactcgctccgtcatacatggaatcgtaagttttcagaaagaatggatgccatggatgggccggtcagcgaagaacgccaagagcaaatccgtgcgtacttacaaggttggaaagcgggctcaggaaccgcagcgacttacaacaagcgtttcattcagcaaaaaggttttgaggccgccttggcattacaagagggaaacggcactcgcttgccaaagggcataaagattgatgatgaataa

SEQ ID NO: 142875 - DNA, 1113 bp, Enterobacter cloacae
atgttactgaatgcggtagggtttctgtcacgcagtagcatgagaatgttactcgctatttcattgttcatcatgatgcatttcccgtctgtggccttagctgcgcctgtttgtgacgacacgaatattggccacagggagatagtattacctggaggtagtatttcacccggtgttgaccattcttcgtttgtcccagtatatacaggtggtttcctttcgattaatctagctaactattataattgtcacgtaactagtggagactcttcaagttatgatatgtttgtttttcttgaaccattaaattcatatggtaactcttactcttttaattcgggggcgatgaggtattacagtgtcgttgcgatgaatgctccggcatttggggtcggattatctactgcacttgcttcaccgccaggcatggcggttaatacagtagataaggtatggtttgactcaagctaccaaatacatggcagttataaaggtgcatatattatatcattggttaacggttccctcttacagccaggagttttatcggggagtgacctacccacttttggcatatacggtatgatatttaagagtgatggtaccccctatgacggaaagaaaataacgatggggtctgtatcttttagcggctcagtgaatgttattccgtttacatgccagacacctgatgtggtcgtgccgatgggaaaatataaaacgacagatttcaccggtgtgggaagtaccagtcagtgggtggatttcaatattgaattaggtaactgcccgggtaattacccagggtattatacatataaaaaccaaatgagtgtattaattaatcccgtttatggcaatccgacccctgattcattcagtctcaaatcaggtactggcagcgcaacggggatagatatgcaggtcagaaagcaaaatgatagcagcatgataacaatgggaacaggttttgaccctctgggccccgtaaccgggaatacgggagtgacgcaattacggatccctctgcaggccagatatatacagtcaggcgggcaggtgactcctggtttggcggagtcagcgctaacgttcacaataaattattattag

SEQ ID NO: 142876 - DNA, 177 bp, Enterobacter cloacae
gtggttcgctatcacaatgagtgggccgtgttcggggatttgttcgaggtctcgggcggaaatggtgcagagaatatcaaggtgttccagaacctgctctaccatatccagccctttcaggtgacggtggctggcggcaaactgctgaaattcgtcttcgtggagcagtctttttaa

SEQ ID NO: 142877 - DNA, 2775 bp, Enterobacter cloacae
atgcaaacatggaaaaagaaactggttgtatcacaacttgcattagcctgcacactggctatcgcttctcaggccaatgccaaagatatatccggcacgacatataatacttttggatatgacaatactgcgtccacgccctggtattatggttatgctgactgggattattcagatgccacacatgatggtgacatttatccagtcatcaataaatcaaccgtaaacggagttatttcgacatactatctggatgatggtgtcaatggccgtgcgaacgcgttgagtatttctaacagcaccattaacggcatgatcacgtcagagtgtatgaccacgacgtgtgcagaaggcgtggatactgacggcactacgcatacccagtacgatcgttttagcctgactgttgataactccaccatcaacgatacctacgagcattatgcgtatgatgtcgttaatggcgataccactgaaacgcattatctggacacctatggtctgggtaacgccatcaccctggatgttgagtctgatatcgttattcagaacaattcccacatcgcgggcatcacgctgacgcagggttatcaggagcttgataacacgccatacgacggtgttgaaggcgttgctaacagcagcaatatctttaccgatacgctggtggtgaaagactctgtgctgacctctggcgcatacagcgatctgggcaccagcggcttctacggtcaaacggcgaagccgagcgactacggtgaaaccaacgccacggctgcggatgatgcggcgctgatcgttgctgccagtgcgtctgataacgccatgcagaccaccgctaccttcgatcactctaccgttacgggtgacattcttttctccagcacctttgataacaacttctacgagaatggcgatccggcaacggataccacagaagatggcgtctataacccaaccaccaacggctgggatggtaccgataaactggatgtcacgctgaccaacggcagtaagtgggtgggtgcagcgcagtccagcgttgaagctatcggcactgcgcagatgtatggccagggctacagcaacgtagactggcacgcattgtccccgaatagcatctggcctgattctacctttgacagcaacggtcacgttgccggtgaagaggtgtatcagagcggcctgttcaacgtggcgctggataacggttccgagtgggatacccgcaagatctccaacatcgatgcactgacggtgaacaaccagtctcaggtcaatgttgaaaactccggcctgctggcagattccatcaccctgaccaatgcttcgaccttgaatattggcgacagcggtgccgtggcaaccgacagcttgtatctggatagctacagccgtgcggcactgactgaagagacggcagaactgtatgccaacaccattactgtagacaacggtgcagagctggcgctgggtctgggtcaggttgatacgcacaatatggtgctgaccgatggcggtgtgctcaatgttgccagccgcgattatgtgctgaacagcgacctgaacaacgcacgctatatcaccaacgatagccataaagcggactacgactatggtgttgtcgcgctgaactctgacggccatctggcggtgaacggtgacgttgccggtaactataaagtgcgcatcgacgatgcgaccggtgcaggctccgtagctgactacaaaaacaaagagatcattcgcgtctatgacaataacgcggataccgctgccagctttactgcggcaaacaaagctgatttaggtgcatacacctatcaggcgcagcagaagggtgacaccgttgttctccagcaggaagagctgactgactacgccaacatggcgctgagcattccttctgctaataccaacatctggaatctgcaacaggataccgtgggtacccgtctgaccaacagccgtcatggcctggcagagaacggcggcgcatgggtgagctattttggcggcaactttgacgcggataatggcaccgttagctacgatcaggacgtaagcggcattatggtgggtctggatactcagatcgacggtaataacgcgaagtggattgtcggtggtgcggctggtttcgcgaagggtgatatcagcgatcgtactggtcaggtcgatcaggacagccagactgcgatgatctacgcgtcggcgaagttcatgaacgacatcttcctcgacagctccatgagctacacccgcttcaacaacgacctctctgctaccatgagcaacggtcagtatgttgacggtaataccacgactgacgccgttggtttcgggatgaaactgggctatgactggaaaccaaacctgtctggctacgtcacgccttacgcggcgatctctggcctgttccagtccggtgatgactatcagttaagcaacgacatgcgtatcgatggccagtcttacgacagtatgcgttatgagctcggcgtggatgcaggttataccttcaactacggtggcgagcaggcattaaccccttacttcaagctggcttacgtgtatgacgatgccgacaacaatgctgatatcaacaatgacagcattgacaacggcgtggaaggctctgcggttcgcgtgggactgggcactcagttcagcttcacgaaaaacttcagtgcttacactgatgcgacttatctgggcggcggcgacgttgaccagaactggggagcaaacctgggtgtgaaatatacctggtaa

SEQ ID NO: 142878 - DNA, 1335 bp, Enterobacter cloacae
atgacagaacatattcgtaatggcactgccgccactgaggacatagaaagagagactatgcgcaaggtgatctggcgtatcctcccgtttctgatagtcagttatctggtctccattatcgatcgcggcaatatcggcatggcttcgctacagatgaatgaggatctcggtctcagcaaagcggcgtttggcttcgccagtagcctctatttcgtggcgtattttctgtttgaagttccaagcaatctggcaatgcagaaagttggcgcacgtctgtggatcccccgcattatgatcagctggggggtggtatccatgtgtatggcactggtacaaaacacgacgtcgctttatatcgtgcgttttctgctgggtgccgcggaggcgggcttcttccccggcgtcgtactctttctgacctggtggatcccttcccgctaccgtgcgcgaattatcgcgtcctttatggtcgcgatcccgctggccaattttattggctcgccgctgtccgggttgattctgtcgctggatggatggctgggtctgcgcggctggcatctgctgtttatcattgaaggtttacccgccgtcctgctgggtattgccgcctggtttgttcttcgcgatcgtccgcaccaggctaactggcttaacgcggaacagaaaaaatggctggaaacgacgcttgaaaccgagcgtcaacagcaaaaaaatatcggacaccagacgacatggcagttgctcaggcatcgtcaaatctggctgctggcgctgatttacgcaggcgcgtcatcagcgggcaccaccatcagcgtctggtcaccgcagctgctgaaatcgttccaccttgataatctggagacgggtctgttcaacgccattccttacggtctggcatccgtactgatgattgtgtggggacgcagttcggaccgaaccaacgaacgccgctggcataccgctctgacccttttcattattgccgcaggcgtatttgccgcctttgtcagcgtctctctttccgccaccattgttatcctgagcatcatgctgataggggcgtattcaatgaaggggcctttctgggcgctggcgtcaggctggatgagcagcacgtcggcggctgcgggcctggctgcaattggcgccatcgctaaccttatcggcggtgcggtgatggtcaacgcttacggtattatcaacgaacggacgggtagccacacgctggccatgcttcctctggcggcgttatgcgtcacggggggtatcgcggtattggtgatgggacgccaggccagcaatgctcagttgcatgaaaagcaggtcacccattag

SEQ ID NO: 142879 - DNA, 663 bp, Enterobacter cloacae
atggcaaaaatcgcaaagaaacttactgacactgaaatcaaaagcactaaggcatcagagaaagagattaaccttttcgatggcgatggactgatgctgcggattgctcccctcactaaaggtggagcgaaaagatggtatttcagatacgcagtgcccttaacaaaaaaacgcacaaaaattagtctcggcacgtatcctcatctcaccttagcgaatgcaagagctttacgagatcaatatctttcactactcgctaacggcattgatcctcaaactcataacactgataaagcaaatgctctcaaggatgctactgaacatacgctgcaggctgtagcaaggaaatggttagatgagaaagcaaggactacaggtataacaaaagaccatgctgaagacatctggcgtagtctagagcgaaacattttccctagtcttggccacgttcctatcaaagagattcgaccaaagttgttaaaacaacaacttgagcctttggagcatcgtcgcgtctttgaaacactgcggcgcataatttcccgcttgaatgagattttccggtgggcagctaccgaagagcttattgaattcaatcctgccgataatcttggacaacggtttacaaagcccaaaaaacaaaatatgaatcgccacggataa

SEQ ID NO: 142880 - DNA, 1296 bp, Enterobacter cloacae
atgagtaaagtcatcgcttcacttgaaaaggtactccttccttttgctgttaaaataggaaagcagcctcacgttaatgccattaggaacggctttattaaattaatgccgttgacattagccggggcaatgttcgttttaattaacaacgtttttctcagctttggagaaggttcctttttttattcattaggaattaggttagatgcttccactattgaaacccttaatggtttaaaagccattggcggcaacgtatacaacggtacgttgggtattatgtcgctaatggcgcctttctttatcggaatggcgctggcggaagagcgtaaagtggatccgctggcggcgggcttactgtccattgccgcgtttatgaccgtcacgccgtacagtgtaggcgacgcttacgccgtgggcgccaactggctgggtggggcaaacattatttccggtattattatcggactggtggtggccgaaatgttcacctttattattcgccgcaactgggttatccgcttgcctgatagcgttccggcctctgtttctcgttcattttccgcgttgataccgggcttcattattctctccatcatggggattattgcctgggcgctctctcactgggggactaacttccaccagatcattatggactctatctcaacgccgctggcgtcgatgggtagcgtggtcggttgggcgtatgtcatctttacttccctgctgtggttcttcggcgtgcatggttcactggcactggcggcgctggacagcggtattatgaccccgtgggcactggaaaacgtcgcgctttaccagcagtacggctccgtcgatgcggcgctggcggccggtaaaaccttccatgtgtgggcgaagccgatgcttgactcctatatcttcctgggcggtaccggggcgacgctgggtctgatcatcgcggtctttattgtctctcgccgcgccgaccatcgtcaggttgcgaagctggccctgccgtcaggcatcttccagattaacgagccgatcctgtttggtctgccaattatcatgaacccggtgatgttcattccattcatcctggttcagccgctgctggccgcgattacgctgacggcgtattacctgggcattatcccgccggtgaccaacattgcgccgtggacgatgccagctggtctgggcgcgttcttcaacaccaacggtagcgtggccgccttcctgctggcgatattcaacctcgggattgcaaccctgctctacatgccgttcgtggcgattgcgaactga

SEQ ID NO: 142881 - DNA, 3309 bp, Enterobacter cloacae
atgaaaagggtttttatgacggctgcattaacgggtttatttgtcagtaataatccgtatgcaggagaaagctatctggtctataacccacataatattgcggtatttgaagtgcgtttctttaatgttggcgacggcccctttatgccggactggccgaatgcgtctgagtcaacctgggatcttggccagcaacaaaaagaaaaaatactcgatgctatgcgttactgggctgaggttattacccccagcccagggcaactgcctgccattatcaatgtggggacgtttaacgacgagaatgccgcaggttccagcgattcagttaccgacggcattataagtctgacgcagttgcaaggcgcattgaacggtattgataccggagagctgacctttggctcccacgcccagttcatcatgggcaaactggattttgataacgttccctatgtgcccgcgcaattgccgcgcactggaaaggccgatctggtcagcgtcgctgttcatgagctggcacatggactgggaatatccaatatggttaccgatctgcaaggaagtggcacattcacgcctgcttttgataccgtgccttttggctcctggaccagccatctgcgcgatgaccgtggcaatcctgcccggccagggcaagtaatattgtgtaatggatgcaataacagatgggatccacaaggctttgatgtacggcttgataaaggctatttcaccggcaggcatgtggatgaagtccttgcaggcgccatgcctggcgtgccggtgaaaatgttagcagacgacggctcggtcgatgataactacatgagccatatcgagctgaaaaacagcatgatgagccatcagaactaccgcaattacaccacgtttatggaagcggaactggcgttgctgcaggatatgggatatcagattgaccggcgtaactttttcggtttttcgctatatggcaacgggcaaacgctcgttaaccgcaatggctattttcagcgtaatcagcaggcggatggctatctggctggtcaatacaataccgctaatctgggagttggcctgcatgtgtatggcagtaataaccatatctttcaacaagcggacctgttgacgtcaggggctggcggcgcgggcatccgtatagatgggcaaaataacaccctgagcatcgatcccggtgtacggatatacgccgatggcgttaatggccgtggggtgatgtttgcctacggtaaacagcacagccttattcaacgtggcgacgttcaggcactgggagccagtggcgtcggtatcagttttgattttggcaataacctcctgggtaacgaggtggactatcgtggatcctggcttcatatcgtggacggctattacgatgcgttattacccgagttgcagggagcgctggtagacaatgccgacatcagcggacgggttgccggtaaaggcgcggcgatttatatatcaccgaacgcgctggtcggtaatataaatatattaacgggtgcccggctggagggtgatatttattcggactacgcccagcgggatgactatggccaacagcggttaacgctgcttaccttcggtcggaaggcaaatgcgtacgggcaagcgacggaagctgccgatgctgatttcagctttacgtaccgcggaaacattgaaggtatcaataatctggcactggacgcgcacggagggaaaacctcgcttaacggcgatttccagatttacagcatgactatcgcgccaggtgccagcctgtccggcaacgccagctatacgcttaatgaggaaggccgctttgtaaataacgggatccttgcgccgggtaattcacttgggcaaatcaatatatccggtgcttatcaacaggggaataccgggcagttgttgttggaagtcgacgggcgcggcaggcatgatactctgcaagtggacggtcacgcacaatttgacggtcaactgacgtttgcgccgcagccggactggtacgcaacaaactggcgtctgaatacgcaagatttgctaaaaacggacgcttccgacggcaatttcagtgcggtgaacagcgtgctccgttcacccacgctaacgctgcaaacaacgccacagggaaagaatggctggcagctctcaatgctgcgcgcttcaaacgcatacagccggtatgcgcaggacgctaatgcgcggcaggtagggcaagcgctggataaaattgtggcggaagctaagtcggatatacaaccgctgtaccgtactctggatttctcagccactgatggcgggagtatcagcaatgccttgccgcaactttctgcgggcgcctacagcgccatgttcgcaagttcccttcagcgtgaacagcagatagcgcggatcgttggcgggccaaatcctgtggttatgccgaagcaactgacggaaggcgaatggcgcagctttgccataccctttggcggcggcttctggcaacagcgtcagggtgacagtgtagggtacgacgccagcagttatggcattgtattcggtgctgaaaaacaaaacgatgagaatcacaactggatttatggctttcatggtgcggtcagcggtcagtcggtgacggtgaaatcaccagaaaccgcaaccgggaaaaccactgctttcgatctgggtattcatgctcgttacggcgctgaaaggtccgaaggaatgtatttattcggcactggccgattgggtattgaagacagctggctggacagaaacattaatgtagaaacttacggagcaagccaccatgccacctggaccggattgtcaggttctgttacggccggcggaggctatcgatgggcgctgaataataatgtgaacgccggaccggtaacgtcattgaattacaccacattacatcgtcccgacgtgaaggaaagcggcaatgacggcagccgactgatgctgggttcgcagaccttcgattctctgagatcaagtatcggggtgaatggtaactggaatgtacccctcgcttcaggggcatcgttcgcagctgagctgcagctcagctgggatcatgaactgcttgatggcaacgtagtgcaacaagcctctttcgccaactatcgaagcacagggtttagttccaggaatcaggtgactggtcgtgacactctgggtgttaaggcaggtatgagctataaaatcaacgctgatgtcgaattgggcatcggggttgaaagcgaaatgtttcgttctggctatgactcgattgcaggtaatctttcagccacatggcgtttctga

SEQ ID NO: 142882 - DNA, 510 bp, Enterobacter cloacae
atgacaaaaaagaaagaaccacatgaactaatgaagcgtggcagaaaagaaacggtacatcagaataacgatctacgtagtcacttagcaggtgttaaaaatctaaaccagttaaccagtgccgcacagaacgttatcaagaaacatatagatgctatgacaaaatcaaaaggttctaagaaaggtatggtgaaaaagaacatacttatactactaacaatgatgggtgatataagcgtagctaaaactaaagcaatacttgatacaagtgaacttttcgaaggtgatgattattctaaatcgagggtgaacgattacaagatagtactgacaggtgtatcgcaagagttgtgggcgatgtatgtaaatgatacacctattagaacagatgatccgcgaggtggtgagtaccttactggtgaagagttatataatctcactcgccttattgaaagtaacccaactaaaaaacaactctcagatttcatcaaaaaaatttatccctcctga

SEQ ID NO: 142883 - DNA, 1209 bp, Enterobacter cloacae
atgaaatctgtagaactatttgccggtgctggtggcttggctatgggttgcgaaattgctggttttgagcatcttgcagtcgttgaatgggataaatgggcctgtgataccgttagagagaacaaaaagaatggctttccactgttgtctgattgggatctttttgagggcgatgtaagagaatttgattggtcgaaaatccctaaagggattgaccttcttgcgggagggccaccttgccagccattttcaatcggtggtaagcacaaggctaattctgattcgcgggacatgtttccagcgacagcagaagcgatcaggcaaattcgccccaaggctttcatcgtcgagaatgtgaaaggcttaacacgggcaacctttgcgagctatttccagtacatccagttacagcttgagtttccagaagtagccccgcgaaatggcgaagactggagcgagcatttaaaacgcttgcaggaagaaaaaaccagtggaaagaacaaagggagagggctgacgtataacgttctggctacgttagtcaatgcagcagactacggcatcccacaaaaacgtgagcgtgtcttcattgttggcttccgcgatgatcttgaaattgagtggtcgttccctaaaccgacacacagttatgatgcactcgtttatgatcagtgggttactggtgattactggaaacgacacggtttagaaatgccaactgttccaagccagatggttaaccgtatcgcaaaattgcgtaaaaatcctcccgatacacttccgtggaaaacagttcgagatgcaattgcggatttgccagatcctgaaacaaaggcggcaaagatgatccggaatcatgcgttccaggcgggggcacgaacttatcccggtcataccggaagccccttagatctgccagctaaaacgctcaaagcaggtgctcatggcgttcctgggggcgagaacatgcttgttcgtgatgatggctcagtacgctattttactgtgcgagaaagtgccagaattcaaacatttcccgatagttatcgttttcacgggagttggactgaaactatgaggcagttaggtaacgctgtgccggttcatttggcgtattgcgttgccagcagtgtagcggaaaagctgctgacctctgaaattgggaacatccttaagcagggtggcaattataaaagggcttctgcatga

SEQ ID NO: 142884 - DNA, 651 bp, Enterobacter cloacae
atgacaggaaaggtcataccatttaatccacttgataaacaaaatttaggtgccagcgttgcggaagccttattgagcaaagatgctcatcctctggaggagttaacctcatttcaaggagcagggatttacgcaatttattacactggcgatcatcctgcttatgggcaactggcagaactgaatcgtgacgggcaatttcgattgcctatctacgtgggtaaggccgtcccagcaggggcgagaatggggcttaccaaccctgataaggttggtaacgttctgtttaggcgcttgaaagaacatgcagaaagtgttcgcgcagcggaaaatctttcgattgaagatttttattgtcgatttttggttgttgatgacatctggatcccattgggagaatcgctggttatctctcgctttaaaccgatttggaattcgtctattgatggtttcggtaatcatgacccaggtaagcatcgctacactggtttacgtcctcgctgggactttatgcacccggggagaggatgggctcaaaatttacgtgagcgtgatgaaactgtggatgaactcattcgtgattctatacagtatcttcagaatttaccgccttgcttggctcagaaatttatcgaagctgaaggcgattaa

SEQ ID NO: 142885 - DNA, 351 bp, Enterobacter cloacae
atgaaaaaattgattctcgcggcgctgctcgtcctccccttcgcctcaagtgcaaccacattcacctgtaaggccattcaggaagggcagatagattctggtagccaaaaatcgtctgtcgaaactcgcctcgatgtgcgggacaaaagcatgaaagtgagcatgggtggtaaaacctggcggctgggtttcattggagagaaaagtattgcgaagatgtacgccaccccagacggtggaatagcggttacttacatcgacaacggcagtgatccagttttcgttatgcgcccaactaacaacgatggtgaaacggcactctacacgctgagcctgtgttatgagatctaa

SEQ ID NO: 142886 - DNA, 207 bp, Enterobacter cloacae
atgagaagagcaatgatggtgatgtgtgggctactgttttcacagttggtagcagcagggcagatcacaatgatcgatccccagcaggatacgacggagaatggcaagacgctttgcacctacgagaacagccagtatgtttttacctacgtcactaaagggcagtgcccctatgcaaagactttcgatactcaggattcagagtag

SEQ ID NO: 142887 - DNA, 918 bp, Enterobacter cloacae
ttgattcaagcatacgaagacggttattttttcagagataccccgcaacacgatcacccgctttcagcattttccagacctacccaacaactcgtttctttagataatgttctgtacgttgtcgaagttgaaagtggtgaaattcttcactacgactcgagggagtatttgcttgatggtggcattgttcaggatctgcatttgagctactcgacagcagacacagccagatcaaaacaggcacaccgtgaatactccaatacgctgggcgacctcccagaaaaggcagcctataacgggatcaaggagtttgcagacgtattaagtaagcccgatttcacgaaagtatttgcattatgtaacgaagttgacaggcgaaacttagcatttataacacgtgcggatctgtgcacaatactgaacaccacgccggatcatctcaaccgtgttttatcgggtcttgagcgtaaaaagtacatcaaggttgataaagctgaacaccagaaaggcgtattaaaggtatgggttaatccttcgtttgtctggaaaggtgatttagctaaccgctacttatctggacatttgcagggcttcccaatcctggaacgtaaacgcccagtaaaacgctctgaggtgctcgacacgctcacggcggcagcaatggctgcttatgatgtctggcatgttgaacacggacataaggccaatcagccttattctaatgaatggtatgcagagatcacgatgtacgacagcgtctacggagaaggtgtacgccttgcagcagaaaatcagactttgagcaggttattgaacccggcaacgtcagaggttgacttcatttgtgagttattcactcctgcacaataccaagcttatctgcaaatgtttgcaaaactaacaagaagaatacactga

SEQ ID NO: 142888 - DNA, 960 bp, Enterobacter cloacae
atgaatccagatgatttgaaggtagaaataaacagtattttcgaaaactactcaggaattagagtaatcttcattgtaaaaaatgaagaggactactccttaaaactttcaaaaatagataacaaagcatttcctaaaatcattgagggttttaaattaagtcttacgcaagacattattgagaacgaagatctaactatccctcaactctcaaactttgatgatcgcaagaatgctttatttttattcgactatgagcagaaacctttagaatttgattttataacatctgctatagaaatcccacctaactcacaggatttctataattatgaagataaattcaagaacatcaaagggataatcattcagatacgtggtaataataagtgcttatcgctctacaaaaacaaaaccccaataacagtttttgagcaaagccgtaaagttttcaatttagtaccagatccggatggtttccttaaagaacttcctgagcaagttttcagattagatttcaactatgacttaatacttttagatgataacttcattataaaaaatctaaccacgcttgaaaggactatgaaattccatgaggtcattcaagctcaatcggttattgctttaaaagcattaaaagaatcaaatcttattgaagacctttctcatcttgaaaaaagctcatctgaaatgtctttctcaagaaagctggctaaaatttctaagcactctccagtattaggtataattgatgttcctgttatcattgagtatgtaaaacaacactcattcctctcaactgtcatgatagttagcgatgatggtacgaaactgatagttaagacaaaaagatctcaaaaacattttattaaattgctcagcgatgactatttagaatcacctctcactaaaatactctatgactcattagctaaagatgaactaaaagcaaactga

SEQ ID NO: 142889 - DNA, 600 bp, Enterobacter cloacae
atgaaacgaaaaagcacattcaacaagatgggactatacatactgtctttgatgttgctgtttgtttttattatcattttgagcgcaaaaatcccattttgttatggctcctcctgccattttataggattttatcaattagcttccagcaacataatctcaataatttgtgtaatttttatagggatagcattttatttctatagaagatttaaaggattgactaaggtcaacaacgccgattgtgtaacaatcactgcttgtcaaagtgagagttatgaaagtttgacttttttagccacatacatagtaccttttatgggattcagttttgatgacccccagaaaaatctcgcttactttctcttaatagttgttattggtttaattttcattaaaacggataagtattatgcgaaccctactttggcccttttcggttataagctgtatagagttaacatttcttattcaggaagcagtgaagtaaaaaacgtcattgcaatctcgatggatgtgctgactgttggcgatcaagtattctacagtttttttgatgactacgttttcatagcaaggaaaaaagatgaatccagatga

SEQ ID NO: 142890 - DNA, 156 bp, Enterobacter cloacae
atgtcagaccatcagatcataacaatgagccttcgattactgcaaggggaaagcaggtacgccagtacaggaaaggctgatatacgtattcgtgttccggcgatgaaaggtagccaactgaaagccttgcttgattacatacgcgcgttgaagtga

SEQ ID NO: 142891 - DNA, 309 bp, Enterobacter cloacae
atgggtgagtatcaaatgactaacagttccggattgaaaacgcctgaacaatggcaacaagaaagtattcttgtcctgctgtttcattacgaccacgtagaagcctgtttcatggcagatgcaatcaaggtgttaccagaagatcacgacgtgaacagagcggaggagtatttagaaagcctgatagaatggctggctggtaacacggacgaaagcgaaatgagaaaggctatcgagtgttacagcgtcaaaggcagcgaagagcaaacagaatttttcttaggtgcaattctcggagatgagtattga

SEQ ID NO: 142892 - DNA, 1179 bp, Enterobacter cloacae
atgaaagatgtcgttatagtgggtgcgttacgtacggctatcggctgttttcagggagcgcttgcgcgtcactctgcggttgatctcggcagcgtggtggtaagagcgctggtggaacgcagcggggttgccgcacatgaaattgatgaggtgatcctcggccaggtgctgaccgcgggcgcgggacaaaaccctgcgcgccaggcggcgctgaagggcggcctgcctaataccgtttcggcgattaccatcaacgacgtctgtggttcaggtttgaaagcgctccaccttgcgacgcaggccatccagtgcggtgaagcggacgtggtcattgccggagggcaggaaaacatgagccgcgccccgcatgtcctgaccgacagccggaccggcgcgcagctcgggaacagtcaactgcttgacagcctggttcatgacgggctgtgggacgccttcaacgactaccatatgggcgtaacggcggaaaacctggcgcgggaatacggcatcagccgcgagcttcaggatgcgtatgcgcttagctcgcagcaaaaagcgcgtgcagcgatcgactccggccgttttcgcgatgaaattgtcccggtcagtacccaacgccagaacggcgaagcgctcatcgttgataccgacgagcagcctcgcaccgatgccagcgcagaagggctggcaaaactcgatccggccttcgaaacgctcggttctgtaacggcaggtaacgcatcatccattaacgacggtgcggcggcggtgatgatgatgagtgaaagcaaagcccaggagctggcgctgccggtgctggcgcgcatcaaagcgtttgccagcgtgggtgttgatcctgcgttaatggggatcgccccggtctatgccacgcgccgctgtcttgagcgggcgggttggcaactgaacgatgtagatctgattgaagtcaatgaagcctttgctgcacaggcgatctcggtcgggaaaatgctggaatgggatccgctgcgggtcaacgtcaacggcggtgcgatcgcgctcggtcatcccattggcgcttccggctgccgcattctggtgtcgctagtccacgaaatgaaaaagcgtaacgcccgaaaagggatcgcaacgctctgcataggcggagggcagggggtagccctggctatcgaacggtaa

SEQ ID NO: 142893 - DNA, 555 bp, Enterobacter cloacae
gtgggtatagaacctgaatggaaagttgagaagcagcccgcctggctagtggccgcaatcaggaagacgattgccgcgttgccaggcggatacgctgaagcggcggagattctggacgaaacccagaattcactctttaaccgccttcgtgctggtggcgaccagatctttccaatgggctgggcaatggtgcttcagagagctgctggcgtaagttacatcgctgacgcgtactctcgtgaaactgataacggaattcacgttcccggcgccgtgcctgatgatgaaaacgaagagattggcctgaagctggccgagctggtggggaggcttggtgagctggtcaatgcttaccgtcattacattgaagatggtgtagttgaccggagcgagtggcaaagtcttaacgatatcgcatatcagttcagggtcactctcatgacgttcctgaaccttatttcccgtgtttattgccttccagaaatgggtgaggcccgcgagtgtgcagctccgggccccttggcgtgtcgtatcagtggagaaactaacgcatga

SEQ ID NO: 142894 - DNA, 378 bp, Enterobacter cloacae
atggaatttatcagacctacagaactgcgtgagattatcgcgcttccacttttcagcgatttagttcagtgcggattcccaagcccggctgccgattatgtggagcagcgcattgatcttaatgaacttctggttgcccaccccagctcgacgtatttcgttaaagccgcgggtgattcaatgattgaagggggaataagcgacggcgatttactggtggtcgatagttcccgaacggctgagcacggcgatatcgtcatcgccgcggtggaaggggaattcaccgttaagcgcctgcaactgcggcctaatgttcaactcaatccgatgaacagcgcttattcaccgattatcgttggcagtgaagacacgctgtga

SEQ ID NO: 142895 - DNA, 240 bp, Enterobacter cloacae
atgtttgttgaactggtttatgacaagcgaaacgtacaggggctggagggagccagggagataattctggctgaactgacaaaacgtgtgcaccggatttttcctgatgccagcgtgacggttaagccaatgcaggcgaatggcctgaatagcgatgccagcaaaagcgaccgggaaaagctgaaccgtatgcttgaggaaatgtttgaagagtcggacatgtggctgacgcacgagtaa

SEQ ID NO: 142896 - DNA, 1860 bp, Enterobacter cloacae
atgcttgagattcacacaagttctatcgtcaacacggtacgttttcaagtttcgaaagaggacattgcagaggcgaagaaagccgctgatgatcttcaacgccatttttctaagattaaagatccgaaaattcggtttcaggcacagcgcgcacgccgacaatcagcaagggaaaaagtggcagatgctaaagcggcttctcccaaaacgtccaatgacttgaagcaacaacgccaggcagaaaaggcagggaaagcgcaagccagagaagcagcgaaaattgctaaacgtaatgaaacggctgacatcaaatttaaatcggctggcttacagctccgtgggattaaaggcaagtatggtttagatcccgcgaaacaatacgaggctcttaaactcattcaacaagaaacagaagcctttaaaaatgggctaatttcaagccaacgaatgaattttaccatacggcagcgcataacggacttgcgtagggaagcggcgctccaggcaaaaataaccgcatctacacagcaacaggcggcagcactcagacatgctaagaaaaccgactatgcaggggctgcaaagggtattaaagaaaaagggctgaatgttataggtggcggtgctggctttgttggtgctactgctgcattagctggcggggcaggagtcttgtctcgtatcaagcagcaaggagatgaaaatcttgagcttgtccgtatgtcggaacgtaccaaactgaatcctaacgctgttaaggcgattgtatcttgggggcagcagcacggggtttcgagcgccagcgttgacaagatcacggatggcttcgggaaagatacccgcgagagaatcaacgaaacattattaaatagccagttcaaaggcggtaaatggtctggtggaaatagcgccgttgacgaagtgttaaataagtttggctggaacaaatcgcagctttcacagtatgcagataatccgcttgattacctacaatcggtggtaaatgaaggccagcgtcgcgggatgaaagacggtgagatcgggcatcttctcgaaaatacttttgatgatgggatgcactacctcgatcttttcaaaaataacggtgagcagtttatctccgtcctgaaaagccttgttgaaagtggtcaaactcttaacgatgagcaaataaggcaaactctggcatatggtgacctgagtgtagcaatgggtaatctgatgaatggcgttgataacagtctattcactggctttatgtccagttttgccgatagcggtgatgagttggtgaaaaatacacaggcaatcaatcagagtgctgggctattaggtgagggattaggcgaccttgctaaacaggtgtcgggcttcgttggggaaatctccaatcttgtgagtgacatcaatgcagggcttcgcgctcgcttccctggttggtttgctgataaagataagccagcagctcaggcggtctatgatggcgtcacaggaagtgctaacggcgcggcagggtggattcaagagcaaacgggttggaatcctcagacagtggctccggctattaaatcgtggttaggtattgatgatcagcaagcagggacagcggcgaacgaatataaccttgcaggtgattctctgcgtgattctgcaatgtcactcaatagcggcaatccaccagcgtataatctgaatcctacatttaacctgacggttgcaccgtccgtaccactgacaatccaatccgatacaggcagattagccgactatgtagacttccaggcgagagcttctcaagccagcttcgcacagtcgctaacgctgcaaatgtcgtctggtcaatcgtctacaggtgggtga

SEQ ID NO: 142897 - DNA, 1287 bp, Enterobacter cloacae
atgtgcaaaagccctgacaaaatagctggggtgaacatgatttacaagcgagatcgttacttagttttagatccatgcggaaactatctggtgaggatcgccataccaaagtacatgcgtcatctgttcggaggacgacacaactatgtgaagagcacaggcacacgcgatgtgcgcgaagcccgtctctttcgtgatgcggttgccctggagtggtttaagattcgtaacctggtaaagccacagcgtgatcgaggctcgaaggttgagcaaatactgaatgagctacgccggatcgggacgtatgcacacgaagcgccggaaccattaagcgcacctgtaatgagttgcccttccctcttgaggatgcgggatcaatacattctccagttcagcgagaagcgcaaactcaccacgttatcgaagaccaacaaggccgtagaagtgctcttagaacatctgaaaaagcgtgatgttcagcttcgtgacgttaaccgaaccaccgttacaggctggcttgataagctcaagacggagaaagcaccacagaccatacaaaactacgtcagcgcactggcgcagatctgggatctggctcgtaaccgttaccacgatgcaccacaagaaaacatctggcgcggtcatggtctcgaaagcaaaagtagcaaggtgagctatgaagtgtttgagcctggcgaattagcgaaagtgttcgcagtgatggcagatgatgaagagatgcagaacgtaacgctgatcgggatgtatagcggtatgcgccttaatgaaatctgttcgttacgtgcaaccaacatcaaggagatcgagggggtgctatgcttcgaagtgacagagggtaagagcaaatcagccgcccgtatcatcccctgccacagtctgatcactccgttggtgttgtcgcttcgtgagaagccctacaacggctttttgttctatcgtgcgtcaatcactgaccgtgcagacggaaagcgctctacgtggcattcacagcgttttacgagggctaaacgaaaggctttaggcgaagcgggatcagagttgaaagtttttcactcgttacgccaccaggccgcgcaaataatggacaggggcggaattggtcgaggtaagttaaagccagtaccagaagaccgcattgcgctgctactcggtcacgagcgcggctctacagagagtttcaagacgtacagcaagaatgccgcctctcctgttgagctacggcagtatatagaattgctacgctatccagagatagagaatcaataa

SEQ ID NO: 142898 - DNA, 1257 bp, Enterobacter cloacae
atgaagctcaacgccaggcaggtagagaccgcaaagcccaaagacaaaacctacaaaatggccgatggcggcggtttgtatctcgaagtttcggctaaggggtctaaatactggcgcatgaaatacagacgcccctctgacaaaaaagaggatcgccttgcttttggtgtttggcctaccgtgacgcttgctcaggcaagagccaagcgcgacgaagctaaaaagctgttagtacagggcattgacccaaaagccgaacagaaagaagctcaggccgaaaacgcgggagcatatacttttgaaaccattgctcgcgaatggcatgccagtaacaagcgatggagtgaagaccatcgatcgcgcgttcttcgctatcttgagctttatatcttccctcatatcggttcgtctgacattcgccagctcaaaaccagccacctgttagccccgattaaaaaagttgatgccagtggcaaacatgacgtcgcgcagcgtcttcagcagcgtgtcacggccattatgcgttatgccgtgcagaatgattacatcgactctaacccggccagtgatatggctggtgctttatcaacaaccaaagcacgacactatcctgctttaccctctagtctgttccctgagtttcttgctcgtcttgctgcatatcgtggccgcataatgacacggattgcggtcgagatttccttgttaacttttgtgcgttcaagtgagttgcgttttgctcgttgggaagaatttgattttgataaatcgctgtggcgtgtgcctgcaaaacgagaggaaattaaaggtgtacgttactcgtatcgtggaatgaaaatgaaagaggaacatatcgttccgcttagtcgccaggctatggtgttgttggaacagcttaagaaaatcagtggtgataaagagcttcttttccccggagatcatgatgcaactaaggtcatgagcgaaaacacggtgaatagtgcgttgcgtgccatgggttatgacacgaaaaccgaagtttgcgggcacggatttagaacgatggcgcgtggtgcgttgggtgagtcaggattatggagcgatgacgcgatagaacggcagttgagccattcggagcgtaataatgtacgtgcagcgtatattcatacatctgaacatttagatgagcgccgactgatggttcaatggtgggctaattatatagatgcaaataaaaaaatgtatattagcccttatgattttgctaataataaatag

SEQ ID NO: 142899 - DNA, 603 bp, Enterobacter cloacae
atgaaaagaagaatattctcatacaaaatagttagggattttgggttcgccccaaaccctttccatgattactgtacgcttgcaacatgcaagccaaaaataagaaattctgcccagcccggcgatttgatttttggatgtgggagctctcacctgaatctaaaagataaactcatttatgtgatgttagttgaagaaaaaatgtcattccaagaatattgggaagaccagagatttaaatataaaaaaccacatttttatagtaataagcagaatgcttttggagacaatatttatcatgttgatagcaatggtaattggactcaagaggactctcatcatagttttgaagatgggcggattaaccaagataatatggatagagacttaacgagcctccatgttttgataagtacaaattttatttacttcggcgataattttattgatgcacctattttcccaacaacaggcgagaagatctatcccaactcacgagattatattactaattttagtgatgaaatggtgaaccaagcttatgattggtttataaattatccacataaaggttgtattggaagccctatatcttggatataa

SEQ ID NO: 142900 - DNA, 690 bp, Enterobacter cloacae
atgagaagaaaaaaagaacatgtagccatacttaagttactatcacaacttagggattttactagtgataatgttttcaatccttatagagatatatgtagtattcatgacactgaaggagcccctaatcttcgactaagcaatctggagcgctacctaacagccagtttaagtctaagaattgatgcgatctgggttgggcgagatctagggtaccggggagggcgtcgaactgggctagcattaacagatgagtttcatcttgatcttgcagctaaaagtctcaataccgattcattttacaaatcgaccaaaactatttgtgtcaaggaaagaactgcatccgaggtttggagtctaattaatcttttagatgaacctccttttttatggaacattttcccatttcacccccatgaaaaaaatgattccatgtcaaacagatgccatacaaaaaaggagtttcaccaagcttcctttttttttctagagttgatgaagatttacaaattcaataaagtatttgccctagggagagatgcctcaaatgaactaaattatttaggggtgaaacatagcatagtcagacaccctagctatggtggacaaactgaatttagaaaaacaatccttttatcttctggaatgagtatagaagagagaactaaaaactatagattggatatatag

SEQ ID NO: 142901 - DNA, 1143 bp, Enterobacter cloacae
atgattacctatagcgattatcaagaaagtgttcgtaagtcagataaactacctaccgacaatcctcgttttatagtattgggtttagtaggagaagtcggtgacttagtaagcctagtaaaaaaagagcaaagagactcattaaaagcaaatacaattgaagagcatctccatgaagaattaggtgatgtcttatggtacgtcacatcgataataaacagagaaaacttcaggattgataacatagtaaataatgcaatccagaaaataaacttaaaagaaaataacatccagccatctacacttacaaatttaagtttaattgactccttctcgacaaacaacaacttaaagttaaacacagtagaaatatcacttcaactaactatttcccttggtagctttgtttctctctactcatcaaaaaacacaaacaaccataatgaaaaagaaattacaatttctatctttgtaagtaatctgctactgttctgcttttcaaaaaaaataagcatatcaagagcgatagactataatttaaagaaaataaacagcaggtggcctgataaatacatatacccagatccatttgatattaattatgccaattatgaaagattcccaccaaagatggtttttgttttcaaggagattagtgtaagtaataaaaaatatgtaatacagcaatgtcagggggttaatataggcgatcgtctaacagacaataaaaaagataaggatgattacagatttcatgacgtttttcatatatgttacgctgttcacttaggttggtcaccagtcttaagggctttattacacctgaaaagaaaaagtatttcgtcaacagatgaaaatcaggatggtgcaagagcaataattatagaagaagggatttcaaccttcattttcagcagagcaataaaacagtcattattcgaaaatgtaacacgcctcgattatgatattttaaagttcattcaagagtttgttaaaggctatgaagttgataatgcttatttatggcaatgggaaaaagcaatattagatggatacaatatattcagaaatttaaaagaaaaaaggaatggtaaaatcactgctgattttgaaaatcacattgttttttttgaagagatttaa

SEQ ID NO: 142902 - DNA, 564 bp, Enterobacter cloacae; identical to SEQ ID NO: 114091

SEQ ID NO: 142903 - DNA, 3009 bp, Enterobacter cloacae
atgcccgtcgattttctgaccactgagcaggaactgaattatggtcgctatgttgcagaacccaatgacgtgcagctggcgcgctattttcatcttgatgagcgggatcttgccttcattaaccagcggcggggaaggcataaccggctgggaattgcgcttcagctcaccaccgcccgttttctgggcacctttctgacagacttaacccgggttctgccaggtgttcagcaatttgtcgcggtgcagcttaatattcgccgtccagaagtccttacccgctacgcagaacgggttaccaccctcagagagcatactgcgctgattaaggaatattacggttaccatgaatttggcgatttcccctggtctttccgcctgaagcgcctgctgtacacccgcgcatggctcagtaatgagcgacccggccttatgtttgattttgccaccgcgtggctgcttcagaataaggtcctgctgcccggagcaaccacacttgtacgtctcgtcagtgaaatacgcgaacgggcaaatcagcggctgtggaagaaactggccgcgttgccggacagctggcagaccgcccgcgtgacggagcttctggacattcctgaggggcagcgtacttcaccgctggagcaactgaaaaagggaccggtcaccgtcagcggcccggcatttaccgaagcgctggagcggtatatccggctgcgaaacctggaattttcccgactgaattttaccggtctgcctgctatacaactgcgtaatttggcccgttacgcaggcatggcgtcggtaaaatatatcgcgcgaatgccacagcagagaaaactggccgtactcacagcattcgttaaagcgcaggagactgcggcgctggatgaggccgttgatgtgctcgatatgctgatactggatatcactcgtgcggcgaagaaaacggggcagaaaaaacggctcaggacgcttaaagatcttgatcgtgctgcgctaatattggcgcgggcatgttcattgttgctggatgaacaggctgacgatgctgaactgagggagaccatattcaacagcataccgaaaagcaggctggcagaatccgtctgcaaggtaaatgagctggcccggcctcagaacaacaatttccatgacgaaatggtggagcagtacgggcgggtaaagcgctttcttccggcggtattgcgcgacctgcatttccaggcagcgccagccggagaacatacgttgtccgccattcattatctgaccgaactgaactgctcgaaaaagcgcatcctggacaatgcgcctgaacatattattaccggcccctggaaacgcctggtatacgatgcggagggccggatacagcgtgccggttactcgctttgtctgctggagcgccttcaggatgcactacgtcgaagggacatctggctcgaaaacagcgatcgctggggaaatccccgcgagaagctgttgcagggggaagaatggcaggctcagcgggtccccgtttgccgggcgctgggacatcccactgatggacataaaggcgtgcaacagttggcggtccagctagatgaaacctggaaaaccgtcgcatcccgctttgaaggaaatgcggaggttcatatttgccatgacggtaaacatccttccctgactatcagcagcctggagaaactggaggagccaacatcgttgcatcgtctcaacagtcgggtaaggctgctactcccgccagtagatttgacggaactgttgcttgaaatagatgccagaacgggatttacacgtgagtttacgcatgtcagtgaatccggggcccgggcacaggatctgcacatcagcctgtgcgcggtcctgatggcagaggcctgcaatatcgggctggaaccgctgataaagcacaatataccggcgctgacgcgccaccggcttagctgggtaaaacagaattacctccgggcagaaacgctggtcagcgccaatgcccgcctggttgattttcagtccacactggagcttgctggccgctggggtggtggcgaagtggcttcagctgatggcatgcgctttgtcacgccggtgaaaaccgtcaattcaggacctaacagaaaatattttggttccggacgtggcatcacctggtacaacttcgtctctgatcagtactctggattccacggcatcgttgtccccggcacattacgagattccatttttgtgctggaaggccttctggagcagcagacagggctgaatccggttgagatcatgacagacacagccggtaccagcgacattatttttggcctcttctggctgctgggataccagttttccccccggcttgccgatgccggtgaagcggtattctggcgagtggataaatcggcaaattacggtgcactggacgaactggcacgtggttgtgccgatctgtcgaaagccgaggatcagtgggatgagatgatgcgaaccgccggttcgctgaaactgggcaccattcatgcttcagaactcattcgctctttgctgaaaagctcgcgcccatcagggctggcacaggcgatcatggaagtggggcgcgtcaacaagacgctgtaccttcttaattatattgatgatgaggattatcgtcggcggatcctgacgcagctaaaccggggggaaggccgccatgctgtggcgagggcgatctgctacgggcagcgcggtgagatcagaaagcgctatcgtgaaggtcaggaagatcagctgggggcactgggcctggtcactaacgcagtggtactgtggaacacactttatatgcaggaagccctgagctggatacgcagtaatggagaagaaatcggggttgaagatatcgcccggttgtccccactgatgcacgggcatatcaatatgctggggcattatacgtttacgctaccggaggatattttgaagggggaactgagagaactaaatttcaatttaaacaatgaattaacttcttag

SEQ ID NO: 142904 - DNA, 1248 bp, Enterobacter cloacae
atgctaaatttaaccgtttgtcaggcacagtcaaatccaacagactacgcctgtctgacgggcccggacatccccttgactcgctattacggaagattactgatgatgaaaaaatctctttgctgcgccctgctgctcggcatctcttgctctgctctcgccgcgccagtgtcagaaaaacagctggcggaggtggtcgcgaatacggttaccccgctgatgaaagcccagtcgattccaggcatggcggtggccgttatttatcagggtaaaccgcactattacacgtttggcaaagccgatatcgcggccagcaaacccgttacgcctcagactctgttcgagctgggttctataagtaaaaccttcaccggggttttaggtggggatgccattgctcgcggtgaaatttcgctggacgatccggtgaccagatactggccacagctgacgggcaagcagtggcaggggattcgtatgctggatctcgcaacctacaccgctggcggcctgccgctacaggtaccggatgaggtcacggataatgccgccctgctgcgcttttatcaaaactggcagccgcagtggaagcctggcacaacgcgtctttacgccaacgccagtatcggtctttttggcgcgctggcggtcaaaccttccggcatgccctttgagcaggccatgacgacgcgggtccttaagccgctcaagctggaccatacctggattaacgttccgaaagcggaagaggcgcattacgcctggggatatcgtgacggtaaagcggtgcgcgtttcgccgggaatgctggatgcacaagcctatggcatgaaaaccaacgtgcaggatatggcgaactgggtcatggcaaatatggcgccggagaacgttgctgatgcctcacttaagcagggcatctcgctggcgcagtcgcgctactggcgtatcgggtcaatgtatcagggtctgggctgggagatgctcaactggcccgtggaggccaacacggtgatcgagggcagcgacagtaaggtggcgctggcaccgctgcccgtggcagaagtgaatccaccggctcccccggtcaaagcgtcctgggtccataaaacgggctctactggcgggtttggcagctacgtggcctttattcctgaaaagcagatcggtattgtgatgctcgcgaataaaagctatccgaacccggcacgcgttgaggcggcataccatatcctcgacgcgctacagtaa

SEQ ID NO: 142905 - DNA, 3156 bp, Enterobacter cloacae
atgaggcctgaaaagaaatcgcaactgctgcttggcgtctcccggtcaaaggcaaagatgcttgagttcagcattccggaagagcatcacatcaaaataacccaagatccggccaagcttttcagcatatctattggtctactgggagatctcgcagctgccataaacagagaggagccagaggttaatttgctcacagagatgaaaaccaatcttttattttctgccagctttttcgactcttacctccagtcaaagttaaatgaaacgcttgacccatatcttatgcttcttggtgcagcctcatactatttatgcgaactcccaggtagttcatcagttttgataagaaaattgaaaagtgatattgatgcatctggcatttatggactgtactgtccaaatctagatggagccgggctggaatttttattgctgtggttgcttgaaggagattcaagcattcattttgagaatatcgactcagcatttggaaaacccatagaaaacatttctaaagagttaaatatatttttttcaactggaaatgacttcgcaattcgaagtgaggtgaaaaggctaagggatttagcttactttgctggcactccaaggcagttacttttaagcgacttgatatcttcaataactttgaaaaaaatcgataactcaacgtggaagtgcttaccaaaatatagtggcctatcaattagtacctggaaggaagcactgcataaaaatagcttcattaaagaattttggccagcacagcatttattgggacaagccaatgttctaagaggaaagtcagccatcgttcaaatgcccaccagtgcaggtaagacaaaggcaactgagctaattcttcggagcgcgtttttagccaaacgtgtgtcacttgctattatcattgccccatttagagcgctatgtcatgaaatcaagaacagcctcgtcgaagcattcaacagcgaatcaaccaaggtggatgagttaaccgataccctacagactgactttgagatcgctgaactcttggggcaccaacagatcctggtcgtaacacccgagaaactactttacgcccttcggcacgctccggagctaggggcacacattggcctattaattcttgatgagggacaccagttcgacagcgggactcggggcatcacatacgagctacttctgacgtcactacgcactatgattcctgaaggaacccaaaaggtcctaatctcagcagtcatcagcaatgccgaggctgttggattatggctaaacggggaaccgaatgtcgtcgaaggcacaacccttattccaactttcaggtcgatcggattcgcgagctggctcgatcaactgggaagaatcgaatacgtcgacagtcgcaacgctgaacaaagtgagtttttcgtcccgagagttattgaaacatttaatctcggaaggaagtcacgagaacatactgaccgtttttttcctgaaaaaaataatggacaggctatcgcactttacctcggtctaaaattggcaccaaagggcagcatagctattttctgcgggcgaaagtcaactgcggcaagcatctgcgaaaaggcagtcgatattatcaagcgaggtgtaccactgcccttaccatccgattattcagatccccaagaagtggctcggctaacacatctgcatatcaaaaatctcggggctaacgctccagcatctcagagtgcggaacatggaattttttcccatcatggcaatacaccacaaggcattcgactggcagtagagcatgctatgcgtgacaatcttgtgcgattcgttgtttgtacatctaccttagcgcagggtgtaaatcttccgatacgatacctcatcgtgaccagtgtctaccagggtatggagcgcatcaaggttcgtgatttccacaatcttattggtagagcgggtcgagccggaatgcataccgaaggcagcatcctgtttgcggatccagtaatctttgataagcggaaggtgctgagcgaaaaatggcgctggaagcaggtgaaaaaactactggaaccacaaaattctgaaccatgtgtcagcaaccttctatcaatatttgatcccatcaagagcgatgacgagaaaatctcaatccccatgggggcactagactttaccaaggcctatatcgacaatcccgaaaaaattgcgaatcttgccacagagataaccgcattgcatggagataaaaatttttctcaaaacaatgttgagcgtcaaatagcctggagaatcagcctaatatctgcagtcgaaagtttccttctatcccattgggatgaatccgaagatggtttatcgcaagctgacgtgacccacctagctgaaggtacgctagctttttttctcgcagacactcagaaaaaggagcatatacgcgagttatttcaactgctcgcaaggcacatttcaacaaatattaccgagccgtcccgccgaaaaatctatggtagaacgctttacgggattcaggatgctcaatctattgagaaatgggtccaatccaacactgacagccttctttctattgttgatgaaaaagaaatactcaaccatatttggcaattgcttatccagcatatcaacagtggtgtatttaccaagtttgatgaaccagaggtgcttaaagaaatatcgtatgaatggatcagtggcaaacccttctacgacctcctagaaattatccatgaacgaaaagttaagatgatatggggcactaatcggagagagttcaagatcgaccatatcgtagatatctgcgaaggggcgcttgcatataatgcaacgctcgttgtaggtgcaatatctgagttcatcgaaactcttaataaggatggcacaagggatctgttcaatcgtctgcagcttttacaaaaaaaactaaaatatggtcttccaacagacaccgctatttccctatatgagcttggtttttcagatcgcgtaatagctcaggatctcgccacgtccttgaagctagcggcgactcagaagaaatatctcgtgaaagagttgaaaaataatcgaggtaatgcaatgaaggtgatagaaaaatacccaatgtatttccaagaaagaatgtcagagttgatagaagatttctaa

SEQ ID NO: 142906 - DNA, 819 bp, Enterobacter cloacae
atgagcttctcatcaactcatacgaggtggctgaccaagaatgaagaggacctaagaaccgcagacggcaaaaatatcgaagtctgggttttccgtcatgaacaagacgaacaagtgctttcagaatgggcaaagcactttcggaaccactactgctttgacagtgaaatcgattattttcgtaggggatacgggtattctcgcgaagactatctcaacctcataaagtttccagacataaaaaatgcgcctggtccaagcattcgtgcaggtgactttggagaagtattggtggctgattttattgaatacttgctcggctactgggttcctcgcactcgctacggtgacaaaactattcgaaacgagtcgactaaaggcagtgacataatcggttttcatatcatcaaggacggtattgtatcttcgaatgataggttagcgatctttgaagcgaaagcacaattctcagggaaaaaagcgaagccgagacttcaggatgcagtggatggctcattaaaagacgttgcacggaaggcagagtctttaaatgctattaaacaaagactgtatggtcgtaatcagcttgatgatgctgaaaaaattgaacgcttccagaacgaagtagattatccatataaggaagtatatggtgctgtagcgctctttgatagtccactttttgacagccaccttacatcattgaccgataccatttctcatccatattcaggtgatcttgtgttagttgtgatcacaggggatcagatgatggcactagtccacgagctctataggagagctgcgcatgaggcctga

SEQ ID NO: 142907 - DNA, 1434 bp, Enterobacter cloacae
gtgatcgcccttgccgatgctgccaccgagcatctcgcgcgccagcgcagtttccagctcgctgcggatcaggcgcttgagttcacgcgcaccgaactcgggtttgtagccttcttccgcgaaatggtcgatcagcgtctgatcgaaagtgagcgtcacgccctggctggcggcgctgcgcgccacgcgatcgagctgcaggccgacgatgtggcggatctcctccttgcccagcgcatggaagacgatgatctcgtcgatgcggttgaggaactcgggccggaagtggccgcgcagcacgtccatgacctcggccttggtcttttcgtactcctcgtcggccgccccacgcgccttcagccgtcgctggatgatgtccgaacccaggttggacgtggcgatgatgatggtgttggtgaaatccaccacccggcccttgccgtcggtgaggcgaccgtcgtcgaacacttgcagcaggatgttgtagacgtcagggtgtgccttctcgatctcgtcgagcagcagcacgctgtagggcttgcgccgcaccttctcggtgagctgaccgccttcgtcgtaaccgacatagcccggaggcgcgcccaccagccgcgccacggtatggcgttcgccatattccgacatgtcgatgcgcaacagggcgtgctcatcgccgtagatcgattcggccaatgccttggcgagctcggtcttgcccaccccggtcgggcccagaaacaggaaggtagccaccggtttgctgccttcgcgcaggccggcgcgggacagccgcacggcatcggccacggcacggaccgcctcgtcttgtcccaccaggcgctcgtgcagccgttgttccaagtgcagcagcttttcgcgctcttccaccgtcaactcgttgaccgggatgccggtcaggcgcgagacaacctgcgccacgtgttccgccttgacctcggcactgccggaggcccgctcccgctcccagttctcgacgagcttcttgagctcggcctccttggcttcgatgcgcttgccgagctcggcggcctggtcgtactgcttgcgcgcggccacgtaatcctgttcacgccgcagctggtgcagttcggactccagctcctgcacggccaccggccgggccgtggccgacagcttgacgcgcgcggccgcctggtcgagcaggtcgatcgccttgtccggcaggaagcgcgccgtgatgtagcggtcggacaactcggccgccgcgatgatcgcgtcctcggagatgctgaccttgtggtgcgcctcgaaggtgtcgcgcaggccgcgcagaatcatgatggcctgggccaccgtcggctcgggcaccgtcaccggctggaagcgccgctccagtgcggcatccttctcgatgtatttctggtactcgttcagcgtcgtggcgccgattag

SEQ ID NO: 142908 - DNA, 1044 bp, Enterobacter cloacae
gtgcacctcgtcgatgaacaaaatcagctcgccctggtgctcggtcacctccttcagcaccttctgcacgcgctcctcgaactcgccgcgatatttggcgccggccaccatggcgttgatgttgagttccaccaggcgcttgtcgcgcaaggtctcgggcacttcacccgccaccatgcgctgcgccagcccttcgacgatggcggtcttgcccacacccggctcgccgatcagcaccgggttgttcttcttgcgccgggccagcacctcgatggtggtttcgatctcctgcgcgcggccgatcaccgggtcgagcttgccgtcgcgcgccatcttggtcaggtcgcgcgagtacttgtcgagttctggcgtgttggtcggcgtctcagcgcggccatcctcggcgcccttgccgaccaccttgctgacctgttggcgcagcgcctgcggcgtcaggccgtagcggcgcagcaggttggcggccagcccttcgccttcctcggccagaccgatcaggaaatgctctggaccgacataagaatggccgagttcattggaggccacgaaggcgcggctgagcgcatccttcacgcgcggcgacacgccgatctcgccctcgaagggcttgtccccgcgcttggcctcagactcgatctgccgcttgaggtcatcgaccttgatcttgaactgacccaggatggtcttgaccacgtcgctgtcggccagcgccagcagcagatgttcggtatccacctcggagcggccaaattcggcagcgtgtttggcggcctcctgcagcaaggcttccgactgttcgctgatgcggctggccaacccactgccgcgacggcgcggcgcacccgaacctgcggtggcgggctcgccaaacgaggcatcgaccacgtcatcggtatcggcggcaactggcgtcgcgtcttcgccgatgcggaagaagtcactgccgaggaagtcctcgaacaggccgctacgcgagccgaacaaggcttccagcggcgaaacggtgcgcttttgctggcgcactaa

SEQ ID NO: 142909 - DNA, 147 bp, Enterobacter cloacae
atgtacagcagcgcggtgttcggatatcgcaatttcgcatcaatcacctcagtgaagctctgtagcgtcatcgtgtcgccgattttcgcgctgttggcgtcagcggtaattttgcgtagtctgattgtccaggtgctgcccgcctga

SEQ ID NO: 142910 - DNA, 600 bp, Enterobacter cloacae
atgtcagaggttatgaccagaattgagctcggcggtgttttgggtaaaacctacgggaaggttcaccatcgtctaataagaacaaccgcagaagcgataaactcacttacaaaaacaatagacgggctggagaaatttttgataaccagcaaagcaaggggcctgacctacgccgtctttaaagataaaaaaaatatcggaaaagatgattttggttttccggtaacaggtgaagttattcgaattgtccctgtagtgatcggaagtaaaaaagctggagttttacagacaattcttggagctgttcttgtcgttgcggggattgcagttggaatgctttctggtggaacactatctgctgttggttacggagccgcgaagtttggtgcagctatgatcgctggtggagttgttcagatgctttcgcctcaacccggtggcctggccagcaaacaaagcgcagataaccgtgcatcgtatgcgttcggtggggtgacaaacaccgccgcacagggttacccggttccgctcctttacggccgccggcgaatcggcggggcaattatttccgccgggatttatgtcgaagatcagcagtag

SEQ ID NO: 142911 - DNA, 270 bp, Enterobacter cloacae
atgggggagtccttggtcaaagacacccttaaagatccggacagtgccaagtttgaatcatttttccgtgattttggtgaaaattctggatatgtttgcggttatgtgaatgctaaaaattcatacggcgcatacacgggtaaaaaaccatattatatgcggattgaggtcaaagatggaaaggtcaataatcatggaccaatcatcattattaatgaccaagaccagaagaaaattgattcctatgagtcaatctgtcaaagggactga

SEQ ID NO: 142912 - DNA, 1821 bp, Enterobacter cloacae
atgaagaaacaactaacgagggaactaaacctacagaaaattaataacgctattgatgtagaaaaccgaaccattgagatcgcttttgcaagtgaaacacctgttaaacgtgattttggtgaaggtattggtgtactaaacgaaatccttaaatgtacgccagattccgttgacctaactcgtatgctaaatggtgctccattactaattgaacatgactttacccgtcatgttggaattgtattagatgcgagagtagacagcgataatgtatgtcgtgcgactgtaaaactatcttcaattcaagaagcagaaactatttttacaatgattcaggaaggtatccgtaccaaaatttccgttggatacaatattgaatcttatcatatcgaaggtgaaaacctaattgtagacctttggtcgccatatgaagtaagtagcgtatctgttcccgcagatgattatgttggtgtttcacgttcactaaatataaatgaaattcaacttagtgaaggtgaacaaatggatattgaaaaccaacaagaagaactacgtaccgatgatgtagttgaacaaatcgaagaagaagtaaaagaaagtactgaatctgatgaacatgttgaagtacaggaaagttcagaagcagtagaagaaactaaaacagtagaagtacaggacagtactgaaattgttgaagtagaagcacaagaacgtgcagcactaaataaaggtgaatctgacgaaattagaattcgtgagttaaccgctattgcagaacttttcaaggtagatggttctgaagcaattaaatcaggtgtgacagttgaacagtttaaacaggaagttcaaaccagatccctaaataaagaaacaaatctaattaacaaggatgttaataatatgaataaaaatgtaattggtgaactaatccgtagtatcaacgatgataactttgattctgtaaaagctgaactcgaaaaaggccaacgcggtttcaaaatggatttttcccgtgctcttgctaccgatactcagacagcagcaggaacagtaaaaaccgtatatgcggattcttatctaaccgctctattggctcagtccattcttggaagcctaaatccaactatctattctggtcttgcataccgtggcgttcttagtattcctcgcctaactggtctaactcctgcggcaccaggtaacttcaaattctatgaagaaggtgatgcagttgaagatacaatcacgaattttgattctatcaagctatcgccaaagatgtttgctggtgcagtacctgtaactaagcagctcatgctaagttctgataccgcagctacctttgttcaggatgctctaatccgctatgcggctaatggcctcgaatccaagatctttgattcactacagtcaacaattccagtagttacgaccgcagcgattggtaaaatgactgaagctgatgtacagaaagctattgaagctcttggtactgctaacgttgacgttcgttcttgcgtagcagtaatgcatccaagtactttagctaagctacgtcaaaccgccgtattaaataacacctcagccgttactatggttgaaggtcatcgtttcgatatgtggctaaacgatgaagttcgtgttgttgaaagtacttttgtagatgtcgagtctgtgatcatcggtgacttccgtaatctaattattgcgaactggtcagaaggtcaggaaattgacgtagatacaactactcaccgtgcagcacaaattactgttttccgcagcttccagtacttagggaaggtgcgaacaagttcctga

SEQ ID NO: 142913 - DNA, 1512 bp, Enterobacter cloacae
atgttctggaaaaagaaaaaaattgatgagcctgaacaagtacctaaaccacagtttgaacgtaaacaacttacagataacgcattaaaacgtgaactaaaagagattcgtactaactcacaatcaccaatcatcagctttgggttttcagcaggtaattcagcagggaatattaatagtatcatcaatatgacattacctaccttagtagctaagtcacgtgaactaagtttgaataatggaattgctaaaaagtactttcaggttaacagtgatggcgtaacgggtgcatcaggtctctatatccgtcctgatgttaatcttcatgattataatgaagaaaacttagttattaacgaagaacttgagcagctattctacaaatacgcagataatccagaagcatttagtatgaatggtaagatggatttagcggcttttcagcgtttagtggaacgtactcgtagtattgatggtgaagcgttcattatttgtcatgaattgaacggtactgtgaagtttgaacttatcgacactatgcgaataccgactactggaaaccgaatttttgatgatggttcatatgtttctaatggtattcattttgatcgatatgggaaagtaattgagtactatgtaactcgtttgaatccatctacatatacgtatcaaacaggtgattatgaagtaattccagcatcaaacatgcttcatctaatgatccaggactacccaaatcaagagcgtggcatacctgatatcattgcaggtactactttattaaaagatcttgaagcctttataaaggcagcaattatatctaagaaactatcagcctcagcaatggctttcattactaactcagcaggtaatgatgaagatattgattttatgaaagggtacgaacctgattactacgaaaatgacagcttacaaagcggtgctttagtagaacttcaaccaggacaaaacgtaacgagtgttaacccaaacggggctactgatggaatcacagagtttgtagatactcagatgcaacaaattgctatgtctcttggtatcacagagcaatcactaagcggttctaccgcaaatgcttcattctcagcagcaaaactaacagaccgcctacaacgtcagactttcaagacacgtactaatgcattaatcacgtttgtattaaaaccaatatacgcacgctggcttaaagcagaaatgttacgtaatcagagtttaaatctgaaatttagtgatttcgataaattagtaaatgctaaatatattagtgaatttgtggaatcccttgatcctctcaaagacgtacaaacccaagtactaatgattgataacaagatcaagagtcgttctatggttgtttctgaatttggttatgacccatatcaagtacagaaggaaattgaattagaggaagctaaaacaattaataataaacaggaagttattcaggatgaagaaacaactaacgagggaactaaacctacagaaaattaa

SEQ ID NO: 142914 - DNA, 486 bp, Enterobacter cloacae
atggcaacacgcagcgttgatttcacctcagatattatcaaaggtgaaaacattgtgtttagttttgccgcagattctaaagtagatatagtagatgtggatgggattaaaatttcatatacctatccatattcagtaattgatacttcaaactggaaatcaggtgcatatacggcaattatcaatgataaaacatttgctgtacgtacctttcagatagtagatccaactgcgacagcaaataaatacaatcaatacctatctatcattgatgaaataaatattgttatagagtctaaagtacagggcggtggtgtaatcactcagagcatcaacaataaaagcctaactacagaatctatggacgcattactaaaactccgcactcactatacaaaacttgctaaccaagaattagcacgtatgagggggctttcttctggtaatccgattaaatcaataacaacttttaacaggggtaactaa

SEQ ID NO: 142915 - DNA, 1776 bp, Enterobacter cloacae
atgcgtttgtacgaattccagaaacaaccgttagattcaattatagaaccaggggtacgcaaggtagtactaatgagttcggcacagttactaaaaacaacaatagttactggtgcatccctgtactttcttcaacatgatccatcaaacatggtaattgctggtacaacagcaaatacagtgaagaagtataagaatggtaagtacgatccaactatccagctaacaccatcacttgcaaagctaatcacgagtaaatcagacaagaccaaaactaacgatgcaaccacgcaggaaactaccgttggtactttcaactatttcgttagtctctcaagcccaagtaccctacgtggcctcacggctaagcgtgttttctgtgatgagatttcaggggtagataccgagggtgatgaagggaaccccatagcccttgtatcacagcgttgtgagtctttccgtgactcattaatcatgatgtgctctacgccgttagtacctgatgatcccatatgccaggaatttgctatgagcgatcagaggcactttcacgtaccttgccctgaatgtggtgatgaacaacgtctgatatgggaaaacgttaaattcaaatggaaggtaatagacggtggccgccgttctatccctgatgcagataccgcctatcttgaatgcccgcactgtaaacaccagtactcagaagccgaacgcgtaagagcagtatcacagggacgttggatcgctacacatccagagattaaggatgtgaggggctatcacatatcacgtttgtactctccggtttcgtcgatccgcaagctggtacaggacttcgccgaagcgtttaaaaactttgaccatatgcgttttgtgaacaacgcattaggcgaaccatacattgataaagaaaacgtagaacatgatttaaccctactggaacagctacgcgattttgatattgatatacataacatacctaatgattgtgttggtttagcatatgcggttgaccaacaattagaccgcctggaatgtaccttagttggcatatcggaaaagaactattatgtactcgatcatcgtagcttctatgcagtcgattgtaataaatatgactcgccagcatatgtagaattacaaagttttataaataatacaaagctaaaaacgaaaaatggaacacctctacgagtacttcaggtatgggttgatagttctaacggtgctgcaaccaataccatctaccgattctgtaataaaccaggtaatgagatatacaaacctatcaagggtgatgggcgtacaaccattcctctatacaaagaaagtacatcgggtggttataagttcatgctacttaacgttaacgaagggaagaaccgtatcaggaagctacttaacgcagctatgaacgatgaagcacatgaaggtaagagaatccatttcagccattcattaccggatgatgcattccttcagtacaccagtgaaaagcgagttatgaaaggtggtcaacttgtttgggtgaagcgtactggttcaaaagatgatcgtaacgaaatgcttgatacgctcaactattgcctaattagctttgaatatatgttaaataaattgggtgttgatgcctataaaaaactaaggaactacaacgccaatatagctaaaactaaatacagtgaagaaatacaaactaatgatacacctatagaacatgttccagtacgtaaacaacgtaaaaggcgtatggggggaagaaattggtttaatgaataa

SEQ ID NO: 142916 - DNA, 540 bp, Enterobacter cloacae
atgacgtacttacaattagcaaaaatctacggatacgatcctgcaacagttagccgtgattggaaagcaaaaggtttagatatagatggaacagacgatgagatctatcaatgggtacaagataatgtactaacaccattgagagggcaaacagatataaaagaagaaactcagcgtgaacaattacgattagcaaaagctaaagcagacattgaagaaatggaagctgatctaaaaagaaaaaacttagtagaagtggattatgtaactgactcactttcaagttacttacttcaactaaagaacatgttgcgtagtattccaaacacaacttatgtagaactctttgcaagtgaagatgcaaaccaattgagggaaacgctaaaagataaaattgatgaagtactcagagatattggaaattatgagtacgaggaagatgaatatgaaaatggattttcagaatcagaagaagctaataaagatattgaaccaggcggtgaagaacatactaccgccagagaagatcaaaccgagtga

SEQ ID NO: 142917 - DNA, 675 bp, Enterobacter cloacae
atgggaaagttaacattcgtttgccttagtaagtctaagaaaccaggtggctactgcgtagcgggtaaaattattaaccaagatggttctattggtgaatggataagacctctaaataaatttggttctataagtgatcaagattgtctttatgatgattctacttatgctaagcctcgtgacataattgaagcggagtttttaaaagctattcctgagagtttccagactgaaaactaccttatcgattctactaagtattggattaagaaaggtgattatctttttactcgtaaagaagtaatgaaattatgcgattatcctgattcgctgtggtcaaataaatatcaatcgaaaacaggcaaatgtgatcaagtacatccgactgaagcaaccaagtttaatgaaagcttgtattttatttatgtagacgaaattcagtttcaaacttcaagatgggaaaatgaaccaattaaagttcgtggtgaatttacctataataatgtcatatataatctccgtgttactgatattgtatggatcaaccactttgaaaaaaaggaacctggagtttataatgaaacaggtagatttgtgacggtcagtttagcacatgatttgcatacaagcgtaagtggcgattatcactataaattaatagcagaggttatgtaa

SEQ ID NO: 142918 - DNA, 438 bp, Enterobacter cloacae
atgaaagtgttttcaattggctttactgaaaaaactgctgagaaattttttaccttgattaagtcacagccaatcaaaactctggttgatgtccgtctaaacaatgtatctcagcttgctggttttgctaaaaagaaagacctcgaattttttcttcgcgaactgtgtggggtagactatgcccatgttccagacctcgcaccaaccaaagagatgctcgacccttataagaaaggaaaagtctcttgggagatttacgaagataactttttgaatcttatggcaaaaaggaatattgagcgtatagataaaagcttaatctctgacggttgcttgttatgtagtgagcacaagccccatcactgtcatcgtcgtcttgtgatagaatatctgaacaagcattgggatacagattttgaggttaagcatttaatatga

SEQ ID NO: 142919 - DNA, 591 bp, Enterobacter cloacae
atgatgaaagtactaattatgtatcatcctgattttgcttcaaagggtaagtttgagcgaaagcttacccgtatcttctccgaatcgagtgaatacaaaatcttctattttgaggatcaccaggatttgatacataactattttgcctctgatttaatttttaaacttgatcatgatactcttgctgacccacttaaaataggattgacgcacgctattatttttgattcagcattgaaaccagagttcacaactgtttatgaaacgttatcatcacaaattcctgtaaggtatataaaggataaaattacgtttgtatccaataaagacaggggcgaacacttcgatgtatattgcggtcgcggtactttatggggtaatccttatgcgattggagccgatggtgatcgtgatgaagttataagaaagtttaaatacgactttgatagaaattttttaaaaggcggggaagatttcaaagaaaagcttaaagcacatagagggaaaatccttggctgccattgcaaaccttatccgtgccacggagatgttcttgccagatttttaaatgaattagatgatggtgagtaa

SEQ ID NO: 142920 - DNA, 276 bp, Enterobacter cloacae
gtggcttctgtttctatcagctgtccctcctgctcagctactgacggggtggtgcgtaacggtaaaagtactgccggacatcagcgctatctctgctctcactgccgtaaaacatggcagcttcagttcacttacaccgtctctcagcccggtacacaccagaaaattattgatatggccatgaatggcgtcggatgtcgcgccagtgcacgcattatgggcgttggcctcaacacgattttacgacacttaaaaaactcaggccgcagtcggtaa

SEQ ID NO: 142921 - DNA, 1557 bp, Enterobacter cloacae; identical to SEQ ID NO: 13485

SEQ ID NO: 142922 - DNA, 207 bp, Enterobacter cloacae
atggatgcgcagggcgaggtcactatgttcgtacatgccgcgaccgtataccggatcgaaaccgccaaccttctcgatagcgctgcggtggtagtaaagcatcacgccgcgctgcccggtgtacgccacatgctgatcgtcacggtaaagcaccgaaaggtcattcagcttattgcggccagccagatcgagaaactggtaagctaa

SEQ ID NO: 142923 - DNA, 228 bp, Enterobacter cloacae
atgcgtatcactgtattggatgacgatccggggcggaaaattaatctcgctcgggaacgatataaagtctatatcgatggcgttgaagttaagcacgtactcactgctgatgacgaaaaaggcgaggtaattgccgccgtaaccgatgagcgcggatacattacggcagagaacggcgaagtaaagcggcaatctttttacgggcgagtaattatccaacgccaataa

SEQ ID NO: 142924 - DNA, 174 bp, Enterobacter cloacae
atgcaattaggcagaaaatccaaaaacggactgagaaccttccttcgcagtgacgcaatcgttattgctgataaaaaaggaaaacccaaagtggttatgggtgtttttaacgaagacgacaatgggttacgcagcggcaaaccgtcatcctttaataaattaggtcgcgcctaa

SEQ ID NO: 142925 - DNA, 717 bp, Enterobacter cloacae
gtgattgaatggaaggggttgcgtgttgttacgactgaaacgctggccgcaggttatggttctgatgaggctaatattaggaaaaacctttcgcgcaatgccagccgcttcattgagggcatccacatcttcaccattaaaggccaagagctgaaggatttgcgagtgactaatagtcacgcacaaatttcgagcaaagcccgctctgttgttttttggaccgaaaagggcgcggcccgtatgtcgaagattgttgatactgacgaagcatgggcctttttcgaacgccttgaggatgcttacttccgtccaactccatcaatgggtatcccgctgacctatgaagcagctctggaagacctcctgacaaaagtgaaagagaaccgcattattgctgaacagcgcgatcgtgcagttaaagagaagcgctggatctctgagaaacgcgaagtaaccgcgatggcaacagcttccgctgctgttcgtgccaaaaacaaactggcggaacgcatcggggaaggaaaaaactatgccgccattatcccggtagagaagaagctcggacagaaattcaaatggcagccactgcgcaagtggtgccgtgataatgatgctgagccacacgaggttgaagacccgcgctttggtactgtgaaatcctggcctcgcgctgcatggatggcggtgtacaacgtggatttgcgcaagatcttttaa

SEQ ID NO: 142926 - DNA, 738 bp, Enterobacter cloacae
atgattagaaaaggtaacataaataatgcccttcaaatgttagaagggcatttgaaatttttagaacaaaatacaggtttaactaacgatattaaaacagaacattttgtttttaatccagataaagtacttgccaataacaggcacttcatcgcggaaactggatgggaagcacaacctgatggtgatgcaacaacagaaggacaatccttagcaatacttggtgctatctatgcataccaggcaaccaaagaaccccactatctggagctggcaaagaactactttaacgggtatcacaatgcgttctacagaggggtagcgtttccagatccacctgatggttcactacgctgtaactggatatgtaacggaaaagctccggtactggcacactacccattagatccagagtacccaactcatggaggcttcaagggagtactgtttacatggacgaacggacagacacagataccacacggttctcctaactatggcgagtacctcgatgctgtatggttcgcttttcctgaacgtgcttctttaggctggaatcaggtaaacgctactgtatatgcgtgggattcagaaggttcggtagactggaaaaccaaagcacctacatacaatgttgattggatcgttgaccgaacaggccgcaaggtagatagcaatggtgatgtactggaagaagtgaatcgccacgggtttaacagacacctcagagtcatttaa

SEQ ID NO: 142927 - DNA, 438 bp, Enterobacter cloacae
atgtttacggcagactataaaatcagaaagtacttaattaataaactctctccagttactaatttacactttccatcaaaagcgtcagtagatgatattactgtggtttatattggtgattcttctgtacaacgtactcaagtatctaaagcaaacacagttattaataatcaaattatgccgtcaactattcgaaatttatgtgaatttcgtgttgagtttgtgtctttaggacaatcatataaagaagcatccgatgaaattgaaaaaatacttgaagcaatttatacgcctggtttctttaatgacttaaaccagcagcttccaatgccattattcaatgtgcgtattgaagatagcctaatgacttctcatgccgaagcaacggaaaccgcttatgtacacacgcaaactctatcttttagctatggggaataa

SEQ ID NO: 142928 - DNA, 357 bp, Enterobacter cloacae
atgctgaggaggtacgctataacaaacgccgtgtatcagccgcggcagtgtgatgtagtcagcctgagtcttatcagcaactatcagccgttcggctatctgtatttgatactgaggtgggcgaccagtccccagataaaagcttacgagagcctcagggaaacgggtcagccaatcgaccaccagctcggcaaacaaaggaacgggtatcgcgtcgtcttccagcaccactacccggcaggtttgttctgctacccactccagcgcgcgtcggtgattccagttcgcgccgtggttaccgtcatcaataagcagatgggcatccagcatcgcagcgagacgttgagcttgctctaa

SEQ ID NO: 142929 - DNA, 426 bp, Enterobacter cloacae
atgggaagctacgtagaccaatctttgacgagaaatgaatctgtaatatctcgcgctcaaacctcctggattccaacaatcatcccagtaattatcggaatcctgttgctgcctttttacggcttaggattacttataatagtccctgtgcttcttagagtttggtcaacggagcttgcattgactaaccaaagagtcatcgcaaaagtggggttgatccgacgtaatacggtagaactccgcattgataaagttgaaagccttggaatacatcaagggatactggggcgaatctttaactatgggtcaatcgtaattaaaggcactggcggaaccaacacgccaattccaaacatcaaggcaccaatgcaattcagatctattgtgaacaatcacattgaggaaatggattctaagcagcagtag

SEQ ID NO: 142930 - DNA, 168 bp, Enterobacter cloacae
atgcagctaaaacgaaaaaacccggcacgggccgggaaggtattcgaaaatatttatatgaaagccgccattccggcattcttatcgaagagcgtttatgacaaaaaaagcgcacatgggtcaacaagagagcagggaaactactttttatggtggtattgggcataa

SEQ ID NO: 142931 - DNA, 222 bp, Enterobacter cloacae
atggatgcgcagggcgaggtcgctgtgttcgtacatgccgcgaccgtaaaccggatcgaaaccgccaaccttctcgatagcgctacggtggtaatacagcatcacgccgcgctgcccggtgtaagcgatgtgcttatcatcccggtacaggaccgccatatccttcagcttattcgtccctgccagatcgagaaactggtaagccaggtgcggttcgggtga

SEQ ID NO: 142932 - DNA, 627 bp, Enterobacter cloacae
atgatcaccaaaaccttcatagcagaaccaatcatgactacatcaggccagctcgtaggatgtgaactgttaacccgcttccaccgtgaagatctgccagtactgaacagtaagtacttcatcatggctatgacggtcgaagggaagaaggaactactgaaacaacaattagagacagtagaagttcatgcgtcatggttcagagataaccggcttttctgtaccgttaacgtcgataccgtacaggcacggctatgtgtctttgacagggatatcattcagctattggacaagctggatttcatcagacttgagatctcagagaactttgaagggcttgaactcggtatcaatcatccagtacttaaaacactgttaaacgttggctatcgcttgttcctcgatgatcttggctcaggccgtgccaatgtcgaagcactaactactggatgctatgaggcggtaaaacttgatagagcgttctaccgtcatgaagtacagaaacctacattcaatgtattgatgaagaacatcatgaagtactgcccgtatgtgatagtggagggagtggaacagcgtcaagagctactgacctgctccccgttgattaatacaccgcgatgttag

SEQ ID NO: 142933 - DNA, 336 bp, Enterobacter cloacae
atgggtaataagaatctgtttgatccaagtgttagaaagggtgttcaaatgttttggcagtgcggacaacggatagtagttgttcatcctggaggatacttggaacgtattgaagacgggcaatgtgtcttgttcgagacaacacctcatgaggatggtactcgtttgtactggttcggtgtggcttcaagtaacgcatactactttatgcttgaggtagctcagccagtggatatctttgctgttggtagttggttctacgcacagcaagctatgttagaggcacatgataaggatgatgcattctgtgatatgcagggtgaattaccgttttag

SEQ ID NO: 142934 - DNA, 624 bp, Enterobacter cloacae
atggactgtagaaaagcaaatattgctctaataacaattgtttctgctttattaattatttcatgcttggtacttgtaaaatttcttttttctggcagtgaaggtttcgtgtggggttcggttagtgactgggttagttctctgtcaacacttggtactttatatgtagcatatcttgcgtacaaaaatgccccaaactggatcaaggataagaaaaatgaaacaggattaaaccatgttataaatctaatggctgactacgacgaattattaatgcagatacgtgaagcaattacagtcttaacaagcgaatacaatgattcgcttgatcttgatgtatacattaaaagcattaatgatttgcgtatacaacatactaaattacaatctaagattgattcctgccgaagatggaaaataaattaccccaatgaactacaattatcaatgttcaaactatctcatgctaatattacattgttcttgtatatccgcttccagcgagacaatgacaaagaacaagcacaaacattaaaatttgatttgattaatttgaattcagatcttcataatgactcgttattttttaaaaaagatatggaagagatttttgaattcccataa

SEQ ID NO: 142935 - DNA, 264 bp, Enterobacter cloacae
atgattagaatggaatttaaaacttacgatgatggatcatactattttctctatattactgaggaagtacgtattgaaaccaatggagctgacggtttgcatatggaaaacagcggttcaagagtacgtgacttaggcgaaccgttccagtacttaaccatcagagaacgaaaggatgagtactttaacgaatcattgattaatccgtatcttgatacaatgattaaagcagtagaagtactatgtgcagttttgaatggctga

SEQ ID NO: 142936 - DNA, 291 bp, Enterobacter cloacae
atgtcatttgagtctttcaaccgctgttttcgcccggtggcaaggcttacagaggctttcgaggttggacaggtcatcggtacccccatttgctttggcggtgatgtggtccaccgtctcagcgggtgtataccttccatttcgaaggcattcctgacaaaggtgtttatctctgtcgagaacgattgggcgcagcctgtcccacttgctgccataacctcgctgatgcctgctctgtcctcgctgatgctgctgccagccttcgttaaggtgctgggggcaatagcctga

SEQ ID NO: 142937 - DNA, 714 bp, Enterobacter cloacae
atgggaatcatgacaaaaacggataaggtggatgcgtatatgctggcctgttacgcattccttaagaagccacaccgctgggagccgccggcacccgaaatcagatatctcggtgcactcctgcgacggcgggatgttctgctgggtgatgccctgcgtgaggagaacaggctggaaaaatacctgtcgacagacacacctgcagatattatcagttcctgcaggcgtatggcgcagcttctgcgcgaggaggtaagtaatatcgagcggcagataaaagcacatatcaaagccagccctgcactgaggcgtgattatacactgctgacctcaattaaatcggttggtccccagctggggatgcatatgctggtcgtgcttcgcagccataactttgtatcggctgagcaggctgccgcctttctgggcgtggtgccgatcgagaaacgctcaggcacatcggtccggcgccggccgcggatgtcgaaaatcggcccccctcagttgagagcgaagctttacatgtccgccctgtgcggaaaaatctacaataagcgaatgcgtaatatttacgatgagatgtgcctgcggggtaaacctaaaatggtggccattggcgcgctgatgcggaaactggtgcactggtgttatggcgtcctgaagaccggaaccgtttttaatgacgaagacctgaaaccggtactgtcaacctga

SEQ ID NO: 142938 - DNA, 336 bp, Enterobacter cloacae
atgactcaggctggcgggaccgtgactctgccgtttgttatccagaacgggcagacattcatccgcgccagctttattcaggatggcaccattgagaacactaagataggaaactacatacagtcttcaacatgggacggcaccggaaatgttggctggcacataaacaaatctggctacgcgacgtttaacaacgtgaccgttcgcggctcgatttacgccacaaacggtaatttttctttcaatggctccggcaacacaacggtgattaatggtaatggcgtaaccattaatattccgggtggcggccgcatcgtactggggacgtggacataa

SEQ ID NO: 142939 - DNA, 1251 bp, Enterobacter cloacae
atgaaatgtattaacaaatcagtaatggctattactgtttttggcatcctgttatctagtgttgttaaagctgctacacccgctagtgatgtagttctttccagtggtcaggatctggaaacagcacatagtaatttgcaaggtcaagttgatggtctatcgaatgatattgctgatgtgtattttaacaaaatccctgcaatcaatcaggtaaatagtcaacaagatacagctattaatactgcttcctctgctgcttctactgcacaagatacggcggatcaggctaaaacattagctgataaaaacgcttcccatattgcggcttctgatactgttgtaattgagcaaggtaaacgccttaccactgttgaaggtaatcaggctagtgatcacgttgaaatcctgcgtaatgcacaaacagcaaatagtgcattaactactgcaacagctaatacttctgctattgataacgtcaacagtgacttacaaggggctaaacagcttcttgctgataaagcacagattgcgcaagatacagctaatcaagccgatacaaacgctaacactgctcttatcatggctggtaataactctacccgccttacagcattagaaaacgctcctaagccgactaacggcgtagatggtaaagatggtgttgatggtaaaaacgggatcgatggtaaagatggtgctacaggtgcgcaaggtttaaaaggtgatacaggcgcacaaggtatagctgggaaagatggtgctccaggtgttaagggtgagaaaggagataaaggagattccatcaaaggtgataagggcgacactggcgctaaaggtgataaaggggatgcaggtaaagctggctctaacggaatcacaactaccatcactaagaaagaagttgatactaaaactatcaatctggttaagtcactcaatacccaaactacagcacaagctaaagatctgaaagctgctcaacaagtgttcgcacaagcgcaagctaacactaactctcaattcaagagcctgaaagatgaagttgacagcaataagaaagaagcccgttcaggtgctgctagcgctgtagctatcgcctctatgcctcaagtagagaaagatcaggctgtcatgttctctgctggtgtaggtagctttaaagacgagcaagctgttagtgtgggtgcatccttccacgttggtagcaacaccattgacctgcccccaggattagatacaaggctcagttag

SEQ ID NO: 142940 - DNA, 936 bp, Enterobacter cloacae
atgccgacagggttattgatagagctgaacgacggcgggaaacctatggagataacggcggggctgagatgcccgtcatttggagcaagttttgacagtggatatcagaaagccaagtacgcggatatttccggttatgtatccggttcgcaggtgctgtttatccctcacgcaacggcttatcttgattcagggctgcttcataaaatgaactcggtcaccatatccggtggccgcgtgacgcagaactccacgatgaaggatgtaagcatcagtgagcgtgaaagtacgtacacgttccccggtagcctctggcagatatttccgtcaggccagcgtagtggtgtgggtcttctcatcagcaacagtactgacttcacctcaataaccaatgctacacagtcaggacagtgtatctggaagggtgccgtcaatgttcccactggcggctgggcagttcccacgatagcggggtacgacaagtccaaatatatcgtctttgggcgctgcaatagcggtaacacagtcgatttcgatggcaacacggtcaggttcttcagccctccatccaccaacgatgatgctccgacgaccggcacgatagatattgtcatctttgccagtggcgtggcgcctcagccgggcaccggcctcaacatcttcaatgcagccggggcttgcacgttttcgacgacaaagcggcctttcgtctacctcaaccaactctggacgccttcgaaaaatgccgtaagcatcggcagcggctatgttccgctgggcaggttcgggctgatggctcacgaagtaaatggcatgtacgtgtatcgaatgttcggaataaaaatacagaacggcagtgcttcagttcagggtgggaaatatctcgggcgcgaacaatatgccatttttggtaatgacacggtaacgcccctctga

SEQ ID NO: 142941 - DNA, 615 bp, Enterobacter cloacae; identical to SEQ ID NO: 134513

SEQ ID NO: 142942 - DNA, 915 bp, Enterobacter cloacae
ttgctgagcgacagcctgagcgtggatggactggcacaggatattgcagaaaccttcacgatgtaccagcgctacatgagtgggttcgctgatgtgatgaatgggacatctgacgtaactatcaccatcaatggtgtggccgtcactgtgccgggtcagagatcgctggcaaagaaaggggctaacagcgacatcaccagcctttccgggctgaccacagcactaagcgtggcgcaagggggtactggtgcgaaaaatgcggcagatgcccgcacaaacttcgggctcggaaccgcagcactcaaaaacaatgtaaacggtacgctcggtgatgtcttactgcaagggtacggcaatctagttaaaatccagcagtataatcccggattacctctggggcagaccggggtatacggacagtcaagcgccgcaggatggaagccgtcaacagcgggcagcggctttatgactgcatactccgacgaccgccgccagcagtactggatcagcattgagcagggattttatgtgcgccatatttctgacgcagcctttgatatcggtgcgaacgtttacccgtggacgcagatgcaggcggttgggacatctgatatcaactttaagaaagatatcactgaacttgatacggaaatcgcgctggcaaacatcgatgcgatggagttcgtatcgttcaggtataaggatgacgacagtgaagcagtacgccgtggtgtaatcgcgcagcaggttgagaagattgacccgcagtacgttcacagcgctgagggagtgggtaaaatgacccttgaccttaacccattgcttatggatgctctggccgccattaaggcacttaacgcaaaggtagcagaacttagtaaacaggttgatgagctaaaacaggttggagcttga

SEQ ID NO: 142943 - DNA, 216 bp, Enterobacter cloacae
atggcgggcgaggctgccgtgtccgactccatcagcctggcatgggcagcctccctggcatcgatcgcggtggcggtcgtggccgcgggtcacgcggtcgtctacaagcgtgatccgcggtcggccacgccgtggggctgctcatcagcggcggcactgccctcccgctcgctggccatccgtttgcgtgacggtgcggcccgtctgttcacctga

SEQ ID NO: 142944 - DNA, 492 bp, Enterobacter cloacae
atggaaaaaaagaatcaatggaataccggctactggatcgttgccctcctgctgttgctgagtttgcagagctactggcagacggcgaaaaccgtcgagccggtgccctacagcgagttcgagaaggcgctggacgaggggcgcgtggccgaagtgctggtgtcggatcgtacggtgaccgggcgcctgaagtcgccggacagccggggcaagacgacgatcgtggcaacgagggtcgaacccgatcttgccgatcgcctgtcgaagtacgacgtaccctatgcccgcgtgttggagagcacctggctgagcgatgtgctgtcgtggatcctgccagcggtatccttctttggcgtctggttcttcctgttccgccgcttcgccgagaagcagggcatgggcgggtttctcaacatcggtaagagccgcgccaaggtgttcgtggaaaagaacaccggtgtgacgttcgccgatgtggcgggggggggatga

SEQ ID NO: 142945 - DNA, 492 bp, Enterobacter cloacae
atggcaataccagtctatctgtggctgaaggacgacggcggcgcggacatcaaagggtctgtggacgttcaggatcgtgaaggcagcatcgaggtggtggcccaggagcacaacctgtacatcccgaccgacaataacaccggcaagctgaccggtacccgtatccacaccccgttcctgttcaccaaggaaatcgattcgtccagcccgtacctgtacaaggcggtgaccaccggccagaccctgaagtctgcggaatttaagtggtacagaatcaatgacgcgggccaggaagtggagtacttcaacacgaagcttgagaacgtgaagctggtgaaagtgaatccgaagatgcacgacatcaaggatccggcgttcgagaagcacaaccacctcgagcagattgaactgcgctacgaaaaaatcacctggacctacaaggacggcaacatcattcattccgattcctggaacgaacgcgccaccgcgtaa

SEQ ID NO: 142946 - DNA, 516 bp, Enterobacter cloacae; identical to SEQ ID NO: 129617

SEQ ID NO: 142947 - DNA, 264 bp, Enterobacter cloacae; identical to SEQ ID NO: 101375

SEQ ID NO: 142948 - DNA, 174 bp, Enterobacter cloacae; identical to SEQ ID NO: 125612

SEQ ID NO: 142949 - DNA, 180 bp, Enterobacter cloacae
atgggaaagatgacgttcgtatttgagtatgaggacggtaaagagccaccggttagcgctggcatgtcgtttatgggtgggaagattgtcgccgcgtcttttagtgatgctttggatgaatccgaggttaatgacgcagaagggcttgagtggagtgatgagatgaagctacagccatga

SEQ ID NO: 142950 - DNA, 255 bp, Enterobacter cloacae
atgacctacttcgagacggacatgcccgtcaccaacgcttacacggagtccatcaaccgactggccaaggacaagaaccgtgaagggcgcggttactccttcgaggtgatgcgggcacgaatgctctacaccacgaagcacaagaagaaggcaccgactgcgaaggtctctcctttctacaagaaaaccatcggttacggactgccggacttcgcagaggaactcaactacggagtcgatctatcaaccatctga

SEQ ID NO: 142951 - DNA, 489 bp, Enterobacter cloacae; identical to SEQ ID NO: 119516

SEQ ID NO: 142952 - DNA, 165 bp, Enterobacter cloacae
atggggcgtttaatagcaggcatagacaccttgtgccccttcgccaccataaagagagcgttatgttacaagacggttcgaaagctacgagcgggttacgcgattgtctacattctgttttttaatttcaggcataacgggataattttctgcccaataaaataa

SEQ ID NO: 142953 - DNA, 618 bp, Enterobacter cloacae
atgcccctccctccaaattttttatctcctgaagaccaggctgagtacgatgcttatatgtcaagattcagcgagataaatcactataatgattatcgcactgtccccgtgattgactggttctttaaacaagcaaccgaggctttgcatcacgacctatggataccggcctgtacgagcttcctgaacggaattgaaacatcactcatggttacgttgaagtcgctgatgctgaaaccaacagttaacgatcagcatccagctcctgagctggtggacttggagggtatctccgtaatgagtaatgccttactgagaaaggccaagcaggaaggggtgccggtagaattactgtcatttccagccgagcaggatatgttggttaaggtagcagccgggagaaaacctgaagcagaaattgtcaggctgagaaacaacctatgccatggcaacattctggagttcatcatgtctgttgatatcggtacttcaggccccatacgtatttttacgcctgaatgctgccgtgaactggcgcatgaactttcgtccatttccaggaattgggtggtaggtttgcacaagtactgggtcgacaacaatctgatgtccccctga

SEQ ID NO: 142954 - DNA, 357 bp, Enterobacter cloacae
atgaaattaaaataccttctgttatgtgcaactctgtctgtcgcctttacctcctctgcggtccttgcatctgaaaacgggaaaaaaccgatcccgggcaaatcagatgtgatggttgccgatatttgtttaaaacctgaaatccaaagtgaaaccgattataaaaaaacgaaagaactggtaaggactgagtttgaagaaaacttgcctgttggatcaaaaatcaaagaaaaagacttgaatgccgtaattgaagcctttgctactcgtaaaagggacacgccggagcgagcggaccattgccaagaaaacgtacgtgaaagatactgggaaatgaacccggagaaagataaataa

SEQ ID NO: 142955 - DNA, 378 bp, Enterobacter cloacae
atgaacagcgaacccaataagcaatgctgcaaccgtgctgatgaagtcaaaaaagaaagtcagtcttgcaataaagacgatgaactggcgcaactcctggcgaatcttgaaataactgatagtgctctgtacctgagtaacgaacgtatagaggaaattgcgtctacagactctgatgcggagaaacgccagcttgccggtcgcctactgaatttgcagcgatacagagacaacacctctgttcttcacgccctcagctttaaacatcagccaggttgttatcctctcaatccgcttgatgaccgcctactgaacaagctcagtgattttcagggtcgttcaatttctctggatggtggggatgataatgcatcgtga

SEQ ID NO: 142956 - DNA, 462 bp, Enterobacter cloacae
atgacaaattctcaatctgattttcctttgaacgatcaaagttttcaggcagatttgctgaaaatcaaaaaggttttcgccgaccttataacgcaggcatctgatggtaagatacccataaggtcttctcatgtacacggcttacaccatttcgaggagctctacatccgggcaagagcaggcatgtgttcggtcctgggatatccggtcatggttgtttcaactatctcagttaaagagcccggcacaggcatttttagagcgcttcttgcagaattgaaatgtattgcagatgaacaaaattacattttgaaaattgaaaatgtactgcctcccctattccgcaaataccttattcaagaaggttttgttttcccaggtgaaccttggatgtgtggttccggctattggtttaagaacccacaagtacttcatgaaaatattgagttattatctgtttaa

SEQ ID NO: 142957 - DNA, 648 bp, Enterobacter cloacae
atgcaaccagataatgatttctatacacacttaggtagtttaagtaagggagcgtcgcgtcaagaaatatataaagaatataaaacgtctgagaatgataatttttgctttaacatgaatgggctgttaagggctggacatccgttgcagacgcttcaggcaaaatttgatgcaatgaagtcaatattcagagctcaaaacctggagcaaattgttctatttcgcatgacatcaagttgtgaatttacacctggcggtgcagaggtggcccttggcatgccctttaggtaccctgcatttttgtcaacaagccgcaatgtggatgttctaagatcatttaatccctcacaagggatcccaactgtattaataattacatgtcctgcgggtatgcgaatggctctaatggagggcaataactctcactcaggagaggcggaagttttactggaggcatatgcagagtacaaaataacaagtgctcaaaaggtgaggtcggatgctgaaattaaaaaatatatcctcccgagcaatctcagtaaaacacctgttatttatgttcttgagatggaaatgactggcaatgcagtaacaccaagtcatgctcagatagaccaaagtgagatgtttaactttaaaccattgtaa

SEQ ID NO: 142958 - DNA, 171 bp, Enterobacter cloacae
atgaccgaagctgaagatttatctacctactgtagggataactgcggtttagatgtgtccacagttgcactgcgggcaggtctgcctcggcgcacgttgtacgactggtggcgaacgcgtcggcgtgtcgtcgaactgatcgttaaaggtctggccgcagagcagaaataa

SEQ ID NO: 142959 - DNA, 351 bp, Enterobacter cloacae
atggaagttggggttaggcatgacattgagcaacagattgcccgggctgcggttaaaagtttgaccagtgcaggttataaaatttcagtgttcgacggcgaggcatacgcgctggcgaagactgatgacgcaagcgctatcctggatgcaatgttctgcactgacggcgacgtgctgtacgtctatacaccgccagctgcgaacaatggatcctgggaacgtatcgggtttgtcgagttcgtctacggaaacagtggctgggatgttatttctgaccactccagcagccttggaagtgtgctgcattccgcaagcgcactggccgataaactggaaagagagtacgcctga

SEQ ID NO: 142960 - DNA, 297 bp, Enterobacter cloacae
atggcaaaaaccacaaaggaagcacacttcagttctgagatgatgcgctgtcgcgggatcgaatttgcgaagcttggaatgatggtcgaagtcgatggggagattggcaccatcgagggcatgaatggcagcgcaaatctggatgttcgcttcacaaatcagctcaagcatggaagccaagttcataactgccaccctacctggaaagttaaatacttcgacgaggccggtactgtgatcgcacattttgatgaatgtcggtgtgtgttccgccctgaactggcgactgtggaataa

SEQ ID NO: 142961 - DNA, 279 bp, Enterobacter cloacae
atgaccgatatgacccatgatgaatttgctgaattcccgtttggtaaagccgcactgcaacagctctctccgttaccggataactttcgcctgtatgaagctgagaatttagggcccggtaaaggtatgaaaatcactggtgctgaatttcgtgttgcacagcgcggaccgaataaaggcaaacttagcatccttgtgccgggtactcgaaaagttgcgcggctcacccaggacgaaatcaaccacgcatacgcgaaagaagcctcaggggagtcataa

SEQ ID NO: 142962 - DNA, 267 bp, Enterobacter cloacae
atgcacaacgcttatcatcggccacagcaggagccaatgcccacgctgaagtttctctcggttgccggtgtgggagcaatctgggccgtacaggaacgctacagtgatggctggtttggcgtctcatgggcgagtaccagtctcgcacgtgtcaggtcgatggaagcagcagcgaagatagcccgagctgtagcggaatccggcgcagacaatattcatgacatgagggcattagtggcatcgctgctgcccgaaaaggcacagtga

SEQ ID NO: 142963 - DNA, 288 bp, Enterobacter cloacae
atgcctgagctgccgcatatcgcccgcccctgccgagattgtccttttcgcaatgatacgcttaaagaatggttgggtgctgagagaatgcaggaaattttgggtgccgattcgtttgtctgccataaaaagaccgacaagcagtgcgcgggccacatgctcataaagggaaacgacaatctgttcgtgcgggttgccggtcgtatggggatcccgctggaactatccgggcgcgagctggtctttgataacgagcaggactgtattgagcatcacagacgccggtag

SEQ ID NO: 142964 - DNA, 477 bp, Enterobacter cloacae
atgagtattaatttacctagccatcttaatgaccttcatcatgccctccttctggtagacgaggctccactggaatgtgatgggcataccatgctaataagtaatgctcttgtagaggcccgtatccctcatgaacgaattcttggtaccgttcacggtcagcacaatggattttgtttatatcctcatctctggctgaagctagatggttatataatcgactaccggttaaggatgtgggtaaacctttctgacggggcgtcagtttctggcactgctccgcatgggatttttcctgccaattcggatgagatgaattatctgtatgaaaaacatcaagtcgcccccgcaaagctgtttaataaagacctcctcagcttaatttcagatggtttttcgaacaaattaaccattcctgaaacgaccatatcctggtacaaacgacactcccatgataatcctgaaattaggagctga

SEQ ID NO: 142965 - DNA, 915 bp, Enterobacter cloacae
atgcgccacgcgtacgaatggcgtaaaaaaacaactagcgatgaaacaaaaaaccttatggacaaaatctataacgatatgcaaggtttgttagttgagtttgataaatacactaagaactttcgccttcatggtgaattgaatcaattttatatcgactttatttttaagaaactttatggtttgtcgttcaaagtaaataacatgtcttttgaaagccatgtaaataaaattgcattagcttcaaaaatagatcgtttgtctgagtactttgttaaaatgaataataggcttaatcatctcggactttttgaaaaatctgttacggatggaattcgtaacatctcagaaaatagcaacctttactgtgtaacgaaagaagagctcttcaatgaaaataatttaactgcggctctgttgacctggttaaaagctaggctatcctacttaaatttctccttccttcaggaagaaccaattgcaaacgggcgtacggacatatccatcttccaggacggtcaccggataagtgtaattgaatctaagctcataaaagatcgtacgaatgtttcggatatccgcaataaaatcaacaatggaatctatcaactttactcgaagtattcagattctatacctataaattataatacgcccccagaaatgtatttcattttattttgttataaccctgactataaaactatacgagagcatatagcagttgctcttgacaatttaagttcagagcatagccgtcttactttaatacatttaggaaattttcgttatcgccttaaagaatctggtggtgactacccagacaaagtggttcatataaccctaatcattgctccgcttcgtacaaaagataataatgatgaaaaacacgggaaatatctaaaaagaaaatga

SEQ ID NO: 142966 - DNA, 588 bp, Enterobacter cloacae
atgcgtagttacgctgattttaacgccggagaactggctttcattgaaccactgcccatatttgaacgtaatacagcaactgaaagatacctcgatgacaaacaggtaatgcaggaaagaagatcctgtctgtcagtttacgtattttgtagtaaacttgagaaacgagtcgaagagtttaatataaataagcattttcgcggtagcttgattacctttcttgagtctggagagcctttcttcatagaaagtttgcatcgtgattggcctagagatgaatatctttcccaactgacaacttatataaaccagcttaaattatgcttaaatgtacaaacctccatgccttttcctgtaagcaagttggaaattatttatgaaaaacttacttcaagccttaagcaagtagattatgatttatcccggttgcggtttgctaactcatattgggtaagtgatcccaaaagttatggtatgcatttaagcaatcatacacaaaatattttcctagtggataatttagataatctatttcaaacaacttcaacgttggttctgtttttttatcgtggtccctattacaaatga

SEQ ID NO: 142967 - DNA, 279 bp, Enterobacter cloacae
atgaagacttttttcttacacgctgaagttgaaaatgaccgagaattacttctttctgttttgatcgagaaatttcaaaatggactcttcaaacattttgaaattaaatatatagcagatgatgattatactcgcatagatatttctgataatgttacgattgaaatgatgcagtgttttatatcagaactgcctgatggccatcgaatgttacaaaccctcgccactgacatcgatcaatccgactataactggcgcaataaatacttcgcttcctaa

SEQ ID NO: 142968 - DNA, 1221 bp, Enterobacter cloacae
atggacgaaaagtccctctacgctcatattctcaacctgtccgctccgtggcaggtaaagtccctttctctcgatgaaaatgccggttctgttactgtcactgttgggatcgctgaaaatacccggttagcctgtccgacctgcggtaaatcctgttctgttcacgatcaccgtcatcgtaaatggcgccatcttgatacctgccagttcaccacgattgtcgaagccgatgttccccgaattatgtgtccggagcatggctgccagacgttgcctgttccgtgggcagggcctggcagccggtatacgctgctgttcgaatcgttcgtgctctcatggctgaaaatcagcaccgttgatgctgtaaggaaacagctaaagctcagctggaatgcggttgacggcattatgacccgggcagttaagcgaggtcttgcccggataaaaaagccattatctgcccgtcatatgaatgtggatgaggtcgcctttaaaaaaggacaccgttacataacggtgatctccgatcgcgatggccgggcgctggccttaacggatgatcgcggcacagagagtcttgccggctatcttcgcacacttactgacgggcagttgctggctatcaaaacgctctctatggacatgaacgcgggctatataagagccgcacgtatccacttacccagtgcggttgagaaaatcgccttcgaccgcttccatgtagcgaagcaactgggtgaggtggtggataaaacccgccagaatgaacatccacacctccctgttgaaagtcgtcgtcaggcaaagggaacccgcttcctgtggcagtacagcgataagtggatgaccgaatccaggcaggaaaagctgatatggctgcgtgcacagatgaagctgacgagccagtgctgggcactgaaagagctggcaaaggatatctggaacaggccatggagcgaggaaaggcagaatgactggcagagatggctggcgctggcggccaacagtgacgtacgcatgatgaaaaacgccgcgaaaacgataggaaaaaggttgtacgggatcctgaatgccatgcggcacagtgtctcaaacggaaatgcggaggcactgaacagcaagatcaggctgttgaggataaaagcgaggggataccgaaacagggagcgctttaagctgggagtgatgttccactacgggaaactgaacatggcgttctga

SEQ ID NO: 142969 - DNA, 1404 bp, Enterobacter cloacae
atgacggctctcgcagcggagtttttcactttggatgaagttaaccgactcaagattattcaggaagtcatcgaccggcgtctgacaacacaggtggcagctcagcggcttgggatatccgaccgtcagtgccgccgtcttcttgctcgttatcgtgaagatggtccacttggaatgaccagccgtcgccgtggtaaagcaagcaaccatcagttgcctcagggactggctgcttacgcgctcaatattattcgagaacgctataacgatttcggcccgacgctggcctgtgaaaagctgtctgagattcatggcgtacatctttccaaagaaactgtgcgtaagctgatgactcaggccagtctgtgggtcccacgtaagcaacgtgcgccaaaaattcagcagcctcgttaccgtcgtgcctgtgccggtgaactcatacaaatcgacggctgtgatcatcactggtttgaaaaccggggacctaagtgtacggcactggtttacgtagacgatgcaaccagtcgcttaatgcagcttcgtttcgtgaaatctgagtctactttcacctactttgaagcgacacgtggttatatcgaaaaacatggtaaaccgctggcactgtacagcgacaaagccagtgtattcaggatcaacaataaaaatgcaaccggcggcgacggcgatacccagtttggccgtgcgatgcacgaactgaacattcagaccatctgtgcagaaaccagcgcagcaaaaggtcgtgttgagcgggcgcatcagacccttcaggacagactggtcaaggaactcaggcttcaggacatcagcaccatggaagctgcaaacgcatttgccgaagagttcatgaacgattacaaccgacgtttctcaaaagcgcctcgccaggagttcgatgctcaccgggaactggatgtcgatgatgatcttgatatggtgtttacttggcgtgaagcccgccgcgtgtcgaaatcactcacggtgcagtacgacaaagtgctttatctcattgaagacagcgaattcagtcgtcgggcaattggtaaatatattgatgtttggcattaccctgacggacataaagagctccggcttaatggcatatcacttccctactctacctatgacaaactatctgaaatcgatcagggtgccattgtggacaataaacgtcttggccgtgcgctggaaatggcgcaactggtgcaggccgaacgggataataaccggtcacaatcagtgccatccggtgacggcccttcacgcaggcgcaaagcccccacgacgaaaaaatcccagcgttctttggatcaggacgatatgttcaatgcgcttgtaaaacttcagtcacgatctgaagaaatatttggtaagaaacagatatga

SEQ ID NO: 142970 - DNA, 867 bp, Enterobacter cloacae
atggcaatgaggcggacttactcacaggttaaatttgttaactgggtagtgttttttcttagtgtcgtaatatctgtcgctattgtaatatttactacagtgataaagaaaatggggctattccctcatttgactatagctccttatctcggttattacggtataatcgtgttggtcatcacaattattttttccacaatgatttcctcaatgaaaaaatgtgcagccacaattcaggaaatgtttgactgtgatgtcttacacattccatggagtgaattaaaagtagggaagccggttggcagagaaaatgtctttaaggcttcaaggtattacaaaaaaagaaacaaaaatgatgagtttattaactggtatctaaataaagattatcatgctaatgaaaacatattggcattattatgtcatgcgaaaaattttggctgggataaggcacagcgcgatgtaatgagtaaaatatattttatcactatgttactttcctttttggtacttcttgcatatggtttatggtctaaatcctcgctggaagattttttgttttatattgttttcatgctcccgttttttagacatgtgataatgttatacgttgaaaacaacaaatctattaatcgaattatgcgtgttaaagattttattgagaaaaaaatacagaatataaagataagtggcattataaacgatgacatcttatctcatgatttaagatcgattcaggatgaggtttatgcccatcgatcgacctcgaatcctgtgcccaattgtctccacagattcatgcggaagaataatgaggctatttatgatgattattttgaagagaacttgaaaattttaccccgatag

SEQ ID NO: 142971 - DNA, 999 bp, Enterobacter cloacae
atggctcttacggtgactgctgcgtttaacgagtttcagcgcaatattgtaaatctagatagctctcagactgatcgagccagagccagtagagattggttattgggcagaatgaacacttttccaaataatgatgtttatttccccataatataccctgatatacatacaggttttggttcctttgctagacgcacaaaaattcgccctttagatgatatagatcttatgtttggtctcgatggtgatgattgtgtatacagcgagagtgatggaaaaataataatcactgcgcgtgaaggaaccgttcgtttaaaatactataagcatgatggcacaaattttattaactctagaaaaataataaacagttttatctcaagcctaaatcaaattccgcagtatgataaggctgatgtaaaaagaaatcaggaagcagctactctgaagctaaaatcctatgactggaattttgatatagttcctgcattcattactactccagattcatttggcaagacatattatttaataccagatgggaatggtcattggaagaagacagatccacgaattgacaagcaaaaagttactgatcttaatgttaaactctcaggaaacatgttaaatgtcattcgtgtaataaaatattggcaaaaacgtcccaccatgccttcaatgagtagttacttgttagagacaatgctacttaactacttcaacggtcgatcagaatgttatcaatgggtcgatttagagattgtcaatgttttaggttacttagcctctgctatatttagtccggtatacgatcacaaaggcatacaaggaaacataaacaaccttagttatgatgataaattaaagatatctatccgctgttatcttgaccaaggaaaagcaacggaagcccgtaattacgaaagtcaaaataaccacagagcgtccattaacaaatggcaggatgtttttggtgtcaacttcccatcatacggatga

SEQ ID NO: 142972 - DNA, 789 bp, Enterobacter cloacae
atgattaaattcccgactaaaaagcgcattgatttgtataaaaatgctgtcagttctgagcaattacagctggatctggctgcggctcaggagtttatgttcgatgcctgggaaactgatgacctggacgttgtgctgaaactcatcagaaaagctatcaagaaatccccgctctgtgctgacgcatactcattctactgcgagatatctcaagaacctcctgagtcaaaaatcgttaatctggagacggctttgtacgcagccagcattgctctgggcgaggattttcaggaattcgcaggccgtttctggagatgtgtcgaaacacgcccatatatgagagcaaaagctgctttggctgatgccttgtgggtgtcaggtaacttccacccggccatggctcactgtcgcgaaatgcttaagctcaacccaaacgataaccaggggattcgtcatttattagcgaactattaccttgagcttgaaatggtggatgatctggccttccttttagacgattatcctagggatatgcgaccgttctttcagtatacacgcgccctactcgcctaccgacagtcatcccaagatgctgatgatatcgctaaagctgcaattgattctaatagacacatcccggggttgttatcgaagtgcagattgcagcccaaatctaacagtggatttatcacgttaggtggaatggatgaagccatttattacgtgaataataatataaagccttggattcgcactcctggtgcaattgagtggatagttggatattaa

SEQ ID NO: 142973 - DNA, 696 bp, Enterobacter cloacae
atgacagagttggaggtgtcgctaaatcggatttatcaaagtttttggataatggaaggcctcattgaagaaaccgaatccctaatcaataaatccttgcgcgacttcgaaaaatcaggcccgagaatatgctcttacgaccacgactttggtagtgatgagtattataaatttcgaggttttgcaagttataattttgacgaggttgttgaaaattacgctaccttaatgccaagcaggcttagagcctcagcatttttaacaatgtttggaatgtttgagtgtaatattgaatcactcacacaagcgattttaaaattcaacgatcaaatttggagagtttcggattttaaccaaaagggcttagaacgttgtaacttaattttaaaaaagttacttcccatcactcattcagaatcaagaaacttgatatcttgtattgttaaattaagaaacctatgtgcacataacaatcggtatgtaagtgatcatattttaaaggatgggaacataaaacggttaatttcagaaagcggatgtattgatacaaaaaggttaaatggagagcatgagttgatttttaagagaagctcgcttcactttattttagaatgtttcataaactttcataatgaagtaattaattctttgaatggccccggatttataatgaactataaattcagacagctttaa

SEQ ID NO: 142974 - DNA, 1314 bp, Enterobacter cloacae
atgaataataaattcaaccgtgcaattgagcacttgattaaatcaacttcctcagaagaggtcatcaatgcaattcaggcagtggaagatctttttagtttagcatggctgagtaaacaagaaggacatagactacaaaagttatgggccaggcgggatgtcctgtccacatctgaattatactctttagggaaatctataattaatttgagtgttaacaataagaaatggcttgatggaactgctaaagagataaagaaggatactgatagttcacatggtttgcttaccgaaatgataataatcgggtctttgtcaacaagcaacgggacagtttccccttgtcctaaatcatttaaaatatacgattatacagttgattttgaaactggatttagacataaggtctctataaaaaattatgacataaccaaacatgaaaaagacttcaatacaagaagtgaagtaattcggtccacgttcaaaaatcatcttaaagctaggaggttgtctggaagattaacgattctactagagcatgatatcctaacagatgaacttacaagagaaatatgctttttcattgcatttcaaatgaaagattatggtttttacccatttagtaatggaagcggaggtattggattccatgaaataactgagtttgataagaacagactagttagtccttccgatacaatacttatcattgcaaagcaccacttcaatgaacagaggaatatcatcgataaaatagatgaagcaaatgacaaactcttatctgacccagacgactcaaaatcattaaaacaattagtaattcggttgggttcgacagctaacatagaaatgatcaatgaccacttgaccaacttaggggctgattgggagagatgtgggtttgacatgtactttctgtttcaacctcaggttgtatccgatattgaaaaaaatagcacaatgatcacgacatcaattaagagtggggtcaaaggtttttttccttcaacctcagatattaaaaataagcttgaaaatatgaaatgtctaaaaatggaatttggcattggtgcaataagctctgaaagttcacccatgattctaatgattaatgatactcaaacaaatgtttcgatacaatcacactatgtatttcagaaaggtgatgtatatctccgggcagaaaaaaaaggaagcggttatgaaggcagtctagctaagatggctccaggtattatcacacatgctgtatttgataatatgacaatatctccaatttgttactcacaagatgatagagtattaatcatataa

SEQ ID NO: 142975 - DNA, 147 bp, Enterobacter cloacae
atgcctggttttttacataaccacattggcaagctgttcctgataattaatgctctggacaagtccgattgtcaggtggggtttgagtacctgggcagtcatatgaccgcccaggatttgtttagagatagccgaggtacttcgtaa

SEQ ID NO: 142976 - DNA, 1347 bp, Enterobacter cloacae
atgtcctacactaccgaacgccatcttaagactggaaacgatccgcgctcaatgcctgattattcatcattacgtgaagaactagctaaactcacccatcctgcccgtccggatgtgaactgggggaatgttgaaaaactggcgttaaaccttttcgatatcaatggggtcgagcttcagacggcggcgtggtataccttggcaagggcacaacaggcaggtatacagggtttcaatgaaggtatggcgattctggatgccctgatacgctatcaatggtcagcaatgtggcccgcttctgcacatgccagaatagaaatactcagcagcctgagtaagcgtcttcagcagctgttccggactttatccctccatagggcggatttactaggcctgaaccagggaataaggcttttgagctcaactggtgaagccttgcaacggctcgaactgcacagagcaagtggttttgagccgcttcgtcagatgctgcaaaacacaattatcaggctggaaaatagtgatgtcacgtcaagccagacggatagcaatctaactgacgtagcactaccggttaaggcagaaaggcagaatagtcagcgctgggtatatgtggtgaattctgaaccagcagttgaagttgaagtaatcagaaaatcagcctcaagggtcactccattagtggcttatttcggcggtattttaacagctgccgtactgggcatagtcacctatattttcacgccaatagtattcagccaccccggagaagatgcgttgaacaactctctcgcagctttaccgaccagcatgcctcttccggctgtcgatcagctacgccaggacgctccgacgtggcttgaatccagtgatacctacgccaaacaattaacttcccgtctgaacgaactgagcactctttcaccgtattggccattgcaatacggtaatcagttggtagaacaaactcgccatctttaccctaacgccaaatttgcagaggagttgtcggcggactggcgatcaaagctgcaagccaacagtttgcccaatgccaccatctcaggttggtacaggggagtatctgagcttcagacgcttcaggacagacttaatcaactcgatgagaagaagggcaaatacctgaccgttagtgagcttaaaacggctgtgttctctatatcaaagtccttaaacgaaagcgtgccagttgaagaattaatccggcaactgcaaaattccccgcaggatcaaccgctgtcccgagacctgctcaaccgggcagatctacagctcaggcaactgaataactcctacatcatggccacgtcaaacaaccaaaaatag

SEQ ID NO: 142977 - DNA, 498 bp, Enterobacter cloacae
atggcagattccagcttccagaatgaagtgccaaaagcacgtgtcaacatccagcttgacctgcacacgggttccgcccaaaagaaagtcgagttgcccttaaaacttctcgcgttgggagacttcagtaacggcaaagaaaccctcccgctttctgaacgcagtaagttaaatatttccaaaaacaactttaatagcgttctgtccgagcttaacccagaggtcagcattgatgttgctaacaccctgagaggtgatggttctgaagaaaatatcaaactcagcttttctgaaatgaaagatttcgagcctgaagcaatagcaaagcaaattcctcaacttcgtgccatgttagccatgcgcaatctccttagagacctaaagtctaacctcctggataacgccgagttccgcagatctcttgaaaccatactgaaagacccggctctgagcgaagaattaagacaagagctgaatgcccttgcacccgccgaataa

SEQ ID NO: 142978 - DNA, 921 bp, Enterobacter cloacae
atgaccatgatgaaagaggatcatccgttacttcagttggtacttaacgattccggtcgtcttgctatgcctgttcatgatagagaccaacagtattgcccgacttgccttgcaaaggtactgaagagtgaggatggaaggttgtcgcatgtcgggcacgaaaatcaaactaaatgtgttccttctatttcagtagttgtgacaaaagcaatcatagaaatgttaagtgatggagaaaaaatttatgtaagtccaatccgaaaccgagggcgaactctggcaccatcagtgattttttctcctgatacacacacatttaagccatttataaatacagactatcagcctgtaggggcaaactggaaaagtgacaagggttataaactgggccttttttatcttaaagatcgagctagctctattactaaagaggaatttgattttattgctgttattgatccagagttattgcttaacgaatttaattcttcatggtctgttgaacagatcgcaccaatagaacagttgaagcaaatcttccggtcaaaaaataattcttctgcttgggtaaaatggcctggtaaactcgacttagcaaagaaaaccaattataacgataatttctggtacgacaatcaatctgatagtgcggaacttaactgcactgtttccgttgtaggtatagaaggtaacagttcaggtgaaacaatttatagattacaaactatgctaaagcataagtttaatgaatatcaactggttcggtctttgggtactattatgcttcttgataataccgggaatatggtctcatcaaatcacccgaattttgacatcatctcaagcgcatgtataagtggagtacgtgattttgttcgccaaaacccatgggtagttagacagacaactcttaacacttaa

SEQ ID NO: 142979 - DNA, 750 bp, Enterobacter cloacae
atggaaaacctgctgatcgtcaatgccgatgattttggcctgtcaaaagggcagaactacggcattattgaagcctgtcgccgtggcgtcgtgacctctacaacagcgcttatcaacggtgaggcggtggaacatgcggcgcagttaagccgtgagctgcccgaactgggcgtgggcatgcactttgtgctgacgcttgggttgcccctttcaccgatgccaggtctgacgcgcgaggggcaactggggaaatggatttgggaaatggcggagcaggacgctctgccgctcgatgagattgcccgcgagctggattgccagtttaaccgctttgtggatgtgtttggccgcgagcctacccatattgacagccatcatcatgtgcatatgatcccggcgattttcccgcttgtggcagagtttgcgcaacgtaaaggcgtggcggtgcgcgtggatcgtgaggtgcgcgggttgccggacgtcgcggtaacgtcaacggaggggttcagcagcgcattttatggcgacgaaatcgacgaagcgctgttcctgaaggtgctggatgactccgccgcaaaaggggagcgctcgcttgaggtaatggcgcacccggcgtttgtcgatcagatcgtacgtaagagcgcctactgctggccgcgtctggcggaactggaagtgctgacgtcggcgtcgttgaagtacgcgattgccgagcgcggatatcgtctggggacgttcagggatctttga

SEQ ID NO: 142980 - DNA, 894 bp, Enterobacter cloacae
atggtgcgtaatcttaagagtaatgacgatttttcgcgtgaagtgtcttttctttttcacaggtctataaagattagaaattcaggtttcgcaatttttggtgcaggtctattgataatgatttttagtgtttgtgtgtggttgttgtcactacgcttctcaccttcagttctggactttgatattgatgtacccttgtcactaattcattcgactgaggcaacaggtaaattagaggtttcgggtattggcgaagaatttgaaggtttttttactacatactctaagttattattaggggtcatgggtctacttacagtgtcttcaactgtcattaaaattattaagggtgaggaaattggcgaaatatttcctatacttataattgctggtgcttttttggttgggatgacggtttttacatctgttttaggcccaaatgagtcggatgtacattcaaccgcacctgtaagcgttatcaaaaaatatgtaaaagaagataattacgataagcttttaaaatatttaaatgaaagtggtttgccatcaagtgaagatgcatcaatgaagtatttaatagcgcagttgcatattaaacgtggcaagccagatgtaaagctaacacaggatgttgtggagtcgtatatgtcaggagtattacaggctcatattcccgtcaaagttcgttacgctttagagaagactgcgttagataaaactgtctcacaacctgcgattagttttgaacaaaaaagtgttgctaaatcactgagcttttcaaaagtgtcggttaaatgtcttgcagtaggcggtccggtggccctcattggatttttattcgctctgcttggtataaaaatcagacggcgggtcagatttatagcatcacattaa

SEQ ID NO: 142981 - DNA, 162 bp, Enterobacter cloacae
atgtgtaagtttactcctgtcaaaattattgctgattatatgttgaggtttcttaaaaataatgccgatgccaagctttatgaggcaatgcagcgccttgaaaaaaaattggtcagtttgtcgctgatggggttgatgaacatcaattacgctcttcattaa

SEQ ID NO: 142982 - DNA, 294 bp, Enterobacter cloacae
atgtcaggtttaagcagttccgcccaaaagattacaatggcacagatttacgtgttacgacggatggcatccggcagggtctatgatatctctggcaatttcagacgggccagagaacggcgtacgtttatggggaatcctgatgatgtgacgtgcaggagctctccggtcctgttccggctcggcctcgtggagttatgccagccagcaagccatctggagccaggtttatactatcggctcaagttgagctcctcagggcatgaggctcttaaggcgaacgcacacctctaa

SEQ ID NO: 142983 - DNA, 204 bp, Enterobacter cloacae
atgaaccatgagagccgaactgtatacctgaacacggccattgaggccctgctgaaagctgaggcggctctgaacgatcttgcattagcctatgagcttaaaccagatgaaaagccaagcgcatgccatcccagaaccggcacactttccactgcgtcccaggtaaaaaaactccgccgtgtccttgagaagcagaaagtatga

SEQ ID NO: 142984 - DNA, 792 bp, Enterobacter cloacae
gtggcagataattatactaaggcgtcgtttaacattccctgcactgaggatcaggctaaaatggcacaagaggccattgcattcgttaccgaagcagaaattgcagagggcgagcgtttgctttataagtcactggcagattgttctctgacagagaagctgattctcagtattatcgagagccaccctgagtatgacccttcagagccgagctttgggcaaccatcctgcccagactgcaattatgaattgctgttcgcaacagaagttaccagcagtgggctatcagtttttcatgatgagaccatagatcttgaccatgcaatttgcctcacaactgccgttctgtcggtattcgacatcccggaaatggtaacaattactgctgcctttacatgcagtcaaagccgtacagatgaatttggtggtatgacaattctggtcacaaaggatacccactattaccaggatggctgtcagttttctcgtctcatgaatgaagctcacaaagccggtatccagtatgctctatgtaaagtgacgcattaccacggagagagcagctatgtggcgagctatgtcctgagctgcgacgtggcggattcagcccagaaggttgttaacagacgactgacggcaagtgccggaaaagagccagaagacggaatctatattctgagtgaagaagacaacaccagtctttcggtcgaactcgttacagaactgtctccgctcgattacgacaagctgagcaagcttctcccttcccttgacaccctttgcggcgcttaa

SEQ ID NO: 142985 - DNA, 660 bp, Enterobacter cloacae
atgcaatgcctacaccgtatcagacagggttttatcgaagagaaaacagcaacatataaccgattgagaggtttgatatcggaattcggtgtcatcgccccacaaagtacagatgccctgcgtcacatggtttctgagcagaagagttctttgccacttcaggttcaacaatgtgttaatgacctgctggaacacattgatcgtattgaagataatattactgaatatgaccggattttgtcccgcatggcaaaaacagatcaccgcagccagcgattgatggaactgaaagggattggtcccacaacggcctgtgcgctggtcgccagtatcggtaatgcacacgattttaaaaatgggcgacaactggcagcctggctgggactaacgccatcgcagtacagcagtggtgggaaatcaaagcttggcaggataactaaagctggcgattcgtatctgcgaacgctactggttcagggggctcgttcggttctgattggtgccgagaaaaggactgatttattcagtcgttgggtctgttcactggtcgatcgcagaggatactggcgtgccgttgtagccatcgccgccaaaaacgcaaggctgtgctgggcatcattgcattacggtgatgatttcaggctgtactcagccagctaa

SEQ ID NO: 142986 - DNA, 237 bp, Enterobacter cloacae
atgtatacggtgcgcaccatttcagaaattcgtactgggggtgtgctggtgctggataacggtgcacagcgtacactggatgaagttcagaaaccggctccagaagcaaagcaggtagagccaaaggaaatctcatcacttcaggagctgctgaacgcttccaaaaatctgaagccgacttcgcctgaactaattgcggctcttaaacaggctcagtcaaccgccataaaacggtga

SEQ ID NO: 142987 - DNA, 252 bp, Enterobacter cloacae
atgagcgtaaacccagaatataccaggattcagaatgcccagatcgttcgcgagcaagatggacagaaggaagttgttcgagtctatgatgaagatggcgatgtggttctatgtttaccttcctatattcaaaatgaggaagtaaatcatattctgcgccggatgaatgacgtatattcaatcggatatcgtgtaggtgatgcagcccgccgacgcgccatcaaaaaagcgctgggggatgatgaggagtaa

SEQ ID NO: 142988 - DNA, 231 bp, Enterobacter cloacae
atgagcaccattcaggacatccgaaaccagctatcaactctggtaaccgaggcgcacaaggttgcatgcgccctcgatataggtgacgagcgaacagaggcctttgagctatatgaagcgcttcgtcgacttcagcggcagggcgccgccggagagattctctcagcaaccaaccctcttctcgcctcgccatattacgacgaggactgggacgaagatgaagacgactga

SEQ ID NO: 142989 - DNA, 1161 bp, Enterobacter cloacae
atggctgactctaaattatccggaccagatgagaagttattttaccaaagccgtcgactatatcgaaagtgttgcaacatttattacatccaagtgagcatgatggtgaaaaaattcaaaaagttacttttagagttcattgtagcagttatgctttcgctttctataccgggtatggctatggcagcagatgctggagtccctggggctatgtgtcagtcagctggagtgtggcagggcttgattaagaatatctgttggagctgcatttttcccatgaggataatgggcataggggcagctccagaaggcgctgctccttcacgtccgggttgctactgcacagatcagaacggcataccggaaataggttggcaattgagcttctttcagccggtgaagattgtagaagttgtaaagagcccctggtgcagcccctttcttgaaggcacgatgcttcaaaaatcgcagtttgatattggtaaaagcaacacaaatcagccaatgacagcaactgaagccggattttacgatgttcatctttgggagttcccaatcatgacaatgctcaaattactgattattggcgagtgcactgctgaaccctatatagatgccagcctgacctatataagcgaagtggaccctatgtgggaaagtgatctgcttacactcgtcctgaatccagaggcagtagtttttgcaaacccaattgcctcaatggtgtgcgctgctgactgtgtagcagtaacagcaggaaaggataatctcgctgcatacttttgtgccggatgcgatggcaacctttatccattaaccggccacatttacgcaaatgatgacgctgtaaggacgagttcactgattacccagcgtcttctgactaaactacatcgccagggaatgctgatgcgaacgatgggagcagacgcaatgtgtgagaaaacgtgggaatactttacacctcgttcccagtatcggctttcaatgcttttcccaactcctgaggcgaaagggccggattgctgtcatcgtcttggtgattcggtacatgactggtcaacccttaaaggtgggcgcaaaaaaataggcaatgataattatgtctatatgttgtggcgttacaatgactgttgcgtcagatatataccaggcgcttga

SEQ ID NO: 142990 - DNA, 1164 bp, Enterobacter cloacae
atgagtgttttactgacagaacctacacagcaagctaatgacaaggtctttaaaacggcccatgttgccttttcagtagttactggcacaggtcgttacgtcactgggcttaaacagttccgtgatgcaaaccctgaactttgtactgaagtaagtgaccagaaagcatgggctatccacccttcagtaattcaggtcacgccaggcttcaactcccgcgaaatgggaatgggtgacgattactataagctccctgaggtggaagaacacatctacaacatcaagaatgcctacattcgaggtgactatgtagaccctatccgagtacgtgtcattgatggggtaccttttgttcgccaggggcactgccgtttaaaagccgcaatgatggcatgtgatgaagatcatgacatcacaatcctttgcgttgagattaaagaagatgaaattggctgtgagctcgcgaccattgatggtaaccgtggtcttgcgctttctcctgttgcgcttggcgagtcctatcgtcgcctacattctcttgctggctggtcactcgaacgaattgctcaacgtgaaaataaaagcccgacgacaatcagttctcttatccgcctgacaacttgttctgttgttatcaagaaatggattcatgctgacgctatttcgtatgttaacgtgctttcactgatcgatgagctgggtgaaacagaagcaatttcacgtatcaagaagatgatcgcggaacttgagcaggccgatgcgaatggcatcacggtgaaaaaaacccaacatggtcaggtacgagtcagaccttcagacttcaagccagcacggattccgccggttattgccacaaaagccgtagaaggcgtcaaactcatcaccaccagcttattacagaaactgggggatattgaattgccggagctgacagattcaagtgctgacgaagaaatcaacattacgttgaaccgcagtactctggagatgctgagaaatctttcaaaagagatcacagaatcagagaacaagcagcttcgccgtgcggagaatcgtcaggcaaaacttaatggtgagaagccaaaatacccacgtaaaaaaaatgctaagaaggcaggggaagagaccgatcaggatactgacccacagccggacgcagaataa

SEQ ID NO: 142991 - DNA, 1089 bp, Enterobacter cloacae
atgactaaagagaaagatactgagcagcaggacctggtcaccagggctttctctgttagagagaaagaatcaggtaaagacatcattttgcgtcctaatagcaaccgtacggtgcagtctatcgctttgatgcggctcgggctgttcgtcccatcaccaaagagtgtggggcgtcaaaaccgggaatataaaacggttggctttgacgcaacgaaagagctacagacgctctctttaatggagagtgaggggttcaccaatatttcaattgtcggtgagcgtcttgatatgtcagtagattttaagacgtggatgggcatcattcgaacctatgcaaatcatccgattaaccaagacaaaatcagcttaaaattcactgaattcctaaagctatgtacacctgaaaattatcgatcatctacagcttccagaaaacgtattgacgcctccttacgcaggttggcatccgtcaccttgtcgtttaccagtaataactcttccaaagtctacacaacgcacctggtacagtctgccctgttagatccggaatcagatcaggtagtccttcaggttgatcctaagattttcgagctctatcagtacgatcataaagttttgatgcaattgaaggcaattaaagagttggccaagaaggaaagcgcacaggctctctatacgttcatagagtcattaccgcctaatcctataccgatctcccttactcgactgaaaaaccgtctgaacctcaagacacgagcaaatagtcagaacgctaccgtgagaaaggctcttgaagagttggcatcgatagggtacctccagtacaccgaaattaagaaagacggcaaagtatacttccagattcataagcgggatcccgatttgaatttgaacaatactcagcctcctttagaagtggttgaagatgaagaagagaactcagggtcttctgttttagaaggtgagttatgcccaccagctgacccgattgacggcgatgatgttcttaccgtccatgatttaaccgccgaagaactgcgctatattcgtagtcttcgaagccagaaaaagaacagcagcgccagctaa

SEQ ID NO: 142992 - DNA, 570 bp, Enterobacter cloacae
gtgattgattccaccgggctgaaggtcttcggtgaaggcgagtggaaagtcaaaaagcatggccaggaacgccgccgtatatggcgaaagttgcatctggcagttgacagcaacacacatgaaatcatctgtgcagacctgtcgctgaacaatgtgacggactcagaagccttccccgggttaatccggcaaacccaccggaaaatcaggtcagccgccgccgatggcgcttacgatacccggctctgtcacgatgaactgcggcgtaagaaaatcagcgcgcttatccctccccgaaaaggtgcgggttactggcccggtgaatatgcagaccgtaaccgtgcagtggctaatcagcgaatgaccgggagtaatgcgcggtggaaatggacaacagattacaaccgtcgctcgatagcggaaacggcgatgtaccgggtaaaacagctgttcgggggttcactgacgctgcgtgactacgatggtcaggttgcggaggctatggccctggtacgagcgctgaacaaaatgacgaaagcaggtatgcctgaaagcgtgcgtattgcctga

SEQ ID NO: 142993 - DNA, 126 bp, Enterobacter cloacae
atgttggtaaatgactacgctgtttccattaccatcacaaaggtggtaaattacggcttttaccgatgtcaggctttgtgttgcaaaatcaaactgtgttgcattcccattgacaccgaaatttag

SEQ ID NO: 142994 - DNA, 936 bp, Enterobacter cloacae
atgaaaattattgaaaaaattattaacgcgtttttggtttcgcaacataaacaaattaatgtaaagaacgttgttggtatttttgacgatgatgggaagtacactggtttgttatttgatgcggatgtgtctgttgattatatgctacaatatgaatgtgcatatagtgaaagcgattttgaatcaccattctgctgttacgatggtttaactcagattgccgttacacaattccatttaaatacgttaaaagaaaggaagaagggatcattctgtatagatcatctgagatttcctcttttatataaagaaggggtaataactgaaaaggactctttttattctatctctgaatgtgaatacaataaagaaaggttacagtatctatttactcaaggtatttatggtaaggagtttagtacgttagaatcggaattaagctcgttcttttcattcctatataccgatctttatgaatccttaaaagaaactgtatatctagctcttggaattttaaacaagatctctatcgaaaaatctgagcgccttataaaatcttttcgtcatcgtgactggtataacagctatgatgtagaaatctattgtaagggtttaccagaacatatcctggaggatcttatagtcccagacatcttgctattagaaccatccagttgtaaaaaagtaatcaaaaaggcaaaacgttttcttaatggacatatgaaaactaattctgtgtatattaaataccaaagttggttgatggatattgatacatctaactctccaaagttaatgtccgaccgagaaatgttatgtcgaaatgatttgaaaaactttacgagcgtattctttaaagaatgcttaaattctggtaaatcagaatatgatttacatttagagcaaagaaaacgcgcgcaactatacgattattag

SEQ ID NO: 142995 - DNA, 429 bp, Enterobacter cloacae
atgtctaataatactgaagtcattagctgtgatttattttcaactctatcttcacttaattttagcaccgaggatattacaggtttgactccggccacctttcgaaagggagctttcttacatgcaaaaatttctgctagccaggccacgcgagcgactgatatttcccttcaattacacacgaataatgttacaggtgaattgagctacgtagtagtaattggcaggcacgaagggctccttcaaagcgaagcaatcaacccaaactctgataagcagtaccgggaaaatcggcattcgcgccattttatcgcagtaaccgatgccagtaccaaagccctgaaaaaaacctgcaaggtaatgaaagcatatatcaaagagcaggaatttaagcctaacacctgggggcacagtttcattaagggttga

SEQ ID NO: 142996 - DNA, 672 bp, Enterobacter cloacae; identical to SEQ ID NO: 129616

SEQ ID NO: 142997 - DNA, 258 bp, Enterobacter cloacae; identical to SEQ ID NO: 15284

SEQ ID NO: 142998 - DNA, 393 bp, Enterobacter cloacae
atgaaaacattaacagatatattaaaaacaaaaaacacaattgaaattgaaaaattcattaatgaaaaccatgttcttgaagaagatttctatattgatgaagtagccaatatttttcatgttgttctacttacaaaacaatataagagctatgaagtagcaagaatgcttaccaaatactttgacattaacaagcaggataaagcaggtaaaacagttctgttctatgccgttctgatgggtaatacagaagctgttaagttctttatctcagcaggaggtgatgtatcaataaaagataatcaaggcagaaaagcagcagatcagataacactacttgatcttcaaaatgcttcttcaatgtcaagagtattactatcagcagagaaataa

SEQ ID NO: 142999 - DNA, 294 bp, Enterobacter cloacae
atgagaaagaagtttagacctgtagattttcaaacaagcaatatgggaaataactatataacaatagaaggtatgatgtcagcaccatataaagaacatagcccggagttattttcacaatgtctaaaagaagtaagcaatattaatagattacttatagataaaaggaagtgtgataacgaagagcattaccaaaaagttttaatggttgctgatatgtgtttatcaatgatgatgattgaacgccgtattggtatcgttaatgaagataatagttattttaatcaaaaataa

SEQ ID NO: 143000 - DNA, 2178 bp, Enterobacter cloacae
atgaatagtgaaaaaacagaattagaggctgaaaagcttcttgataatatggatttaacattagatgaagatgaaacagaaaatcaatcatctgatgatctgactttaacccctccagagcatgatgtttttgaagatgccagtttatatgatgcgcgtattacggaggaagctttttacgcttcaagaaactacgctatacatccgaatggttttttcaaaagaatatatccgaaggacggacaaccgtactggaagaaaatacataacttctttgctataccatacctcaagctttctacagctaaacagagttctggcgttaaaacagcagagactaacactggatatactggcgttcgcttcctgaataacgatttagaaataaatgagatcgcgctctcttcatccgaacgagcagagtttaccagctctaaatctcgcttaaccgctaatgactggacacctccggcgggttccgaccgttcagacgtttataaagcctttatggaggcggcacaagccgggtatgagccacatgtaagacctaacggtaaaatctatcctgcgttcataaagcgtatgacgggatacactcaaagaggctgggtgactcctgaccttcatatccgttctaagcatgatctgtatgttgggaaggtagctacccaaagtgaaaagatgggtgatcctgaaatccagaagcaggttcttagagagataatcaaacagtctccagcagttcgtatcttcttagctggcacgttcgcggcatacactaaaggacgtatctgtatctcagatgagttttgcccgatagttaactatgttggtgaaggtgagaaaggaaaatctaccacgcttcgtatatgcgcctctattgagggttctccttctaagggtaaaatggttatagaaggtgtcagtacggaagcaggtgtagagaacttcgcaactgcttacaaccacggccctgttttccttgatgagattgacgaacttctcaggatgaatgagttatcaaaaaggataatgcgccttaccaacggcggcggtagagttatttatgatactgaaaaaacgtttaaacaaccgaacgtctggaacggtatgttctttactacctcaaatacaccgctaaaagatggtgttagaggggatggaaaagaaacagctattcttactcgtcttattgaaatcaatatcaatgatccagaccttcacatcttttaccctgataaaaatgatggtggtaaagttaatgagtggatgtcaaaacttgccgttaactatggtaatatttacgatgaaatcattcagtatattatcaataacgctgacgagcttgaagaaaagcttgaagattttgagtctcaattattaacaacagaagagttaaggtattttaaaaaatatcgtcgttcagcgcataccttagcattagtaatgcttggtgctgaaatgatggagccaattttaggcaaagaaagttctatgttaactcatgacgctattactatttataaaaataaatatgcgcaagatgttaacgatgaaattgattatgctgattataaatacatttctcatcttgaaacattatatgagtggattaatgctaacaaaggtatgatttgttggagcaagtttgcttatgctgaacagtcagaagatcagtatgagactttagatagaacacaaaagaaaatggctcaggctcttacaaataatgctactcatcgtggttctgttctggcagaagtaaaagtaaacagaattatggagaactctgatgattttgaaggaacgattgtattaaatgctatgggtataaagcatttaaaacaacatgctcaacttgatttccatgaactttgccaatctcttgaaaaacttggtatggttgagcagaaagcaagattaacaaaagagaaggttaaagatttaggcttatccagtgcgagaactacccgccttaccttgaaaccaattgatgagcttcgttctgatatgattaacagcaaaaatagcaggatgattgccagcggtgagaagaccgaaggacaaacggagatcctcaaccaaaataacgctgataatgagttcaatatcaacaaaatacttgaagcttcatcccagcttgaagaggactattcagcctacttcgatagagcataa

SEQ ID NO: 143001 - DNA, 612 bp, Enterobacter cloacae
atgatcccactcctcaagccgcttatgcgcattctcaatcatcacaatggcggcatccaccatcgcaccgacggcaatcgctatccctcccagcgacatgatattggcgttcagtccctggaagtgcatgacgataaaggcgatacacagaccaagcggcagagagataatcgccaccagggcagaacgtacgtgccacaggaacagggcacagacgatggccaccacgataaactcttccagaagtttggaactgaggttatcaatcgcccggtcgatgagctggctgcgatcgtaggtggtcacgatttcaacgccttccggcaggctggccttcagcgtctcaagtttatccctcactgccgtgataacgtcgcgtgcatttttacccgaccgcaggatcaccacgccgccagcgacttcgccctggccgttcagctcggcaataccacgccgcatttcaggcccggtctgcacgcgggcaacatcccgcagataaaccggcacgccgttctcgcctgttttcaggacgatgttattaaaatcatcaatgctctgaagataaccgctggcacggaccatatactcagcttcggccatttcaacggatga

SEQ ID NO: 143002 - DNA, 411 bp, Enterobacter cloacae
gtggatcagacaacccgtacgcttcaggtccgtctccaggtttctaataaggatgagtttctcaagccgggcatgaatgcctatctgaaactgaataccagaagccaggagatgctgctgataccaagccaggccgttatcgataccggcaaagaacagcgcgtgattactgttgatgatgaaggcaagtttgtgccgaaacagatccacgttctgcatgagtcacagcaacagtccggcatcggctccggcctgaatgaaggcgataccgtggtggtcagtggcctgttcctcattgactctgaagccaatattacgggcgcactggaacgtatgcgccaccctgaaaaaacagaaagcagtatgccagcaatgtctgaccagcctgtaaatatgcattcagggcactga

SEQ ID NO: 143003 - DNA, 177 bp, Enterobacter cloacae
atgagtgtgattgatgaaaagattaaaaatatagctgaaatatcttttgaagcaaaatccaaagataaagagattgaacagcttaaagagagaatagagatcctatccttcttgttagctaaacgtgatttgaaaatcagtgctcttgaagatgaaatagaagagttaaaaatataa

SEQ ID NO: 143004 - DNA, 273 bp, Enterobacter cloacae
atggaaaataaaactgttcgctgtccgttttgtgatcatgaaactaaacacggcttaggtgtgtgcttaccatgtggggcgagcattacatacggtaaagcgccgttatggttcggtcaaattggagctttactatcagtggtattaagctttggtgtcttgattttagctgaaaacatgatggctggtttaggttcactatgtttctttttgctaataaccattgttctctccaaaaccatttatgcggatagagttgtattcacaagataa

SEQ ID NO: 143005 - DNA, 810 bp, Enterobacter cloacae
atgctgcttcatatagcagggttacctcgcagcacgtactactggcatgctaaggcagatgcccgtggagagcgctatgagggcgaacagcaaagaattgcagcactgttccattatcataaaggtcggtatggttaccgccgcattaccctggcgttgcgtaatgaaggctatggcattaatcataaaacagtacgaaaactgatgcgtaagatggggctggcctcatgcctgagaagcaaaaagtatcagtcatacaaaggcacctacggtaaagtcgcgccaaatacccttgcacgtgattttaaggccagcagtccaaaccagaaatgggtcacggatgtgacagagttcaatgtaaaagggacaaagctgtacctgtcacctgtgcttgatctgtataacagcgagataatagcctggaatatgacgacacatccgggaatgaatctggtcgaaaacatgttcagcaaagccatcaagaggctgaaaccgggtgacaggccggtactgcactctgatcagggctggcagtatcagatggcacggtaccaggagaaactaaaagctaagggcatagagcaaagcatgtcgcgcaaagggaactgtctggacaatgccgtgatagaaaacttttttggtctgctgaaaacagaatgttggcaccacgaagagtttgaaaatacagaccatttacgaaaaacggtggaagagtatatccactactacaacaacgaacgaatcaagctaaaactaaacggcctgagtccagtacaatacagaactcaggccatgtcagccgccagttaa

SEQ ID NO: 143006 - DNA, 516 bp, Enterobacter cloacae
atgggcagaaaaaaatactcacctgaattcaagcagcaagtcgttctccactatctgtacagcagtgacggagcaaagaaaacagcacggttgttcggcgtcgatcacggagcggtcaggcgctggactgagcactggaaagtgaatgggatcgacggttttaccattcctaccagggcttactctgccgagtttaaagagtctgttgtgctctggatgcagcaacacaacaaatcatcccggaaagctgcggctgagtttcgtatctcagccgcttgtactatcagcaaatgggagcgtctttaccgtacaggcggtatcattgccctacaggataaacccagagggcacaagatgaagtcagggaagaacgaaacttcagataaagaacttaataatccccgtccagcgttccagagcgctgaagaagagcttgaatacctgcgggcggagaatgcctacttaaaaaagcttcaggccttgattcgggaaaagcagaagacaaagcaaaaataa

SEQ ID NO: 143007 - DNA, 1086 bp, Enterobacter cloacae
atggatatggacctggtgccaaaatatgctgatgaaagcggcgataaaagcagtggcgggatccgtatcgatccaacgcaggttcagaatctgggattaaaaacgcaaaaagtcacgcgaggaatgctgaattattctcagacaatcccggctaatgtcagttacaacgagtatcagtttgtcattgtgcaggcgcgctctgacggtttcgtcgaaaaagtgtatcccctgacgattggcgatcatgtgaagaaaggcactccgcttatcgatatcaccattcctgaatgggttgaggcacaaagtgagttcctgctgttatccggtacaggcggtacgtcaacccagataaaaggggttctggagcgacttcgtctggctggtatgccggaagaggatattcaaaggctgcgttcaacccgcacaatccagacccgttttaccattaaagcacctattgatggtgtcattactgcgtttgacctgcgcaccggaatgaatatttcgaaagataaagtagtggctcagattcaggggatggacccggtctggatcagcgctgcagtgccagaatctatcgcatatctgctgaaagatacgtcgcagtttgaaatttcggtaccggcttatccggataaaacattccatgtcgaaaaatggaacattcttcccagcgtggatcagacaacccgtacgcttcaggtccgtctccaggtttctaataaggatgagtttctcaagccgggtatgaatgcctatctgaaactgaataccaagagccaggagatgctgctgataccaagccaggccgttatcgataccggcaaagaacagcgcgtgattactgttgatgatgaaggcaagtttgtgccgaaacagatccacgttctgcatgaatcacagcaacagtccggcattggctccggcctgaatgaaggcgataccgtggtggtcagtggcctgttcctcattgactccgaagccaatattacgggcgcgctggaacgtatgcgccaccctgaaaaaacagaaaacagtatgccagcaatgtctgagcagcctgtaaatatgcattcagggcactga

SEQ ID NO: 143008 - DNA, 1152 bp, Enterobacter cloacae
gtgcttttctggtatgacccaatgaaaccggataccaaatttgataaacccggaaaatcgccctttatggatatggacctggtgccaaaatatgctgatgacagtggcgataaaagcagtggcgggatccgtatcgacccaacccaggttcagaatctgggattaaaaacgcaaaaagtcacgcgaggaatgctgaattattctcagacaatcccggctaatgtcagctataacgagtatcagtttgttattgtgcaggcgcgttctgacgggtttgtcgaaaaagtctaccccatgacgattggcgatcatgtgaagaaggggacgccacttatcgatattaccattccggactgggtggaagcacagagtgaattccttctgttatccagcaccggtggtacttccacgcaaattaaaggcgttctggaacggcttcgcctggcaggtatgccggaagaggatattcagagactgcgttctacccggagcattcagacccgttttaccattaaagcacctattgatggtgtcattactgcatttgacctgcgcaccggcatgaatatttcgaaagataaggtggtggctcagattcagggaatggacccggtctggatcagcgctgcagtgccagaatctatcgcctatctgctgaaagatacgtcgcagtttgaaatttcggtaccggcttatccggataaaacattccatgtcgaaaaatggaatattcttcccagcgtggatcagacaacccgtacgcttcaggtccgtctccaggtttctaataaggatgagtttctcaagccgggcatgaatgcctatctgaaactgaataccagaagccaggagatgctgctgataccaagccaggccgttatcgataccggcaaagaacagcgcgtgattactgttgatgatgaaggcaagtttgtgccgaaacagatccacgttctgcatgagtcacagcaacagtccggcatcggctccggcctgaatgaaggcgataccgtggtggtcagtggcctgttcctcattgactctgaagccaatattacgggcgcactggaacgtatgcgccaccctgaaaaaacagaaagcagtatgccagcaatgtctgaccagcctgtaaatatgcattcagggcactga

SEQ ID NO: 143009 - DNA, 891 bp, Enterobacter cloacae
atggctgtgcctgttttcaaaactaaaacctcgtatcgagctccgctgaacaaagactacataccaaatccccgaatacttgaacaagtggttaaactgcttatcagtccggatatagatttaagtgtgtgtcttaaaggtgagtccggttctggcaagactgaaatggtaatgtacattagccacatgatgaattggccgctgacaattaagcagatcaacagcaatattcgagttgatgagcttgaaggtgagcgcagtcttaatggtggtaatacaggttttgtacacagcgatttggttacgggatttcgtaatggtcacctcattcttctggatgaagtggacaaaatcgatcctgatacggcagcaaaacttcacatgcccattgaacgtaagccctggtcactcagtgctaatggtggtgaggttataactgctaatggctacacgcgatttatgggtactgcaaacacaaacatgagtggaggcgctcgccggttcgtttcttctcaacgtcaagatgcagcttttataaagcggttcttgatagttgaaatggagaagcccgacaaagttgctttaaccaatgtgcttactaaacgatatagctctttgccttttcaggtcattgagaagttcgtaagagtagcgattgcagtaaatgactctggtacagaagacagtgtgatggatattcgtcaattagtagcttgggttggcacgtcaatgacgttaaaaacctttagtcttcttgacactttcaaaatagcttttgcttctgctttacctttacatgtggtcgatcttgttcttcaagctatagatctttctcttggcgaagacaaggataaatcgctggagtatttcacagcaaaaaagtcgagttag

SEQ ID NO: 143010 - DNA, 411 bp, Enterobacter cloacae
gtggatcagacaacccgtacgcttcaggtccgtctccaggtttctaataaggatgagtttctcaagccgggtatgaatgcctatctgaaactgaataccaagagccaggagatgctgctgataccaagccaggccgttatcgataccggcaaagaacagcgcgtgattactgttgatgatgaaggcaagtttgtgccgaaacagatccacgttctgcatgaatcacagcaacagtccggcattggctccggcctgaatgaaggcgataccgtggtggtcagtggcctgttcctcattgactccgaagccaatattacgggcgcgctggaacgtatgcgccaccctgaaaaaacagaaaacagtatgccagcaatgtctgagcagcctgtaaatatgcattcagggcactga

SEQ ID NO: 143011 - DNA, 324 bp, Enterobacter cloacae
atgctcaccatgtgggtgacggagggcgagcaccggcggctgcttgagcgctgcgacggcaggccgctggcggcgtggatgcggcagacctgcctggacgaaaagcctgcgcgcaccggaaagctcccctctatctcgccggcgctgctgcgccagcttgccggtatgggcaataacctgaaccagatagcccgccgcgttaacgccggcggcggcactggccatgacagggtgcagattgtggcggcgctgatggccatcgatgccggacttgagcggctgcggcacgccgttcttgagaaaggaacggacgatgatcgttaa

SEQ ID NO: 143012 - DNA, 216 bp, Enterobacter cloacae; identical to SEQ ID NO: 142298

SEQ ID NO: 143013 - DNA, 318 bp, Enterobacter cloacae
atgagcgaggcgatggagaaaaaccggcggagcgtactgcggactgccgggcggacatggttcaccatcctgatggtgtcagcgctgctgatcggcacgagcgggagcatactgtggtggcaggggcagcagataaccgacaattacacgcatcttcgtcagcaggaagataccctggcgaaaatgactgcccggacgtggggagtgcgctatcaggagagcagcgacggccggaggtttcttatcctgccgcccgggatgcaaaccgaagccatcccctacgacgggacgacatggatccgcctgaaacaggagtag

SEQ ID NO: 143014 - DNA, 216 bp, Enterobacter cloacae
atgacagagctggaaaagcagttgctgagcgcattagagcagctacagcaggactactcgcaaaggctggacgaatgggagagcgccttcgcggaatggcggagcatgtgtgggcttatgcaacgggagaacgcggtgctgaacgagcgcgtgtcgaacttgagcacgcaggtgctgagtttaagcgagcagctgcgccgtttgtccgggaactga

SEQ ID NO: 143015 - DNA, 318 bp, Enterobacter cloacae
atgagcgaggcgatggagaaaaaccggcggagcgtactgcggactgccgggcggacatggctcaccatcctgatggtgtcagcgctgctgatcggcacgagcgggagcattctgtggtggcaggggcagcagataaccgacaattacacgcatcttcgtcagcaggaagataccctggcgaaaatgaccgcccggacgtggggagtgcgctatcaggagagcagcgacggccggaggtttcttatcctgccgccggggatgcaaaccgaagccatcccttacgacgggacgacatggatccgcctgaaacaggagtag

SEQ ID NO: 143016 - DNA, 240 bp, Enterobacter cloacae
atgattgaacgagataaccagttgctccagctcaatgggaacgcgtgtcggttccagtcgcgcatcaagattctcggaggtgatgtttttaatggcattgctgacattacgaaggggcaggtgcccctgacggacagcgattcgaatgatcagaacaatcaacaggcttatcacgacggcaatcgcaatcaggttctttttcagcgcatcgaggtaatggagatggaaattaatggatag

SEQ ID NO: 143017 - DNA, 234 bp, Enterobacter cloacae
gtgctcaccagtaaagagttcagcctgctggaattcttcattcgccatcagggagaggttcttccccgctccctgattgcctctcaggtctgggacatgaattttgacagcgacactaatgcgatcgatgtcgcagtaaagcgactccgcgctaaaatagacaacgattacgagacaaagctgatccagacagtccggggcgtgggctacatgctggaggtcccggatgcatag

SEQ ID NO: 143018 - DNA, 282 bp, Enterobacter cloacae
atgatcccactcctcaagccgtttgtgcgcattttcaatcatcacaatggcggcatccaccatcgcaccgacggcaatcgctatccctcccagcgacatgatattggcgttcagtccctggaagtgcatgacgataaaggcgatacacaggccaagcggcagagagataatcgccaccagggcagaacgtacgtgccacaggaacagagcacagacgatggccaccacgataaactcttccagaagtttggagctgaggttatcaatcgcccggtcgattaa

SEQ ID NO: 143019 - DNA, 792 bp, Enterobacter cloacae
atgccgatcctgaccccgatgaagcagcagatcacgctgggcgatgttgcggatattaaggtcgtttccgggccgactatgctgaaaacggaaaatgcccgtccagccagctggatttacattgacgcgcgcggcagggatatggtgtcggtggttaatgacattaaaacggcgatcagtcagaaagtgaaactgagaccgggtaccagcgtgtcattctccggacagtttgaactgcttgagcatgccaacaagaaactgaagctgatggtgccgatgacggtgatgatcatcttcatcctgttgtatctggcattccgccgggttgatgaagccctgctgatcctgatgagcctgccgttcgccctggttggcgggatatggttcctgtactggcagggcttccatatgtctgtcgcaaccggaacggggtttatcgctctggccggggtggcagcagagtttggcgtggtcatgctgatgtatctgcgtcatgccattgaagcgcacccggaattgtcccgtaaagagacgttcacaccggaaggccttgatgaagccctctatcatggtgccgtactgcgtgtccggccgaaagccatgaccgtggcggtgatcattgcgggtctgctgccaatactctggggaaccggtgcaggttcagaagtcatgagccgtatcgcggcacccatgattggtgggatgatcacggctccgctgctgtccctgttcattattcctgccgcctacaaattaatctggctgcgcagacataaaaaaagcgtgtcctga

SEQ ID NO: 143020 - DNA, 411 bp, Enterobacter cloacae; identical to SEQ ID NO: 143002

SEQ ID NO: 143021 - DNA, 684 bp, Enterobacter cloacae
atgcaggaaaacagtatcgttattgataatcaaaaggccgttgcggatacgttgcggatggaaggcgctaccgttatctatgtggccacagacgggaaccttgcaggcctgatagctatctcggatcccgtgaaagcaaccacgccggatgcgcttaaagctttgcgtcaggcggggatccgcattgttatgctcaccggggataaccagcttactgctgaagcagtcgcacggaaactgggaatagatgaggttgaagccgggattctgccggatggcaaaaaagcagtgataacccgactgaaagagtctggccatgtggttgcgatggccggagacggtgtgaatgatgccccggcgctggcagcggctgacgtgggtatagccatgggaacgggtacagatgtggcaatagaaagtgctggcgttacccttctcaaaggcgatttgatgatactcaacagggcccgtcatctgtcagagatcaccatgaaaaatatccggcagaatctgttttttgcgtttatctacaatgctcttggggtgcctgtagctgcaggtctgctttatcctgtgtatggaatactgctgtcgccagttattgcggcggcggccatggctctttcctccgtcagcgtcattgtgaatgcgttgcgtctgaaaagtgtcaggctcgggaaataa

SEQ ID NO: 143022 - DNA, 207 bp, Enterobacter cloacae; identical to SEQ ID NO: 126817

SEQ ID NO: 143023 - DNA, 210 bp, Enterobacter cloacae; identical to SEQ ID NO: 118993

SEQ ID NO: 143024 - DNA, 318 bp, Enterobacter cloacae; identical to SEQ ID NO: 143013

SEQ ID NO: 143025 - DNA, 411 bp, Enterobacter cloacae; identical to SEQ ID NO: 143002

SEQ ID NO: 143026 - DNA, 369 bp, Enterobacter cloacae
atgattaactttttaataggttttttgatagaaataaaggtattggttttaaagataaagattgataaagcctcacatgtattaagtagggctatgctttcaaaagggtatagcaaagactttaatgacaaatgtaaaacagtaagaaaaaagcttttggctttctatgataaagatttaaaacaaccatccaactatagaaacgctgaatatatgttagatgaagcaatggttttgtgtaataagtttaactaccttgttgaaaaatcacttattacagaacataaaagaaatagtaaaagctcaggatcgtcaacctcagactcattttttggaaatggcgcagctggtccaggccgagcgggataa

SEQ ID NO: 143027 - DNA, 207 bp, Enterobacter cloacae; identical to SEQ ID NO: 126817

SEQ ID NO: 143028 - DNA, 198 bp, Enterobacter cloacae; identical to SEQ ID NO: 129801

SEQ ID NO: 143029 - DNA, 198 bp, Enterobacter cloacae; identical to SEQ ID NO: 117752

SEQ ID NO: 143030 - DNA, 1680 bp, Enterobacter cloacae
atggctgctcaggcgtttttgcttattgccagctttttactggtgctgtttgtgctcgccaggccgctgggaacagcgctggcgcgtctgataaacaacgtgccattgccgggcacgcgaaatattgaaaacgtgctctggtgcatttcaggtatcagcgaccgggaaatgaactggcgccagtacctgatggcgatactgcttctgaatatcctggggcttattgccctctttacgctgctcatgctccagggcagtctgccgttgaacccgcagcagttaccgggtttatcctggcatctggcgctgaacacggcggtcagctttgtcaccaacaccaactggcagtcttacgccggtgaaaccacgctcagctacttcagccagatggccgggttaaccgtgcaaaactttctttctgcggccagcggtatcgcggtgatcttcgccctgacgcgcgcgtttgcccgtcagaatgtcagcaccctcggcaacgcctgggttgatgttacgcgcatcaccctttggatcctggtgcctgttgcgctgattattgccctgttctttattcagcaaggcactctgcaaaacctgctgccttataccccttacacctcgcttgaaggggccagggaactcctgcctatggggccagtggcgtcgcaggaagcgatcaagatgctgggcaccaacggcggcggcttcttcaacgccaactcatcgcatccgtttgaaaacccaacggcattaaccaattttgtacagatgctggcgatcttcctgatccccgctgcgctctgcttcgcctttggcgatgtggttaacgatcgccgccagggacgtacgctgctgtgggcgatgtcgttgatcttcgtggtctgcgttgcactggtgatgtgggccgaatggaacggcaacagccacttcatgcagctgggggctaacagcaatatcaacctggaaggcaaagagagccgcttcggcattcttgccagcagcctctatgcggtggtcaccacggcggcctcctgcggggcggtgaacggcatgcacgactctttcaccgcgctcggcggcatgatcccgatgtggctaatgcagattggcgaggtggttttcggcggggtcggctcggggctgtacggcatgctgttgttcgttctgctcgccgtgtttatcgccgggctaatgatcggccgcacgccggagtatctcggcaaaaaaatcgacgtccgcgaaatgaaattaaccgcgctggcgatcctggtcacccccgcccttgtgctgctcggtaccgcgctggcgctgatgaccgacgccggacgcagcggcatctttaacccgggcattcacggctttagcgaagtgctttacgccgtttcgtctgccgccaacaacaacggcagcgcctttgcagggttaagcgccaactcgccgttctggaactgtctgctggcgttctgcatgttcatcggtcgtttcggcgtgattattcccgtcatggcgatcgctggaacactggtgaataagaagatccagccgaccaccaccggtacgttaccgactcacggcgcgctgttcgtcggcctgctgattggcaccgttctgctggtgggtgccctgacctttatccccgccctcgcgttaggcccggttgcggaatatctctctttacgctga

SEQ ID NO: 143031 - DNA, 1236 bp, Enterobacter cloacae
atgaccgacgagcctatgcgcccggatccggacaggctgcttgaacagacggctgaagcccatcgcggcaagctgaaaattttcttcggcgcctgcgcgggcgtcgggaaaaccttcgccatgctgacggaagcccagcggcttcgggcgcaggggcttgatattctcatcggcgtggtggaaacccacggtcgcaaagagacggctgcgctgctgacggggctggcgacgcagccgccccagcgtatcagccatcgcgggcggctggtcacggagtttgatcttgatgccgccctcgcccgccgccctgccctgatcctgatggacgaactggcgcacagcaacgcgccaggctcgcgccatccgaagcgctggcaggatgttgaggagctgcttgaggctggcatcgacgtcttcaccacggtgaatgttcagcatctggaaagcctgaacgacgtggtgagcggcgtaaccggtatccaggtgcgggaaaccgtccccgatccgttttttgattctgccgatgaagtcgtactggttgacctgccgccggacgatctgcgtcagcgcctgcacgaaggcaaagtgtatattgccggccaggccgaacgcgccatcgaacattttttccgcaaaggaaatctgattgccctgcgcgagctggccctgcgccgcaccgccgatcgcgttgatgaccagatgcgcgcctggcgagatcttcaggggcaggagcgcgtctggcacacgcgggacgccattctgttatgcattggtcacggcagcggcaacgaaaaactggttcgcaccgccgcccggcttgcagcgaagtttggcagcgtctggcacgcggtctacgtcgaaacgccgcagctgcatggcctgccggaaaaccagcgtcgcgccattttgagcgcgctgcggctggcgcaggagctgggcgccgaaaccgccaccctgtccgatccgcaggaagataaagccattctgcgctacgcgcgcgagcacaacctgggcaagattgtgattggacatcgccagcaccgccgctggtttagccgcgaatcttttgccgacaggctggcccgccgcgcgccggatcttgatttagtcatcgtcgcgctggatgacaagcccgcccccccctgcccaaccgtacgccggacgctcgcacctttggcgataaatggcgcattcagatccgcggctgcctggtggccgtggtcctctgcgccctga

SEQ ID NO: 143032 - DNA, 828 bp, Enterobacter cloacae
gtgcaacaacgcaccgagatcccgccgcagccggtttttgaggagatggtcgctcgcgccgcgtcgctcaccgccacgccgcaggtgaataaggtggtgctgtcgcgcctgattgatatcgccaccgacaaacagatcgatagcagcgcgctgatggagcgtcttatcgcccagaacccggcgagctttaatttccacgtaccgctggaagacggcggcgtgctgctgggcgccagcccggaactgctgctgcgtaaagagggcacgcactttagctcgctgccgctggcgggctctgcgcgccgtcagccggacgatgtgctggatcgcgaagcgggcactaagctgctggcctccgaaaaagaccgtcacgagcacgacctggtaacccaggcgatgaaaaccattctggaaccgcgcagccatcatctgagcatgccggcttccccgcagctcattaccaccccaacgctgtggcatctggcgacgccggtagaaggtgacgcgcgtgaaaacgaaaacgccctgacgctggcctgcctgctgcacccgacgccagcgctgagcggcttcccgcatcaggcgacaaaagagctaattgccgagctggagccgttcgaccgtgagctgttcggcggcatcgttggctggtgcgacagcgaaggcaacggcgagtgggtggtaactattcgctgcgcgcggctgcatcaaaataccgttcgcctgtttgccggcgcgggcattgtgcctgcttcctccccggtgggtgagtggcgcgagacgggcgtgaagctctccaccatgctcaacgtgtttggtttgcactaa

SEQ ID NO: 143033 - DNA, 444 bp, Enterobacter cloacae
gtgcatctggtgagcttcaccgggggcaaactcagcgccgttgagacgcttgaggtgccggtcacccagccgctggcggtgctgaaaggcgatctggccgccattaccgctcagcttgagcagtggcgcggcgcagcgcttaatccccccgtctggctcgatatcgaaatcgccaccgacgagtacctgtacgatatgcagcgtaaaattcagacgctgacggaagaccttcccgtggaggtgctgctggtacgccgcagccgcgagcagcgcgagaaaattctgctcaacgcccagcgtgaaacgctgagcgaacttcgggttgaagaggtgttcgcgcggcggcttgcgcatgaagaggtggacgaggccagacgcaccaggcttaacgagctgtttgcccagaccctgcattccctccatgacgaggacgaaaacgcatga

SEQ ID NO: 143034 - DNA, 291 bp, Enterobacter cloacae
gtgaagaacgtgtttaatctgggcaaattcgagttcaacggtgcttttcagctgcgccagcgggaaaccaggctgagcgtcggccagcccctgaagcagatcggcgaagatacgctcggcgtcgctgatgtttggcagtgcatcctgaccaccgatggttttttcaatcatcgccaccaggtggttcgtgattttggccggggcagagagcacggtggcaacctgcccctgcctggcgttgctttccaggatatcggcaacacgcagaaaacgttctgcatttgccactga

SEQ ID NO: 143035 - DNA, 630 bp, Enterobacter cloacae
atggaaagagatcttacaataatcttagctgagcgagatgctattaaacataagatggagcttgaaaagcttcgtgatgaaaatttaaatctaatgcaacaaataagagacaagatagaaaatgcgaaagtagaaataacagaaagcgcaatagataagacgatgtcaatcctagaaaagacacgactctggttaatctatggctctagtttttttgctatattcataggtattgcagggtttataggttataagagcgttaacaaggaaattacagattattatataaacactgtgcatcattggttacgcttcgatagcccagaaagtgggggaagccgagttctcaatgatttgcgaactgaggccttgctcgattccttaacattgaaatatgaaagagaaaaagtcaactcaggtccgataaataatattaatttgaacacagaggaaagactgcgtctgatgtcattaattttaaaccccgaaacggatgaacaaaattatagggatgccttacgcttaataactataagcagaggactctatggtagatattacgaagatgacatcgaaaaaaaattgcaagtatattggataacaaagaatttagtgatagtaaaaaaatag

SEQ ID NO: 143036 - DNA, 384 bp, Enterobacter cloacae
atgaatcaggatatgaaagcgttaagatttaatgaaagaatgaaggctcattatgccgcgtattttatcaacgggaatatcaattctttgttgttagaatggacaaaagaaggggctactgtcgaaagcattgagcatgagtatcttgcaaatggattgatccctgttccaccgatagatgagcaacattcgataattaagagcatctcaggccaaatgatacgctttgagttattggaagaaaaagcattaacaggtatccgacttctccaggaacgccgcaccgccctgatctccgccgccgtcaccggtaaaatcgacgtccgcgattgggttgcccccgacacacaggatctcgaggagccacaggaggccatcgcatga

SEQ ID NO: 143037 - DNA, 402 bp, Enterobacter cloacae
atgcttaagctgaaacagcaggtctttgaagccaatatggatctgccgcgctatggactggtgacgtttacctggggcaacgtaagcgccatcgatcgcgagcaggggctggtggtcattaagccgagcggcgtggcctatgacgccatgaaagtggacgatatggtagtggttgacctggagggacgcgtcgttgaaggcaaatggcgaccttcttctgatacggcaacccatctggcgctgtaccagcgttacccgtccctgggggggcgttgtgcatacccattccacgcacgccaccgcctgggcacaggccgggctggcgatccctgctttgggtacgacgcacgcagattacttcttcggcgatattccctgcacgcgagcgttaacgcaggctga

SEQ ID NO: 143038 - DNA, 795 bp, Enterobacter cloacae
atgaaatttgataccgtgattgtcggcggcggactggcgggcctgctgtgcggcctcaaactgacgcagcggggtctgcgctgcgccattgtcactcgcggtcagagtgccctgcacttctcttccggctcgctggatttactgggtgcgctatcgttcgccgatctgccgcctgaacatccctaccgcctgacgggcgcagagaatatggcccgctttgcctgcgaaaccgaacacctgctcaccgcctgcggcgcacgcatgcagggtgacgccgagcaaaatcatcagcgcgtcacgccgctcggcaccctgcgcgccgcctggcttagcccggaagaggtgcctgtcgcccccatcgctgccgagcgcgtgcgggtggtggggatcagcggtttcctcgatttccagccgcatcttgccgccgcgtctctcagacagcagggtgttcaggtggatacggcggagattgatctccccgaactcgatgtgctgcgcgaaaaccccagcgagtttcgtgcggtgaacattgcccgcctgctggataatgaaagttactggccgcagctgtacgcggcgcttcaaccgctcggcgagacctgcgacgccctgtttatgcccgcctgttttggcttaacggacaaccggctctggcgctggctctcggcgcgcctgccctgtacgctcggtttactgccgacgcccccccttccgtgcccggcattcgtctgcacacccagcttcagcgtcagtttgttgcccagggtggcgtctggatggcaggcgacgaggtga

SEQ ID NO: 143039 - DNA, 1554 bp, Enterobacter cloacae
atgtttacccgctacttctccagcaaccgcaagatactgtttctcagtttccttacggggttattcactgccctgcttctgggagcattacagttttactggagttaccacaagcgagacgtcagattcgataccctcattaccgatttacgcgtctatatggagagctatttcgatgagctcaaaatgtcgattgatacgctccagccactcacgctgaacagctgcgaggaagtgagtgccgccctgacctcccgggcggcctttagcatcaacgtgcgcgcctttttgctggtcagggataaatacgcctactgctcttccgccaccggcccgatgaatgtccccctgcaagcgcttattcctgaactgcacatcaataaacaggttgatatggcgctcctgccgggcacccccatgatgccggacaagcccgcgattgccatctggtatcgcaacccactggtgaaagacggcggtgtgtttacctccgtaaatctcaacctgaccccgtaccttctctacacctcacgacaggatgagtttgccggtatttccatcattattggcgattatgcgttatcaacccattccggaacgctggtccctgcgcgtgatttgcctgatatcccggtccgtaccgccacgctgaaaaatgtgcctctgaccatccatgtttatgcggaagcctggacgaccgatgaagtgctgtacgccctgtttttcggcctggtctgcgggatcgcggcgggcctgttgaatttctatattcttactatccgtcttaatccggggaaagagatcctcacggccatcaagcgcgaccagttttacgtggtctatcaacccgtcgtggatgcgcagtcgctcaaaatgaccgggctggaagtcctgatgcgctggaagcatccggtgatgggagaaattccaccggatgcctttattaatttcgctgaagcgcagaagctgattgtcccgctgacgctgcatctttttgacctgattatccgcgatgcccctgtcctgcaaacggtgctcccgcctggggccaagtttgggatcaacatcgcgcccgggcatctgcatgcggaaagctttaaagaggatatgcgcgcgtttgccgccgcccttccacccgatcacttccagattgtgctggaaataaccgagcgcgatatgatcaaccaccgcgaggctaatcagctgttcgaatggctgcacgaagaaggttttgaaatcgccatcgatgattttggcaccggccacagcgcgctgatctatctggaacgcttcacgatggattacctgaaaattgaccgtggcttcgtgaatgccatcgggactgaaaccgtcacctcgccagtgcttgacgcggtgctgacgctggcagaacgtctgaatatgataaccgtcgccgagggtgttgaaacgccggagcaggcggcgtggctacgcgagcatggcgtgaactatcttcagggctactggatcggccgcccgatgccgctggagcagttcaggacgtggcaacccgacatcacgctcggggaataa

SEQ ID NO: 143040 - DNA, 1050 bp, Enterobacter cloacae
atgccccccctgcaatggggttacaataacagcgacgccttcgcggacaatgccgcgcgacagacccgcgagatggttgagcagtttggtaattccccggccattatcgtctggggcggtcataacgagccgccatggaattcaccgtggatggaaaaacgctttcccgactggaataaaaacctgaaccagacgctgacgaaacgcgtcggagacgcgctttcgcaagatacctcgcgcatagtgcatcgtttttctgcggtggaagaacactactgggccggatggtactttggcaccatgcgcgatcttcttggccccgccaaaaccgcgatcatcacggagtttggcgctcaggcgctaccgcgactctcaaccctgaaaaccatcattcccgcccgcctgatgtggccgaaaagcaccgccgacgacgatcccggctggacgcactggaaataccataacttccagcccttccagacctttaaatttgccaatattccgcggggcaataccattcaggagatgattgccaacacccagcgttaccaggcagagctggtggcaatggcggcagagagctatcgtcggcagcgctaccagccggtaactgccctcttccactttatgtttgtagaaacctggccctccatcaactggggcgtcgtggattatctgcgtaagccgaaagcgggctactacgccctgcaaaaagcctatcaacccattctgccgtcgattgaacccgtgacggcggtgtggcgtcagggaagcgaagctacggttcgcctgtgggcgatcaatgacacctggtccgcctgtgaggcgtgtcgtctgaagtggcaggtgaagcaaaatggtcgggtgctggctaaaggcaatacaagcctcacgcttccccccgattcgggcagcaggatcaaggacatcaccgtcacaccgaccaccaggcataacgttaccattgagtatgagatttcggatcgcgccggtaacaccgtgggttccaaccagcgcaatgagagagtggaaagccctcctgagcaatga

SEQ ID NO: 143041 - DNA, 465 bp, Enterobacter cloacae
atgccaaaacatgatgattttcctgttgatgcgtttccgccactcatcaaaaacgcaatctgtgaagcacacgaggtaacaaaagccccaatcgctctgattgcggcgtccgctctgggggcaatttctctggcctgccagaatcgtattgatgttatacgcccagggaaccatcgtggccccgtatcactttttgtcctgactatcgctgaatcaggtgagcgcaaaagcaccgttgacaaactgttgctaaaaccattgcgcgcgaaagaagaacagctagaaaatattcataatcgggaatatcagatttattacaaacaaaaccagatagctgtctcagtaagaaaagcgctggaaaacaagcttaaagcacatattaatcgggataaagatattactgaaataaaatcagcaataatggcccttcagtctccggccccccccctgtcagacgcaaactga

SEQ ID NO: 143042 - DNA, 297 bp, Enterobacter cloacae
atgctggcagactggaccaatgcgctgccggagggcgagcccgtggtggtggccggtgatttcaacgactggcggcagcgggccaaccatccgctgaaggtgaatgcggggctggaggagattttcacccgcgcacgcggtcgtcccgcgcggacgtttccggtgcgcttccccctgctgcgccttgaccgtatctacgtaaaaaatgcccacgccagcagcccgacggcgctggctttactcaactggcgacatctctccgaccatgccccactcagcgcggagatccacttatga

SEQ ID NO: 143043 - DNA, 225 bp, Enterobacter cloacae
atgcataaaaccgccagacagaaatatgtacttgatatcattactgaaaaaggccaggccagcattaccgagctggcagagcggttgcaggtttcggcggacaccatccgacgcgatctgaccgacctggaaaaacaggggctggcgcaaaaaaaaccatggcggcgccatcgcgctgaatctctcgacgatgacccgagtaagcaggaataccttgctgcctga

SEQ ID NO: 143044 - DNA, 285 bp, Enterobacter cloacae
atgaccgatcctgattttaatttactgattgcactcgacatattgctgagcgaagcgagtgtcgcaggtgcggcacgtcgtctgaatctcagcacctcggccatgagccggacattaagcaggttacgcgacgttacaggcgacccgatcctggtgcgcgccggacgtaacatggtactgaccccgtgggccgaagcgacccgggatcgcgcccggcgtgcagtgcacgagagtagaggcacagggaaggggtgggatgcgatgggcttatctgacgagggatag

SEQ ID NO: 143045 - DNA, 513 bp, Enterobacter cloacae; identical to SEQ ID NO: 129740

SEQ ID NO: 143046 - DNA, 492 bp, Enterobacter cloacae
atggaattcagaacatgtcgcaggcactggggtgctgagtttatttccgatgacgttgtacgttttcgcgtctgggcagaagggcaaaaagatctcacgttgcgtttaaccgataccgacaatcccatggcggcggtgggcgacggctggtttcagattgatgtgcccggcgtcaggcacggtacgacgtatcagtttgttttacaggatggaatggcggtgccggaccctgcctcgcgcgcgcagcagtctgacgtcaacggcccgtcggtggtgatcgacccgcgtcgcagcctgcccactcagcgggaatggcagggacgaccgtgggaagagacggtgatctacgagctgcatatcggcaccttcaccggggaaggaaccttcagagcggccatcgacaaactgccttatctggccgaactgggtgttacgcaactggaagtgatgcccgtgtcccagttcggggggggcgcgcggatgggggtatga

SEQ ID NO: 143047 - DNA, 1758 bp, Enterobacter cloacae
atggaaaaccgtgagacgttatccccttcaacgcgcgtagccgtcgtgctggcgggggccctacagggcgtaatttgctatgtaatcacgtggtatatcgagtacgcaaaattgccatcggatacgctgtggctgatgtgtgtagtacctgccaccgtggtaatgacaaccacattgtcgcttgccatgacgtcattcagaaagccatttttgtggctgtcactcgggatgattggcgcggcagtcgcggggatgggcggctggcttaagtggagcgttgcggggctggacaactgggataccagaaatgcggtgctccttttcggttttcatctgctcctgatgacgcttctcctgttgccatggcttcagcgacgccttgagaccgcaccgacggacgctttctaccgcgatttcaacgataaaaactggcataacgcgctgacatttcttcttgtttttgtctcgaatgggctgttctggctggtgcttttcctctgggctgagctttttaaactcattggcatctctttttttgatcggcttttctttaattctgactggtttatttcagtggcgattggcgtggtttcagccagcgcggcagtacttgcgcgtatgcaggttcggctgattcttgcattgcaaaatctccttacgcttatcgcgacaggtttgcttccactgatggctgcgctggcgctgctctttataggcatattgcccttcgttggcttagaggctgtttcagcacggatctcggctgcgggcttactgacgacgctggcgttgttgctgttattgctggtgactgtcgtatggcacccacaacgtcaaaagctgccttacttctctcccctgcgaggaatgattcatcttgccgtgattatcgctcctgcgtatcccgtcctggcgggctgggcgctctggctgcgcatcgcacagtatggctggtcaccggagcgtctgtacggtgtgctgattacgatagtggcgctggtctggacggtaggattctgtcttagcgtacttttttaccgtcgggatccgcaaaggctccaggctcatatcactccggctaccggattactggcgctgattttcctggtgttgatccatacaccggtgcttgatccctggcgtatcagcgttgaaagccatatggcgcgttatcaggatggcagaataaacgcagaccaggtaagcctgtatatgctcagcaataccggacgaaaggggcgagaggcgatgcaaatgctgcaaaacgatccacagtttatctcaaacccaaaacgccagcgtgaaataaatggtcttctctccgggaacgctggtgaagcaggtaagatgaccgccgcgatgctggaaaaacagatccagctcgcaccgggaatggctcgtcctgataaggcattgtggcaagccatgctcagcaatcagtatcgctttgagagctgcgatagcgcccagagtaactgtttactcatgccgctggatcttaacagtgacggcaagccggaagccgtgctatttcaatttaccgatcgcacgatcgtggcttacacacaaaccaacacgggctggaggatagccggggacgcgtggaaaatgccggaggcgttgaccagagaagaacttgaccgcgcattaaggcagaggaaagtgaaatctgtcgtgaagccctgggcggatattgagatttttggggagcgtgtcgatatgagctacgacagttacaataatgcgcagtggcgttag

SEQ ID NO: 143048 - DNA, 576 bp, Enterobacter cloacae; identical to SEQ ID NO: 127133

SEQ ID NO: 143049 - DNA, 234 bp, Enterobacter cloacae
atgaaaaatatgattctttgcctggcggtagcggtattgctctccggttgcgctggcgttattgagaagcagcaacccgtatgcaccggaacagccctggtcggcggacaggaaagcagcgtccagatctacggagtccgcaagcaaaacaatcagacgcagtaccgcgccggttatccctttaactggtcatgggtgagcgccaacacgttcaccagcaccacctgccactaa

SEQ ID NO: 143050 - DNA, 492 bp, Enterobacter cloacae
atgttccataaccacgcctcgacggtattcacccagattggcatcggcctctgcttcaccgctctctatttcgtagtcttcaggacgctcatcgaacgtctgaatcttaaaacgccgggccgggaagagagcgaaatcaaactctacaacaaggccgactataaggccgcgcgcgggcaaactactgctccggcggcagccagccagaaggtcgggcaggccgctgggttcttacaggcgctcggcggcgcagcaaacatcgaaagtatcaataactgcgccacccgcttgcgtatcgccctggtggatatgacgaaaacccaaagcgacgacgtcttcaaagccctgggcgcacacggtgtggtgcggcgcggcaacggcatacaggtgattgtcggtctgcacgttcctcaggtgcgcgaccagctggaatcgctgatgaaaacccctttaacaaacgaacaaaccactctgacagaggctatatcatga

SEQ ID NO: 143051 - DNA, 2592 bp, Enterobacter cloacae
gtgaaaaataaattagtgttgccggtgatgatggcttgcgcatccggcacgctgcccgcgcttgcgcatgcagcctcaagctccgtggttatcgctaattaccgttttcccgactcgctttatgcactgctggagcaggggatcaaaattcccgtctatctggtgaatacgcgtccacactcagcacaacaaggcaaccacgaaggcacggcgagcgaatacgttcgtatcggtgacgtgacgctctttgcaaaagatctgaagctggggctgagggatgttcaggtccaggagtctgataacggcattcgtctgtcaaaagagatgcgaacgttattgcagagcattaacgacaagcagttcgatgaccagatgcgcattcccgtaagtgcgggttcggcgttcgagctggatcagaaaaaaatgcgcctgttgctgaatctgtcgcagaacgactacggggtgaatattcgcccgcgtgaggtggacattgatgccccgacgtccgacgacctgagcggcacgttctcctacaacctcggggcgtatcacaccgagagcggctacggtgacagctggtcgtcgggctatctgaacgcaagaaactggatctcaatgggtgtcgatcatgtgctgatcgacggctctggctacgtcaacgagagcagcagcgatacccagatgaacgcggtcatgtgggagcgcgactatcaggggatgcgctacgccgcaggcatgctgaacggctgggcgatgcagtctctggcgagcgtcagcgggatttccggcggggaagtctacggcgtttccatgggcaaccaggccaactcccgcaagcgcgataacacgctctctctgacgccggtggtggtctatttccccacggcgggcgaggcccgtattcgtcgtgacgggcagcttatcggcattcagcgctttgacgtcggcaaccatgaaattgacaccagcagcctgccctacgggatctacagcgtcgaagttgaagtggtgagcggaagccgcaccgtgtcgcgcagcatgtacaccgtaaataagccgttctccagcaacgtgtcggaaacgctgcgctggcagatgtggggcgggatgtatagccgcgataaatccgtcgtcaattataaaaaatacgcgaaacgcaaaaacgagcaggacaacacctactactacgattacgacaccaaacataaagacaccatgtcgctggtgggggcctcgttcagcaagcgtagcgggatggtcgactggaacgcctctacctacatgatgcgggaacatatcgtcagcgagctgtgggcctccctgaacctgacgggctatttctcggtgaatacccagaccatggctgcctccgacggaacgtaccgcgccaactatggggcgaatctcagcctgccgtggcagatcggctcggtgtggtactcccatgaacagctctccagcggcaagttcctcgatatctatgagagcaagggcaacacctggggcgcctcctttagcctgccgtcgttcggcctgccctcggcgggcaacctgagcctgatgcgccaggaggacgacctttaccactacaaacgctatcagctggattactcccaggggttatacgccggtcgctacggtacggcgcgcctgcgggtggggatgtcgcgcaacaaatacgacgggtattacgaagagaaagatcgttacgtgatgctcgatttcgccataccgctcggcaataccgtgtcggttggcgtttcccacaatcgcgataccggcacggcgctgaacgtcagcgccagccgccagtttgagggcgattacctgaaatcggctaccgccaacgtctcgaaagcctttaacagccgccaggatcgcagcgtaagcggcggcggcagcgtgaacttcgacacgccgtggaacagcaacatcctcagcgtccagagcggcatgagtaaaggctggaactccacgctgaccagtgacggcagcgtgggctggtccaaagaggccatcgccgccgggaaaggtaccgaaagcgcaggggtgattgtcagtaccggtctcaaatctgatgaagcgctgaccctgaagcttaacggccgggcggaacgcatcaaaggggataaaacctggctgtcgctgccggcataccaggcttatgacctggaagtgatgaacagtgaaaccggtacggaaagctatgagattggcgcgaatgcgcgtcgccatatcacggtttacccgggcaataccgtggtgatgaagccgcaggtgaagaaaatcgtcaccctgtttggtcgtcttgtggatgcaaacggggccccggttggcgccatgcagatcaaaaaccacgtcgggctgacccggacggaaaacgacggacgcttcgtgatcgacgttgataagaacaaccctgtcctgagtatcgccacgccggacgacagcgtctgcgaagtgcgcctggacattgagtctaaccgcggtgcgctgtggctcggggacatctcctgcgaaaaaggcgatttcgtctggcaggaagcaaaaggaacgcaggaacgtgacgatgaaaaagatattcgctcttaa

SEQ ID NO: 143052 - DNA, 339 bp, Enterobacter cloacae
gtgcgcgcgttctccaccgatgcgatgaaacgcctgatgacggcaagctggccgggtaacgtacgccaactggtgaacgtgattgagcagtgcgtggcgctgacgtcatcaccggtgatcagcgatgcgctggtggagcaggcgcttgagggggaaaacacggccttaccgacgtttgcggaagcgcgaaaccagttcgagctgaactatctgcgcaagctgctgcaaatcaccaaaggcaacgtgacccacgcggcgcgcatggccgggcgtaaccgtaccgagttttataaattgctctcacgccacgagctggaagcgaacgattttaaagagtaa

SEQ ID NO: 143053 - DNA, 270 bp, Enterobacter cloacae
atggaacacaagtctgctcgtgcaaaggtccaggcttttggggggtttttgactgcaatggtcatcccgaatattggcgcttttatcgcctgggggtttattaccgctttatttattccaaccggctggatgccaaatgagcatttcgccaaaattgtcggtccgatgatcacctatttattgccggtgatgattggctctaccggtggacacctggttggcggcaaacgtggggcggtgatgggggggggatcggcactatcggcgtga

SEQ ID NO: 143054 - DNA, 711 bp, Enterobacter cloacae
gtgaaaattgggctaacggttaacgggctacatgtagaagcacattatcctgacgacgaaattgaaaatgttcataagcctttgctgcggcaactggcgaaacggcatttcgccagcgccagcaggcgtacgattgtttttctcagcgcgccgcccgggacgggtaaatccacgctaaccgccttctgggaattcctctctcgtcagatggaggggatgccgccgatccagacgttgccgatggatggatttcatcactacaacgagtggcttgaggcccataacctgcgtgcgtataaaggcgcgccggagacctttgatgtcgacagacttgcgcaacatctgtggcagatcaaagagggcgacagtacctggccgcagtatgaccgacaaacgcacgatcctgtcgaagaggctattgtggtaacggccccggtcgtgattgttgagggtaactggctgctgcttgatgacgaacgatggcgaacgctgatggaatactgcgatttttcattgtttattcgcgcccccgccgaagcgttacgtacgcgcctggtgggacgtaagctggccggcggactctctcaggccgacgccgacgcgttttatgcgcgcactgatgggccaaacgtggagcgtgttttgcgtcacagccgtcctgccaatgtggaactgatgatgtcggcaaatggcgaataccgactcgtctga

SEQ ID NO: 143055 - DNA, 192 bp, Enterobacter cloacae
atgaccgctcgccttacgcgctggcttaacacgcttgataattttgaaacgaagatggcgcagctgccatccgttcgtcgttatggacgcctgacgcgcgccaccggtctggtcctggaagccacggggctgcaacttccgctcggcgccacctgcgtgattgagcgtcaggacggggggggagacgcgtga

SEQ ID NO: 143056 - DNA, 387 bp, Enterobacter cloacae
atggcttcgccgctacggaacccgctaagcgggctggtctgggcggcaatggcggtcatctatctgccactgcttcccgccagcggcatgctgctggccccggcgttttctcccggcaactgggcgacgctgtttgccgacccgcagctgccgcaggcgctgaccgccacgctggtttccacgcttatcgcgacgctgggctcactgtttgtcgccctgaccctgcttgcgcttctctggccgggtgaaggctggcagcgccttagcacccgtctgccgttgctgttagccgtgccgcacgtcgccttcgccaccagcgcgctgctgctgtttgcggaagggggggcagttttaccggatctgtacagtctgttcgccgcagcttga

SEQ ID NO: 143057 - DNA, 291 bp, Enterobacter cloacae
gtggtcgaccatctggcgcatattgatatccagcttgctcagggcgtggcgaataatctcggcattacgctgactgacgagcaatgccatgccgcgccgccaaaagacgtgaacgggctgaagaaggatccgtccctgagcctgtatgcagtaccaggcgggtcaattaaaggccgcgtggtggctatcctgctgaacgataaaccgcgcgccagcgacgtactggggatcatgaggggcgctcaaaacccagggcgtacatgccaaactgctttactcacgcatgggtga

SEQ ID NO: 143058 - DNA, 213 bp, Enterobacter cloacae
atgaaaaaaatcgccagcgtctgcccctactgcggtgcaggctgcaaactaaacctcgtcgttgaaaataaccggattatccgtgccgaagccgctgatggcgtaaccaatcagggcacgctttgcctgaaagggtactacggctgggactttcttaatgatacacggctgcttacccccccgcctgacgcagcccatgatccgctacagtaa

SEQ ID NO: 143059 - DNA, 291 bp, Enterobacter cloacae
atgctgaaagataatctgcgcagcatggccgcaaactatctggctcaggggattaatgcttctcccaccacccggcatttttaccatcagtggctgacgacgcccgcttctcccggtctgattgattataaagatatgctgggctggctgggggactggtgtcaggcggataaacatccggtgagctggtcagtgacgcagagctggcaaacggtcgcgctggggatgccgagactctgttcggcaaaacggctggtggatggcatggtggaagagatatttggtacgtga

SEQ ID NO: 143060 - DNA, 591 bp, Enterobacter cloacae
atgaaaaaaagtgccctatcccttttgatttgtgcagcaatatcattttctgctgcggcagaaaatctggtgcaaaatgagcttgcatatgacaatgcgacctacacggcaattgtactcaagctaaaacccactaccggtttgttaaaagcgacaaacaataaaattaccctgaatgatccttcccttatcaccacaaatatgtttcggccgacgaatttgcggagttcaaatcagtcatccgagctgacggaactcaataagcgttatggctttgaccgttatctgcgtatcgcgttgccgcaagataaacgtcaggataaaacctacattaaccatattattactgagctggagcagaatcagaacgtagagtttgtttacccggaggccgaaccggtgtcgctggatgaaaacgcccttacgccgcaggttaagtcttcggtaaataataatttaacgtctgccgccgtaccggattttcgcaataagcaggattatctcaaagcacctgatgttaagcgcgccggttattatatgggggggcgtaaaccgcgaaagcgtagatcactatgcaggcagtgcgggtga

SEQ ID NO: 143061 - DNA, 1383 bp, Enterobacter cloacae
atgtcggtacctaaccagacgccctatattatttataacgccaacggtcttacgaccgtttttccctttgagttttatatcattaatgcagctgatctccaggtgtcaataaacggcacagcgataaccagcgggtacagcgtttcaggtacgggaaatgttggtggcggcgatgtcacgtttattacccctcccgcaagcggatccgttgtaatgctggaacgagtggtaccaacataccggcttacggattaccaggataacggggacctgctggctgatactgtgaataaagattttgatcggctttggatggcgatacaacgctcttttatttatctagggttggcgcttcgtcgtccattactcggcggcccgtataacgccgaagggtaccgtatttctcatatgggagatccccaggataagcaggatgcggccactaaaaattatgtggataatgtgggtctggtccgtgctttgcgcgtgcctgagaacttcgtttctgtcctccctccgattgaccagagggcaaataaactgttggcattcaacgcagcgggacagcccataactgtcttacctccttcaggatcagcgtcagacgttcttattgagctggcgaagccaacaggtgcatcaaagattggttacggcgctcgaactgtagaagaaaaacttaatgagcggaaaagccctttcgattttaacgcaataggcgatggtgaaaatgatgacacattagcactccaaagatttatagacgaaactgatggtgatcttgatcttgctggtggcacatttctaataagtaagaattatgcgctagctattcaatatccaaatgaagccgacttttctgacggtacatataactacagcccatgtcttgcattggttggcaagaaagatatcaagattcacaatggtacgttgattgttaaaacccacggaatggatgcacttagtactattgcatgtaagaacgttacagttaacctgacgattaaggggccaggagtattcccagccattgacacatcaacaggttatgcagagaaaggagaggctaggttcggttatgattccgcacttgtcctcgcaccaaataatgctttagacactagtggatatacaggtggtgcctatgcgggtgtgatggggcagttccctaaatataatgcggacggaagtcaatcgtctggatggcaaagtacatggggtactttcttgggtggctacattggtagttgggcttgcggtgttaaagttcaacgtggatgtcgaggtattcttatcgataactgcgacatctcgggatttaatttcggggggggtaggtattggcatccgaaacacagcagcagtttatggatcaagtga

SEQ ID NO: 143062 - DNA, 1704 bp, Enterobacter cloacae
atggctcaacgcttcattacgctgatcctgctgctgtgcagcacgtcagtttttgccgggttgtttgacgcacccggtcgttcgaactttattcctgccgaccaggcgttcgttttcgactttcagcaaaaccagcacgatctcagtctcacctggcaggtgaaagagggttactatctctatcgcaagcaggtcagcatcacgccggcaaaggcgaacgtcggcgcattgcagttgcccgctggcgagtggcacgaggacgagttctacggtaagagcgaaatttatcgccagcgcttaagcgtgcccgtcacggtgaaccatgccgataaaggtgccacattaacggtcacctatcagggctgcgccgatgcgggcttctgctatccccctgaaacaaaggtcgttccgcttagcgaagtgaaagcggcggcctcccctcacccctcaggggaaatggccagtgtgaggggtgaaggcgtagccgcttcagaccttccgttctcagcgctttgggcgttattgattggtatcggcatcgcctttacgccctgcgtgctgcccatgtacccgcttatctctggcatcgtgctgggcggtaaacaacgcctttccactgcccgcgcgctggtgctggcctttatctatgtgcagggcatggcgttaacctacacggcgctcggcctcgtggtcgccgctgccgggttgcagttccaggccgcccttcagcacccttatgtgcttatcggtctgtcagcggtgtttattctgctggcgctgtcgatgtttggcctgttcaccctgcaactgccttcttccctgcaaacccgtctgacgctaatgagcaaccgtcagcagggtggctctgcgggcggcgtgttcaccatgggtgccatcgccgggctgatttgttccccctgcaccaccgcgccgttgagcgccatcctgttatacattgcccagagcggcaacctgtggctcggcggcggcacgctgtacctctacgcgctcggcatgggcctgccgctgatcctggtgacggtgtttggcaatcgtctgctgccgaagagcggtccgtggatggagacggtgaaaaccgcgtttggttttgtcattctggcgctgccggtatttctgctggagcgcatcatcggtgatgtgtggggtacgcgtctttgggcgatgctcggcgtggccttcttcagctgggcgtttatcgtgagtctgggggcgaagaaaccgtggatgcgcctgctacagatccttctgctggcggccgcgctggtgagcgtccgtccgctacaggactgggcgtttgacaccccggcaggtcaaacgcaggcgcatctgaattttatacagattaagaacgtggatgacctccaccgcgctctggcgcaggcgaaaggcaaaccggtcatgctcgatctctacgccgactggtgcgtggcctgcaaagagtttgaaaaatacaccttcagcgatccgcaggtacaacatgcgctgagcgataccgttctgctccaggcgaacgttaccgccaacagcgcgcaggataaggctctgctgaagcaacttaacgtgctcgggctgcctaccatcctgttctttaatgaacagggggaagaacagccgacgcagcgtgtaaccgggtttatggacgcgactgcattcaacgcgcatttgcgcaatcgccaaccgtaa

SEQ ID NO: 143063 - DNA, 2430 bp, Enterobacter cloacae
atggatattagccagcgaaccggaaccgcattttcagataacgccagcctgtttgcccgttcagccgcctccatgcgtgagtatggctacagttcagaagaggttctgaaagtaaccgaagctatatcgacaggacttaagctgtcaggcgcaagcacgtctgaagccagctcagtaatcacacagtttagtcaggcgttagcacagggtgttcttcgaggcgaggaatttaactccgtcaatgaaaacggtgatcgcgttattcgtgcactggcatccggcatgggtgtcgccaggaaagacttaaaggctatggccgatcagggacaacttaccgccgataaagttgttccggctttaatcagccagcttggggcgttacaggatgaatatagcgcgatgccacagaccgttgcatcagcaacgaccaaaattgaaaacgcatttctggcgtgggtaggtggtgcaaatgaagccactggggcgacaagcgcgctaaccggggcattgaatgcgatttcagataatatcaataccgttgcctctgctgctggcgtgctggcggccatcggaggttcaagatttattggcggcatgattggcgatcttggaagccagacggcgcagttggttgaagcgaggaaaaatgaaatagcgctcgccgccgcaagggcaagtacagccacacaatcacagcgcaaggccgctgccgatgctattgctgctgagcgggcttaccagcttgcccagtcagaacttgtgctggcaaagaatactaatgctgaggctactgccactcaaaatgccatatccaagcgccgggcaatgattacagcaaatgcggcactggtacagtcaaacagagccgttgcagcctctcagcaggcactaaactctgcaacatcagtgctggggcttgtaaaaacaggcgctacaggcctgctgggtcttgtcggcgggttgcctgggctgttgatgctgggggccggtgcctggtacacgatgtatcagaatcaggagcaggcacgtcgttccgcccaggagtatgctggtcagattgatgaaattaggcaaaaaacctcacaaatgtctctgaccgagacggatgaaaatcgtgggcaaaccgttgaggctctcgttgaacaaaatcgtttggttgatgagcaagccaaaaaggttggtgagctgaagaaccagatcgacgatttgaatgcatcgcgtggaaaaccgggcattaccagcgagaacgatgcaaatatccttaaagcaatagctattgttacggatcaactcgctgttgaagagggaaaattgaatgacatgcgagataaatctcgcggcattcagcaggctctcgaagaaattgagcggcgtcgtaatgatttaatacgcgaacaagcctggcgacagaatgcggtatatcaatcgatgatcatgatgaatggtcagcatactgaatttaaccgtctgctgggtctgggaaatcagctattaatggcccggcaagggctggctaacgtcccgctcagacttcctcaggccgacctcgacaaaaagcaaaccgatgccctcgaaaagagccgccgggatctggagttgtcacgccggaagggtgaagcaaaagagcgcctgcgactgagttatgcagccgatgacctggggttaaccagtgatccgcaattccagacaggccgtcaggagtttattaataacggtcttgctgaatggcggaataatgaggccaacaaacctaaggcgaagggcggtaaaaccgaaggcgagaaaaccgaggatgtgtataagcgccttatcaagcagcaaaaagagcagattgccctgcaaggccagaatactgaactggcgaaggttaaataccaggtcagccagggcgaacttgcttctctgacagaagcccagaaaaagacggtattgcagaatgctgcgctgattgaccaggttaaattgcgtgagcaactgcgaaattacgaagccaaccttgctgacagtaacgccagcgcccgcgcagccaatgaagcgcaactgctgggctacgggcagggaaccaggttccgtgaaagacttcaggagcagttcaatctgcgtaaggagtttgagcagaagaataccgatcttctccgccagcgtcaggctggtgaaatcgacgagacgttctatcagcaggggctggcacttaataagcgctacctagaagagcgcctgcgcgaccaggagggatattacactgcttctgatgcgcagcgtgacgactggatgacgggactgtctgagggttatgcgaactgggtggacgaagctactgactattcttccatggccgctgacggcatgaagcaggccatgggggggcggtcaccacgatcaccgacatgcttaatggcaacgttgacagctggaaggactggggcgtga

SEQ ID NO: 143064 - DNA, 270 bp, Enterobacter cloacae
atggtcagccagacgtggctgaccatcgtcctggtctccgtgctgctgatagcctcaagtgcgggcattctatggtggcaggggcagcagatactcgacaattacacgaccatccgggagcagaagagcacgcaggccatgctgtccgagaggaacagcggcgtgcagctcacgacctgcggagaggaacgacgccgctgcgtgagggtgaacccggacgcgggacggttcggagaggattcgagctggatgatactggcggggaaatag

SEQ ID NO: 143065 - DNA, 324 bp, Enterobacter cloacae
atgctcaccatgtgggtgacggagggcgagcaccggcggctgcttgagcgctgcgacggcaggccgctggcggcgtggatgcggcagacctgcctggacgaaaagcctgcgcgcaccggaaagctcccctcactctcgccggcgctgctgcgccagcttgccggtatgggcaataacctgaaccagatagcccgccgtgttaacgccggcggcggcaccggccatgacagggtacagattgtggcggcgctgatggccatcgatgccgggcttgagcggctgcggcacgccgttcttgagaaaggaacggacgatgatcgttaa

SEQ ID NO: 143066 - DNA, 465 bp, Enterobacter cloacae
atgaaagcagtaatttacaacggtccttatgatgtaaaagtaaaagacgtaccggatgcgaaaattgtccgccccacggatgtactcgtccgcatcaccaccaccaacatttgtgggtcggacttgcacatgtatgagggccggaccagctttgaacagggacggattctgggtcacgaaaacctgggtgaagtggtcgaaattggctcaggcgttgaacgtattaaggtgggcgactatgtttgtctgccgtttaacgtgggatgtggtttttgcgaaaactgtgaaaaaggtctgaccggcttttgtctcactaccaatccgggttcggcaggcgcagcttatggttttgctgaaatgggtccctgggaggggggcaggcggaactgcttcgggtgccatttgccgactttaactgccttgttcttccccctgatgcggcagaaaaagaagatgattatgtga

SEQ ID NO: 143067 - DNA, 216 bp, Enterobacter cloacae
atgcgaggcatcttgtttagagtactgttcttctctaaaattaacaaaatagtccaagaagaacagctcgtgagaaaaaaaatagttaccaaagcacaaatttaccgtgccgtcgccagctcaaccgcaattgaaaccggtgtttctgtgcaaaaaattgagcaacaactcaaacaaaatcaggcacaggcgaaagccgttggcctcgcccgttag

SEQ ID NO: 143068 - DNA, 258 bp, Enterobacter cloacae
atgattattcagccgcaccggatcgggccacgcctgctgtatcagccctttaatcatcagctcaatggcacgcacctgtttctgcgcctgaagctggctctccttctctggcactctcccggtttcgtaggtcagcagaggctgttgcagacgcagatactcaagggaggtgacgaagcgcatcgccgcaatcagctggttttcgctgacatcctgcccgctttcatactggggaacgcgctgctgaagcaagcgtaa

SEQ ID NO: 143069 - DNA, 279 bp, Enterobacter cloacae; identical to SEQ ID NO: 127146

SEQ ID NO: 143070 - DNA, 825 bp, Enterobacter cloacae
atggcatcccgtctggaggaactgggagcaagaaccgatactgccagcggcggcatccagaataacgctatcgcgctaataacgagtacgctggcgcaggttgatcagcgggtgagactcagcgcgcagtacggtgacagcaaggccggcatcgatcgtattgataacgtcatggcaagcgacagggaggcaacggcgcgttcgctgctgagtttgcagactgacgtgaacggcaacaaggcatccatcaacagcctgaaccagaccttctccgattaccagcaggccaccgccacgcagataaacggcatcacggcgaccatcaacggacatacctcagcgatcaccaccaacgcgcaggccattgcgaacgtcaatggcgacctgaaggcgatgtacagcatcaaggtcgggttatccagcaatggccagtattatgcggcagggatggggatcggtgtagagaatacgccgtccggcatgcagtcgcaggtcatcttcctggctgaccgcttcgccgtcactcaccaggccggagccacggtgaccttaccgttcgttatccagaacgggcaggtaattatcagggatacggtaataggtgatgccactatcacccgagcgaaactggctgaaacaatcagctcggttaattacgttcagaaccaggctgggctgtccataaacttcagaacgggcacgcttgagaactacggttcaaccgctggggaaggggcgatgaagcagactaatcaaacgatcagtgtcaaggatgccaacaatgtgttgagggttcagatcgggagaatcacgggaacatggtaa

SEQ ID NO: 143071 - DNA, 216 bp, Enterobacter cloacae
atgcctgccatgctgggactaattaccggggttgtatcggctggcggtcaaccgcagtcctactcggccatatacaagagcatggcaaagcttgagggaggcaatacgcggatattcgccaggccgcagacaaccccaggcggcaaccttcagaacgttgcttattcgaatctgaggaacgtgattatggccattaactgcgccaattatgattga

SEQ ID NO: 143072 - DNA, 216 bp, Enterobacter cloacae
atgcctgccatgctggggctaattaccggggttgtatccgccggcggtcagccgcaaccctactcggccatatacaagagcatggcaaagcttgagggaagcaatacgcggatattcgccaggccgcagacaacccccggcggcaaccttcagaacgttgcgtattcgaatctgaggaacgtgattatggccattaactgcgccaactatgattga

SEQ ID NO: 143073 - DNA, 375 bp, Enterobacter cloacae
atgagtagcttattagcgctggagaatctgcaaaccaccttccgcacccgcgagggcgaggttcacgcggtgcgcggcgtgagctttcaggtgcagccgggggaactcgtcggcatcgtcggcgagtcgggctgcgggaaaagcgtcacctgtaagtccatcattcagcttctggggagcaacggacggataaccggcggcagcattcgcttccagaatgacgatctggcgcagaaaacgcccgcgcagatgcgcgccattcgcggcaacgagatcgcgatgattttccaggatccaatgaccgccctgaatccggtgctgaccatcggcaaacagatggcagagatcctgatgcgcaataaagggctcacctaa

SEQ ID NO: 143074 - DNA, 1986 bp, Enterobacter cloacae
ttgaaccttggcccgtggcggttaagggattactcaagctggaattatcacaacagcgatgactcacgcagcgacaactggcagcacattaatacctatgttgaacgcgcggtcattccgctgaaaggaagactgacgctgggtgacagctacaccccatcagacgtgtttgacagcctcccttttcgcggtgcgcaaatcgcctctgatgacaatatgctgcccgatagcctgaagggtttcgcgcccacgatccggggtatcgcaaaaagcaatgctcaggtaaccattaagcaaaatggctacaccatttatcaaagctatgttccaccgggtgcatttgcgattagcgacctgtttcccacgtcctcaagcggtgacctcagcgttgaggtaaaagaatctgacggtagcatcaacagctattccgtgccttattccaccgttcccgtactccagcgtgaaggccgcgtaaagtacgcattaactgcggccgaataccgcagcagcagcgatcaacaggacgaggttaatttcgttcaggggtctctaatctgggggctttcgcatggcttcacgctgtatagcggatcgcagataaccaacaattaccactcgctggcattcggcaccggcctgaatatgggtgaactgggcgctatctctgcggatgtgactcacgcgaagagcacgctggcggatgacagcacgcattcagggcaatcgatccgttttctgtatgcaaaatcccttaacggcctcggcactaactttcagctgctgggctaccgttactcgacatcgggattctattccctggatgaaacagcctataagcaaatgcgcggctacacaggtgaccacgaggacaacgataccgaacagcaaaatccctggatggattattacaatctgtactacaccaagcgaggaaaggttcagttcaacatctctcagcagcttggtcatgcaggttcgctctttgtcacgggcagccaacagacctactggcataccgatgaaaaaaatacgctactccaggtaggctttagtggaaccattaaagatgtgtcctacagcctgtcctacaactacaacaaatcaccgggcatgtcgaaaagcgacgagatttacgcgctgaatttgtcgctgccattgagcctgtggctgcgtccacaaaacgatgtcagccagaagcataactatgcttatgccacctacaacatcagcaccgacaaaaagggtgaaacctcgcaaaatgccgggatcaacggcacattgcttgaggataacaacctgagctacagcgttcaggaagggtattcaagccaggggacaaaatcacaaggctccagcagccttgaatacgatagcgcctatggcaatgcgaacgtgggctataactacagcggaaacggcgactaccagcaggtgaactacggtttgagcggcggcgtcatagctcaccggaatggcatcacccttagccagccactgggtgataccaacgtgctgattgccgctccgggcgcgagtaacgtcaaggtcgagaacgagccgggtattcataccgactggagaggctatgccgtggttccctacgcatcctcgtatcatctcaaccgcatggcactggacatcaactcactggctgacgatatggatatcgatgatgccgtaaccaatgtggtcccaacccgtggcgcggttgtgcgtgcaaccttcaaagcccggcctggtacgcgtgcgttaatgaccttaacccatcggggcaaacccgttcctttcggtgccatggtgtcacgtgatgacaatggcagcgatacgattgtgggtgaagacggagaggtctatctctctggcctgagcccggcgggaacgctgaaaattcagtggggtgaagggccagacaagcaatgtagcgtgaagtatcaattacctgaaagtaaacagccgctgctgcggttgaaaacggagtgtatataa

SEQ ID NO: 143075 - DNA, 858 bp, Enterobacter cloacae
atgaggcttaactgggaaagcgcgctgctcattttgctggtgctggagatcctgctctttggcgccatcaacccgcgcatgctcgacgtcaacatgctgctgttcagcaccagcgacttcatctgcatcggtatcgtggcgctgccgctgacgctgctgctgggtctgctgtgcgggctggtgaatgcggcgctgatccactacaccggcatcagcccgctggtcattaccctcggcacgctctacctctacggcggcggcgcgctgctgctctccggcatggcgggcgcgacgggctacgagggcatcggcggtttcccagacagcttcacggcgttcgctaacctcacggtgttgggtctgccgatcccattggtcttgttcgcggtaatcaccgtcttcttctggctcattacccaccgcgggcgctttggccgtcatctgttcctgattgggcagaacccgcgcgcggcgcgctatgcggcgctgccggtgaacggcatgccctacgtgctgtacggcctggtgggcgtggcctcggcgattgccgcgctggtgatggtctcctatttcggctccgcgcgttcggatctggggcgcgatctattaatgcctgcgctcaccgccgccgtgctcggcggagccaatatctacggcgggtcaggttcggttgtcggtacggcgctggcggcgctgctggtggggtacctgcaacagggtttacagatggtcggcatccccaaccaggtgtcgagcgcgctgtcgggggcgctgctggttgtggtggtgatggggcgttcgctgagtctgcaccgcgaatgggtgcgatctctctttagaaaactatccggagcgtaa

SEQ ID NO: 143076 - DNA, 2049 bp, Enterobacter cloacae
atgcatcgctctgtttctgagttttatcgcatcccccctctacttattcgtgcgctaaaaagcggagtcgcctccgtggtggagtttcatctcagcaggggattgccgaaagattcacgagattctctgggaaatagcccattgatgattgcggcccagaatgggcatttcgctatttgcgaaatgttgttgtgcgcgggtgtcgatgttgagcatcaaaacaacctcgggtttcgcgccagtgacctcgcgcaggagcaaacgctgcgtgatctgttagctcgttatcggaaatctcctccgtctgccgggcagcaactagcaggggggttagatgatgaggcaaacattgaggttgtaattgaagccgatgttgaaacagaactacccgaaaccgaagacgcaatggattttatgcagtgggatgctgaaatcgaatcggaacccgccgatgataatctgacattacgacacgcttccgctgaggctcagcgattgttatcccactatcgccctatagataacgcggctgagtggatcgatatcgaactctcgcttccagacccgccgacgccagtttctcactctccgcaaaattatccccatttctcaacgttgctcactagcgcactggatgccggtcgtgtctctgttcgtgacatccggtctgccggggaagatgatttcggcatgccgtggcctgaattccaggtcagcgtagaggcattgatcaaggacttacctttgattgtggatagcgatgatgctttcccggaaagtgatgcctgttgggaattagcggcgagtgatgatctcgagccctggtttgacgctttcggtgcattgcggcagtccggcatatttgaacgctatcttttggacattcgccaatgggatgtcgtcgataaaacaaaggaagagcgactcgggcagcgcatggatacggcgcttatcaacttgatgacgatcctggtgagattacccgaagcagaatatctacagttgctgcatccgaattgccttccctcgacatcgcctgaggttactgaagaggaagacgacgcggaagaagcggatgaggatatttcttccgcagccgatgacgatgacgccatcacctttaacgatctgctcattctgctgagaagtgggaaagctgaagaataccaggagactcacatccctcgcccggagtaccgtgacctgcagcagatagtcgagcgcgcccaaacgctcatccctgatgaatgccacaaagtcagtctttatgtcagtagttacagagacgcatgggaggggttaatccacgccaatttacgtcttgtggtcgcgattgcgaaaaaacactgcgggcgaggattagatatcgaggacctgatacaggaaggtaatctgggcttgatcaaggccgttgaaaaattcgactataggcgtggattcaaattctccacctatgcctcttggtggatccgccagaagattacccgtgcgattgccgatcaggctcagctcattcgtttacccgttcacttctatgagcaattcaggcgctggcggagcagtagggatcagttgctgcatctccaggggataacgccaaccctcagacggttgcaggaaatgaccgacctgccagagcgtcaacttcttcagatggctaaatatgaagaacagacggtgctgattggtgattttcatgacgacgctcaggaccgcgaagcagcattgtcgggagacgcgctgctgaccagatgggatttcaccagtgctcccgttcagtctctggagataagagaacatatttcatctgttctgaatacgctgttgccacgcgaaacacagatcataaaaatgcgttttggcatcggtatgacgcaagatttcacgctggaagaggtgggtaaacagtttgatgtcacgcgagaaaggatacgtcagatagaagccaaagcgctccgtaagctccgctatcacagccgggcgtcgaaattaggcggcttcgtcgaacagtgggaaaccgcgttgagcgagatgcaggaagaagaatga

SEQ ID NO: 143077 - DNA, 243 bp, Enterobacter cloacae
atggttattcaggcgaaaaattattctggttctgtaggtaactcggcggtgcagcaggtgatctctgcaaaaacgttctatggttgtgatgaggcgatggttgtgactaattcctacttcacacgctctgctaaagagttagctgagtcagccttggtacgtctgatcgacagggatgaactgcaaaagtatctggatgattacaatcagaagataatcgaagatttccagtcaaactcgtaa

SEQ ID NO: 143078 - DNA, 831 bp, Enterobacter cloacae
gtggcggatacgcttgccgaagatacctcgcgcatcgtgcaccgcttttccgccgttgaggagcattactgggcgggctggtactttggtaccgtacgcgacctgcttgctccggccaaaacggggatcatcaccgagttcggcgcgcaggcgcttccccgcttatcgacgctaaaaaccatcatcccggcggcgtcactctggcccaaaacgaccgccgctgacgatcccggctggaccgtctggaaataccataattttcagccgttccagacctttaagtttgccggtatttcgcgtggggacaacattcaggcgatgatccgcaatactcaggcgtaccagtcgcagctggtggccacggcggcagagagctaccgtcgacagcgctaccagccggtgacggccctgttccacttcatgtttgtggaaacctggccctccatcaactggggcgtggtggactacctgcgtaagcctaaagccgggttttacgccttaaaacgcgcctaccagcctgttttgccgtccattgaacccgtcacggcgcagtggcaatccggggcggcggcgaccgtgcgtctgtgggccatcaacgacacctggaaaccgtgccgcgaatgccttctgagctggcgcatcacccagcgcgataaggtgctggcaaatggcacgacgacgatgacgatcgcagcagactcgggaacgatggtaaaagcggtcacggccacgcccgtgggccaggacgacgtgtcgattcggtttacgattgaaaacagcgcgggaaaaattgtcggcgaaaatcagcgcacggagtccgtcataaagtaa

SEQ ID NO: 143079 - DNA, 426 bp, Enterobacter cloacae
gtgaaattttaccgcgatctgtttgaatccagtctgaaccgcgtctttccggataatgataaaacggcgttttttcagacgttttatgacgccttcgtccatatgtcacccgagacggagcagcatttttctcgcctgccggatagcgagggtcagcagactctgtttaagagtttcttcgccatgcttgcggtagacggcgcgttaatcgtgcctgattttctcgagcgcctggcgcgggagcaaagtgacgacggtctccacctgcccccgcgttttttcgccctgtggcgcgaagcgatgttgaacaccgtgagcctgcgcgatccgcagtgcgacgatgagatcctgacggcctgggccatggcgatcgcgcccgggctggaatacctgcgccgacaggcagaactgcactaccgcgcgtag

SEQ ID NO: 143080 - DNA, 1548 bp, Enterobacter cloacae
atgaagccacgatccccgatccttttccacctgctcacgggaataacgatctgctggctggcgctatcgaccgtgcgtgcggacaccgagctgcctgcatcaggttactccccgcgcagcggcgagctgacggcccgggagatgaccatcgccaaaaacgcctggcagtatttcgtcaccaactatcagcccacgacgggcctggtgaatgcggtcaacaaatatccctccaccaccatgtgggacagcgcctcctatctggccgccctgacggcggcgcgcgagctggggatcattgataaagcggaatttgaccgccggatgctgaagtttctcgccacgttaaacaccctggtactgttccgcaacgagctgcccaacaaggcctataacaccatcagcggtcagaaggtggactacaccaacaagcccggcgaaattggcttctcggcgctggatatcgggcgaatgctggtctggctgaaaatcatcaaggagcgttacccggaatacggcaacagcattgataacgtggtgctcggctgggatgtcagccacgcgatcgacccctgcggcacgctgtacggggcctatctggagaacggccagccgaagtacgttcaggaaggtcgactgggctatgaagagtacggcgcggccggtttccagctgtgggggtttaatacctgcaaagccagccgtccgcagccttacgagctggccgagatctactgcgtgctggtcccgtacgatacgcgcgacccgcgcaacacgtcgcagcataactacgtggtgacggaatcctacctgctctacgggctggagttcggctttgataaaccgaccgaccgggataacgccccgcgcgactactctctgacgtggatgaaaaactttgccgaccgcgtttatcaggctcaggagaaccgctataccattaccggcgtcctgaccgcgcgctccgagcaccagctcgataaggccccttacttcgtctatgacaccgtcttcagcgacgggtacaactggaacaccattaccgataaaggccagttcgtccctaacgctgccgcgatttcgctgaaggcggcgctgggcatgtgggtgctgtggaactccccctataccgaccgcctgctgaacaccattgagaatgccaacgaagagggaaaaggctactacgaagggctgtatgaaaacggcgacggcccgatcaaagagttcaccgcgaacaataacggcatcatgctggaggccctgttgttcaaaaaagagggaaaactgctggccttcaacaccgacaacccgaagagcaaggattttgccccgtcgctgtgggatcaaaagctgctcgatcagtttgaagagaacaacgcgctgcgcagccgcccgttccttgccagcaccccggccgtaaaaagctggtgcgaccggaccggcgtcacgcagcgcaccaaacccgcctgccaggcctgtcagtgcgcgtcatgcagcgtggacgagcccgttaaactgcctccggtgactgcgcaatgcttaaaaccatag

SEQ ID NO: 143081 - DNA, 1218 bp, Enterobacter cloacae
atgagccatgttgcgccgtcggtagcgcaagaagatgacgctaaatcaacagcatggcggtatgccgttgcaggtgccagggacctgagaatcgactttatgcgcggcattgccctcgtcatgatggtcgtggcgcatacggaggtgatgtcggtatttaatatattctcctgggagcgttttgggttaacaaccggtgcagaaggttttgttattctctcggggtttatgcttggcatgctgaaccgcgcgcgtctgcaaaaagtggttttgctcacggtttcctgggggctttatcttagggcatggaaaatatatcgtgtaaatatcattatcatagtgtcgtttattcttctggcctatatcccacatattaacattttcgaggtcacccattttaccgaccgtttttcgggtgaaagctggtcgctttatccggttacgccgcaaataaaagagacctggttcaacattatcctctatttgcagattggccctcatcagacgcaaattctggggctgtatatctttttactgctactcagcccgctatttttggggatgctgcagaaaggaaaagtctggtggctgctggggctgtcgctgctggtgtacagcctgtggcagcgctggccgcttcggctgacgccgtcggaattcgaatttgccttcccgctgctcgcctggcagttcatctttgtgctgggcatggccagcggctggtataaagccgaactgctctctttcgcccggacgcctccggggaaaggggtggtagtggcgctggtcatggtgtcgctggtgctgggatttgtcgcccagaaccataccaacccgtttatgccgcccgcgctgctgatgcacgtcatcccgcctgacagcttcaattcgttttatcacacctgggcggcgaagaacgggctgggcccggtgagggtgttaaacgatatcgccctgatggtcaccgtctacctggtgctgacgtattgctggacgccgctcaatcgcctgctgggatggttcctgatcccgctcggccagcactcgctttatacctttattttgcatgtgtacgtggtgctgctggtgagccagttcatcaccttcgacttatggcgacatgcctggatagagaacacgttagtgcatgcggcggcactgggtattttgtggctgatggcaaaatacgacgtcggcgcacgctggatacctaactaa

SEQ ID NO: 143082 - DNA, 267 bp, Enterobacter cloacae
atgtttgttgaactggtttatgacaagcgaaatgttgaggggctccagggggccggagagatcatcctggctgaactaacaaagcgggtgcacaaaatttttcctgatgccgaagtgaaggtaaagccgatgcaggcgaacggcttgaatagtgatgccagcaaaagcgatcgggaaaagctgaaccgcatgctggaggatatgtttgaagaggccgatatgtggctggtgtctgagttcccgaccattcgccaggtcggtctgtga

SEQ ID NO: 143083 - DNA, 438 bp, Enterobacter cloacae
atgaaatatgtatatagcgcaaccagtaatgctttctatcctgtggctctgaaaagttcttatgaggctacaggtgactggcctgttgatggggtggaagttgacgaggacgtatttgcaacatacaccggaacacccccacaaggaaagatgagagggagcgacgaaaacggttatcctgcctgggtttcaacgcctccactcactcgtgagcagcagattgcagttgctgataatgaaaaggtgtcacgcatcgctgaagcaaacagcttcatgaacagcaagcagtggcctggaaaggcagctatcggaagactgaagggggacgaactcgcgcaatacaatgcatggcttgattatctggatgcgctggaggcggtggatgcctcgacagcgcctgatatcacctggccgacaccgcctgcagacgaagcgtaa

SEQ ID NO: 143084 - DNA, 576 bp, Enterobacter cloacae
gtgagcaatgataattatgtccagcttctgggggcgctgctgcctcctggccctgcatggtcagttgacgatgtggcgataagcggcgctgctccgtgtttactcagggcgcatcagcgtggggacgagctcatgctggagatcgacccacgaacgacaacagagcttattgaccgatgggagcggtgctgtggtctgcctgacgaatgtattccgtccggaacacagactttgcggcagcggcagcagcgccttgacgctaaggtcaaccttgctggtggtattaatgaagatttctatcttcgccagctgacagcactgggtaagccaggagccacgatcacgcgctataacaatggtccatttaaatgcacatcatcgtgtgtcgatgcgacctactcaactgaatggcggtattactggcaggtcaatatgcctgcttcgacagatgccacctggatgacctgcacagacaactgtgaaacaccggttcgctactggggagatacggttgctgaatgcgttatcaacaaactctgcccgtcacatacctacgtaatattcaaatatccgtaa

SEQ ID NO: 143085 - DNA, 1059 bp, Enterobacter cloacae
atggcggacagtgaattccggcggccaacgctggccgaaaatattagcatgatccgcacagacctttttgcccgtctcgacatcaatgatgagcttcgtcgtatggatgaagatgtcagggctaaggtttatgcgggggctctgcatacggtctacggctatatcgattacctggcaatgaatatgctgcctgacctttgcgacgaatcatggctttaccgtcacgcagcaatgaaacgctgcccccgaaaagatgccgtggccgcgtctggttttatgcgctgggacggcgtatcgaacgggctgaaggtgagcgccggggcggtaattcagcgtgatgacctcgtgcagtatacggcgcaggcagatgctacaagtgcgggcggcgttcttcgtgtccccgttctttgcagtgtgacaggcatgacaggaaatatggatgacggggagacgctttcactggtttcgcctgttaatggactcccttccggcggcctggcagatacgataaccggcggctttgatattgaagatcttgaggtatggcgcgcccgtgttcgtgagcgttactactggaccccgcaggggggcgctgacggcgattacattgtctgggcaaaagaagttccaggggtaacccgcgcatggacctaccggcactggatgggaacgggaacggttggcgttttgatagccagcagtgacctcattaaccccatcctggatgatgcaacggttgcagcagctcaggctcatatagaacctctggcaccggttgcgggttcagacctttatgtgttcaagggaacaccaaaaacggttaactacacaatcgacctgaatcctgacacgcctgaaatacgcgcggccgtggaggctgaactccgatcatttctgttgcgggacggctatccggaaggagccctggaactttctaggacgaatgaggccatttctattgctgcgggtgagtacagccataaacttctttcgccaacagcagatacgccgatcgcgaaaaatgaacttgccgttctgggggtaataacgtgggtgtga

SEQ ID NO: 143086 - DNA, 426 bp, Enterobacter cloacae
atggagctctggttaacagtaaacggaaaagccgtcagtgccagctctcagctcgatccgctcacccgcgcagtggtgatttctttattcactcaccggcgcgccgatcctgatgacaatgttgatgtacctatggggtggtggggggatacctggcctgttgttgcgaacgatcgatatggttcaaaactctggttactgcagcgcagcaaactgacaaatgcactcgtgaatactgttcgtaactatctgcgtgatgctctccagtggatgcaggaggatggcgtggtgacgcgtatcgacattgatatccagcgaacgagtattaacgaactgggaaacaagatagttctctggcgccgggatgggcctgtaactatttcctttaacgacctgtggagcgtaatcaccaatggcggacagtga

SEQ ID NO: 143087 - DNA, 1080 bp, Enterobacter cloacae
atgaacgatgacgtaacgctgagagtgaacggacgcgaatgggggggatggacttctgtaagaattggggctggcatcgaacggctggcgcgtgattatagcgtagagattacccgcgagtggcctggggccgatggtgtgacctcgctgcaattacgggtgaaaaatggtgatcgtgtagaggttttgatcggtgacgatctcgtaataactggctgggtggaggcaacacccgttcgctacgatgcacgctcaatcagtaccggaatcagtggccgcagcattacagcagacctcatagactgtgctgccgatcctacccaatttaacggactttccctgatacaggttgccgcctcgctcgcaaagccatttaacattgatgtggtgaacgctggagccccttcttcagtcatccccggtgtacagcccgatcacggtgaaacggttattgaagtgcttaataaaatgctcggacagcagcaggcgctggcctatgacgatccaaaagggcgtcttgttattggtggcataggttccacacgagcccataccgcgctggtactggggaaaaacattctttcctgtgataccgaaaagagcattcgggagcgcttttccacgtatcaggtctccggccagcgagcaggtaacgataatgactttggtgctgcgaccactactgcgcttcgggctaaaaccaccgatgcaggtatagggcgctatcgtccgatggccgttcagcagacggggcatgccaccggcgcgagctgtatcgcccgcgcagagtttgaagcccggcagcgcgcagcacgtaccgatgaaacaacctacgtggtctggggctggaggcagggagacgggagcctgtggcagccaaatcagcgcgtcattgttttcgaccctgtttgcggcttcaacaacagcgaactcctcgtctctgaagtgacattcactaaagataacaacggcacattgactgagctgcgtgtcggtcctcctgatgcctatcttcccgaaccggaggacaagcaaacgaagggtataaaaaaacgcaaagtgaaagaggagccgttctga

SEQ ID NO: 143088 - DNA, 594 bp, Enterobacter cloacae
atgatcaaaaacttctccggtatttcgctgggcagcgatctttctcctcgtggtgtctggaagacggacagtaaaacgacgcagaaccgaaaggaacagggtaactatgttgccagtgctattcgcacaacagccataagtgaagcggtttacacggtcacgtcgcttccggcatcaatacaccagagtaatgagcagagcgggcagagcgctggctggccttcggtgacacaccccgcgctgaacaatgctccggatgaaacgacatctgtggatgtttcgacctgggacgagctcgttgatattcgcgacaccctgaatactgccattgataaagaaatggccagagccacagatgaccgtctttttctggcgctgcgtcgtgttaagtctgacctcaacagtgacatcaaaaaacgtctgtcgcagacagaaaaaacggttgaacgcactccgcctgaggttttgccagcgctggtactggcggcaacctggtttgataacgccgcacgggagtctgacattgtcaggcgcaacgctgttacacatcccggctttgtgccggtttcacccctgagggttccggtgcgatga

SEQ ID NO: 143089 - DNA, 1230 bp, Enterobacter cloacae
atggctgagtttgaattgaaagcgctgatcaccggcgtggataagctttctcctgcgctttcacgaatgcagaaaaacattcgtggttttaaacgtcaggccgaagaggcatcgaagggcggaattgctcttgctggtggccttgcagcaggactgactgtttcactcaaggctttcgccgatcaggaaaatgcggcaacgggtctgaaagtggcgatgatgcaggccaatggtgaggtcggcaacagtttcgaaaaaatcaataaacttgccgtggggctcggtaatcagctgccgggtaccacggctgattttcagaacatgatgcagatgctggttcgccagggtattccggcagaaaacattctgggcggggtgggaaaagcgacagcgtaccttgccgttcagctgaaaaagacacctgaagctgcggctgaatttgccgcgaaaatgcaggacgcaaccggcaccgcttcagatgacatgatggggttattcgacaccatccagaaggcattttatctgggggtggatgataccaacatgctgtctttcttcaccaagaccagttctgttctgaagatggtaaacaaagatgggctaaaagcggctcagggtcttgcgcctataagcgtgatgatggatcagatgggcatgcagggtgagtcagcaggtaacgcccttcgtaaagtcattcagtcaggtctggatgttaagaaagtcaacagcgtgaataaagtgcttgagcgtcaaaaactcggagtgaatcttgatttcaccgacggtaaaggcagtttcggcggtattgataaaatgttcacgcaactgtcgaagctcaggaagttgactgatgtgaaacgaaccggggtgttaaaagcgttgtttggtgacgatgcggagacgctccaggttgttaatgcccttatcgacaaagggaaagacggctatgaccaggttcagcagaaaatgaaccaacaggccagcctgaataaacgtgttgaagcgcagcttggaactcttgctaacctctgggaggcgatgaccggtacccgacatccggcgctgcaacggctaatacgctggtatcttcctgttcggcgctggacgactgtatcagcgataacttcggaaaatttggtatggaaggcatgcctgattttgtgcagaacggcgtggttgaagatgcgacgggcatgcttgggtacgtttctgaaaaaatggcgctggtag

SEQ ID NO: 143090 - DNA, 270 bp, Enterobacter cloacae
atgaaagaacttgagctgagcaacccagtcaatgcacatggtgaaacaatcagcgtcctggagttcaacgagcctacggggaaagacgttcgtgaactgggttatccctatcagatgaaccaggacgagtcgatcaaacttcaggcgcacattattgctaaatacatcgtcaggctggcaaatgtccccctgagcaccgttgatcaaatgtctccaggtgacctgaactcggcaggctggcttgttgctggttttttcctccagggctga

SEQ ID NO: 143091 - DNA, 357 bp, Enterobacter cloacae
atggcacgcattgcaggtacctgttatttcaaaattgacggtcagcagttatcgctgaccggcggcattgaggtgccaatgaacaagacggtcaatgacgacatcattggcatggccggggacgtagacagaaaggaaactcatcgcgccccttacgttaagggcacctttaaagtgccgaaagacttcccggtcaacaaggtgacgacatcagaccagatgacgattaccgccgaactggcgaacggtcaggtttatgttctgtcatccgcctggctgcatggtgaagccaaccataacgctgaagaaggtacagcggatcttgaattccacggtgaagagggagattaccagtaa

SEQ ID NO: 143092 - DNA, 414 bp, Enterobacter cloacae
atggccgatattgtcacaggattaactgcgcttaagacagccttcgatttagcgaaggatataaaaaatgcttcgggcgcatataacgatgctgaaatgaggctcaagttcagcgagctttacagtgctctatctaaagcaaaaatcgaacttgcagatgcacagcttgagatgtatgagctaaagcggaaggttgatgaactgcaaggaaaactaaatgcctcagatgagcttgagtttcgggataatgtctactggagagctacacctgttgatggcaagccaaacggacctttctgcccaagatgttatgagggatcggataagaaaatgtcctcaatgagcgcagtcactggacatgcaactattgctggtaagtacaaatgtaatacctgcaatgcatatgtaagataa

SEQ ID NO: 143093 - DNA, 972 bp, Enterobacter cloacae
atgagtgacgttgacacagaaaagttgtctaaagggacggaagattctgcaccccaaaaaaatgacactgattcaaatagtgcgcaaataaaatccaaaaatatgggtgatagagttgatggtatgaaaaccgaaaaaatcattttttatattttgagtgttattgcaataggtttgattttattccctatgggctcagttgtttttccgtttttctctaatgtctggcccgcttttataggtgtggcacttttggtaggtatatatacatattcttcacatggaaggtattatacaaggaaagcagacaatagttttgttgatgttgattataaatacagctctgtgcatagtgtagaaaaatacatagatgagcagatttcattacgtctttctgaagtgaatcaacacaacagtgatgatgctgatgtagattctgtgaaaggtaaagcagttgattatgccggacattctttaagagtgctttctcatctacaagccaaagctgatgcggctgacgaaaaagcgtcgatcttactgcagagagggattgcctatacaaaatttggtattgcatattatttggcgtcaataattctttggcagattatctttttttataatggatataagaaggaatatttatgggggattgcatcctgttcttttttgtttctctttattgagtttttaagcgcctggtttttgaagcaatacaaaaactttactgataactcagtgtatttgcttaaggttaaagctatttttgacagatatcttctactataccatttagagaatgataataatgcaggggcgaatggtaaaaacaaagctactatcaattccttgagtaaggatattatatggccagatgtctctgttatagaaagtaaagaagatacatttggaaaagaggctatggcatctctaacagaggcaataaaggccttaaaaacagaaaataagtag

SEQ ID NO: 143094 - DNA, 717 bp, Enterobacter cloacae; identical to SEQ ID NO: 130286

SEQ ID NO: 143095 - DNA, 3111 bp, Enterobacter cloacae
atggaaattcctcatattttaagtcaaaacatcaactcaggtcgtgttgttctttttttaggttccggggctactattggagctacaacggtaagcgggaaagaggcacctaaaggtaatgatttggccaatattctttcgaaagaatattttggagatgaaaaaactactaaggcattatcctcggtagcggagttagcaatatctgaaactgatattcatacagtacaacagtacattaaagattactttgatgagtttgaaccagctgattttcatctaaaaatacctacatttagatgggttgcaatatatactacaaactatgatttggtgatcgaaagagcttatcaaaaacaattaaataaaacacaaaatattaagtgtatatataaaaacagtgatagagtcgatgaaatactcagagcaactgattctatttgttatgtaaaacttcatgggtgcattactaaaactgatgatctaactatcccgttaattttgactcctgaccaatatgtgacacataaacgcaatagagatcggttgttcaatcggttagatgagcatgggcatcagtatactatagtttttgtaggatatagtttggatgactcagatctgaggcaagctcttttatccttaagcgacagcttggacgaaagaccaagattttatactgttacaccatcattgtctgaggctgaagtgcgtatgtgggagaagaaaaaaataactcctcttaagggaacttttgaggatttcttaaattctttagatcaaacgactcctattgccttgcggaacatatctcgcgttaaaaagcagcacgagattgaacgtgtattaaatgataatgatttggaattgtcatctaaaacagttgagttgctctccagtgagcttgtttttattcgctcagatatgcctactaataggcttgctccatctgatttttataagggaaattcatatggttgggaatccattaaggagtcttatgattgccgtagagctctttcagacacattaattagcgaggttgttttattagaggaagtcgagaggaatgcagttgtagatttctttttagttaaaggtcatgcaggttctggaaaaaccattactctaaaacgtatcgcatgggactctgcaatagaatatagtcgtatagttttatactgggaatcttcgaataagatagatatcaatgctatctttgaaatatgtgaacgctctaatgacaggatatttttatttgttgataaaccatcatttcatatttctgaaataatggccttaataaagaggggtatatcatcaaacctcaagctaactataatttcatcagagagaggaaatgaatggaatatggagtgtgaacccctgcattcttatgtttcaagggaatataaactaccttatttgaaagaaaaagaaattaaagatcttttagataaattagataaatttcaatgtttgggtctcattaaggatttggcccgtgaaaagcaagaggaggcttttagaaataaggcaggcagacaaatactagtcgcgctttatgaggttactatgggtaaatctttcgaggatattgtttttgatgagtataataatattgagcccgagcaagctagattgatttatagaactatttgtgctctcaatcgtttaggtgtgccagttcgtacaggtattatacataggatttttggtgttccatttgagatatttaaacagaagttttttagccctcttgaaaatatcgttcaggtcataagcccatctaataatgatgactatgcctatcaagccagacatcctttaatcgcagagtttgtatttgctcgtacgatgctaaatgaagttgataaggaagatttatattttgatttgattgattctctggatattgggtattcatctgataaaaaagcttatcgagaaatcatcaaagctaggaatctaatggcgctattcaatgatccattaattgttagaagaatctatgatgcagcaaggcaaattggagagtatgatgactattatcatcagcaaattgccattttcgaaatgaaacgtaagaatccgaattttagacttgctgagcaacacttagatattgcagcagaaattgcgccatataacccgaccataaatcatactcgttctgaacttgaactccaaaaagcgcgaggcggtaatgagttagagcgagatagatttctttcacgtgctcgcgaatatgcattaaataatatccgtagcgggtatgataataactcacatagttatcatactttgtgtaaggttcacttagaaaaaatttcagcaatcctcaatgctaatgtcattgatgaaaaaacattaaaagagttaatcaaagagtttgtgacaacattacattccggcttgcaaaaaaacccaaattcagagtttctcttggaggcagaatctaaactgagttctttgctaaatgataataaaggtgcaatagcatcattggagaaagcatttagtaaaaatagtgctagtaccttcatatcaattgcattatcgaaagcttatataaaaaatgaaaatgtacctaaggccagagagataatggaaactgttttggaatattatcctgctgataaggtatgtaatggcaggctcgcaaaaataataactgatttttaccctcaagaaaatgaacttgcagaatactactggaggcgctcatttactgaaggtgatgctaatatagaaaatcaattttggtatgctcgtcagttatatataaacaaaaagtatgaagactctaaacattactttgcaataacaaaaagcaaaaatgttgctcccgaagttaaaagtaaaatacgtggtcccattttcgatagagaagcatgtttgttacaattaggaggggcggttatcaggaaggatgatagttactgctttgtgcgtgattttgcatccggtgaggtcgcatttctgcctaagagaaacattaccgatccacttttttgggatcaaataaggatagacacccaagttttatataatcttgggtttaattattacggagcatcagcctttaatgctaaagaatttgatttgtag

SEQ ID NO: 143096 - DNA, 987 bp, Enterobacter cloacae
atgaatggacgcgaaatacggttatctactgaaccggtggtattcaatccagaagaaagtctgaataaatatctcctgaacatcagccattctgacttgattgccgatgtggaatcattcaccggcgaagaagcactgagtaccccctatcgttacaccatccgttttacctcaaccacagctgatgctgaagcctttcatatcgtgcagaaagaagcatcatttattcttcgagccaacaaccctgcctggtcgacctattttcccgatcgcgggaaatgggtggctttgcgtaaaatccctggtgtcataaccgagatcagcaggatcagtagcagtgctgacgaaacgctgtacgaagccgtgctggaacatcctctggcactactaaacgcccggtatcgcagcgctatctatcagaatgtctctgtacccgaactggttaagcgtatcctcaaagaacacggctttgagggatataaaatcaatgttgacctgcttcactgggaatatccgcagcgggagatgatcgttcagtggaaggagagcgatctggcgttcatccaacgcttgctgtctgaagtgggaatatggttccggttcgaactgcatcccgaccatgacaatattgttgttatcgtgttcggagattccggggcgcactatgtgcacaaccacaagatcgcggcaatcaacccggcaggaaccgtaggcaatagctacagcctgcgaaaaatgacaaccaggcatgccatcgtacccggctcggtcgacgtgcgtaactacaactatcgggagagtcgacgtttcaggacactcgaaacccaggccgataaatcccgacagccagaactggtttacggtggcgaatatcactacgcggataatcatctggtatccggcgatcgttacgcgacaggcaaaggccaacaggccgaaaccagttggcactatgcccgaattcgggtaatgactccaacttactga

SEQ ID NO: 143097 - DNA, 1023 bp, Enterobacter cloacae
atgtatcgcacattaagctggcgcaatattcccaccgcgagaacgttgtttgccatggtctttatggcgggcatcggcttaatcatctccgtcgtcgcactcctctatctttccctgcatcttatcagcaccaaaaccaatgaaattgatgaacaccgcgcggcgctttccgtgcagggggccattcagacatcggtcaaccgcgtctcctcgctggtgctggataacgccgtctgggacgatgcggtgcgggaggcctaccgtcccacgctcgataccaactggttgtataacacctggggcgccggctttaaaatcaacaacctctatgatggcaccttcgtgcttgatgagcatttcaacgtcatctggggatcgtttcaaagtcagccatttcaggagacgaatctcgattttttcggtaaggggctgaaggcgcttattgctcagcacgcgcgcgccctgtcaggcgataaaaatatctatgccgggatcagcaaaacgcgaagcggcgtcgcctttgtgggcattgggctgattcgcccgatggtcggaagattacaggttaccgacggaacgcgccgctatctggtaatcacccgtcatctgaacgccagaattttatccgacctggggtcgacctttcagatcgataacctgcactttacgccggataaaattaacgaactgagtatgccgctgcgcagctcggcaggggagctgctgggctatcttaactggcaggcacggcttccgggagcgcaggccgcccgggcggcatcctctgatatcacccagattgtcgtgctggcatcggccctgatcctgctctttattctggtgagcggcacggtgcggatcgccaacgcgctggggatggcggtggtcgccgaaggggtcgaaaccgaaagacaaatgaaactgctgcggctggctggctgcgatcaactgcagggtttctggttcagccagccgatgccgattgagtcaatcagggcattacatcaggtcagacgatgctga

SEQ ID NO: 143098 - DNA, 1377 bp, Enterobacter cloacae
atgagcgcaagtttacaagatgttacggattttgattttattatttctgaagcatatagaataaataaagaattagcttcatctaattttaaagatttctatcgaaaagaatatgatcgtccccttggttcaataggaatgactatagacactccgtgtgagcttatagagaaaaacaatgacaccccaagacggcaaatccatctttcatacctttcaaatgaaaggctatattccatagcagcaagatatatcaaatccaatagattagagatgttggttgctgtggacgaattagtggcaaaaataaaggacagtctatatattcacatattcatcgatgatggtgaagatggaattaaaggatgcacaagaatccttaacaatgcatttaaaatgataaaaagggaaatggtagaagaagagttctatttccctgtgttagctcacggcctaatcaaagataaaatttcaattggtcgcgctgaaataatctcatcaaagaaaatgtattcaataattggtgatgcattgactgaagaccagcttgcattgtcaacgagatattgcctttctcataaatacccctatgagcatttcctaaaaatcccaataagtaaacgctctaaaaagagtagggagcgaatcgctaaaaatatagcaggctttgtagtagggatactacatttatttagcgagcactataaaatatcgccacactttttaagtttatcaactagcccctatcctaactacgaaggtttttatttcacaaagaaatctaatagtaatttcaactataatcattcatctataggtcgggttgtatggagtgataagttctgggataaatttgaggaagattactgttccgatttaggagaggtgttatctcagctaattgacttagccatcgagcctaatgaaagatctatcatttctgaccgattaattgatgccatctatttatttagtagcgcgcaacaagataaggatgaaagttcacgcatagtgaaattagcaacagccctcgaaagacttgtgagtctaccaagtgagaaaaaagattcttcaactacaaagaacttcactagacgcatttcatcattagtttcaatttattatccaaatgaaaaggactgggataaggttgctaaagaaatgtatgaaattagatctgacatagctcatggagcctggtctctatatcgaggagttgaacctttgtattcatcccgatatagcgaattaactagcagggcaattttttctgcatgcatgggattttacaagcgaggctttactgaaaataacaatgataaattagtgaaggaattctttgattttctagaaaacgccatagacaaaaataaatga

SEQ ID NO: 143099 - DNA, 2199 bp, Enterobacter cloacae
atgaagcagcgtgatatcccgcaaggtgaaaacatgacggatgcggccctggcccagtgggcgcaggcctttggctttatcgccacccgctaccgcgtcgcctgctcgcccggcgcgctgatcgcaggcgcaccgtggctgaaaggcaaaccgatggtgcccgccctcacccagctcgcccgtgaagcggggctgtcgtttcagctgctcaccgctgaccagcagtcaatcaacagctggcgtctgccggtggtggtggcgctgaatgacggccgggtcggggcgatcgagcacttcgacggcgacgatacgctggaagtcagcttcttcgacgaccagacctacaccaaccggctgtcgatgacgaccatgctgcccgctatccgccacgtcattgccctgcgtccccttgccgcgctgaaggacagccgcgtggatgcttatatctcaaaataccgtccggactggctctaccggctggtgatgcgcgatctccgcccctacagctgggtgatgctcgccgcgctgtttatcaacgtgctgtcgctttccgggattgtcttttccatgcaggtctatgaccgggtgatccccgcccagtcctacccgacgctgtacgtcctgaccatcggggtgctgatcgccaccctgtttggcttcgtgctgcgcgtggcgcgcggccacattatggatctgctgggcaagcgctcggatatgcgcgtctcggatcgcgtcttcggccacgcgctgcggctgcgcaacagcgcgattccccgctcaaccgggagctttatctcacagctgcgcgagctggagcagatccgcgagatggtcacctcgtccaccatctcgacgattgtcgacctgcccttctttttactgttcgtggtggtgctggcgatcatcgccccacagctggcgtggatcgccccggtcgcggcggtgatcatggtcctgcccggcctgctgctgcagaaaaagctggcggagctggcaaagcagtcggcccatgaatcaaccctgcgcaatgcggtgctggtggagagcgtgcaggggctggaggacatcaagctgatgcaggcggaaaaccgctttttgcaacagtggaacagctatatccagatcaccgcggaatccggcctgcgcacccgcgagctgacgcagaacctgatcagctgggggatgaccattcagagcctggtttacgccgccgtgattgtggtcggcgcgccgatggtgatcgacggtaccctgaccaccggctcggtggtcgccgcgtcgatgctggcctcccgcatgatcgccccgatggcgacgctgtgcggcgtgctggcccgctggcagcaggtcaaagcggcaaaagaggggctggacagcatcatgcagcttcccaccgaaaaccagcgcgaggagacgccgatccgccaggacgtgctgcgcggccactacctcttcgagcaggcgcagttccgctatcagccggacgatccgcgcatggcgctgcgcattaaccgcctggagatcgggccgggtgagaaagtggcgatcctcgggcgcaacggcgcgggcaaatcgaccctgctgcaggcgatggcgggcgggatggacctggcggcgggcgagctgcggctcgacggcttcagcctgccgcatctcgacgtggcggacgtgcggcgcaacgtcggctttatgacccagaacgcgcggctgttttacggcaccctgcgcgagaacatcaccctcggcatgccgcgcgccaccgacgaagagatcttcgaggcgctggaactgaccggcgcggcgggcttcgtgcagaagctgcccaaggggctggactacccgatcatggaaaacggcgtgggactctccggcgggcagcgccagtcgattctgctggcgcgaatgctgctgcgcgatccgaatatcgtgctgatggatgaacccaccgcctcgctggacgagcataccgagcgggaattcatccagcgcctgggcgactggctcgggcaccgcaccctgatcgtcgccacccatcgcgtaccggtgctggagctggtggagcgcgtggtcgtgttgaaagagggcatgctggtgatggacgcgccaaaagcccaggcgctgagcaacagccgcatgcagcagcaacagcagcaggcagcaaccggacgggagtggaaaaatgaaaatcagtcagcgtga

SEQ ID NO: 143100 - DNA, 1404 bp, Enterobacter cloacae
atgggaatgaagattccttactggtggctctcgtactgcctgatatctgtgcccgctttctgcgcaaatccggcggcaaccatcaataccggacagcttcgcgaaacgcaggaactcccctcgctcaacggtcgcgtggccccggtggcgggcaacgccgcgcccggttcattacagcttggcgaggccgtcaaccgtgccgtcacgtggcacccggccatcagcgaagccgtgggcaaactctaccagcagagcgaagaggtggacgtcgcgaagtcaaaatactatccgcagattaatgccggcgtggacaacgggtattcccacgacggcgaccagaacggctttacgccgtcgctggtgctttccctctcacaaatgctctacgacttcggcaaggtggccagccaggtacgcgccgaaagcgccggcgtggcccagcagcaggctaacgtgctggtgagtatcgacaccatcgcccacgataccgccatcgccatggtacaggtgcaaacctggcagcagatggtcgacaccgccaaagagcagcttgaggccctctcctccattggcacgctgacccgccagcgtaacgacgagggggctacgtcgctctctgacgtggtacagaccgatgcccgtatcgaaggcgcgcgcgcgcagctgatgcagtaccaggccagcctggacagcgcccgcgcgacgctgatgagctttctcggctggaacagcctgaacgcgatcagcaacgactttccgcaaaagctggcccgcagctgcgatgtcgccgagccggacgaccgcctggtccctgcggtgctcgccgcctgggcgcaggctaacgtcgcccaggctaacctcgactacgccgacgcgcagatgacgcccaccgtctcgctggagccggaggtccgccactacatgaacgatcgctacgcgggcagcgacacgcgggatcgcacccagtattccgcctgggtgaaagtgcagatgccgctctatcagggcggcggcctcaccgcccggcgtaacgccgccggacacgcggtggaggcggcacagtccaccattcagcgcacgcgccttgacgttcgccagaaactgctggaagcccgcagccaggtgatgagcctgcaaagcacgctgcaaattcagggtcgccaggaggcgctcagcgcccgcacccgcgaactgtaccagcagcagtatctggacctcggctcgcgccccctgctcgacgtgctcaacgccgaacaggaggtttatcaggcgcgcttcacccagctgcagaccgttggtcagctgcaccagctgcagctcaactgcctgtataacaccggacaattgcgtcatgcgttcgaccttgataaccgcaacatccagaccgtggagatccagccatga

SEQ ID NO: 143101 - DNA, 180 bp, Enterobacter cloacae
atgcaatggcgtaactcctcccggcgctacggaataatatccataggtttgcactggatatttgctcttgccgtctacggtatgtttggacttggactatggatggtcacgctcagctattacgatggctggtatcaccaggcaccggaattgggtaatagtgccaacttactgatttag

SEQ ID NO: 143102 - DNA, 204 bp, Enterobacter cloacae
gtgaccattggcaaccgtggaccagacagcctggcctgcccggtcattggcaataacgtcgagctgggcgcgaacgtggtgatcattggcgacattacgattggtaacaacgtcacgattggtgcgggcagcgtggtgctggacaccattccggataacgcgctggtggtgggagaaaaagcccgcgtgaaggtgattaaatga

SEQ ID NO: 143103 - DNA, 213 bp, Enterobacter cloacae
atgaaattagctttgatcggtactggcaacatgccgttgatgcagtggattttagacgggaccaatgacgatgcgattgttaacatgtccgctttggcccgtaggctcggctgtagtcgttccagcctacttgaccgcattcaaaaccacggattcgacagtgctattaggtactacctcagcgaacagcgacaacgaaaactgaaaacatga

SEQ ID NO: 143104 - DNA, 1035 bp, Enterobacter cloacae
atgggactatcaaccaatttcagctacgcggattacaccaacacctttgtgaacatggatgcaaagaacactttgctgtccacgcttaatgttttcagtgatcgtcagacttctgcaagtccgaaggtgagcctcgatatcattgatgaagtcgctcagaaggtggcaagctctgttaatcgttacggctctgagtggtctagcattcctaagcgtagcgctagcaatcacctgattgaagctccgctttatgcttatcaggaccgtattacagcggcagacgtgcaaccatatcgcaaaccaggctccgacctgcaaatgtctgtaatggatgcggtcacttcttctgctgtcgcaatgcacgataagtacatgcgtacccgtgagcggatttttgctgatgcgctttttcgtaataccgtcgaagcgacctacacccagcagccgatcatttcctgggaagatgaatttggataccaacaggcaaccgggacaatcaaaaccaacgttagctctggtgacccacttcgcagcctcgatgatgctgtaaccgccgcaaaagtgcgtatggggggccttgctggtcagcttgatggatttatcctgtttgcaggtagcaatgtttttcgcggcatcaagtatcacccagacgtgcgccagaatgttcagttcggtgtgcttgatcgtgatcttctgtttaacaaagaagtgcttcctgcgttctcaacattcattattgaaaatgtccgagtggtggaagtaacggaccaaaatctttatggaattggtccggatgaatccttcctagttccacgtttcagccgccccctgtcctctgatattgctctacctttcggttatgtagcaacggctaccagccgcaatcttgatctggcatttgctgatccggttgatttccgtatctggagcgtacaggacaagtttaagaacgtggagctattcgcggaaagctcaatcttgcctgtggtgtaccgtccagactttgtgaccaaactggcgaacgacgcagcttaa

SEQ ID NO: 143105 - DNA, 342 bp, Enterobacter cloacae
atgaaaatgggaacaactgaacgttcttacaatgacgtgatcgcgtatgcagccgatccgaattttgaccgcaagactattactgtcgatctagctgtagaagtccagccgggtagttgcattaccagtgcaggcgcggcttatgtctctggtgatgattgcctgctggttctgagccaccacagggcagaagatgctgctcatatcatcgttgctgatcgcgggatttacatcaaacaagacaccatcaccgctgttatgggcgctaccgctggcgctaatgctattgccgcactcaccaaaacgggcgctatccgtacaagcgcaccggacgcagaataa

SEQ ID NO: 143106 - DNA, 591 bp, Enterobacter cloacae
atgagtgttgttgagacgttaagagagttttcagaagtatggaagctttttagtgagattcctgatgacgcgacacttaatgttgagttggcatctctgtatcttggtattagtgtaaaatcacttgctcgatataggcaaaatggcgggggaccagcatatatccagtaccaagtagaaaatagcaaagcgagaaaccagcgagtaaattacttgctaaaagatcttcgagcgtggcgtgataatcataaggtccaaaatactatgcacgcagctcaaatccgtggattaacatttacgtcattaaccgatttatgtgagccacatccattttggctgtctaatttttcaggacaaaaaataatatctcatgctttgacaacctctgatgatctttttagaaagttattgtcagagcctaatgttgatatagtctggatttctgttgagcaggctattttcaaagagtgggaaaataaaaatgaacgaattatttggcacaatattttcataacaattctaaataatttgagctatgcttcagaagcagcgcaagaaagatatacaatgaatgatgtcttgggaagttaa

SEQ ID NO: 143107 - DNA, 360 bp, Enterobacter cloacae
atgacgttgtatatcggtatgagcaggaatgacgggcaggccattgcagatacagaccatctgcgccagtcggtgcgggatattctgctgacgccgcagggcagccgtcttgcccgccgggaatatggctccctgctgtcagccctgattgaccagccgcagaacccggcgctgcacctgcagattatgtctgcggtttatgtggcgctgaaccgctgggaaccgcgccttacgctggactccatcaccatcaacggcaattttgacggctctatggtggttgaacttaccggacacggcaataacggcgcaccggtttccctttccgtatcaacaggagcagacaatggcagtcattga

SEQ ID NO: 143108 - DNA, 276 bp, Enterobacter cloacae
atgggtgctgatgaaaaaggttatcctgcctgggtttcaacgccaccactcactcatgaacagcagattgcaatagctgaaaatgaaaaagcatcacgcatcgctgaagcaaacagcttcatgaacagtaaacaatggccagggaaagcagccattggtcgactgaaaggggatgaattagcgcaatacaatttgtggcttgactatcttgatgagcttgaagctgtcaatacagcggcagcaccagatatcgagtggcctggtaaaccggcatag

SEQ ID NO: 143109 - DNA, 384 bp, Enterobacter cloacae
gtgaaaaaatctctaattgccttattacttattaccagcgccagctcctatgcagacaagattccggtttcgattgagaatgtcattgctggcataaatgctcgtgagcatagtcttaaaaatggtgaactcactgtcagatatgaccgttcaaaagtgacgcaggatatggctaccgccatgtttgactggatatgtaatgactatttcatgaataaatggaagccggagacaataaaaagggtcacgcttctgaacgtcacacgcgatcaaggttacaaaattgatgctggcgggaatgagtgtaagaaaagtggctctatgacttttgaacaagagaaagcctataaagccaatatcatcgaaaacgctactcagttctaa

SEQ ID NO: 143110 - DNA, 210 bp, Enterobacter cloacae
atgaaagtgaccttcgaagagttgaaagcggcgttcaatcgggttctgctcgatcgcggcgtgaaagcggaaaccgcagacgcctgcgccgagatgtttgcccgcaccacggaatccggcgtctattcgcatggtgtaaacgtttcccgcgttttattcagcagcttgatgcaggggatatcattcctgacgcccagcccaaacgggtga

SEQ ID NO: 143111 - DNA, 174 bp, Enterobacter cloacae
ttgggaagaaatgacctgcttattcgcaccttccctaaatatcagttaacccagaagctgtatctcaacgccagcgcggtctacaccgtgttgcctgacgacgtgaagaacagcccgatgatcgaccgcgacgacagcttcacgctgatgaccggcctgacctggcgtttctga

SEQ ID NO: 143112 - DNA, 465 bp, Enterobacter cloacae
atgaataaaaagtttatttttttgttgctgtccattatctcctctccaggtttcgccgttagcatacctgacccggttccttcagatgcttgccattttctttcaggaatgccattcattaaaactccgtcaacctataaaccatatgctgaaggcagcgaagactatacgtgcggaacaccctattttgagatagaaacgccgaatagtagcgacactatgaacaataacatcgcttactacgtatcaggtaatcaggacaaaacaaagaaattgatgctcatccttaatatgaataatcaagagccaaatgccatcaaaattgcccgaggttattttataaacggttcatttgaaataatgaaaaagatgtttcctcattctcccggaaaaattgccgacattgttggtttactcaggaaggtgcgaataagcaggtcatttcttcccaagctgactcgctga

SEQ ID NO: 143113 - DNA, 153 bp, Enterobacter cloacae
atgaccggaacggactgtattgcagaaggggttgatagtgaagaaaagtttgagaaattagtcgagctgggcgtcaagaactttcagggatattatttatcgcgcgccgtgaaagaggaggagttagaccgcatggtcagattgtttagttaa

SEQ ID NO: 143114 - DNA, 1164 bp, Enterobacter cloacae
atgtcactcttccgcagaggtgaaacctggtacgccagcttcacattgccggacggcaaaagatttaagcagtctcttgggacaaaggacaaaaggcaggccacggaactccatgacaagctaaaggccgaagcctggagggtgagcaagctcggtgaagtgcctgacatgacatttgaggatgcctgtgtgaggtggcttgaggagaaggcgcacaagaagtcgctggatgatgacaagagccggatcggattctggctccagcacttcgcaggcatgcagctgaaggacatcactgaatcgcggatctacgccgccatacagaagatgactaaccggaggcatgaggaaaactggaagctgatgagcgcggcgcagacgaagaaagggaaggaagcacctgattacgtacctcgcccggcatcggtggcgacaaaggccacgcacctttcgtttatcaaggcgcttctccgcgcggcagagcgtgaatggaagatgctggataaggcaccgatcgtaaaggttccccaaccgaagaataagcgtatccggtggctggagccgcacgaggccaaaaggctgattgatgaatgcccggagccgttaaagtctgttgtcgagtttgcgctggctacaggacttcgtcggtcgaacatcatcaatctggagtggcagcagattgacatgcagcgccgggtggcgtggatacacccggagcagagcaaatcgaatcaggccattggcgtggcactgaatgatactgcatgtcgcgtgctgaaaagacaaataggaagtcaccacaaatgggtgttcgtctataaggagagctgcactaagccggacggaacgaaagcgccagcagtgaggaaaatgcggtatgacgccaacactgcctggcgggcagcattaaaacgagcaggcatcgaggatttcaggtttcacgatctgagacacacctgggcaagctggttagttcaggccggagtcccgatatctgtactgcaggaaatgggcgggtgggagtctattgaaatggtacgccggtatgcgcacctggcaccaaatcacctgaccgaacatgccaagcaaatcgactcgatttttggcgattgtgtcccaaatctgtcccatatggaaaacaaggagggtacgaataacacgtaa

SEQ ID NO: 143115 - DNA, 216 bp, Enterobacter cloacae
atgtacatcatcgataccgcagcagagattgaagagcttcagcgtaacgctgccctctccgctcaccgcatcgaccgtaacgccgtatcagctgagcattgtgaggaatgcgacgaaccaattcccgagccgcggcgcgctgctgttcccggctgccagacatgcgctgagtgccagggcgtgatcgaattgaagaataagcagagggggatgtga

SEQ ID NO: 143116 - DNA, 294 bp, Enterobacter cloacae
atggccgtacctgtacatctctttttaaccaatgacggcggcacaatgatttgtggttcctgtgacgttgcaaagagggaaggaagtattgaactaagaggattacaacataacctcagcctgccaaccgactcggcaacgggaaaggtcaccggcactcgccaacattcgccgtttcagtttaccaaggaattggatagctcttcgccctatctgttcaaagcggcagcaacgggtcagacccttaaaacggcagaattcaggttttaccatattaactattccgggcaatag

SEQ ID NO: 143117 - DNA, 486 bp, Enterobacter cloacae
atgcctattccggcttacatgtggcttaaggacgatggcggcgcagacattaaaggagctgtagacgttcaggatcgtgaggggagtatagagattgttggctttagtcatggtctgaacattccagtagacagtgccaacgggaagattactggcaagcgttcacattctccgatgatgattgaaaaggagtttgatagctccagcccgtatctatacaaagccgttgccaccggtcaaacgttgaaaagtgcggagattcgctggtatcgcattaaccatgcaggacaagaagagtgctacttcgtcatgaccattgagggtgtgaaagtgacgggcattaacccagggatgccaaacgctaagatggcaggaaactcgcagatcaaccacatggaatctgtttccctgatgtatgacaaaatcacctggcgttatgttgatggtaatgtccagtatacggacgattggaacgtaagagcgtaa

SEQ ID NO: 143118 - DNA, 1017 bp, Enterobacter cloacae
atgaaaaataaaagggcttgggcctttaaaacaatcagtaaaaaagaactagtttatcgtggtaatgatggttatgatgataatccatttgagttgtattcttatgataatttggttgctaatcataagcaagttgaatctggggatattgttgtaatatataatagaaagcatgttattggtgtggcggtaataacctctcttatcaaagaagactctcaaaaagaaataaatcaatgccctataaacaactgtaaggcagagaaaataagaaccagaactagcaaaaaacccgaatggagatgtagtaatggccatgaattcgaaaaaccattaaaaaaaaccatacctgtaataaaatctaccgcattctattctaataactttaaaatactaaaaatgaattatcttgagctggagggtaaaataataaaccataacaaacaactatctatccaggaagtaaaatttgaatgggcaaaagatctatgggaaggaaatgggcgttatatcgataatttagaaagcatggaggctagtgaacctgaagccctattcaataaggaggatttaagagaggtagttaatcgttctattaaacaaagacgaggacaacgttcgtttagggaaaaacttctcaaaaaaaataatcattgcgctataactaaatgcgcggttttagatattcttgaagccgctcatatctatccatatagaaataaatcacataaccatataagtaacggtattttacttagggctgatatacatacactttttgatcttgatttaatagctattgagcctaagaacttcactgttcacattaatgaaaatcttaaaaaaagtgagtattcgatttatgaaggtagtattcttagtatttcccacaaactgtcacaagatgcattagaagaaagatgggaaatatttatagattattataaactaaatataagacatctttatggcagttccttttcgataaaaaactcacaatacaacaggggatgttaa

SEQ ID NO: 143119 - DNA, 255 bp, Enterobacter cloacae
atgcagcaaataggttcaaaatggtggaaattttatttccatacgcgcacacccgcctcaatggactatggcaagggtgatcatgaaatcaaaaagactatgacactgagaaattggctattagaccatataaataaaggaatagaatgtatagcagtaaccgaccataactcaggagcatggattgaccaattaaagattgaatccatgaaagtaagaaaggaagggacgcttgaggttttcttcagcatctga

SEQ ID NO: 143120 - DNA, 1533 bp, Enterobacter cloacae
atgattgagatttatttaaataatatagatgttgaagatataaaaaatatccggcaggaacctgatgctgatattgaggtttttattcctttagatagtgtaggaatatcaaactcatatattgacttatgcgatgattatcttgaagcaatatgggcaggggaacgactggccgacaattgtcaacacgcccgggcagtttcctattacgatcgtgaaaatcataaatcatacattaagttgtttttaacaaagccaaacaaaaaatttctcgaagcattgagtgattgtatagtcctttataaaagatatgatgacagtctttatagcgaagttccctcggtatatagtgagataagagatgctgtactctctatagaaaataatttagataattttgatgtaaaagtacctgccttgcatgattattattatgcgaatttaatagggggtaagtattttgagatgatgtctgatgcgcccgatgagcaccggagtgaaataaataaatatcctgaaagagctttgggtttttggaaaagtgcttacagtagtgtgataggagagagatgttatgcatcttcagataattgggttttcccaaatacagttgacttagataacttttttaaagttaccgagcaaaactacagttttgaaagtttcataccctctgatattttagtgttaaaaggagtctcttacattatatcggatgtgattatttgttatttcccaatgaagcattatttcaaatctaaagtttgtagcagtattgagttattaagagatgaagataggtggccattagatccatttgattggtctaattcaacttttacttattcgccctataatgattttcttagggggcagataggtcacgaaagtagtttgttatctccaaaacctagccaagaacgatgttatgttgatccaaatggaactctagtagttgttgatgacggtgatttttatcaccttctttatgataccgcagagctgaatttatcccagatgaaaagccttaacgaaacattaggcgttgctcttatttctaccggtgttaatataggtttttccgaaggtttaacatatgattggtctaggattgatgacgaggaatttgaaaagctttgctatgatataatttatagtcatccacgctttaataatgaaacaattagaaaattaggtaagtctcgttctcgcgatggggggagagatatacaagtgtatgatattcctttaaattcattaacaccatcaaaaaaatggatttttcaatgtaaattggttacaggagcagggtcactttctgccacgaaacttgtagatgttggtgatatgctagactattatgatgtcgaagggtttggcgtttttactaacactttaattgatgcaaccctttatgacaaacttgataagttatgtaaaaaaaggggggtggatcagcttaatttttccgcccttgaaattgagaaggaactaataagaaagccatatataagggcgaggtattttaagtag

SEQ ID NO: 143121 - DNA, 207 bp, Enterobacter cloacae
atggaacgtgatgaacttgcagatgaccggatagccttcatggctggagaggttgggtgtgtggtgttcgagttggtttacaacgggattgagatcaacaaggacaacattgtgggatttctggaagggaagcgtaaagccgtggggaatgttatccacaagggaatgctacgggatgcggctgagatggtgcggaagggcaaataa

SEQ ID NO: 143122 - DNA, 246 bp, Enterobacter cloacae
atgaacccaatgcaatttgcaatcgaagctgtaggcggacaaaccgcagcggcacgcctatgtggtctgtcgaatgttgctattcacaagtgggtaaagaacgcggcattgcctcgcaccgagtacacagagaaaaccaactattcacagcttttggctgacgcatcaaaagggcagtttacggcggagtggctacgccaagccgcaaaccccgatcgaactaaacatggatcacatgccgcctga

SEQ ID NO: 143123 - DNA, 282 bp, Enterobacter cloacae
atgagcgtaatccagtacgtcttaagcgatggaggtacatttcctgaggatgcatattttcttgaccctcgacatatcgatgagctcacttctgagtgggaattagaatgtttgtctcaggatgctgccattgattatttctacaatcatgacggttgggaatctgactggccgttggatatcgaggtattcattgacggcgagagcattggcgtcttcgcggttgggatggaacacgttccgcgcttcagtgcaaggaagaaaccggaggccgcacaatga

SEQ ID NO: 143124 - DNA, 882 bp, Enterobacter cloacae
atgagcactattaccagagaattcaccaaagagcagttaaagcaaattatcgaaactgaccacgttcaatgtggtgaggcttcggcgctggcgcgtatcgcgctggcatcgctcgaagcggaggctgttggagaggttattgagcaacagtctggaatgatgttggatggtcttgtcatttcagagaagccaacctatcgcaatatcaaaggcatccacaatatgaagatgatgccgctgggaacgaagttttacaccgcaccgcccgcgccggttgttcctgcgccgacttccaactcgtcgtctgccttcgaagatttctggtctaacttcgaacacccgtttgcagaagatgacgagcttaaatctttcgcgtcggaaatctaccgcgccgccatgcttcagggtgccgatgtatccctcacacatgagggtaagaaccatcacgaggataagctcggtatggttaaccatcttggtgatgtcaccgaaaaggtagaacctgtaacacagattgagccagtagcagacctgtacggcttaacctcaccaactggcggcgaaacatcattcactttcgacgctgttgaagctcgtgatttcattgatggcggttggtcatgtcaggagtacgtggagcttgaacgctttcaggaggctgttagcggcaactctccggtgattcaggatggttgggtgatggtaccggttgagccgacagaagacatgatcgtcaatggtttcgagtctgagccagatgagagctttagcgatgagaaggagtgggaagcatacgaagcaatgagcggatgccagcaagcagcgcaccgggctaagttgtgctgggcggcaatgattgcagcggcgccgaagttagagtga

SEQ ID NO: 143125 - DNA, 315 bp, Enterobacter cloacae
atgttgtcaaaatggacatcagagcgcgtaagaaagcgcttctcaggcaaagagctacctcaattaccaggttacattatgggtgaacaaatgaatcgagttaaaattgaattatcatccagtggtattgttcttaacaatgttgagtttcaggtattgcagggggatcgcgtactggttgaggattctttatcaggtaaaatttcggatgtgttcatccgctactatgatgtaattgctgatggcggccctgtgtcggttcgattcacgaaaggtgatataccaggcttaaatgtgaaggctgctctatcctga

SEQ ID NO: 143126 - DNA, 354 bp, Enterobacter cloacae
atgagtaagtttcccagccaagaaatggataggtttaatgtcaggcttcccgctgggatgcgcgatgctattgcgttcagggcgaagaagaacggtcgctcaatgaactctgagatcattcagatactccatgactccctcactggcaacgccttaagcatggatgatgaattccttaaagtgtttaatgaggtcacgcactcacagccagaaacaatggaggaattcgatgctgtgaatgaaaaggttgattggctgattgacaagctaatggagaagattgacagagaaagtgctaacgttcgggttcttcttcaagccaaaaagaatctatctaataaaaaaccaacctaa

SEQ ID NO: 143127 - DNA, 174 bp, Enterobacter cloacae
atgagtgacatgatttatacaggccggaaaagcgaaagctttcaactacgacttcctgagcgcatgaaagaggagatccgccgcatggcagaaatggatggcatttcgattaactctgcgattgtgcagcgtctagctaagagtctgagagaggaaagggcgaatgggcagtaa

SEQ ID NO: 143128 - DNA, 903 bp, Enterobacter cloacae
atgaacagtatagcaattcttgaagcagttaacacctcttacgtgccgttcaacggtcagcaagttttaactgctgttgccgctggagtgacttatgtagcgatgcgtcagattgtggagaatatcggcatcgactggacggggcagtcagttaaactccgaaaaatgaaggataaattcaactgtagagatatctctatggttgccgctgacggaaagattcgaaatcttctgtgccttccactgaagaaactcaatggttggttgttcagtatcaacccggagaaagttcgtgccgatattcgtgacaagctgatccagtaccaggaagagtgtttcactgttctgcatgactactggacgaaaggaaaagctgagaatcctcgcaagaaaacaacggtcgatgatcgcaccccgctgcgtgacgccgtgaacatgctggtaagcaaaaaacatctgatgtacccagaagcgtacgcaatgatccatcagcgattcaacgtcgatagtatcgaacatttagcccctgagcagattaatgatgctattgaatacgttcatcgcgtagttctggaaggtgaattcctcggcaagcaggaagaactacccgcgccgaaactggatatcaacttcccgatttcttggtttgttgaaaacgcgccgtatacagttattcgtcaacaatgtggtgatacgataacccttgatcgcgcggcactggttgattgcagcccggcttataaattggtttcggcactcacagccgccggatacgacgttagtgcggtaagcgctgagctaaaggcgctgcgcaccatcatggctgagcagagctgggcgatgaaagaaatggcctcatacgtcgctgttcgtgataaggcatgtcatcgcattaacctgtaa

SEQ ID NO: 143129 - DNA, 315 bp, Enterobacter cloacae
atggctcattacggtgttgaaacctgggacgcctcaggcagggtgaacaactatggaattaagcctgtcagtgtaagcggctacctacagttggcccagaatgaaaaaacaggctcttactccgtagtgcttccaccggggtgtaagcttacttattttcagatcatgaacggcgatcagtggggaacgagccggaggaagatcactatttcaggtggcaccgcaacggtatcggcagtgggcgataccgactactccgcagggactgagcctgcggccgcggcgtatcttattttccagatagagagggcataa

SEQ ID NO: 143130 - DNA, 297 bp, Enterobacter cloacae
atgaaagctgcacaccttgtctgcctgctggtttgtctgctgttcgccgcgtttgtccatgctcaggaaaaggacgatccggcgaaagaggcgcagattaagcaacaggtcctgaaagatattaagaaaacctgtacgccacagaaaaagcagagcgataaggcctggcaggcgatgattttgtcatcagaggccaatcagctgctgatcaaaaatgccgttaccgccgtgaagcgtgacaacctggacgcctactgggcggcaattggtcaggtggattgtatggaagattattga

SEQ ID NO: 143131 - DNA, 216 bp, Enterobacter cloacae
atggacaatgggattacaaacagcgcgatagacagttcgagagttttggaaacttccattacggggctgttggtcacgctgcggggattcccgacgaagtattacttaggggcgcaggatgggcgcaaagtcgcgcaggaacaactgatgcggcttttggtaattggtatggctcaacgccttacggcgacgatcctaatgaccaatattggataa

SEQ ID NO: 143132 - DNA, 426 bp, Enterobacter cloacae
atgcaaaacgcacaggtttttaagagacggtatcttcttctgataccgttgactgttatcgcctttgggatttacaagatgctgcacttctcaccacttgagcaagagattatcaagaaggtgaaagtaaacaacctggctaatctattcatcacggaagcgagtgcaggcgccaccacaggcttttcctaccgtttctatttgtatgatgctaacaaagacgataaatcatttattaagagtctgaaggacgatgacgagcctttcatgatcactacggacaaaaacgcattgaggaaagtcgaaaatgatgcgatctatctgtcagtgaagggaaccatctacacctttcacaaccaggcggcttatagagtgcatgattcaatctactcagtacctgtctacctcaccgccatacctttctaa

SEQ ID NO: 143133 - DNA, 1215 bp, Enterobacter cloacae
atgaagctcaacgcccgccaggttgataccgctaaaccaaaagataaaccctataaacttgctgatggtggtgggctttatcttctggttaacccaaatggtgcacgatactggcggcttaagtatcgtgtagcaggcaaagaaaagctgctggctctgggggtatatccagacgttaccctcgcagatgcgcgggctaaacgtgatgaggcaaaaagggggatcgccgggggcattgaccctagcgaagcaaagcgggaagaaaagatagcccgagagttaaatgtcaggaatacatttcaggaaatagcctgcgaatggcattccagcaagctctataaatggtctgaggggtacgcctcggacattatggaagcattcaataaggatgtttttccgtacattggtaaaaaaccgatctcggaaatcaaaccgctagaattgcttaatgtgcttcgccgaatggaggggagaggggcaacggagaaggctaagaaggttaggcagcgctgcggtgaagtcttccgctatgccattgttaccggccgggcagaatacaacccagcgccagatctcaccagtgctatgcaggggcatgaatccaagcactatcctttcctgaatacgtctgagctaccgacgttctttgaggctctttctgggtattccggcagtatgctggtggtattggcagcacgtttgctaatcattaccggtttaagaactggcgaactgcgtggggctacatggcaggaaatcgatgctgatgctgcggtgtgggaaatcccagcagagcgaatgaagatgcgccgcccacacatcgtgccattgtcattacaggcccaagccataatcatgcgtatccgggaaatgacaggccgctatcactatatattccctgggcgtaatgatccgcgtaaaaccatgagtgaagccagcattaaccaggtttttaaacgcatcgggtatgccgggagagtgacaggccacggtttccgccacaccatgagtaccattctccacgaacagggctataacaccgcatggattgaaacgcagctcgcccacgtcgataaaaactctattcgaggcacatacaatcacgctcaatatctcgatggccgccgggaaatgcttcaatggtatgccgactatatggatgcgctggaacaccgtgaaaacgtggttcacgggcgttttggtaaatcctcatga

SEQ ID NO: 143134 - DNA, 720 bp, Enterobacter cloacae
atgcctgttgttgaaaaccttcctgatctatctcattggaaaacagtacaggagtttagtattacccaggctgcgttattgcttgcgggaattgacccctatgattatgcaaatggtcttgagggagttagaagtactcgtcatgaacgctggaaaatggcttggggaatatccgaagggatcataagcgctatccgtcgtggggtgttaactccagttcaatgtctttcggttagatggatcggtgatgaatggaatggctgtgaagaattttatgaaattaagccaactgatcgtaaaaatgacatatcaaaagataaaacaataattactcgtgattcactatttatgtgggttgaaaatgagcgcgttgattttgtacgtaagccatccccagataaaataatttctttcggttgtgaaactatctccgatcaaaatgttattgatgttgttccggagaaaaatgatggtggcattctattacttcccaaatatgaacatcaaagtgaaggtttggaattcgttcaggatgctataaaggaactttggtcaacttatgatgaagacgacccccagacagctccaacaaaaaaagaagtaattgattacttgacggaacggggggcaggtaaaaatatggcggaggcggtgaaccttgttttacgcccatcctgtctgcaaggtataggaagaaggataaaaaaatcaaaaggatag

SEQ ID NO: 143135 - DNA, 198 bp, Enterobacter cloacae
atgtctcagtcattaattagatttgccgaggtacaaaagcgtactggctatagtaaggcgtggttataccgtcttatgagcgagaaacgttttcccgcagcaattaaaattggttcccgctctatcgcttttattgaaagtgaaattgacgagtggattaatcagcgtatcgctgagtcgcgtggcgaggtggcgtaa

SEQ ID NO: 143136 - DNA, 276 bp, Enterobacter cloacae
atggtaaacgacagcaaagccgaggctctggaagcaaaggggctgtatcgcagggcagctacacgctggcaggaagtcatgatgctttgtgatgaggacgatgatcgggaatgggtaaagcagcgccgtgatatgtgtctgacgaatgcgaagcgcccgccagtgaaaaccgatgattatggcgatctgcataaagcagtcactgagacacaacaccgcatgggaattgccagaccgaacggcgaagcattcaggctgaagggcaaggctgtttag

SEQ ID NO: 143137 - DNA, 171 bp, Enterobacter cloacae
atggctacaccatcagtaaaaccagtattgctcagtcgtgaccagattgaacagcttcgagccctgcaggagcaggagcgaaaaaaatccccgctgggtctcgccccaacaattcacgtcatcgcgcgccagctaatggatcgcgccctgaatatgccgaaggaggcgtaa

SEQ ID NO: 143138 - DNA, 321 bp, Enterobacter cloacae
atggagcagttaaccaggctggcagataccatcgcagaaacctatgttcgtgaactggaacgagtgaccggcggaaatacagttgaatataacggcgcctcagggcgggtagttccccataaattgtcatctgggctggtggacaatgttatctctgccgttcgtgaagacgctgacaaggaagcttcggcatataaattactggtgcggttaattgctattaacgggcgcgaataccggattacagcgcatggcgcactggtgatagaaagtatgctcaggaatggcctgatgaatagcaacaaacgtgtagttcactaa

SEQ ID NO: 143139 - DNA, 2967 bp, Enterobacter cloacae
atggaagtcggatcagttgtctatatcatcaaagcagaaacagaccaactgctaaaagccaataagcaggtcgataaattcctttcacaattacagtcaaatttcgacggagcggacaaagctgctgacaaccttggtggaacgctcaagcagacaagctccgctatcgatgataccagtgtcgctgcgggggctatgtcccggaatgtcgccgcagtagagggggcggtaggaaagcttaataccaatattaactctctaacacgggctattctcgaatccagatccggagtcagcagcgccagctctgaatttagccgggcagaatcaatcatagaatcgctgggcaatcagctcgctatccttgaagaacagcaagagggtagcaccagaagcgccgctattctggctgctcagctccgggccgggagtaatgccactgaggaagagaaaaagtccatagccgatttgactggccggctgtacgacatgaagaacggcacggaggcaggggcaaagggaactaaaaactggaaatccaccatgcagcaggcgggttatcaggtaaatgacttcatcgtacaggtgcagggcggacagtcggcattgttagcgtttagccagcagggttctcaactggctggcgcatttggtccgggcggggcggtactgggcgcagtgattgcgctaagctcggtaattgccgggacgctgataacatcgttaagtggcggtaaaaatgccatggaagcccttaaagatgcgacggaggcgatggatcgggtaattaatatctctcaaaacggagtggctgccctatctgataaatacgcgatgttggctaaaacaaatgcagaagcagccactattctccgtaatcaagccattattgagtacaacgtcgctgtttctaaaataccaaaggctataggtgacgcagcagcgtctgtaatcaactttggcgacaaggcattaagcgccttttcgggtgggtatgcgtcaattcagggatttagtgatcggcttgcggcgcttgaaattactaccgatgactattccgaggcaatgaagcaggcgtacggagttgggcaggctttcgaggctacggcgaacagtattgggaatacagtgggctcagttgcgagcaagtttgggatatctgagcaggccgcatttaaactggttaagcagatggacgaggtacaaagaacccgaacgcctgaagcacttcaaaggctggttattgaattacaaaataccaaaagctcctccgatagtggtaccagcgcaatcgctgcgtttttgaagccccttacagaattagtcggcgccgcgggaatggcgaaagttaatttggctggaataaatagcgaaatggatcttctgactgccggccagaagaacctcatcaagcagtctgagcgtaaccttgcgctttcaaagctgcaaggggaggcgcgcgcacgactgcaggcgcaatatgctgctgaggatgccgggtttgcgaaagacgatccccatgctaagcgcatggaagatgacgcggccgccacgtatagaaatacgcaggcacagaaagacctacagtcccagcaaaagaaaggcgcatcacaagcggaatccattgcgcagaagctggagcgactgaagcagcaatcagatctcgcagccgattcgacaaaagaattaagccgcgaacaggcagttctcgcagcccagcaatcacttgggaaaggcgcaactcaagagcagatcgcgctggctggtaaatatcgcggggaaatctgggatacagcaaacgcccttaaagctcaggccgctgctgaaaaactactgccggaagccagagaaaaagcgagctacaagcaggatgttgaagaccttaaagctgctctggcagctaagaagataagtcaggagcaatattaccaggcgagtgagcagcttgagcagcagcaccaggttaatttagccaaaatcagagcagagcaggcatctgttaaccccattgccgaggctagaggacaggttgacccggttcaacaactggctaatgagaatactcaaaaactgaagctcatgcagcagtaccagcagcaggagcaggccgttctaggccagtcgtataaaaacggccaactgacttatgcggaatacatcgctgccaaacagacaacagacgctcagtatctcgcgctcagaaccgcacaggaaacacagtacgaacagcagcgaattgaagctcaatgggaaatcttccgcaatcagagccaggctaacgaattgctggccgcatcgctggaaggcctgcagaacagcacgtcaagcgctcttactggcttaataaatggaactcaaagcctgcaggaatcattcgcaaatattggctcgacaatcctcaacagtgttgtaagcgccattgtggatatgggtgttcagtatgttaagagcctgattatgggtaaggccatgtcatctgccgcaactgccgcgcagatagctgaggcaagtgctcttgccactgcctgggctcctgcagctatggcggcatctattgcgacccagggcaaagcatctgctattggtctagctgcttatagttcatctatggctgcaggacaggcgctttctattgccggcgctcgttataacggcgggccggtttccgctaactcaatgtatcgtgtaggtgagcacggaaagcctgagatattccaggcggccaatggcagccagtacatgataccgggcgacaacggacgggtgataagtaacaaggatatgcagggaggcggtggcgcagtcattcaccagcagatgaatgtgactattcacacgacaaatggcattacagaggaaaatttacggcagattgaatcccgaatgtataaagttgggagaaaagcggctttggatgagatgtttaaccaacagaggccgaaagggatattgcctccaaggaaatag

SEQ ID NO: 143140 - DNA, 1701 bp, Enterobacter cloacae
gtgcagcgcgatacctttgttgtaagacaaacttttttgcaatggctgcataagcgtagcaatccggggcggattgttaatctctgttttctgatcgttctggtgttttccacgctcctgacctggcgtgaggtggtggtgctggaagaggcgtacatctccagccagcgcaaccatctggatacggtggccagttcgctggacaggcagttacagaacagcgtcgacaggatgctgttattccgccagggcatgcatgatgcaatcgagacgccgctggcctttgatgtcctacaggacgcggtgtcacgctttaactccgtccgcatgctccccacctggcagctcgccgttgataaaaagcgcacccttcccatcaacggggtctcggatgcgttcgtggataaaaccacgcttctgaaccgggacgctgagcgcatcagtcatgaaatttctgccgcgctcgaagtggggtatctgctcaggctggcgtcatcaagagcgcaaacggaagcgcgggtgatctacgtctctcgcgccggttttttcctttccacggatacgccggatcgggcgggtgatattaccgcccgctattataatctggtcacgcagtcctggtttacccagcagtcagaacgtaacaaccgcgcccgcgccgtgcgctggtttatctccacgccttcatcctggaccggggatgaacgcacgatcaccgccagcgttcccatctatttcgatcattactggtacggcgtcgtggcgatggattttacattagacacgatgcagcgtttgctgaccgacgcgacggaagaccggacggagggggagtatcagctgtacgatactaggcttaatatgattgccacctcagcccacgcgggaagtccggttaaccagtttgacgaacgcgaaacggcgcagattgcccaggcgattgaacatgataccggcggcggtatccgcctcgggagccggtttatcacctgggagcggctcgatcatttcgatggcgtcgtcctgcggatccacaccctgcacgaaggggtacaggacgacttcggcagtatcagcattgtgctggcgctgctgtgggcgctctttaccgccatgctgttgatctcgtggctggtgatccgtcggatggtgagtaacatgtatacgcttcagcactcgctccagtggcaggcctggcacgatccgctgacccgattgaataatcgcggcgcgctgttcgaccgcgcaaaattgctggcggaaacctgtcgtcagcagtcgctgccgttctcggtgattcagatccatctcgactattttaaaaacatcaacgaccgtttcggccatcaggccggtgataaggtgctttcccatacggcaggcgtgattgccagcgcgttacgcaagaatgacgtggccggacgcgtcggtggcgaagagttttgtgtggtccttcccggtcttggtctggaggaggcgagaggcgtcgccgaacgcattcgttgccgaatcaacagtaaggagatcctggtgaagaagagcacaaccctgcgcatcagtgcgtcactgggcgtcagcagcgcggatgaaacgggcaattacgattttgaacagctgcagtccgtggcggacgcccggctgtatcaggccaagcagagcgggcgtaaccgggtcgtgtggcgggatcaggacaggaaatga

SEQ ID NO: 143141 - DNA, 729 bp, Enterobacter cloacae
atggctaagtcagcatacccaacaggcgtggagaatcatggcggtacgctccgcatatggttcatctataaaggcagccgggtgcgtgaaagcctcggcgtgccggatacaccaaaaaacaggaaagtcgctggcgagctgcgtgcgtcggtgtgcttttcgataaagaccggcaactttaattacgcggcccagttcccggactcaccgaacctcagaaagtttgggatggagagcaaggaaatcacagtgctggagctggcgaataagtggctggaattgaagcgcatggagatcagcaccaacgcgatgtctcgttatacatctataacgcgcaatatggtgccacggatcggcggggacaggctggtttctgcggtgacgcaggaagacctgctgtttatcaggaaggaattgctgaccggttatcagacgttgaaggcggggcatcgtacgcctgtaaagggaaggacagtcagaacggtcaacaactacatgaagaccatggctggcatgttcaagttcgctgctgatagtggttatgtgaaggtaagcccgttcaccgggatcgcccttctcaaacgttcgcgttgcgagcctgatccgctcacccgcgatgagtttgtcaggttgattaacgcttgcgccacccagcagttgaaaaacatgtggtcgctggcagtgtacaccggcgtgcgccacggtgaactggtgtcgctggcctggtaa

SEQ ID NO: 143142 - DNA, 231 bp, Enterobacter cloacae
atgagcaccattcaggacatccgaaaccagctatcaaccctagtcaccgaggcgcacaaggttgcatgcgccctcgatataggtgacgagcgaaccgaggcctttgagctatacgaagcacttcgtcgacttcagcggcagggcgccgccggagagattctctcagcaaccaacccacttctcgcctcgccatattacgacgaggactgggacgaagatgaagacgattga

SEQ ID NO: 143143 - DNA, 645 bp, Enterobacter cloacae
atggatgcagcattgcttaacatgatgcaatcaggtggaagaaataaagcctgggcggaaacgatggtgaatatggaagccaggaaactggtaaatacagccaacactctgtcggcttttcatctcagcgatggtctgactcgaatgaagttcattcaggaaattcgggacctcatagaacaacagtttacgctagctcgtcaggctaaatcagataaagaatgcatggactgcgttaaaatacttcgagaagaaaactataacctcctggaacaagctcgtttattacgaacgaaggcagcgaagctttacgcgaaagtcgagttcatccgagagaataacaaaattgttgggtatgttatctcggcagttagtgttgtcctggccggtgctgaaatagccgcaggatttacactgattggcacgatgacccctctcggagttcttgctggtgcgattctggttactgacggggcaaacagcatcagtaaagaagtggctcgctacgcaacgaacaacactaccagtgaagggctggtcgcgaatgccgcgatgtctacagctgagtttatgggctttagtcgtgagaatggtttagggaaggtgcgaataagcaggtcatttcttcccaagctgactcgctga

SEQ ID NO: 143144 - DNA, 276 bp, Enterobacter cloacae
atgaaatactttacttatctgaccgcgctgatttcactgtctttcgtcggtgttgccagtgcaggagaagctcacgtttgcaaatcgccggcagtgtcgggaactgcggcgaatcccgctctgaatgatgataccgtctttacatgcggaggcggcgtgtcaggcaccattccgcaactggcaaaagagggctggaaaattgtgcagcaaactgatcaggctgattctcctgaccccaccaaaacttatgcgcaactgattatccagaaagactga

SEQ ID NO: 143145 - DNA, 990 bp, Enterobacter cloacae
atggccactgcctctcttcgctactatacttatgatgctaataatcaagcacgggagcgcttgcttggtatagagaacgttgaaaatattgacgaaatgctcatacctctcaatgagaagaatacacccatattcattacgaaggcttttactggcattgcctgcaagcgatggcgcgtagagtttgttctgggtatagaaaagaatatatggggagtatggttaagtgagaaagatataagtaatgatgtctatttatcccagacgatgaaaaaacgaagcatcgcacatgctggcggtatcgttaaaagggggtgcatcgttatagttgaatttgggcatatatatcttacgctcaattttagcaacgggctctccgatagctcccgctatccctgttatcaccagtctggagaaatgcacaaaaggcgccctgctatcgttgtaagcgcagataaaagaggcgttaaagttgttcccatcacctcccaggaacctgatggacacctttataacagagcgatttttgagctcgaaagctcatcgacaacctatatttctgaattcaaaagagataagccttgttttgcattatgtgagatgattcagacggtttctcccacccgtatacttccccctgaagcaaaagacatgaaaagccgtgatcgcaggttccgtcgtgatgagtcctattatcgaaagcttagcaccaacgatcttcatgcccttgaggaagggttacttgctgcagttgggatggcttctctccgtaaaaagaatgatactttactgggggaaagagacagattaaaaaattcgctggatgaacaagatcagatgttagttagcacatctcatgcgctggaacagacccgcacattgcatgatgattttaagaaaagatatgaggtccttttgcaactttaccttgcttcttccgggcatacttccctacaaagcatagaagctgaaatctcagagtatttgtaa

SEQ ID NO: 143146 - DNA, 897 bp, Enterobacter cloacae
atgggcgcacaactttggatgtctcctttaactggttatagacgtaatggtacccgcttcgaatccatcaacagtatttttcttaaaaaaatttctgtgagccttatttgcgaaccgattctatgctgtaaaggtagcgatgatgcatctgatgcgcattatgctcttacgcaaagagactttgacattaccgccgtagtcagtgaaaaaggtgaaattataggtcaggttgaaagagaaaaactaaagcaaggaaaagtttatgattatattagtagaatagaaaaaacatcatgcattgatgataaaatatctcttgtagagcttcttgaaattttaaaagatgatctttttaagtatgttacaaacgatgataaaattgtggcaataatcactcgtgcagacctgaataaacccttgccgcgaacgtatttttttggtgttatttcgttggtagaaatgcacctcaatttctggataacttattattttccagaaaatcaatggcagcaatatgttaactcaaaaagaatggatggtgcgcatagtattttcgaggaaagaaaaggtctcaatgactcaatatcattactggattgcatccagttttgtgataagaaatctattcttaggaacaatagtgaatttctttcgatatttaaatttagcagtaaaagtaaatttgatagctttatgaaattcattgagaaaatacgtaatgaaattgcacatagccaaaattcaatcatctcaggtctagaatgggaagattttgtacatacattatcttttacaagaaccttcctgacattgtccgatgcaaaattagaagaagactaccgaaaaaaagccgagaaatttaaagatgatatgcttgtttcgatcaaagtatcttaa

SEQ ID NO: 143147 - DNA, 1155 bp, Enterobacter cloacae
atggctgcaaaactatgtttcttccccgtaggtaatggggatatgacacttattcaaactgaagatggaaaaaatatattaatcgattgccgtattagggatggagaagaacatcctgatgtccgctcacaacttagagaaaaactctctcgagatagcgaagggcgtcttttcgtcaatctttttatttggacgcatcctgattcagatcattgtgatggagtatctgatcactttcacttggggaaacctgaaaattggagtgaaaagagcgataaaatttttatcaatgaaatttggtcaagcccaattgtatttagacgccatcatgctcaaaatcatccattatgtgatgatgcaatagcgttaaatacagaagtgaagagaagagttaatctttacaaagagaagggctatttggatggtgtcggaaatcaagtcttggttttaggaaaagacgagaatggtaaaactgatgatataccatatattcttttagaattagataatacaaccagttatattaacggagaatcttcatcagtttttcaagcccggttattaggtccatcacccaagaaagatctcgacgagttagaagataaattaggtaaaaatcattcgagtgttatcataaactttgaattaaaaggtgataacaaaactgcttattttttaagtggaggtgatgctgaggttgtgtgctgggaaggtgtgaaagatcgtctgtcagacaagaatgaaatgtcatggttagattatgatatcttacaaacaccacatcattgttcttggcacagtatatctcatgatagtctaagccaaaaaggcgatgatgcaaaaacctctgaaaaagcaatggaggtatttaaccgtgcaaaacaaaatgctttcattatatcaagttcgaaaacaattgaagacgatgaaaaagatcctccagcttaccgagcaaaagaagagtatgaaaaaataacagatgataaaaacggtcaatttctgtgcgtatctgatcataaaaaaaatggaaaaaatgttcctttggaaattgaaatttccagtaatggtattaagaagatagcggcatctacattaggtttggcagaatcatctaatactgtcgtaaatagacaaggtggtggtggttatgcctga

SEQ ID NO: 143148 - DNA, 393 bp, Enterobacter cloacae
ttgggaagaaatgacctgcttattcgcaccttccctaagcgactggtcaacaacgattttttccagctcttttcggaaagtctggttatccaacaggttagctttgagatcgcgaagcaagttgcgcatcgccagcatcgccttcagctgcggaatttgggcagccacctgctctggcgtgaaatctttcatgctctggaaagtcagctgaatgttgtcttcaccaccatcgtcagacagtgtattttttacggccaggttaacttttggggaatattcggaaagaacgctatcaaaattatttttggtgatgttaatcttttcacgctcagatattgtagcagattcctgcccgttgctgaaatcacccgtaacaagcaatttcaagggtaa

SEQ ID NO: 143149 - DNA, 801 bp, Enterobacter cloacae
atggcagcgctgccttacatgcaactttatattgctgattacctggcggacaccatgcatctgtctacagaagagcatggcgcatacctgctgctgatgttcaattattggcaaacaggtcgcccgatccccaaaaaccgcctctcgaaaatagcacggctaagcaacgaccgttgggatgccgttgagccatcgttgaaagagttttttaacgacactggcaccgaatggttgcaggagagaattgagcgggatctggaggctgtgaaaaattcaatcagtcaaaagtcggccgcaggtaaagcgtccgcccaggccagaaaggccaaaaaaggagcaagcacccaacaaaacagtaacgagcgttcaacgggtgttaatgctccgtttgaacagagcagcaacggcaactcaactaataaagatacagatacagatacagatctaaaagagaaacaagagagagagttaagcgcgcaagaatcatttttgccgccaatcggcaaattcccgattaccgatgactggatgccgagtgatgactttgtcgggcaagccgcacagtggggaattaatctcggtgaccgccctggttataccccagtggaacttcagcagttccgcgattactggaagtgcgaagggaaggtaaaacaccacctgcagtgggaacagactttcgcctcgagcctgaaaacatcccgagccaaaacctcaacctctggggcatcttctcgccgtcaggcaggctttggcatttcacaaccagacactgagatcccaccgggattcagggggtaa

SEQ ID NO: 143150 - DNA, 741 bp, Enterobacter cloacae
atgaaatcgacgcacgatttgcttggtcgtctccgcaatatcatgcctgcaggtgtccagccgaagtttaccagcagtcaggaattgatggcctggcagcaggaagaaggccgtaagcgtgcagtagagctggaaaaactaaatcagcgggcgcgagcggagaagatatttgggcgttcagggatatgcgatctgcataaggggtgcactttctcaaattatcaggtgagcaacgacgggcaaaagcatgctctcaccatggcaaagagctatgcccataacttcgggtctggtttcactagtttcattttcagcgggagctgcgggaccgggaaaaatcatcttgctgcagcaatcggtaattacttgttgcaacgtgatcactccgttctggtggttacagtacctgacctgatgttgcgcgctcgtaagtgctatgacgaggggcaatcagagtccgcgctgttggatgacctgtgcaaagtagatttactggttcttgatgaagtcggcgtccaaagagaaacgcgaaacgaatgggttttactcaatcaaattattgatcgtcgtatggcggcgatgaaaccagtgggcgtcctgactaacctaaattttgatgaattatcgaagactcttggtgagcgggtaatggaccgcttaaccatggataacggtatctgggtgaactttgtttggggaagttatcgcaaaaacgtaacccatttacgggttgttaagtaa

SEQ ID NO: 143151 - DNA, 2124 bp, Enterobacter cloacae
atgagcaaatatcataacgatcaacccatttatggcggaattgatgatcccgaccttctaaatagactcagttttgcaaacggactagcaaatgtacttctacttaattgtgaagatgaatgtcttactgtctcattagagggtgaatggggaaatggcaaaacatcagtaataaatttaattaaaggtgccttacaggaaaaggagacttaccccgctatcattgaatataacccttggttagcgggcaatcccgaatctttaatacaagattttctggtcagcttctcagcacagttaaaccttaaggataaaacatccttagcacttaaagtctcgaaagagttggtaaaatatgcaagtttatttaatattgcaaaacttgtccctggaactgaaccatgggcatctatcctagaaaaagtattttcaaaattttcaagcgctacaaaaaaaaccgaagacttaaaagagttagatcttttaagtaaaaaaaataaagtatctaaagaaatacaaaaacttccttatccaatcataataattatcgatgacattgatagattaacaccgactgagacatttcaggtattacgattggttaaagcagtagcggacttccctggcacttcattcctgcttgcatttgatcccaattatctaactgaagtacttaaaaaaaatggcatagaaaactccgcacaatacatcaataagattgttcagttacgggtaccacttccagttatttcagagagtagtataaccgagcttgcagaaattgaattctctaaccttagcgaaaataaactcacagaaaattttgaaaatgatcaagagcgcttaagttggatatttcacaattacttcaaacacttaattaagaacccaagggaaataaaaaaactttttaaccatttgagatttattttagcacaagtagaaggtcaggtatgtttttcagatctgtttgctttatcattaatagcaataaaatcaaacagcctatatgaacacataaaaaacaatcctgaagcatatattggaaagagatttaccaatgatggacttttgttagaaaagccggaagaaatcgtcaaaacattcgataatgaaagaaatcaccatcttcaaattttcaatgataaagatcggagattaatgattaatcttctaggtgaagtgttccctttgcttgcctctggaggctactcgcattatggggttacaaaccctgattatgcaggaagagtgtctgcgcctcaacgcttacatgttgcatttcattatgaaactcctattggatatttatcagatcaggacatcattaaatttattcgaggtgaaatatctagatctgagttcctaattgacgttgaatcaagcaacgctgaagatcgtttttttgaaatgatgactaactattccaacattatcgatgatgatgcctttgatattttgaaatgtatatatgataaatttctattctcagaaaaacttatcatatcacaggagtctaattacggatttctatcttcagatttataccgaaaaatgaattggctgacaaataaagtcatttcagaaagtaccaacaaaaacgaactaatcaaaagcataatatctagaaaagaaaatacccctctgggggctgatgtattatacaaagttagacgtcaactcaacggtactgatgaaagtaatccatggatcactcaagagttacttgataaattagagataacatatcaacataacgctcttgacgcacttacaacaaaaagatttattaaaaaccatcttgaatcgcatatatttttggagttaaggagatcatctaaacatttggcagctcaatttatagataatttaataaataaaaaaaatggaattattagaattgctgaggtacttaagcgtgcaggcagtgattcagttaacgggccttatgcgcaaattgatgaaagcaatttcggtgatattatcgatttagaaaaactaaaaaataaggttgggttgttagatattaccgattatagttacccagtacaggctgcactaaagagcattcttgatgggggtaaatattatcttcgtgatgctacaaagtctgataactggtaa

SEQ ID NO: 143152 - DNA, 147 bp, Enterobacter cloacae
atgacaaataacggaaaattcaaaaatgaaggttaccgtccgaaagaaaatgactacggttaccaacctaaatctcagcctattaacgaaggttacaagccacctaagcaagttacgcaaccagcgccaccacctaagaagccataa

SEQ ID NO: 143153 - DNA, 630 bp, Enterobacter cloacae
atggatatttgggatacaaataaattggtcattttcatagccttcgttattccgggttttctaagtatgaagctgtacagtgtactacatcccaatgttcaacttgatacgtctaagacagttattgaggttgtaacatatagctgcatcaattatgcaatatggctaatacctatatatttatttgaaaaatcgcaatatggtgccactcatttaatcacatacatgcttttctatttgtgtgttctctttgttagccctatcatcttgactttattatttgtatggatgcgatcgtggaagtggctatgtaatttgcttccacatcctacagggcgggcttgggattattatttcgggctaagaatgtcatcatgggttatagttactcttaaagatggaaataaaatagctggcaaatattctgctgactcattttcatcaagttctcctaatccagagcagctataccttgaagaaaattgggtgatcaacgcagatggggggtttgaaagggcaagaacagatacgcttggcattttgattctttcaaaagatattgagcacattgaatttttcagattcactaaccctagtgaaaatagtcaagaaggagataatagtgagtga

SEQ ID NO: 143154 - DNA, 1050 bp, Enterobacter cloacae
gtgaaagagagaatacaagtaacaaggcgtcagcattatgtattcaggaaatatttaaaagcttgggctgacactaagaaaagtgacccgcaactatgtgcaatgaataaaaattcaaaaggaatttttcggtctgggcttatgggggttgcacagcaaaattatttctatgaatttaaggtgttgactgaagttgagaaaatgatggttgtaattctctcaacttcaccatatgaaactttaaataacttcgacccatactttacacttcgtgaagtggaaattatcaacttaaaagagagagttgaaaccgctaaatctacaagtcagtatacccctcagcattttattgacgaacgtcgacagttaggtgagacaaagcaatctcgatatgaaaatgttgggcaaaggttcattgaacttctgttaagcgaaaatgtaaatttttatagcattgataaagatagaatcgattttatatttttcttaatgatgcaatacgttcgaacaaaggcgattagagaaagtcttaacagcgctttttcaaacgtacatgaggatttggaaagactaaaacgttcggttgatttagtcagtgctttagcaataaaaaataatatacctttcgataaggaaaaagcggaggaggagttagaagatttaaacgctaacttgaattttgataaagtcactcctttcataacatacagtacggttgatgagctcacttacgcattcgcttatatgcaaaaaatgaatttaaatattataaaagcacatcctgacataaaatttataacaggagatcagccagtaataaacattcacgcaccatcgcgaaattctcatgaagaaatagataaccttgagttttattatccactgtcaccaatgattgccattgttttaaatttcaaagaccatgacccatggccggaaaaaataagcaaggagcaaacattggagttaaataataaaatctttgaagctgctcatcttcaagtttatgcaggtgatgaaagtgacttccgttctggagggataatataa

SEQ ID NO: 143155 - DNA, 426 bp, Enterobacter cloacae
atgggttatgtatatcgtgccagcactggcggcttttattgtgatgagctggaagccgaatatcgcaaggcgggaacgtggccgggcttctttgtgcgcgtgtcggatgaggattaccgcaacctgatggagggcgtgtctcaggggaaaatgattgtcccgaataagcagtgttatccggtactgcaggagcgtccggctccatcccgtgacgaacttatcgcagaggcggaggaaaagcgccgggagctgattgagtctgcgctgcagtcgatttccgttatccagctcaagcaaatgaacgggcgcagtttaaccgaaaaagaagttaccaggctgaatgacgtgcttgattatatcgaagcgcttgaggcgaccgagaccgacgccgccccggatattcactggcctgaattagccgcgtga

SEQ ID NO: 143156 - DNA, 870 bp, Enterobacter cloacae
atgtatttttataaatacctgcgggtcgacaaccttaacctttccatgcttcgtcatggggaggttttttttgcttcacctaaagaattaaatgacatacatgaatgcaaaccacaattcatttttaacgccgaccgcgaggtatggacaagatttatcgacgaaatcattcttagcatcctcattcaattgaatgcaaagccaaagtctcacatagaaatggctttaacctctttcaaaaaagacatttacacagcccttttaaataagaagaaatcactatcacttaattacgaggaaaccttaaagataatttcatccgagatctgtaacaaggccttcgatgaattagacttcgttgatgcgcgaaatgttaaaaaagcgcttaattcatacatacaaaatgaactggacacagagctaaacgataaactatatattacatccttttcaaaaagcgctagcattctaacaatgtgggggcactatggtaatgctgaaaagggtttcgcaattgtttatgaaacaaacgatggggatattagtttagaaagcgatatagaaatatttccttcagccacaaaattatcagcgtcaagttattccttaggtatgtcaaggttcagtaaagctaaactccttgaggtagcctataaaaacaagcctgttagagcaaatgctttcagaaaactaatccccacattctcttttagtgaccaagaagatttttacgattaccgtgaaactctattggcagaccttcagaaatacaatgagaatgatatcgggcgcgtaaaatacactgactggaagtatgaaaaagggaaggtgcgaataagcaggtcatttcttcccaagctgactcgctga

SEQ ID NO: 143157 - DNA, 615 bp, Enterobacter cloacae
atgctggaagatatcattaaatcatacctgtatacgcagtataacgacgatgatgatttacaggcattcgtcactgcatataacaccatggctcaggaaatttattcatggatgattaatgccagccttccgatctttgtcggcgggtacaatgcaggcgaccaattaaaatggatagcaaggggcatttatggtgttaagccgccggtgcttgtcagtggaaagcgaagcgtgtttggcccttacaacgccgttctgtttaaccaacttccattcaacggtagaaaggtcgtcaatcagtcggagcaggttgtcgtttccgacgacctgttcaaacgcataatgacctggaatttctacaaaggtgatggatactacttcacaatcccatggctgaagcgccgcatcatgaggttcctgactggcatcgatggcgtcgatgttgttaacgatcagcggtggagtatttctgttctcttctcaggttctggtgcaagcatctcgatcataaaggggtacagaaaactaactgatgccactatttttaatagtttttccttcaactcacggtcctacaatcaaaaaaatggtaatggtgccaacttactgatttag

SEQ ID NO: 143158 - DNA, 1947 bp, Enterobacter cloacae
atggttgttacggctcctgcctcatcgccgctggaagttgtcacgtccccaaaaagacctcgtcagcctgtcccggcaagtgatggttccgattacctgaaaaccatccccggtttttcacagatacgggccggtggcacgaatggcgacccggttttacgcggtatgttcggatcgcgtctgcgtatcctgaccaataatggcgaaatgctgggtgcctgcccggcccgaatggatgcccccagctcttatatctccccggaaagttttgaccttctgacgttgaccaaaggaccgcaaacggtcctttgggggccgggtaactctgcagggacaattcgtttcgatcgcgagcagccgcgttttgataaacccggcgtacagggaaatgccagcctgcttgctgcctcgaacaatcgctgggatgagaatgcggatatcagcctgggtagcgaagatggatatttgcgcctcatgggtaacaaatcacgttccgatgactataaggatggtaatggcgatcgcgtcccctcaaaatgggataaatggaacggcgatatggcgctcggctggacgcctgataaagataccctgattgaactgacggcagggaaaggggacggggaatcgcgttatgcgggtcgcagtatggacggctcccagttcaggcgagaaagcctgggtgccaggttcgaaaaatcaaatatcggggaggtattccagaaatttgaagcgaatgtctattacaactacgccgaccacattatggataactattcacttcgttcacccgacggtggtatgtcaggaggtatgtcggaaggaatgacagacagcggcatgggtgactcaatggatgcaggcatgtcaatggatatgaatatgccaatggcgatggaagtcgacagacgtactgttggcggtcgtatgatgggcacatgggagtgggcggatgtggagctgagaagcggcgccgatacccagctgaatacccatcgtaataaaatggataacagctgggtcaaagatgcccgtttccatgattatggtctcttcagtgaactcacctggaatacctctgattcaagcaagttagtggggggcgctcgccttgatcgtgtcctcgtggataatttttccgggaaaggctcctcagagcgaacggacacccttcctgccgggtttgtacgtttcgagcataccctcgcagaaatgccgctaatgctgtatgccgggcttgggtatacagaacgtttcccggactactgggaactgttttcccccacctacgggcctgacggcacctcagacgcgtttgataaagtgaaaactgaaaaaacgacccagcttgatattggcgcacagtattccggcaaacgtacaaacgcctgggtttctgcttatgtcggtcacgtaaatgattttatccttttccgctacgatcccaacgatgcatatatcagccaggtcgataacatcaacgccaccatcatgggaggcgaagccggtgtcagctataagctgaccgacagctggaaaaccgacgccagtctggcctattcctggggcaggaacatggaagatggtaaaccccttccgcaaatgcctcctctcgaagcccgtctgggattatcctgggaaagtggtaactggagcagtaccgggctggtacgtctggtcagtagccagcatcgggtggcgattaatgaaggtaatgtggtgggcaaagattttgacagcagcgccggttttgccgtggtttccgccaatgccgcttaccgcgtgaacaagtactttaaagtgagcgccggtgtcgataatcttctggacaaagattacagcgagcatctcaacctggcgggtaacagtagctttggctactccgccaatacctccgttaacgaaccaggaagaacattctggggcaaaattaatgtgacattctga

SEQ ID NO: 143159 - DNA, 261 bp, Enterobacter cloacae
atgttgaaaattctcaaaactccggaagggaaaaagtttcttattgctgtggcttgtgtgtttatcgttgcggtatgcgtggtgtcaaaagccgcattccagggcgtggaagaccagtacaatctgccgatggatacctgggacacatccctgtttatcatccagggcgcatgggtggccatttacagctttatgttcaccattgtgggggcgctgcctttcgggttttactttctcggccctaaagatgattcagaataa

SEQ ID NO: 143160 - DNA, 417 bp, Enterobacter cloacae
atggtgcctaaggggtggtcaatcgtacatgtaagtgacttatttgaggtccagcttgggaaaatgcttaataaagaggcaaaggcaaaaggacctcagtttaaatatttgggcaactccaatgtcaaatggggaagctttgaactatcaaacctaaatacgatgttttttaatgaaagagaaattaataaattttcgttaagagttgatgatatcgttatgtgtgaaggtggtgaggtcgggcgttgcgcaatttggcagggccaagaagaacatatttattatcaaaaagcgttacatcgacttcgtagcaaaggaaaagttagtccttatttttttcaagcctatattgagagtattgctggaacaaagttactggatgattacacaactcgggtaatggtgccaacttactga

SEQ ID NO: 143161 - DNA, 1785 bp, Enterobacter cloacae
atggcagtgaacaatctggatcgttcccggtggtacatgggaaatgttctctggttcggaggctacaacagcaaaacggatcgggagaataactttggcttcctcttatcagagaatggtaatgagctgttttttcataagaatgagataagccggaactatacacccgctgaaaatataccggtgctgttcagggaaggtataggtaaaaatggtaagcctacggcttttaacgttcacattcttgataaaacagatgaggagacggctgagctcctcattgaatatctccgggctattattgaggagggcgttgatttcgctcgttggcgttatcgtgactgcgttattaatttcctcacgcagtcctttggcgaaagggctataattcggttagttaccagtgatatagctgttacaaaagtcttaccgctatttttaaaatcacgtaactacgataaccagtttgcacttttagcctctgataagaattttgatgatttgaccgcacaacaaatatctcctgcggtcatgccttcgtcatttatcgataataacattgatcaattcgctgtttgggtgaaaagatgttctgcggctacggattgccagggggcttcaacatcggacatcatcaatgaattactcagccatatatctataagtgctattctctacctggctttttacgattgtataagtagcgagcggattcttgagcatcggcatgatgatatagagatttttgttcgacgtagtttcacgaaaaataaaatggatatacaaccatttgtccgtgatgcctatcagcagaaattctcatcgagagagcaattttataaacataccgtgattagtccttttatcaatacgtatttgattaaacagaagatgttcagaaaagatttcagttttgttaatgatgtcgagtcgaatactgaaattgcttctgatcctgaatacttcattctgagtaaattgttaccgttgcttgggcgcaacgatgaacagtccgttctgagtattattctgcatgagatatggcacggagtcttgtcgggtaaaattccggtaaatcatccttctgttttcaaattgttcccacaatgtagttcattacaaattcgtttcccaagtttagaattatcctgtgaggcgtttcactggaatgcaaaacaacctgacggaacgatagagaaaaaattcctttgtcgttcgaaaatctgccatgatccgcaggtactacccgacctcagtcgggattacatcgacttcactatttatgactggcttgcccactatggcatgacctatctgattgcaggcgaaccttctaagcgggatttcccaattaaactggctgggtatttcaatcgtatcagagaattacattcccgcttgcattgccgaagttgtggggtgctgatggttccagatatgaaatatgctcgtgtggaagtcagcgtctgggatacaaagtcgaaaggatttgtgaaaaaacctttccaggccgcgtatcgcctgaccgtctttaaatgtgccagtcattcgtgcgaacagtttggtatcgggcattacattaatcactgtattggttacaaatgcagcgaaataattgacgccagggatttgcatgaaaaatgttcagaaggacgatttatttgtgcatcctgtggttcctgctgtacgacgcatcaggagaaatttggtaatgtaaacaagggcgaaacagaacaggtcaagtacaatcgcctttatcgggactcgccgttcttttcatcataa

SEQ ID NO: 143162 - DNA, 684 bp, Enterobacter cloacae
atgaaactgacgaaaagtggtccactgactgaccgggaaatcgactggctggaagaggtgttgatgaaatacggcaatgatgactctgtgctctgtttctctgagctggatggctttctgacggcgattgtctctggcccgaatacgatttcccctaatacctggctcagtgctatctgggggcgaggtgattaccaccctcgctggaccactgaaaaagaaatgacgcgttttgtggggctgtgttttcagcatatgaacgatatcgctggctgcctgtatgaggcccctgaacagtttgaaccgattttcaatggacgtgaggtgaaggggaagacatataccatcgtcgaagagtggtgtttcgggtatatgaaaggccggtctctggatgactggtcagccttgccagaggccttacgtccctcgctggaggcgatagcccttcatggtattgaaaagaacttcccagtggttgagaaaatgtcacctgttcaatttgaacagagtattactctcattcagcctgcggcactggcgctttaccagcactggttgtcggtgagaatgtcagaagcatcatcccggcctgttcccgtgaagggggcagaaaaactgcccggtcgtaatgacccgtgtcagtgtggcagtggtaaaaaatttaaaaagtgctgcctgcactga

SEQ ID NO: 143163 - DNA, 1155 bp, Enterobacter cloacae
atggtgcctaaggggtggacgcttctccaagtgtcagatatttgtaagttacaaaatggtaatagtttcaagccacatgagtgggatacacaaggtctccctatcattcgaattcaaaatttgaatggaagcgataattataactatttttcaggtgttcctcaggataaatggttggttgaaccagggcagttactattttcctgggcaggtacaaaaggtgtatccttcggtcctttcatttggaatgggccaaaaggtgttttgaatcagcatatctacaaggtatttgcaaatgaaaatgttcatggacactggctgtatttagctttattgcatataactcaaaaaattgaagcgcaggctcatggtttcaaatcaacattattacatgttcaaaaaaaagacattgataatcaatttgtgcttaccccgcctgttgctgaacaaaagaaaatagcccaaatcctgtcaacctgggataacgcgatttcagtaacggaaaagcttctcaccaacagtcagttgcagaaaaaagccctgatgcagaaattgcttaccgggaagaaacgcttgctggatgagaggggggtcaggtatggtggtgagtggcatcgtgctgagcttggcgcagttttagattatatgcagccaaccccttatctagttgattctactgattataatgatagttactcaatcccagttcttacagcaggtaaaagtttcattcttggctataccaatgaagaacatggtatttatcatgcacctttgcctgccataatttttgatgatttcacgactgatagtaagttcgtcgattttgaattcaaagcaaaatccagtgcgatgaaaattcttacagccaaaaaaggagtatctgcaaagtatatttttgaagcaatgcaaatgttgaaatttaaaataggtgggcatcagcggcattggatttcaatttattccaacttagtaatacctattccagatgccaaggaacaacaaaaaatcgcatcagctctgtccactgccgacgctgaaatctccacactggagaaaaaactcgcctgcctgaaagaagagaaaaaagccctgatgcaacagctactgactggcaaacgtcgggtgaaaatggatgaggctgttgctgcatga

SEQ ID NO: 143164 - DNA, 474 bp, Enterobacter cloacae
gtgcttttccgtggctccagcgaaggtaaaattcgccagaaactgatcgacgaaaatttgctggatgcggtaattggtctgccggaaaaactgttctacggtacggggattccggctgcgattctgattttcaaaaagcagaaagttgatgacaaggtgctgtttatcgatgccagccgtgaattcaaggcaggtaaaaaccagaaccagcttagcgaaggaaacattaagaaaatcgtcaagacctaccgtgatggcgataacgtcgagaaatacgcctatcttgccagcctgaaggaaattcaggacaacgattacaacctcaatattccgcgctatgtcgatacctttgaagaagaggatgagattgacctggtggcggtgcgagcagagcgtgagcaactgaaggtggaactggcgaagctggaagttgagatggcgggttatctgaaggagttgggttatggtgcctaa

SEQ ID NO: 143165 - DNA, 849 bp, Enterobacter cloacae
atgttacgtgctttgacgcttattagtgtgggactgctaattagttatggttatagttatcttttaatgaatgatatttggccgtttactggtatgaatttggaacaacgaggttcttttggcgactcatggggaacatttacttccatcttttcggcattaggattttgtggggtgatatggacaatcaaattgcagttagatgctactaataaaattgaaaacgactcaaaattaagggcggaatctgagaagctcagagattttgaaaactcattttttaatatgttatctatcttgcaaacgattataaatgatatgaaagtccctgctgggaagcaaacaaaagagcgtgaggggagagcagtattcacttatcattatagaagatttaaatctcattgtgaattaacctataatataaatacaatatctgatttaaaccattcaatgtttgtgttagaaaatgagctgtttttttattctgaaaaattctgggaatactttaaacaccgctctagtaatttctcgcattattataggtatatatataatctttataaattcattcatgaatcatcgattaaagattccgacaagaaaaaatatgcaaatattttgcgcgcgcaaatatcaaattatgaacttatgatattatattacaatggcatttctaagcacggttccaagttcaaaatttacattgaggaatactctctttttgataatttacctgtggaccgacttgtaagtgatgtccatgtattattttacgacattaaggcttggggggataatgttgatgcgctggcattgttcactaaatgcaagttaaaaaatattatctag

SEQ ID NO: 143166 - DNA, 795 bp, Enterobacter cloacae
atgaaaaatactgcttggaatgtgttggtttatagccatgctgaaagcgcgactactattcttattacttatgctaaaagtgtacttgttctgctaattgtaataattattgcattttcacttctttcatatttcattgcctcccgtatttcacttcctttagaaaagcttgctatatctaccaatgctaaagatataggggcttcgttagtttatattaaagctatcaatgcttggtatgccgaagctgatcgacttaaaaaggcactttttacgcatgttaaggtaatgatggaaagggttgattctttaaatgaggtggcgcttaaagatccccttaccggcgtgaacaatagattggggttttcaactaaaatacagaataacaagtatggggcaggagcttcagttattgctattgatgttgatttttttaaaaaaataaatgatagtttcgggcatggggtcggagatgaggtgcttgtttctttggctcagattattaagtcttgttgccgtagtgaagatattatttgtcggtttggtggagaagagtttgttgtttttctgccgaatacatctgtggtaacagcggagtgtgttgcggagcgtattaggagtgttattgaacgtactgttttccctaataacttgcgtgtcaccgtatctgctggtgtggcaacacaagatgatcctcttggtgggatcgattttttgctgaaaaatgctgacgatgctctttatcaagctaagagagaggggcgtaataaagtgattgtatatagcgctatttga

SEQ ID NO: 143167 - DNA, 429 bp, Enterobacter cloacae
atgaaacgcacacccttctaccgcaggcccgggcgaaccgggcaattctctggcctccgtgagcgcgttatctggatgattcagacgcgtggccgaccggtaaccggtagcgaaatcgctgagaagtttggcgtaacgctcattgagtttaaccgggtcgccaacggcatcacccgcggcactggacagatagcgcagatagttgagtcggaaaaatggctcaacgaggacggcatctgcgaccgcactttcgacctcgtcacgaagccgaaggttgtaacgccgcagggtaaatcgcgcctgttcacccggcgcgctatagagcaatcgcagaaaggcagacggcaggagtgcatagcgcgtgccgcccgccggagccgcctgattgctcagggcctctacatcgacgaaatggagtcagtgctatga

SEQ ID NO: 143168 - DNA, 795 bp, Enterobacter cloacae
atgctcatgcacccgcagagccttgtcgctggcgctcatggcggtaaattccgcctcgctcatggtgtcgaacgggctttgtgccggtggccggatggcgtcataaatcgcttttcgcgtggcctccccgccattctgcataaacgcatcattccagtcaccaaacaccggcggcagggcaacaacgccctcacaggtttctgcggccgcggcggcttttgtctgaccatcgccgttaaggtcacggtcagcagcgaggacaatctgacaggccgggtgtttctgacgggcaaggctcgccagagaaaggaggttcacggacgacagcgccaccataacggtttcgccggtcaggtgatgcacggtgagtgcggtcgcatagccttctgcaatccacaggcgttttccagcctgttttttcccttcgatggtatggctcgctccttttaccgccccgcctttcagggtgcgtttgagcccctcagaattgataagctgaaggttaaccagtgcgccggtatcgtcatacagcgggacaaccacatcatcggcgcggaacatcacgccgccggttttatgtgtggccgtcagcatgacacattcatgaccgggaaatcccttgcgggtcagataggcgttgccgctggccgtgcgggttttctccatcagtctgacggccagcgcggccgccgctttgcggtctgcttcggtttcagcctctgcggccacaatcacttcgggggcaaccggtggcaggttgccggtcacggcatccacctttccggcggcctctga

SEQ ID NO: 143169 - DNA, 1146 bp, Enterobacter cloacae
gtgtcatgtgaagcgttaagcatcgaattcatgaaaatgttaaaagggatttgtgttgaggatgatattgaattcaatttttttgaattgggcggttccggatatctagaaaatccaacaacggatttgatggctttgtttatgggaggccagaaaatggtaccgccatggttgctaaaagcattgttatgttgcctggatgattccctcgatgttgatgaaattgatttcacctctctggaattaatgagagaggccagaacagaggatgggaaatatcttgatattcttatcagacatgatgaattcatcataggtattgagcataaagttttggctgatacatataatccttttcccagctatgtaagtctcattgatagctacggcggcaacaatcaaaatctttttcgttgtatattaaagcctgatggtaactgcgctaaaggcgtagacggttggcgactgatcaattattcattgctgctggaaagcgccatccgacgtctggggttagagatgatgaatcaagatttcagcaagtggacagttttttatcaggagtttttaagtcatcttaaaaaattgagtgaggctggtatggataatgtatctgataaaaatgttgagtttgttactgaaaatttctcggctttgataaagtcggttaaattgctggaaatgtaccaaaatgcaatcacggaggaagcgaaatcggttgtctcagaagtactgcctgatattcatatagcaacaggaattaataactggaagggttactataaagcaattcatcttatgcgaggatgctgggggcaaggtaaaacaggagttacactagtttaccgccctaatgaagatggaagaggtgaagcagaattctacgtaaatggttggatacattcagatgattattctgaaattaatgcactaaaagaagaaatacgagttgctttaagtactggtaattttattccaactgccagccctgaagactacgaggtatcaattacagggaagggacaagtacttgagctgagcttttgggggaatacgagaagcaaaaaagatgcactggtacttcttaaagatatgactgagtggattgactcaaaaataagaacatacagtaatatcactgagtga

SEQ ID NO: 143170 - DNA, 393 bp, Enterobacter cloacae
atgttaattaatatcaatgatgtttttaatgaagctaaaaatgaattagaagatcttaggggtgaagggataaaaagtgatgcctatctggagctaaaaaccatttttgaagagataaaagcaattcctgaaataaagacgaattataactttaatttttcagaacccagttcaggttggaagaatggttgtttatcttaccgagaaacttgttataacaatgatacaaaatcatatgtattagggttaacgcattttgatggcgaaaaatactctgctgaaatgtatgtttttaccagaggaccaagaggagccgataaagggtatgaaaggaaaatatttaatgatgcaaaagatggtattaaattcatcattaaaaaactaattagctaa

SEQ ID NO: 143171 - DNA, 1320 bp, Enterobacter cloacae
gtgcatgagcattacggcgaagcgctggcggtggatgcgaacggacagctcctgtcccgctatgaaaacggcatctggaaaaatatcccggccgccactttttcacggaatgtggctgacttattccagcgcctgcgcgccccgttctcatccgggaaaattgcctcggtggtggagaccctgaaactgattattccgcagcaggccgcaccggcacggcgtctgattggctttcgcaacggggtactcgatacccaaaacggcatattcagtccacatcataaatcgcactggctgcgcacgctttgcgacgtggattttaccccgccggtggaaggcgaaatgctggagactcacgcgccgaatttctggcgctggctcgaccgggcggccggtaaaaatccacaaaagcgcgacgtgatactcgctgcgctttttatggtgctggcgaaccgctatgactggcagctctttctcgaagtcaccggtcccggtgggagcggcaaaagtattctggccgaaattgcgaccctgctcgccggagaggataacgccacatcggccgacatcgacacgctggaagacccgcgcaagcgtgcctccctgattggcttctcgcttatccgtctgcctgaccaggaaaaatggagcggtgacggcgctggacttaaagccatcaccggcggcgatgcggtctcggttgacccgaaataccagaacccgtattcaacgcatattccggcggtgattctggccgtaaacaataacccgatgcgcttcaccgaccgcagcggcggtgtgtcacgtcgccgggtgattattcatttcccggagcagattgccccggaagagcgcgacccgcagctcagggataaaattgcgcgcgagctggctgttatcgtgcgccagcttatgcagaaattcagcgacccgatgaccgcgcgcgcgctgctccagtcgcagcagaactccgatgaggcactcagcatcaagcgtgatgctgacccgacgtttgatttttgcggttatctggaaatgctgccgcagaccagcgggatgtttatgggtaatgccagcatcatcccgcgtaattaccgtaaatatctttatcacgcatatctggcctatatggaggccaacgggtacagaaacgtgctcagcctgaaaatgttcgggctggggctgcccatgatgctgaaagagtacggcctgaattatgaaaagcggcacacaaagcaggggatacagaccaacctgtcgctgaaagaggaaagctacggcgactggctgccgaaatgcgatgaacccgcagcgatataa

SEQ ID NO: 143172 - DNA, 435 bp, Enterobacter cloacae
atgcgtactccgcatctggtgtcgctttcaaagcatgagctggcgatcctgaggcagataaaacagttttgcggggaacacgagctgatttttattggcgatcacgacccgcgtaaacccatgagtgagaacacggtgaacagtgcactacgggtaatgggttatgacactaaagtcgaagcctgtggtcatggctttcgcacaatgacctgtagttctttgattgagtcaggtctatggtccaaggatgctgtcgaacgccagatgagccatatggaacgtaattcggtacgagcagcgtatatccataaggcggaatttatcgacgaacgtaagttgatgctgcaatggtgggctgattttctggatgctaaccggggcagagggattacgccgtttgactatgctaagatcaatagggggaatggcgtgtga

SEQ ID NO: 143173 - DNA, 837 bp, Enterobacter cloacae
atgcaaatcagtgctcaaaaggcaatagaacttggttttgtctgtaacaggaaaaataaaaggataacaaaggattattctaataaatcaagtgtggatctcacaattagagaggttctttataaggacgataaaaataatgttcagtctcttgggcgggttattttgaaaccacaggattcagtctttgtaatatcggaggaaatattacacgttccggaaggttttgttgcgtatgtttttttgaaaaacactttatcaaagagggggttcctcgcccttaatactgggataattgattcaaattacaatggtcctatttctaccttgctgattaatttttcggcagttgaggaatatctaccgattactaataatgaagtggataaatccttctttagagttgtctttcatgaaatagataaaaatacgaactataacccaacacctcctgactccaatgcttataatgttaaaaaagagtataaaaaatataaatcttactgttcctcggatatagccaaattccctaaaacatttttagagccagtagttcttaaagagcaaattagtaaggagttgactgaaaaattaaatagcatttcaataactaaaattggagtggtaattgcagtagttgggctggttttgtcacttcttccgattggtagggacatgttttttgcttatagttatgatttaaaagattttcatgaatacaagattaaatcagaagaaaagataagtagcctagaagatcaattaaagactctccaggctaaagtcgatgccaatgaaaagccattaataactaataatgttaataatcgcagatag

SEQ ID NO: 143174 - DNA, 684 bp, Enterobacter cloacae
atgaaaatttgttttttcgatatggagggaactttactcaaaaagaatttatctttagataatgggaaggtggcgccaagtgcatggacagttcttgcaaaagaaatcagcgaagcctgttatattgaagaagaaaaaacaaaagatttatggctaacaaataaatacatcagttatacgcaatggatgaaggagacagtagaaatacaaattaagcacggaatgaataaaactcatctacaaacagttttatctcaagcagaattacaaaaaggtgctgtggagcttattcagtttttgaaaaaaaaaggatatttaacagtattgatatcaggtggatttaaagaactagcagacctaactcaacgtaagcttaaaatagaccatgcgtatagtgcttgtgagtacttcttcgataaaaatggtagtgttgagcattttaatctattaccaacggatgaggaaggtaaattagtttttatgaaacaccttgcatcagaatataattcagagcttgaaaattgcatttttattggtgatggtaaaaatgatgtatttattgccaaaaatgtaggtacatctatagcctttaatgcacaaaaggaattaaaagatgtagctacatttattgttgaccaagaaagtccagatctatctgcgattattaacattattagttattaa

SEQ ID NO: 143175 - DNA, 408 bp, Enterobacter cloacae
atgcagcagttcagcaacccgatgaccgcccgcgcactgctccagtcgcagcagaactccgacgaggcactcagcatcaagcgcgatgctgacccgacgtttgatttttgcggctatctggaaatgctgccgcagaccaacgggatgtttatgggtaatgccagcatcgtcccgcgtaattaccgtaaatatctttatcacgcgtatctggcctatatggaggctaacgggtacaggaacgtgctcagcctgaaaatgttcgggctggggttgcccatgatgctgaaagagtacggcctgaattatgaaaagcggcacacgaagcaggggatacagaccaacctgtcactgaaagaggaaagctacggcgactggctgccgaaatgcgacgaacccgcagcgacataa

SEQ ID NO: 143176 - DNA, 372 bp, Enterobacter cloacae
atgccaaaattgagtaagccagctactgttgcgccaaatttagtagtgttgagagtgaatcatcaaaatgattctaagttcatttactatttactagatagcgatgttggtcaaaaagaaatagataaaataaaaagtggtacaggcctaccgaaaatcagcaaaacagaatttaaaacgatgggatttagtataccctcattagctgaacaacaaaaaatcgccgctgtcctgtccgctgccgacgccgaaatctccaccttggagaaaaaaatcgcctgcctgaaagacgagaaaaaagccctgatgcagcaattactgaccgggaaacgtcgtgtcaaagtagaagctgaagaagccgtgagtgcttaa

SEQ ID NO: 143177 - DNA, 156 bp, Enterobacter cloacae
atgtggagaaatggaaacccctctattatctatttcgccactatttctcgctgggtcaccgactcggtcacaacttccgacacgatgagtaacccggactttttgacagcggaaaggtttaaacttttcgtgatattctttctttacgccccttag

SEQ ID NO: 143178 - DNA, 327 bp, Enterobacter cloacae
atgtatgatgcgcgcgccaggttgcttttcgaggaaagattctgcaagcaacccgacaatgtaataaccctcaataaaattaccttcattatcgaacaggaaacatctgtcaaaatcaccatcgaatgcaattcccatatctgccttgtgatgaataacggcttcgcttgtatcggcacggcattcctgaagaagagggtttggaataccattcgggaaattcccatcaggcttattgtgaattttcacaaattcaactggaatttgcatttccttgaaacgtttttcgatctcatcaataaccgggcctgcagctccgttgcctga

SEQ ID NO: 143179 - DNA, 492 bp, Enterobacter cloacae
atgtattcgctatcgaagtatgttttttataccactctaattctttatgtcctgacattactaactgtcagctatgttggtgcctatttaacttatgtggctattccggtgattgttgtttctggattattaatgaaacttctcggtaaaagaaagagtaaatcaggagaagtatcaaatgttgtagccagggtgctcaatgatacaaatgtcgggctggaacgttttaatgaaggcatgcactggttcaatgagaaaaacagaatcataaatgaaaaaacaaaacctcttaacgaacaaattcatgcaataagaatgaaaatgattgagccggaggtaaagttaaaatatgaaagtgaccctgaaaaaagaaaaacacttaatgctttaattgaaagtatggaaaaagatatcaggattatagaatcccaaaaagatgaaattaaaatggcgatagagatagatattgcccgcaagaggattaatgaataa

SEQ ID NO: 143180 - DNA, 1053 bp, Enterobacter cloacae
atgctcaatgctgttgaccacgttgtcgcccgccacggtatcgacgcgcaggcccggcaggttagcgtcgatagcgatctcgcgctcgccggtgccggtgttaccgtggccgttggtaacggtcgccgtcacgctcaggctgccgttacccagcgccgtcagcacgtcagacggcacgttgacggaccaggtcagatcgttctgcaccgttgcggtgtagcggttgccgccaatggtcacggtcacggtattgcccgcctccgcgttcgcgaccttgccgctgagggtctggcccgcggccacttccgccgcgttgatgacgttatcgcccgccacggtgttgatggtgaccgttggcagcgcggtgtccaccagcaggttcgcggtgttgctcacgctgttgcccacgccgttggtggcggtcgcgttcagggtgtagttggcctgacccagaccggccagatccgccgccggaaccgtcaggctccaggtaccgtctgccgccgtcgtcgccgtgtagtttttgccgttcagggtcacggtcaccacggtgccttccgccaggttggcgctggtgccgctcacgctcagatcctgacctttttccaccgcgttcagcacgttatcgtcgctgatggcgttgaagctgaccgatggcagaccggtatcgacggtcacgttatggctgccggtgccggtgttgcccgccgcgtcggtgacggacgccgtgacggtcacggtgccgtcgctgaggccggaaatcacgctcgccgggacgcccacgctccagttccccgccgcgtccagcacggtggtgtacgtctgaccgccgatggtgacggtcaccttatcgcccgcggccgcgccggtggcggtgccgctgataacgtgtgcctgactgtgttcagccacgttaatcacatcgtcacccgcgatggtgttgatagtgaccgcaggaacggtcacatccaccgtcaggttgtggtccacggacgccgggttacccgccttgtcgctgaccgatgcggtcacggtgacgctgccgtcggttaa

SEQ ID NO: 143181 - DNA, 1224 bp, Enterobacter cloacae
atggataaattacttgagcgttttttacagtacgtttcgctggatacccaatctaaaccgggtgttcgccaggtgccgagcaccgaaggccagtggaagttattaaacctgcttaaagagcagcttgacgccatggggctggtcaacgtcacgttaagcgagaaaggcactgtgatgggaacgctgccggcgaatgtcgacggggatatcccggcgattggctttatctcccatgtcgacacctctccggattttagcggtaaacatgtgaacccgcagattgttgaaaactaccgcggcggcgacattgcgctgggcattggcgacgaagtgctctcgcccgtgatgttcccggtgctgcaccagctgctcggtcagacgctgatcaccaccgatggtaaaacgctgctgggggcggatgacaaagcgggcatcgcggagatcatgacggcgctggcggtgctgaagggcaacgatattccgcacggcgatatccgcgtggcctttacgccggatgaagaggtcggcaagggcgcgaagcacttcgacgtggacgcctttaacgcgcagtgggcctataccgttgacggtggcggcgtcggtgagctggagtatgaaaacttcaacgctgcctcggtgacgatcaaaattgtcggcaacaacgttcaccccggttcggcgaaaggcgtcatggtgaacgcgctgtcgctggcgtcgcgaattcatgcggaagtcccggcggaagagagccccgaacagaccgaagggtatgaagggttctatcacctgaccagcatcaaaggcaccgtggacagcgcgcagatgcactacatcatccgcgatttcgaccgtaaagcctttgaggcgcgcaagcgtaagatgatggagatcgccaagaaggtgggcaagggcctgcatcctgactgctatatcgagctcatcatcgaagacagctattacaatatgcgcgagaaggtgatggcgcatccgcatattctcgatatcgcccagcaggcgatgcgcgactgcgatattgaaccgcagctgaagccaattcgcggcggcaccgacggttctcagctgtcattcatggggctaccgtgcccgaacctgtttaccggtggctataactaccatggcaagcatgagtttgtgacgctggaagggatggaaaaggcggtgcaggtgattgtgcggatcgcggagttgaccgctaaacgctaa

SEQ ID NO: 143182 - DNA, 1005 bp, Enterobacter cloacae; identical to SEQ ID NO: 31749

SEQ ID NO: 143183 - DNA, 276 bp, Enterobacter cloacae
atggctatgccggaacactgcgaacaaaacctcaccatggttcatcccatgatggcgggacacgctatgtccccgatggaagaaattgcctgtgggtactgtcatttactgattcatctgcctttcgtccagttcgtgctgacgataatgctctggctgatgttactctgcgttcatctgtctcttcctctacaggccattttctcaccgattttccgcgcctgggcacctcagcgtgcccgcgcccctcctgctgcttttctttctgcgaattaa

SEQ ID NO: 143184 - DNA, 219 bp, Enterobacter cloacae
atgtttcactgcccgttctgcaaaaccagcgcgcattcccgcaccagtcgttatctgtccgataacgtcaaacagcgctatcaccagtgcatgaacatcgaatgctcggccacgttccgtacgcttgaatccatcgacggggttattcgttcaccggtgacagagccggttatccctgtacccgcaccggcggccaccgttaaccgtgccggtgcgtaa

SEQ ID NO: 143185 - DNA, 384 bp, Enterobacter cloacae
atgctgaatgcctgctccaccggcaataaatacctttcagcgcatgacgatgcctttaccgcttacgccgatgctgaatggactcaggctgtcaatgcggttcctgtcgcccttatccgcgctttcctgctgcgtgttcgtgccctcgaaatgaagggagaaagtgccccgcagtccgtggccatcagtgagctacgcgatgcgctgagccgtcagggcagcctgtatcacttcgatatgacgcaggagccggtgttgtccgtgacgggcatgcaccgaccgcagattacaggcgtggatacggagctgttacgcagccctgcgaagagaatgatgctcgccagaaagctggctgaaaatggcgagacagaagcggaggggtaa

SEQ ID NO: 143186 - DNA, 441 bp, Enterobacter cloacae
atggtcgaacagtttttcagcctcttcgattgccatacgcaggagtttggaaaaggcctcctgagcatacgggtcatcacgcagctcctgctcaatcatctttgtcacacgggttttaatgatgtcggtttcattgcgggttttattgttgtcccactcttcgggcttttcgctcttgcccattttaccgacttcatacacgccatccggttcacgaacctcaacgcaggtgacatgcttatccagcagttttttcacctgctcagcgtagtcgtcataattgacctgctcgccgctgacctgcattgcccactgtcgctggctggacatctgttttacggtttctttatagagatttcggtcttgttccgtaaagctcttatcggtgaagaaggtagcggactgcagtgccactttcaggcatccggcaaaggccgttaa

SEQ ID NO: 143187 - DNA, 150 bp, Enterobacter cloacae
atgagcatgaccatttattgtattttgtatgatcgcatttggtttaggcagtccagccatatcccacgcaattgccccatattcatgatccacatcaaaaacaaaaccatttataaaatatttattgttatatcccatatatttctttaa

SEQ ID NO: 143188 - DNA, 480 bp, Enterobacter cloacae
atgtcatggacaacacgcatctccaattataccattttgcaagaatcggttcctgaattgaccacgtatatttctgctggagtcgtgattggcgcgcttttggttatacgtgctttttttgtgcacgcctttaaccaaactttaaaatactttgccaatactttcttatgcggtttttgccttgggtttgtattgagcttaaatggttatgatatttatgtctatctcttcccggacaaaataattggctatgaatctgaatatgaggttgtctttccggggccttcgagaggtaagcatggccattgtgaagcgggtctctggttaaaagatcagaacaccaacagatggattcagctttgtacaaacaaagaatatctgcacagccaccgtaagcagggaatgactggggtgtgggtgacagcccgtgtgaataatattggaagttacattgtgagttatgagtttatttatttgtag

SEQ ID NO: 143189 - DNA, 1563 bp, Enterobacter cloacae
atgaagcctgaagagttccgcgctgatgccaaacgcccgttaaccggtgaagagtatttaaaaagcctgcaggacgggcgtgagatttacatctacggcgagcgcgtcaaagacgtcaccacccatccggcgtttcgcaatgcggcggcctccatcgcgcagatgtacgacgcgctgcacaagccggacatgcaggacacgctgtgctggggcaccgacaccggcagcggcggctatacccataagttcttccgcgtggcgaaaagcgccgacgacctgcgccagcagcgcgacgccatcgccgagtggtcgcgcctgagctacggctggatgggccgcacgccggactacaaagccgcgttcggctgcgcgctgggcgccaacccggccttctacggccagttcgagcagaacgcccggaactggtacacccgtattcaggaaaccggcctgtacttcaaccacgccatcgttaacccgccgatcgaccgccacaagccggcggacgaggtaaaagacgtctacatcaagctggagaaagagaccgacgccgggattatcgtcagcggcgcgaaagtggtggccaccaactccgctctgacccactacaacatgatcggcttcggctccgcgcaggtgatgggcgaaaacccagacttcgcgctgatgttcgtcgcgccgatggacgccgagggcgtgaagctgatctcccgcgcctcctacgagatggtggcaggcgcaaccggctccccttacgactacccgctctccagccgctttgacgagaacgacgccattctggtaatggatcacgtgctgatcccgtgggaaaacgtgctgatctaccgcgatttcgaccgctgccgccgctggacgatggaaggcggctttgcgcgaatgtacccgctgcaggcctgcgtgcgcctggcggtgaagctcgacttcatcaccgccctgctgaagaaatccctggagtgtaccggcaccctggagttccgcggcgtgcaggcggatctcggcgaagtggtggcctggcgcaacatgttctgggcgctgagcgactccatgtgttccgaagccaccccgtgggtcaacggcgcgtatctgccggatcatgccgcgctgcagacctaccgcgtgatggccccgatggcctacgccaagatcaagaacatcatcgagcgtcacgtcacttccgggctgatctacctgccgtccagcgcccgggatctgaacaacccgcagatcgaccagtatctggcgaaatacgtgcgcggctccaacggcatggatcacgtcgaacgcatcaagattttgaagctgatgtgggatgccatcggcagcgagtttggcggccgtcacgagctgtacgaaattaactactccggcagccaggatgaaattcgcctgcagtgtctgcgccaggcgcagagctccggcaatatggacaagatgatggcgatggtcgaccgctgtatgtccgaatacgaccaacacggctggacggtgccacacctgcacaacaacagcgatatcaacatgctggacaagctgctgaaatag

SEQ ID NO: 143190 - DNA, 717 bp, Enterobacter cloacae; identical to SEQ ID NO: 130286

SEQ ID NO: 143191 - DNA, 729 bp, Enterobacter cloacae; identical to SEQ ID NO: 143141

SEQ ID NO: 143192 - DNA, 231 bp, Enterobacter cloacae; identical to SEQ ID NO: 143142

SEQ ID NO: 143193 - DNA, 1485 bp, Enterobacter cloacae
atggaaatccaagattttgtaggtcattataaaaatcatccagtgcttttcatcggcaccggttttagtcttaggtatcttcaaaactcttttggctggaatgaattacttgagtttatatccaatgaactcacgggtaatgaggagttttactatgaccttaaagcagaatcaatggagaatggtgaatatagttatgaccttttggcaacaaggcttgagatagaattcaacaaatgtcttgcaactgatcggaatggcaaattcgaagccattaacgatattttttataaaaacatgaaagaaggcaagaaactgagccgttttaaaatttatataacagaaatacttaacggcttattgataagacccgaaaaaagcaatgaaattgacgctctaattagagcacgtaaaaacattggttccgtcataaccacgaattacgatcgtttatgtgaaaaagtttttgagttcaacccgttaatagggaatgatattcttcttagcaacccctatggctcagtttacaaaatacatggttgtgtaaccgactcagacaacataattataacaagagacgactataataacttcaataataaatacgaattaatcagggcccaactcctttctattttcatacacaaccctattatatttattggctatagcataagtgattcaaacattaagtccctgttaaaaactattttttcatatgtaaatgtcaacactgaactagcaaagaagattcgcgataacttcctgctagttgaatatgcacctggtgatcatacgacagaaataaccgagcatgatattgatattgagagcatggcaactatccgcatcaataaaatcaaaacagataactatactgctatatatgatgcactttcaaaactagtccttccagtttccgcgatggacatcaggaaagtgcaaaaagtttggaatactattaaaagcggcggagaaataaaggtaaatataacagaaaacatcgatgaactaaaaaatgaagatatggttttagccgttggttcagaacggactgttaaatatgaattccaaaccataactgaaatgattcaaaattatttcaaaatagttgatgaagcaaactcacaacttatatcattactgaataagcaagtcatatcaactcgtgaaaggttcccggttttcgcattcagttcaatttgtgagaatctcattaatgaagaaaaatataaaaatcgccaagttgataaaattatcgctgacttaaagggttatgttaaagaatgcggaaatgaatactcaacaataactgacataacggataacttacctgactggaaagtcatcggtggaatcatgtattctgttatggatgataatatatcaatagaagaattaaagaattatcttgaagaacactccggacggtgtgacacggatttcagaaaattattatgtctttatgattacttagcattttaa

SEQ ID NO: 143194 - DNA, 372 bp, Enterobacter cloacae; identical to SEQ ID NO: 143176

SEQ ID NO: 143195 - DNA, 603 bp, Enterobacter cloacae
gtggcaacttcaatagtgttagtgactcaggatcgctaccttgtcagggggatgcggatattttttccggatattatcctgctcgattcgattgacagaaacatatttgataacggtgcagatgaatattctgtattgattgatagtcgtgcgccgctccgtttatatgattacctgatacgccatccggccagaacgaaaaaaacgatttgctgcgttatgcttgatatgcgccatcgcgaggagaatctgctcagtatgaagctgtttatgaacacgtcgctgacggcgccggacatggcctcgctgtttaacctggtgctcaatatgaagggccgtcgcctgaccacgaagtggctgctgaatttacggctgagcacgcatgaaacgatcatgttgcggttgctgagagcagggatgtcaatggaggagattgcaggcgagctgaatacgtcggtgaaaagtctctatcgcaaacgaatggcgctctcggaacggctgggggcggagaacttcaacgaggcgtgtttgtttatcttcaaaaacaaactgctgggcgcaggtgggaacgatccctgggttggggagagatcaaaagcataa

SEQ ID NO: 143196 - DNA, 915 bp, Enterobacter cloacae
atgatttatcagtgtgatacttgcagtagaacgacttttgaggttaattgtccctggtgtagtggagtttcgcctgtaaaaacgtctgcatggggttcagcatcatcgaccgcacaagcaatagacatacaacgtatgacaccattgaatccatcgttttatcccgaatttcagtatcgttcaaagggtgttctaaaagatctatttgggaaaaagaaagagcaaactcagcttaatcaattgcttgaaaatgttctcgaaaaatactccagtttaaaagatccatattttactaacttcatttacacttccagattctcacataataataaatcggaagcagattactcaacagataatggtacatactccgaattacaacttttccgtgaggtgttggtcagaaaagggttcaatgagcttgaggaattacctgagctattagataaattactccttaccacgtcatttaacgctctatattatggtttcgctaaggaagttaaacggcatattaaatccacacttactgaatccttgaagtcatggattgaggaagcgggtaccacttttagggcagatctttcattgtttctattctatatatggagcaataaaatagagttctcatcagtagaattcaatgaaaaatcggaggccacgcctggtgtccctttggttttatttgatgaagttaaaaaatacttagctgtgtgcgaacgtatttattttgatattctggttgatagattagctatacgccttgagcattttaaccctaataaattcgtcaccatgtatttagttgatgcaatggacggtttccagttcgaagatttccttgtggaaatattccagactatgggttatgacgtccaagaaactaaggaaggtgcgaacaagttcctgatatga

SEQ ID NO: 143197 - DNA, 363 bp, Enterobacter cloacae
atgattaattttgataattatagtaaaaaatttgcaatgagcatcttggatgctacaccggcatcaatgatagtaaataaagggaaaaacactccctataaaaaggacataaaaaaaaccatacttcgtctggaacaggaaatggcaacaacttcggaagaaacaaaaaaacttcaaaccgagtatggttcagatatgttgaaattcgtgataatccagtcatatattaataaattactgggtaactctaaagttcttcattggttcttggaaaacgaggttgattatcttaatgagttaaaaagaatttcgaaaataaattctttagatgataagactcttgctgaaaacagccagtcatag

SEQ ID NO: 143198 - DNA, 663 bp, Enterobacter cloacae
gtgctgcataaacgcatcattccagtcaccgaacaccggcggcagggcaacaacgccctcacaggctcctgcggccgcagcggctttgttctggccgtcaccgttaaggtcacggtcggcggcgaggacaatctgacaggccgggtgtttctggcggacaaggctcgccagagaaaggaggttcacggacgacagcgccaccatgacggtttcgccggtcaggtgatgcacggtaagcgcggtcgcatagccctccgttatccacaggcgttttccggcctgttttttcccttcgatggtatggcacgctccttttaccgccccgcctttcagggtgcgtttgagaccgtcagaactgataagctgaaggttaatcagtgcgccggtatcgtcatacagcgggacaaccacatcaccggcgcggaacgtcacgccgccggttttatgcatgaccgacagtaccggacattcccggtcggggaagcccttgcgggtcagataggcgttgccactggccgtgcgtgttttctccatcagtctgacagccagcgagaccgccgctttacggtcagcttcggtttcagcctctgctgtcgcaatcacttccggggcaaccggtggcaggttgccggtcacggcgttcaccttttgggctgcctctga

SEQ ID NO: 143199 - DNA, 195 bp, Enterobacter cloacae
atggctactaccctcaccccatcgtacccgcagtttgtctttgtgtttgccgccgttcgtcgtgcagaccgtaaaccccgtatctgtatgctccgcaccgttgccggtgatgaacacgccgcacgcctgtcgctcgttcgcgactacgttctgtcgttcgctggccgcctgccggttgcggaggtgcgtgcatga

SEQ ID NO: 143200 - DNA, 333 bp, Enterobacter cloacae
atggtgatccgggcggggcagccttcgggctggccggtattcattgaggccggtattcctacccccgtccgggtcaccacccatgagcgtaggaactccggtggtggcaataaccgctactcaatggaggttgccatcatggctactaccctaaccccgtcacacccgcagtttgtctttgtgtttgccgccgttcgtcgcgcagaccgtaaaccccgtatctgtatgctccgcaccgttgccagtgatgaacacgctgcacgtcgttccctcgttcgcgattacgtcctctcgtttgccggccgtctgccggttgcggaggtgcgcgcatga

SEQ ID NO: 143201 - DNA, 423 bp, Enterobacter cloacae
atggcaatcgaagaggctgaaaaactgttcgaccatccactgaagcagtacctcttattccgtgagtttgaagagcaggttgaagcccgtaagctcagtgatatcccggatgcactagcggtaaacaaacatgctcaggcatattacggcgtatttaaaaaagagctgcctgaggtttttgcggtaaacgatgttcaggtgcaggagaagtggaccaagctggcctttgaagtggacagcattatcgtcaaagcagtggcagaaaattcccttaaccctcaggatatagagaaagcggtcaagacaaatattttaccgctgctgtttacggcctgccgggagataggggctggaatgatccaggtgaaccgtattgtggaaaccatcatccagatcctgcgtgttggattgatgaaatcatga

SEQ ID NO: 143202 - DNA, 258 bp, Enterobacter cloacae
atgctggtaccgtctgacacttcggttggctggtttaaggaggctatccagaccgccagcgaggttcgtttcatcaccgccgggcgactggcatttatcaacccggtcaccggtaaaccggtcagcggaaataacaaaggcagtatgcttatcatctggcgaccgtacccgcgtacacactgccacttcgcaactgtggaccgggacgaactgatggcttttggggcgaaacttctcgcccgccgggaggcagcatga

SEQ ID NO: 143203 - DNA, 207 bp, Enterobacter cloacae
atgcttatccagcagttttttcacctgctcagcgtagtcgtcataattgacctgctctccacttacctgcatcgcccactggcgaaggctggacatctgttttacggtttctttatagagatttcggtcttgttccgtaaagctcttgtcggtgaagaaggtagcggactgcagtgccactttcaggcatccggcaaaggccgttaa

SEQ ID NO: 143204 - DNA, 717 bp, Enterobacter cloacae
atgataaataaaacagctgctcatgcaatgctggccgggctgatgctgatggcgggatgcacacaggcgcaggacgcgcctacgcaggtgatataccgctttgacgaccatcgttacctggaactgaagggatggaactgtgagggcgcgttgtactacgttgacccggtgcgcggtatacgctcagaagtttccagccagttttaccgggcatttgctggcaaatatgtgcacccctccgagcgctacattgccattcctgggtgggaaaccgatgccttcctcgtttcaaaaaactacggtgagacatggcaagttgcgccgtttaacaccggttttcatacggtcgaaccggacggctcaaacagcccatccagagaaaacatgctctcgttcacggtcgttaacgatcagggctttctcttaacccgccagggcaatctctacatgagctcaaagcccttcgatgacccgcggattttgcccggtggtccgggtattgattatgtcgatgaagacggtgataagcatcaccttcgaccgggttttgccgggccaaaatgggggctgtcatatattccacccaaaacaatcgatctactgactgaccagtttctgacgaactggaaggacttgccggcccgcgtacctgaagtccgtaactataagggctgggatcatatgcagtgcaacccggataaagggcttaagcggtga

SEQ ID NO: 143205 - DNA, 702 bp, Enterobacter cloacae
atggaactggcccggtggcagcatggctttgagcgctggctcaaggaaaatcatcagaacgacgataccgcacatgatatttcgcattttcgacgggtctggatgacggcgcaaaaaatcatggttcaccacacggtcgagccgcgggtgattctggccgcatgctattttcacgatattgtcagcctgccgaaaaatcatcccgaacgcaggcagtcgtcaaggctcgccgcgcgtaagacgagcgacattctgcgccgcgactttccggactttccgccagagcatattgccgccgtcgcgcacgcgattgaggcgcacagctttagcgccgaaatcgcgccgcagagtatggaagccaaaatagtgcaggacgctgaccggctggaagcgttaggtgctatcggcctggcgcgcgtttttgccgtctcgggcgcgctgggcgtgccgctatttgacgcggacgatccctttgccgatgcgcgatccctcgacgatagggcatttgccctcgaccattttcagaccaagctgctgcgtttgcctgatacaacgcagacggaaatgggccgcgaactggcacgtcacaatgccgatttcctgatccagtttatggcgaaactcagcgccgaattacacggcgactgcctcgggctggatagccaggtgctgagccgcttccgtcgcagtttgcgcaactga

SEQ ID NO: 143206 - DNA, 729 bp, Enterobacter cloacae; identical to SEQ ID NO: 143141

SEQ ID NO: 143207 - DNA, 1170 bp, Enterobacter cloacae
atggtgggggggcgtgatagaatacgccgccttgaagttcaatgtcgtgagtattccatgtcagataacagccagaaaaaagtgatcgtcggcatgtccggcggtgtcgattcctccgtttccgcctacctgttacagcaacagggctataaggtggagggcctgttcatgaagaactgggaggaagatgatggcgaggaatactgcactgccgcagcggatctcgccgatgcgcaggccgtgtgcgataagctcggcattgaactgcacaccgttaactttgccgcagaatactgggacaacgtttttgaactgttcctcgaagagtacaaagccggacgcacgccaaacccggatattctgtgcaacaaagagatcaaatttaaagccttcctggaattcgctgcggaagatctgggcgcagactacattgcgaccggtcactacgtgcgtcgcgctgacgtgaatggcaaaagccagctgctgcgcggtctggacggcaataaagatcaaagctatttcctctatacgctgagccacgagcaaatcgcccagagcctgttcccggttggcgagctggaaaagccgcaggtgcgtaaaatcgcggaagagctggatctgatcaccgcgaagaaaaaagattctaccggcatctgcttcatcggcgagcgcaagttccgtgatttcctcggtcgttacctgccggcacagccgggcaaaattgtcaccgtcgatggcgacgaaattggccaacaccaggggctgatgtaccacacgctcggccagcgtaaaggcctgggtatcggcgggaccaaagagggtagcgaagatccgtggtacgttgtcgacaaagatgtcgaaaacaatattctggttgtagcccagggacacgaccatccgcgtctgatgtccgttggccttatcgcgcaacagctgcactgggtcgatcgtgagccgttaaaaggcacactgcgctgcacggtgaaaacacgttaccgtcagaccgatattccctgcaccgtgactgcgcttgatgacgatcgcattgacgtgcgtttcgacgagccggttgcggccgtcacgccgggtcagtctgctgtcttctacagcggcgaaatctgcctgggcggcgggattattgaacagcgcctgccgctgcccgctgtttaa

SEQ ID NO: 143208 - DNA, 228 bp, Enterobacter cloacae
atgagacacaccaccattaccgcccgtgacctcgaatgtctggagcatatgcgcaacgtcggccagctcgtcaatgagctgatgcaggtgcaggactgcgccaccgttcgtcgtgaccctgcgcagcagtcgcaactcacctccgtgatttaccttatgaccgcccagctcgacggcgtggtagagcgctgcaatcagcgctggctgaccggggagggcaacgtatga

SEQ ID NO: 143209 - DNA, 267 bp, Enterobacter cloacae
atgcaaaccgctttttcttccccgtcttctgcccctgccgcgccactgatgccggtttctgatgccgttcaggagcgctttatccgcctgcccgaagtgatgcatctgtgtggcctgtcccggtcgaccatttatgacctcatcagccgggaagccttcccgaaacaaatctccctcggtggaaaaaatgtggcgtgggcgcagtctgaaatcaccgcatggatggcagatcgcattgacgaacgcaaccggggctatgacgcatga

SEQ ID NO: 143210 - DNA, 228 bp, Enterobacter cloacae
atgagacacaccaccattaccgcccgtgacctcgaatgccttgagcacatgcgcaatgtcggccagctcgtcaatgagctgatgcaggtacaggattgcgccaccgttcgtcgtgatcctgcgcagcagtcgcaactcacctccgtgatttaccttatgaccgcccagctcgacggcgtggtagagcgctgcaatcagcgctggctgaccggggagggcaacgtatga

SEQ ID NO: 143211 - DNA, 552 bp, Enterobacter cloacae
atgatgatgaccgttcagcgttcagcccctttttctggcttgcttcctgtcgtcgtttccaggtatagttttcacgctgtcgcaaaatcggcagccgggcgtaggaacccgagttactcaatggcgacaccagacgcgccatgcgtctttttttacgtcgttgctcaggcacacccatttttcgggctgtggtgcttataccttagcccctgtcagataatggtgatccgggcggggcagccttcgggctggccggtattcattgaggccggtattcctacccccgtccgggtcaccacccatgagcgtaggaactccggtggtggcaataaccgctactcaatggaggttgccatcatggctactaccctaaccccgtcacacccgcagtttgtctttgtgtttgccgccgttcgtcgcgcagaccgtaaaccccgtatctgtatgctccgcaccgttgccagtgatgaacacgctgcacgtcgttccctcgttcgcgattacgtcctctcgtttgccggccgtctgccggttgcggaggtgcgcgcatga

SEQ ID NO: 143212 - DNA, 576 bp, Enterobacter cloacae
gtgattctggccgtaaacaataacccgatgcgcttcaccgaccgcagcggcggtgtgtcacgtcgccgggtgattattcatttcccggagcagattgccccggaagagcgcgacccgcagctcagggataaaattgcgcgcgagctggctgttatcgtgcgccagcttatgcagaaattcagcgacccgatgaccgcgcgcgcgctgctccagtcgcagcagaactccgatgaggcactcagcatcaagcgtgatgctgacccgacgtttgatttttgcggttatctggaaatgctgccgcagaccagcgggatgtttatgggtaatgccagcatcatcccgcgtaattaccgtaaatatctttatcacgcatatctggcctatatggaggccaacgggtacagaaacgtgctcagcctgaaaatgttcgggctggggctgcccatgatgctgaaagagtacggcctgaattatgaaaagcggcacacaaagcaggggatacagaccaacctgtcgctgaaagaggaaagctacggcgactggctgccgaaatgcgatgaacccgcagcgatataa

SEQ ID NO: 143213 - DNA, 1128 bp, Enterobacter cloacae
ttgcattctgaagcgttggctatcgaatttattgaacaactgaaaggcatctcggttgaggataatgttgaattcaatttttttgaattgggaggttccggatatctcgaaaacccaacaacggatttaatggctttgtttatgggagcccagaaaatggtgccgccatggttgctaaaagcattgttatgttgcctggatgattccctcgatgttgatgaaattgatttcacctctctggaattaatgagagaggccagaacagaggatgggaaatatcttgatattcttatcagacatgatgaattcatcataggtattgagcataaagttttggctgatacatataatccttttcccagctatgtaagtctcattgatagttacggcggcaacaatcaaaatctatttcgctgtatattaaagcctgacggtaacagtgctaaaggcgtagacggttggcaactgatcaattattcactgctgctggaaaccgccattcgacgtctggggttggagatgatgaatcaagagttcagcaagtggactgttttttatcaggagtttttaagtcatcttaaaaaattgagtgaggttagtatggataaggtatctgataaaaatgtggagtttgtcactgaaaatttctcagctttgataaaatcggttcaactgctggaaatgtaccaaaatgctatcaccgaggaagctaaatcggttgtctcagaggtattgcctgatattcatattgcaacaggtattaataactggaagggttactataaagcaattcatctgatgccgggatgctgggggcaaggtaaaacaggaattacgttagtttatcgcccttcagaggatggacgagatgaagctgagttctacgtatatggatggatacattcagatgattaccctgaagttaatgcactaaaagaagaaataagagttgctttaagtgctggagatttcattccaacagctagccctgaggactatgaagtatcaattactgggaaggggaaagtgcttgaactgagtttttgggggaatacgagaagcaaaaaagatgcactggttcttcttaaggatatgactaagtggatggactcaaaaataagaacataa

SEQ ID NO: 143214 - DNA, 528 bp, Enterobacter cloacae
atgtataagttagaaattgatgaagatccgagtgctgattgcatactaagtaaaatcaataagacattaaaatttatagggtggagtaaatttatttctaaatgggggcagtataaatcaaaattattcagagataaactttgtaataaattagagagtcatcttaggtatactattgatattacaaattcattaccagaagcatccaaaatgtttgttgcggaaaattgtatacatataatgaatatacacaagtcaaagggaatggaatacaaagttgttatttttcttggggttgaggatcaagttttttggaaatattcttctgaaaatttcgaagataagtgtgccatctatgtggcgttatcaagggctaaacaggaaataataatttccacatcaaggcatagaagttttcgatgtaatgcacgcagggatgacagcgtttcaaattataaaaaggtcaaggaaatatacgattttcttttgaagaattgtctatttactttaactaaatatgaaaaatga

SEQ ID NO: 143215 - DNA, 219 bp, Enterobacter cloacae
atgtttcactgtccgttctgcaaaaccagcgcgcattcccgcaccagtcgttatctgtccgataacgtcaaacagcgctatcaccagtgcatgaacatcgaatgctcggccacgttccgtacgcttgaatccatcgacggggttattcgttcaccggtgacagagccggttatccctgtacccgcaccggcggccaccgttaaccgtgccggtgcgtaa

SEQ ID NO: 143216 - DNA, 189 bp, Enterobacter cloacae
atggtgacagaaagtatcattcataaacaaaatgatatcatcattgtctattgttccatcacccgtaagaagagtgtagccttcatcccatgcagagaattctccggctacattgctgcccttgagccactgtacattcgctgcaggctcattttcagggatcagcttaccactattatctacaaataa

SEQ ID NO: 143217 - DNA, 687 bp, Enterobacter cloacae
atgccagcggaaaacagtgttgaagttcatcatcttaagaagtccgtcggtcagggggaacacgagctttccatccttactggagttgaactcgttgtcaaacgcgctgaaaccatcgcgctgattggcgaatccggttccggtaagtccacgctgctggcgattttagccggtctggacgacggcagcagcggcgaggtccaccttgtcgggcagccgctgcatcagcttgatgaagaggcgcgggccgcgctgcgcgcgcgtcacgttggttttgtctttcagtcctttatgctgatcccaaccctgaacgccctggaaaacgtcgagctcccggcgctgttgcgcggtgaaaacagccgtgaaagccgcgctcatgcgaaggcgctgctggaacagctcggtctgggcaagcgcctcgaccatcttcccgcccagctttccggcggtgagcagcagcgcgtggcgctggcccgcgcgtttaacggccgccctgaggtgctgtttgccgatgagcctaccggcaaccttgaccgtaaaaccggtgacaggattgccgacctgctgttttcgctcaaccgcgagcacggcaccacgttgatcctcgtcacccacgatccgcagctcgcggcgcgctgcgaccgtcgcctgcggctggtgaacggtgttctgcaggaggaagcatga

SEQ ID NO: 143218 - DNA, 2178 bp, Enterobacter cloacae
atgccggactcgtcgctcgtcaaggctaaagtgtctttaacggcggggacgtcctctcaggacagtcgttacaacagtaccgacacgcagggcaccaccattaatgccggtgagaatgtctctgtccgtgccggaaatgacattgccggtattggggtacagatcgcgggtaaacacgtggcgctggatgcggggcgcgatattctgttgtctgcctcccagaacacaaccctctctgagagtaaaaacagcggtagccagttcagcgttggtgttggtgtgagcctgattggtgcgcaaaacggcatctcggtggagctgggagcgtcacagcataagggtaaggaaaacagccagtcacagcgcaatacgaacagcgttgtccatgctgatgaacagcttacggtgaacagcggacgcgacaccatcctgaaaggtgcggagctggaaggtaacggtgtggtggtgaataccggacgcgatctcaccatcagcagcgtgcaggatacagccagttatgacagcaagcagtcttcgtcaggcgcgtccctcagtctgtgcataccgccactgtgttatggtgccttttccggtagcgtcagtgcatcgggtgagaatatcacccagaatggtaagagcgtcgctgaacagagcgggatattcgcaggcaaaggcggctttgccgtcaccaccggaaatcatacccagcttgacggcgcggtgattgcatccacggcgtctgcagataaaaatagcctcgacacgggtacgctgggtttcagtaatctccataacgagagccagaccagcggcaacggctacacggtggcgctttccggcagcgcgggcggcagcggaaacggtgaaaaccgcaacctggcaccggccatcggtacgggccaggcaaaagagagccacaccggcacgacctcatcagcggtgagtggcggtagcattgtcattcgcaacccggcgggacagaaacaggatattgctgacctgaaccgtgatacggctgacgcccaccacggcgtggacgtgaacggtgatgtgcagaaggtcagggataacctggcggtccagagcgaaggcgcggcgctggccacctctgcgctggatgcttacggcaagtatgcggagcagaaagcgcgggaatccaatgcggcgctgggcgcgaagctggcgtcagaaggaaaactgcagggcgatacgccgcaggagcaggaagcgttcctgaagacgcagcccggatatcagaatacagagtacggtccgggaagtgatttctggacgaagggcagtgcagcggcgggcttactggcaggcgcgcttggcggtaacctgaaggcaggcgcggcagcgggggcggcccctcttctggcgaccctggtcaaggagcagaaagatccgacagcccgtgccgcgctgcacggtattgtggctgcggcgctgacgcagctgagtggcgggagcagtgcggatggcctgaaggctggtgccataggggccattacggcctcggcgatgactgaccatctggtcagcgcgctgtatggagataaaaaatccagtgacctgacggcagaggagaaacggctggtcagtagcctcgtgagtatcgcaggtggtctggcgggcgcagcagtgacggatggtagtgtctccatggcggcgacggcgtcggaaacggcgaaggtggaggttgagaataacacgctgagtcctggccatgatgaggaagagcttgagaaagagcacggcgaccgcctcccaaaagtctacaacattgccaggcccggggtgttgtttgacgaagatggtaagccgcttccaggagctgctggtcttggaattggggctgttccgattggtggtaaatctaaagatactcagatttggacagaagccaagaaagcagaacctgtgggtaatgcctatggacactggacaaaatatgggaaagaatttcctgagtatcagaatgctaagcaatatgttgatgcagcccataattttatgacaaccccaccgcaaggtaccttaactaaaactcgccctaacggagacacgctgtattacaatcctgcgactaatgtctttgcttcaaaagatataaatggtgtaccgcgtacaatgtttaaaccagagaaaggtctcgaatattggaaaaaacaatga

SEQ ID NO: 143219 - DNA, 654 bp, Enterobacter cloacae
atgtgttgttcctgccggaatgcacaggaaagagttgttgttgagaataacacgctgaacagcgcaatgtgtgcacaggagccgtgggcatgcagaaatccattgctggaaggtggtgggtttgggccaggaggcgggactgctgccgccactggtgcaggtgtagcaatcggtgaagcgctgactaatgataaagaacagccaaatactggcgcaaattggacggatgaagaaaaggcagaactggggggagcgggatcaggcacgccggggggctgggagccgcaggatgaggagaatgctcggaataacagggcttctactgccccatcaaaagatcgccttaatgaggccgcttcagcatctaacagaaatggattgactgatgccggacgagcactacaaaagcatggcggaagagaaggttccgcatattcttattccagtcaaaaagcgtcagttcttaatcaggaagctcagaatatagttaacgaaatattaaacaatccaaatactaagattgaatcccgagtggtttttgaaaataaacaaaggattactgttgttgaagctacagctcctgatggacgagcattacgatttaattctgatggttcaagattaattggcttccgtgaaccaccaactaaatag

SEQ ID NO: 143220 - DNA, 1254 bp, Enterobacter cloacae
gtgcttaccgataccaaactgaaaaacctcaagccgcaggagaaattgtacaaagttaccgaccgtgacgggctgtatgtcgctgtgctcacgtcaggctctgtctcgttccgctacgactaccgcattaacggccgccgggaaacgctggtgatcggccagtacggtcgtgacggtatcagcctggcggaagcgcgcgaggaactcattgccgccaaaaagctgctgaagtcaggccagtcgcctgctgcagcgaaacgtgacggtatcaggcagatcgccggggccgaaacattcgcggtatataccgacgcctacatgaaatatgtcaccctggctgacagcacccgcgccatgaagcaggcagtgatcgacagggatatcctcccggcgctcggcaacaagatgatgactgagataaccaccagagtggtgcgcgacctttgcgatcgtatcgtcgagcgtggcggccgggcaacggcgattcaggtcagggagataatcagcagcgtataccggtacgccaacgaccgtgggcacggcctgttcaatccttcggccgacattaagccatcatccattgccatgtttaagccgcgcgagcggacgctgtctcctgaggagatcggcatattcttccgtgcgctggatgacgtcggtgcgatgggcaccatgaagatggcgcttaagctggtactgctgacgctggttcgcaaaagcgaattcacttacgcgacatggcaggagatcgatttcaggaactggacatggacgatccccgccgaccgaatgaaggccaggcgcgcacatgtgatttatctgccgaagcagacgcaggatctgctggtggggttgcagatgtgcgctggcggcagtgaatacctggttcccgggcgctacaacctccgcaagccattatcgaatgccgcactgaactcgctgatagaccggaccgtggatgccataaacaaagacggcgagaaaattcaggacttcaccgtgcatgacctgcgccggacggccagcacgctgctgcacgaagcggattatccgtcagactggatagagaaggcgcaggcgcatgagcagaagggggtgagggcggtttacaacaaagcggagtatgcccggcagcgcgcctatatgttgcagcagtgggcagatatggttgatgcatggattaacggggagcacaccgatctggtgccgttctccccgtcgaagtttgagaggtggatggaaggtaaggattaa

SEQ ID NO: 143221 - DNA, 141 bp, Enterobacter cloacae
atgctcgcctcgttcggaatcagatttgttccaatgccagcagccacagacgaggagtacgcaatgctgtctgcaatatttatggataagctggagtctcttgctgtagaagctgagaagccggaaggcggtgcagcatga

SEQ ID NO: 143222 - DNA, 249 bp, Enterobacter cloacae
atgaaaggtgcatttggtaagaaggaactcctggcggtggtgccactgtcatggagcacgattgaccgcctggaacaggccggcgaattcccgtctcgtttctggatcaccgaccgccgctgtgcgtgggaccagagcgaagttgaagcatggctggataaacgtaaggcggcaagcccggcgacgttcacaggaaaaaagccgccagttgaccgccgcgtgtatcgcccggtgagtgcggcagcatga

SEQ ID NO: 143223 - DNA, 888 bp, Enterobacter cloacae
atgagcaacgacatcgcaatcacatcgcagcatggctctaccgttggcaccgctgcggcaatcttcagccctgagggtatggaccgcctggtgcgtttcgcaaccctgatggctgacagtaaagccaccgttccggcgcatctggcaggaaagcctgctgactgcctggccgtgaccatgcaggcggcgcagtggggtatgaacccgttcgccgtggcgcagaaaacgcacgttgttaacggcacgctgggatatgaagcacagctggtgaacgcggttgtgtcttcctccaatctgctggcaacacgtctgaattatcgctgggatggtgactggtcgcgcgtcagcgggaaaaccgataagtcgcctaacctgaccgtaaccgtgtgggcaaccctcaaaggcgaatcagagccgcgcgagctgacaatcagcatggcgcaggccggtgtgcgtaactcacctctgtgggagcaggatcctcgccagcaactcgcatatctgtgcgttaagcgctgggcgcgcctgaatgctcctgacgtcctgcttggcgtgtacacccctgacgaattgcaggagacggcgccgcgcgttgagcgcgacatcacgccgacgcccgctaccgcatcaggcatgaacaagctgatcaactccaagcctgagcaaaagcaggaagagcatgatgctggccgtaaaaaagatgaccgcagccctgaaaaattgctctctgatttttctgcttacgcaggcggtgcagtcaccgttgaagaattggattcagcttatacagccgtagcaaagcgtttatcagcaaatcaggacctgctggataaggctaccgatgtatacagcatccgccgcgatgagctgaacgaagttcctatgtaa

SEQ ID NO: 143224 - DNA, 240 bp, Enterobacter cloacae
gtgaaacacttgcgctatgactgtatgggtgctgcttatgctggagaagacagacagccacaagaggtgatgcgtgagattggcattacgtatgagcgcgctattcctcaaagcatgggcgatcaatggtggctatttaactgcgactatggagatttgcctgatttcataaccgaaatgaagtgtgatgactggatggctaagcaatatcgtctccctaaggaatacaaaaatgcctaa

SEQ ID NO: 143225 - DNA, 207 bp, Enterobacter cloacae
atggtaagcaaactcaaacagcggcgcctgcgccgccttaaagccgacgtggcctggtggcgcgaggaggcagaggattgccgctcccgtctgctggaacttgccggggaaatcgacaggctcaaaaagcaagttatccgcgtgccgatgccggtggtggttcctgagtccgtagccgatgaactgaaactgagagaggtggggtga

SEQ ID NO: 143226 - DNA, 204 bp, Enterobacter cloacae
atggatgatttaaacaaaataatcaccaatgctcgcgtactctcatggaagagagaatttgggccattcgtaaagtgccctgagtgtttcggccttctggcaaagtgcgatctttgcaaaggcaaggggaagcttatccaggaggatattgacgcgtggaacaatccgatcgccagaatgaagcgggagcggaatcatggttaa

SEQ ID NO: 143227 - DNA, 351 bp, Enterobacter cloacae
atggttaacgtaacccaggaatcgctggccgcccgcatcgcggaactggaatccggcccgcgctcgctgaaagaggattttgcgctgcaggcgtaccggatgctccgcaagtatctggcaacccctattgaggagaatcttgagagtgggatggacaggattgacgctgatttcagggtcctgcaagaactcgctgatcgcattgagcgcgatccgaacaatgcaggatggtatatgcacagagcctatatgcttgggaatggttgtgatgttaacgaagctttgggaatgccacccagagattactcaaagccaatgttgaaattaattatgggtggtaaaaatggctaa

SEQ ID NO: 143228 - DNA, 156 bp, Enterobacter cloacae
atgtcaaaacgcagactgagcgccagaacaaagaagcgaagagcagcagaccaggaagtgatcgacaggatgaatgacatcttccagaaggttaaaaagtgcgagcatgagctgacagataccatcctgagcactccgtatttcaaggcccgataa

SEQ ID NO: 143229 - DNA, 186 bp, Enterobacter cloacae
atgaagaagacagttgaaggcattcagaaacaatctcctgccgaagagattcgccgcgagaacctctaccacaccaaactgcagtgcctggctgaagtgcttggtaaacagtcattcattgacaaaaattcagccaacaatgcagcagaagcgattaacgctgcattcgataagattactttctaa

SEQ ID NO: 143230 - DNA, 159 bp, Enterobacter cloacae
atggtggacatcattgccacggagtacgaagcaaagtgcagtgctctttccgttgtggttttcctgatgctagttggttcggttgcggcggataccaaggcgacgaaaggaaatgctgacgcacagcaccacaacccaatcacgttaggaccgtggtaa

SEQ ID NO: 143231 - DNA, 324 bp, Enterobacter cloacae
atgacacaggtacaaacccagcgcgtcgtgcgcctcgatggttctaaccaggtggttgaggttccggatcctgctccggcggtaattggagcaccgaccgcgactgattacggcggtgtgaagctgggagcgaccattgctgctccagctgcaatgacggctacctctgatactaactcttccgcatcagacgtggctggcctgctcgcagaccacaacgacctggttaccaaatacaacgcgctactggcagataccaccgcactgcgcaccactcttgccgctgttctggcgcagctcaaagccaaaacgataccggtttaa

SEQ ID NO: 143232 - DNA, 360 bp, Enterobacter cloacae
atggaaaaagcaaaataccgagtcctgcgcttatcccatattcacaataacctctggccagaaggctctgagattgaatatgacggtgagccaggatcggcgcttgagccgctgaatgatgcagcggttaaagccaaaaaggacgtagcgaagaagcgtggcgagaagtatgacgcaccggaaatcaccaaaaagaaatctgatgatgacggtggccagggcaatagcgatgaagtcggagagctggacaagctccgtgaagagtatgaagtgctctttaatgagaaaccgcatcataacgttaaggccgaaacgctccgcgagaaaatcgcagataagcgtaaagaactgggcgtctaa

SEQ ID NO: 143233 - DNA, 324 bp, Enterobacter cloacae
atggaactggtaaacctcaaaaccggtactgacagctaccaggatgaatctggtgaaacaaaaacccgcgatgattatccatggggtctatgcatcaaccttgacaatgaaacactgaagaaactcggtgcaacgccgcagcctgtaggtactgaggtgatgatctccgccaaagctatcatcaaaagcatgtcgactcgcgaagatggtgagggtgtcaggcacgatgccagcctgcaaatcactgacatggcactcagtccggtatctggtgaacagcccaaaaccgccgcggaaacgctctatggtggggaggatgattaa

SEQ ID NO: 143234 - DNA, 540 bp, Enterobacter cloacae
atgtgcggaccagttgcctttgtagctgcaagcttggctatgtctgcaatgcaggcatataaccagcatcagcagggtaaatacgctaaagctgtagcagatcagaacgcagatattgctgaaaatcaggcgcaggatgcagtcaaccgtgggaatattgaggctgatcagcaccgtcgagaaatgcggcagcgggcgggtactcaggccgccacaatgggtgccacaggggcagaactctcgactggtaacgcgctggatatcttcggcgatacggcgcagtttggcactcttgatgcattaaccacagtcaataacgctcagcgagaggcatatgggtaccaggtacagggaatgaatgccaccgcccaggggaatgccgctcaaagccaggcaagagctgctgttaatcagaccttaatgactgctccgctaaaagcctatggtgcatatcaaatgggtggcggcacatggagtccttttacgcaaagtaatgcagctcctatttccgctgctgttggtacaagaaccggtcgataa

SEQ ID NO: 143235 - DNA, 2511 bp, Enterobacter cloacae
atgacggtatcaaccgtagttgaccataacgattacaccgggaacggcgttacgacatcattcccgtacaccttccgcattttcaagaaaacagacctgaccgtctcagtgattgacctgagcgaaaacattacggtgctggggctggacaccgattacaccgtgacgaatgcaggtggctataacggcggcagtgttgtacttaccactccgctgtcgaacggatggcaaatatcaattgcccgcgagctggagccgacacaggaaactgacctgcgcaaccagggtaagttcttcgcagaagtgcatgaagatgcgttcgataaactgacgatgctgattcagcaggtcggtagcatgttccgtctggcactgcggaagccaacaagtatcgcgaactggtacgatgcccttaataactacatccgcaacctgaaagatccgagagacccacaggatgcagcaacaaagaactatgttgatgttaataattctaaaacactgagaacacctgagactatcccgcaactcccttccgtagcggaacggaaaaataaaattgtcgcaatggactttaaaggcgatccaattatggtattgccagagtcaggttctgctgctgacgttatgttggagtatgcgaaaccttcaggagcttccaagattggggctgaagataccgcagggtcaccaagtaatgttcaggaagaattagatgcgcgtgaaagcgccagttaccgcgatcggtgtatcacaaagcttgctgaagttgattataagatccgctcgaaaggggcgtttaatatattgttccagggcgactcgctgacggcgggctttgacacgaaaaccactgataccgtagcggcagaaaacggggactgggccaggcacgcaacaacgacctatccagaacgcttaagctcttttctgctagagcaaagcggcgcaacagcaacgcgggttatccgcgctatttccggatatacagcaaagcaggcatatgaaaatcctgattggcaaacaaaccccggctgcgatctggctctgattatgtttgcagtgaatgatgcctctgtagatactcaagctaatcacgatgcttacattgactatatggaacggcatatcaagcgcttcattgactggggaatgggcgttgtagtcattgcgtcggcagtaggtagttacgggcaaatatcccaagctgctcagcgatatgcgcggcaaattaaaaatctggcaactatttatggctgcgcatattttgatggtgctgaggtgcataacaacaaagagttcagcgctgttgtatctgatggtattcattttaactcgcagggttatgcaatccttggcgagtctattgctgcaatgatgatggggggggggctgcttccgtcatacaagccgatcgccgctgaattcacgacgtggccgggaatgtgttcagatcacatagggtattataaccccagaggcacggttaaccttgctcgcaacagcggggcttatactttgcaaaaaattactggcgagtttctggaacatacaccaactattgcctctttcagcttctatctcgacgcagaagctgctgaaattgacattgtaggtagttggcaaggaacttctggttttcaagttgccatacatccgacaacaaaatctgaagctggtcccaacgttacttactacttcccagagggacgtagtagcaataatgcagaccatgtgaacagcactaaatatgttgcatcaatagctaacgtaaacacggcaagtggagcgccaaaacacgttggcgttctttctggccgcggatggaaaactatagcgttttacactcccctggatggatcaggcgttggcagcgcgtttctgatgcaattaacaataaggccaattcctcgttatcttgcaaccagaaagtcttcagcgtcacttcgccgaggaattactgagatgaatgcatacagttatccatatcgcgattttaaacctgctgatggaaatatccctgccggattaacactaagttctatagttcttccgttgccatttgatctttacggagtggcattcaaccctgcggatcaatattttgattgcggatttgccaagttgtatataagtggaaaccatcaaggcggggggccattatattacgaagctgttatttaccgtgcaaacggtgggaatactttcacagttagtgaaatcaagaaaatcggcacgcttggcgttgtgtctgcaacctgcggtattaagcaaagaaaaatttcagtagccagaggcgttgtcggtactgatatgccgcttgaagatattatagaaattggtgatgactcatcattcacaccaggcgcagaacctaacgaatatgggcttttcttgcgagtttcaattgactgggctggtataactccgcctgccgggtggtacaccatttacttgcaaagttttgcaagagggcttggtggagcatccagtattatgggtataggctaa

SEQ ID NO: 143236 - DNA, 189 bp, Enterobacter cloacae
gtgcgcacttttattaataatattatcaggattgcagccctgctgagcgtgataagcatgttatcaatgctcatggggtggcagagaatagacatgatcgccatcgctgttaatgtgattatgttagcgatatgggcttctaacgagtatgaagtcaggggcaagtcgagagataagccacatcgctaa

SEQ ID NO: 143237 - DNA, 291 bp, Enterobacter cloacae
atgccgcgttacgacgataagataaccgcattcaacaggtcgatcacacgcgatccgtcaggccggaaggttgtcatgacgagcgaatttgtacgcaatcttgcggcgctgaataatcacctttcactggctgaggccaaccggtgggtaaggacatacgcccgtacataccgcgatgcgtctacctctgaaggcgaagaccgtatctggttccagttcaacccgatacgggtgggggatctgacatgggctttccttcaacggcagctgactatgtttcagctactttaa

SEQ ID NO: 143238 - DNA, 336 bp, Enterobacter cloacae
atgggctttccttcaacggcagctgactatgtttcagctactttaaccgccgacagtatttgcgacctgacctctaacaaccttgtgatccagacggattacggccttgcggcaattgaccgtggtctgccagtacgtcagggagaggtccttctcgccactcttgacggtcgtagctacttcgttaaggtcatgggacaggcgttcatcacgcatgacggtgatgtgatcgaaggggattgccttgatgagcttgaacttcaggtgatcggcgtcgtcacccatttcgtagtcgacatgcggaacggcctggatgatgacagccctgtgatatga

SEQ ID NO: 143239 - DNA, 840 bp, Enterobacter cloacae; identical to SEQ ID NO: 126357

SEQ ID NO: 143240 - DNA, 183 bp, Enterobacter cloacae; identical to SEQ ID NO: 22499

SEQ ID NO: 143241 - DNA, 885 bp, Enterobacter cloacae; identical to SEQ ID NO: 22498

SEQ ID NO: 143242 - DNA, 585 bp, Enterobacter cloacae; identical to SEQ ID NO: 97918

SEQ ID NO: 143243 - DNA, 207 bp, Enterobacter cloacae
gtgtttggccttatttttcacatcatgtttgggagtgttttcatagtaatgagcgtggcttcgctgattggccttgttttacacggccatgaatacacgccgggtcacttttggaacatgaccgcattgtgtatcgcatcgactctggcgtggttatgggcgctttctgaagctaaagaagcatggtacatcctaaagagtcgataa

SEQ ID NO: 143244 - DNA, 246 bp, Enterobacter cloacae
atgactcaagtaatcattaaaaaatggggtaatagcccgtctgttcgcctcccttctgcgattgtcaaagctgcttcgttgaacgttgatgatgtagtggagctgtcggtagaggatggcgcaattactatcgtgcccgttaaaacgaaggagtattcactggatgctctgatggccggtgttactaacgaaaatattcatgaggaaatttctttcggcgctcctgttgggaaggagttgttgtaa

SEQ ID NO: 143245 - DNA, 543 bp, Enterobacter cloacae
atgaaaaaagaggatagatcctttattagatgggtcagccttagttgtaagatttttactgctgccttagctattggggtggtgtgctacgctgcaatgggagtgttaggcttagttaataatccagttccatattatttttctgaatggattaactggatgcagcctacgttaaaactacctgttacttatcatgattcgagcttataccttgataacggaacttacagtataggtgattatattctctctattggttatcttttcgttattttcatggctcaatcgtatgcggctgcatattttcttgggagacttagttataccttaatcagcaaggtaataatatataaggcaactaaagaatttcaccaaagatattcaggtataaaagcggctcatttcgaaaggttattgagtgaaaatcttacagatacagatctagaagatgtaagtcgcaagcattgggagaagtggcgggaacattacaaaagtaatatgagttacaatgagtggaagcagaaattcaaaaaggttctttag

SEQ ID NO: 143246 - DNA, 258 bp, Enterobacter cloacae
atgctgaattttttgaaaaaagtttatagctatctagaatttttaggtgctcttgtttgggtaggtattggaatgtattccatctggttagggtttagtaaattatttaaagataactcaatctctattggtggtattgaggctgtatctctgcttgacacaactccgtttgcaataatgttcattttttgtggagtgcttataattacatttatatgggttgggtatatcagcaagagactaaaaaatgaagcgtga

SEQ ID NO: 143247 - DNA, 438 bp, Enterobacter cloacae; identical to SEQ ID NO: 22496

SEQ ID NO: 143248 - DNA, 654 bp, Enterobacter cloacae
atggatatactttcccttttcccctctaacgtaatcgcattgtgggccgtgtcttttggttttctggccgtcctgtattggtggaagatcaccgccagaaaacgcagacacaaacgcaagcaacaacaagcccggcgtgtactcgcaaaaattcagaccctaccggcgttcggctacaagatcgcgtatctcaggaagatagaccctttcacctttgaggaactgttactggagggatttgagtcgcatggcttcagcattatcagaaacaaacgctataccggtgatggaggcattgacggccaagtaataatcggaaaacatcgctatctcatccaggccaaacgctatcgcggccatattgctttacagcacgttcaggagttcgatacgttgcttaaacgacataactgtcgcggtttgttttgccataccggaaaaaccggcgcagcttcaaaagctgttagcttcgccagtgatcggatggaaattatcagcggccagcgcctgattgatttactcacgcccggcagctccttcaccatcgcaaccgcaccgcagacaatgatgaggcgtaccgcagcaacgcgaggaacgaacaccattgtcgaggaagcggataaaaagacaaccgatagcatgagagttaattaa

SEQ ID NO: 143249 - DNA, 315 bp, Enterobacter cloacae
atgaaaactaaaagcatcatcttcaccgcagctctcttactgaccggctgcgccagtcagtcacaagttgaccagttaaccaagcaggtgaatacgcttaaaacagatttgtataacctacagattcaacagcgtaatgatacacaggcacttcagcgcgaagtacagaaatcgcgccccatcggtgtttgctatcttgacggccagccctactcacaaggagcggtcattgctggccgcatttgtgccagcaatggcgttatcgtcaatggcaaacctacagaagtttcatggcaggtttatcaccgccgctaa

SEQ ID NO: 143250 - DNA, 438 bp, Enterobacter cloacae; identical to SEQ ID NO: 21467

SEQ ID NO: 143251 - DNA, 741 bp, Enterobacter cloacae
atgaagcaggttgttgcccttttcccactgttgattgctggccttttggatgccacacccgcaaatgcggaactgtctgcgccggttatggctctggcaaaacgttgtgcgccagaagtgcatcctttaactattgggtacctggttagccatgaatcgcgcaacaacccatacgcgataaacgtcaacgttcctaaaggaacaaaatcaccgttagccagacaaccgcgctccctgaatgaagctgttaaaacgacaaaatggctaacggctcatggttataactttgacgtaggtttagggcaaatcaactctgcgaatttcccaaaattgaatgtttctgccgcagatttgtttaatggttgtaaaaatctcgaagctgctcaatacgttcttaattactgctaccagctcgcaacaaaagagtatgcgccggggcagtcagctttgagacacgctttatcttgttataatacgggttcactaaccgccggatttacaaacggttatgtatcaaaggtggttgctcaaattgggcaatcaaaacccgtaatccctgctctgaaagccgatgatggctccactgatgtggaaagtgttgatacagctatagatgctgtgccggtagatgctgctgatggtgaagaacaaccaaaagacgccggtatgactgatgcctttagtggctcggataaagacgcttttggtgcatctgatggtgacgctttccggcagaagtag

SEQ ID NO: 143252 - DNA, 318 bp, Enterobacter cloacae
atgcgcgtttatctcatcttgttgaagcagttagaagaagtattcaatcaaaacaaagttgttcggatcgctattcaacggatggataaaaagaaatggataccgctttttgatgtgaaaaatagtgaggggggcgtaatcacttgctccctgagagttcagtctggagagggggttagaacgtgggccgatctgcggatactggccgacatgctgagagacgattttaatgcaagagaagtggggcttttcctggatgagcctgattttatttttcctgatgatggagtgttagacaaagatgaatacagcgattaa

SEQ ID NO: 143253 - DNA, 291 bp, Enterobacter cloacae
atgaatacagcgattaaacgttttttcccggtggcaatgttcatgatggttgctctgtgtgttcctgagctggcgctggccgccggtgcagataccggtgaatcatccctgagttctgttcagtcttggatgatgacgtggattccgattgcggccaccgttcttatcatcgtgagtgctatcgcatggatcgctcatatgctcccggcgagctgggcggttcgtattgttatcggtctgattgttgtcggttccgcgtcttaccttgttggccttttcgggctgagttaa

SEQ ID NO: 143254 - DNA, 315 bp, Enterobacter cloacae; identical to SEQ ID NO: 76863

SEQ ID NO: 143255 - DNA, 2631 bp, Enterobacter cloacae
atggccgtagcggaaatgaaaaaaaggggggtgaaagatttcaaaaaagaaccttcctctttgaaatatattccttactcctaccatgtgacgccccatgttatcagtacggtaaatggggagtacctttctatatttaaaatccgtgggcgaacccatgactgtgcttctgatgccgagctaattaagtggcacgctgatttgaatcagcttttaaaagggattggtagtgagcatgtaaaattatggactcacttacaccaccgcgaaattaataattatcctgacacgcattacaatatgacgttcccgcgtatggtgaatgaatattatcgtgatcagtttgatgatacccccatgatggtaaatgacctgtacctgacggttgtttataaccctgtgggggatgccgctcaaaagatgctggcaaagtttgataagccatcggccaacgagctgcgcgaaatgcagactgatgctattagtgcgctggaagatatttgtgagcaggtcatgaactccctgcgtccttatggcattgaccgcttaggctactacttccgtgacaaacgggggaacgtcattcctgaacagaaaaaagatgatgcagaagatgatgaggatattatcgatctgcgtgaagatttgctggccgatgtggaatatcaggacgttcaggaagataaagaagtctttagtggcactcaacacacctattctaaagcgctggagtggctctattacctcgtcaatggtgagtgggcgccagtgccggtttgtcgtggccgaatccgtgaatatttggctactacccgcccaacttcttcattttggggggatggtatcgagattcgcggtaccgacgaacgccgctatacgtctgccgttgaaatccgggattacgattccgatactgagccgggtcagatcaatatcctgatggaagcaccgtttgagtttgtgttaacgcaaacgtattgctgtatgtcccagcaagcggcaagaacttacctcactaaccagcaaaaggcactactggaaacaggcgatccatcctttacgcagataaaccagatgagtgacgccgttgatggcgttgtttcacgtacctttatcatgggctggcatcacctgacggtacacacctttggcaagacgcttaaagaggcccgttcaaacgccggtgttgccagaaatatgctgaacaactgcgggctgattgccagccaggtagggttagcttcagaagcggcatattatgcaaaacttccggctaatcaacacctgtcgccacgaccttgcccgctgaatagctggaattttctttgcttctcccccttccataattttatgtccgggaaagcaaataataacccgtgggggccagcgctgacgctgttcaaaacggtggcaaatacgccgctgtatatgaacttgcatgtaacgccagaagatgaaatgtctttcggtaagcgaccgctggcgcatacgttaatgcttgggcgttcgggggcaggtaaaactacgctgcttaacttcctgctgacgcaagcgatgaagtataacccgcgcatttttgcctttgaccgcgatcagggcatgatgccgatgattaaagcgttacacggtcactacacggttctgaaagagggcgttgcttccgggtgggcacctctacagatgcctggcaccaaagttaacattgcattttgtaagcgcctgatgcgcctgtgcgctgaaattaccaaaggcagcgtactcgatgctgatcaggttaatgaccttaaccgcgccgtcgatgctttgatggatgagaactccctcattccgacagatttacgcaccgtggatatgttaattcagcagatgccgaatccatatcaaacagcgggcagtaaacaaacactggcgtcattgcttgttccgtggactcgcggccatgaaaacggttggttgttcgataacgactcggattcactgaatctcggtgaatacgatatctacggctttgacctgacagatttcattgttgcagataatgagatccctcctgcaacacgtactccgctcctgatgtatctcaatttccgtgtgcgtcagtctattgatggccgtcgccgggtgattcaggtattcgatgagtttcaccagtaccttgacgatccaattatgagtgtggaagtcaaacgtggccttaaaacagaccgtaagaaagatgcggtttacgtattctccacgcaagaaccgaacgatgcgctggatagctccatcggtaaaaccatcatgcagcagtgcgtaacgaaaattcttctggaaaacccggatgcggattatgaggactacgttactcgcctcaaattgacaccggcagagtttgacgcgctgctgtctattcctgagaactcccgccagttcctggtgaaacaaggcagccaaagcgcgatggcgcaattcaacctggccccgcgcgttaagacgccggagaacttcaggaagctggataagatccttagcatcctgtcaggggaaacccaaaacgccgaaacactggcgaaaattattgagcaaattggggatgataaccctgataaatggctcgaaccctactggaaatctgtactcgcagcgtga

SEQ ID NO: 143256 - DNA, 708 bp, Enterobacter cloacae
atgaaaaagacacttgcaagccttgttttagctctggctatttcgccggttgcagttaatgcgcaactggtagttaacgatcctgcaaatctggcccaggcgcttcagcaggtcacattaatgacgcagcaaattgaacagctcaaatctcaattgctgaagcaggagcaaacgctggcttccttaaccggcagctctggtatcggtaatttgctgaatggcgatattagtacgctgaaaggcaatttaccgtctgactggacgcaggtatacagcgacgccatgaacagcagttcaggtatcacttcatctgctcaatccatgctgaaggaatttcagtcgcagattgacggtatgaaccgttccgaagcgatgagtttcattaagcagaagttggcggagaaaggggcgtatgaccgtgtgatggcgcagaacgcttacaacaatgaaatggcggagctgaataacattcaggagctgaccaatcagattgactcaaccacggacatgaaacaaatcgctgaccttcaggcgcgtatccagaccgcgcaaggtgctattcagggggagcaaacgaagctgcaactgatggcgatgctgcaaacctcgcaagacaagattttgcaggaacaaaaacaatacgcccagaagcgctttgtcctcggcgctgacggtgaagatctttccatgcctaacgtaacggaataa

SEQ ID NO: 143257 - DNA, 237 bp, Enterobacter cloacae; identical to SEQ ID NO: 76860

SEQ ID NO: 143258 - DNA, 1044 bp, Enterobacter cloacae
atggccttttcatttacaacggatattttcaattacatggatacggtcacaaaggaatttgtggcctctaatctcggagttgttatatccaccatttcaccggtaattgggttggcgttgatttgcaaactcaccctggacgggctgtttacattagcccggccacacggtgagccgctctcatcgttgataaaaaaattcattgtgtggtcgatgataatcagctttgccagcgcgggcgggctgtatcaaacccaactggctgatgcggccatgaagatcccggatgagttttcctcggtactggttattaacggttcgtccggtggcactgaagatgcaatgggtaacaacatcgacaaggccatccatgacgggatgcaggttgcgcgtactgcgtttgataacgccgatatttatagcggttccgggttggcgtcattattcctggcttgcgcggtcattatttccacggtgttgatctgtggtatcggggccgggctggtactgatggcgaagttactgctggcaatcactgtgtgctttgggcctatcttcatcttctgcctgttgttcaagccgctgtatggcatgttcaataaatggcttggctcgatggttaactatgggctggtaacaattctgctgtcgatgctgtttggcctgatgattaagttctatcaaaaagcgctcgatgccgtcaccgcttccggggctgacagtagcctgttagggccggtttttgcttgtctgctgataatgattgtttcttacctgatcctgatgcgcattcctgaaatagcctcccgttggggggatggtatctctgctggtattcaggagctgatacctaacgccggtggcggtggccgtggagctggcggtggtggcaatcagcctggtggtcaaaaaggcgctacaggtgccgggggcggtactggcgctaagactgcggcggctacggctgccggtggccccggcgcgggagcggccaccgctgcgggttcccaaatgcagggtttcgcaaagggttcacggcgctaa

SEQ ID NO: 143259 - DNA, 171 bp, Enterobacter cloacae; identical to SEQ ID NO: 97900

SEQ ID NO: 143260 - DNA, 717 bp, Enterobacter cloacae; identical to SEQ ID NO: 76857

SEQ ID NO: 143261 - DNA, 888 bp, Enterobacter cloacae
atgaaaaaacaattaatcgccggtttaattctggtcagcctcggcctctctggtcaggcgctggcgctggaagtgggaaaaggtagcccatacgactaccgtattaaatccgtggtgtataacccggttgacgtggtgcgtattgattccgttgccggtgttgccactcatatcgtggttgcgcctgatgaaagctatgtgacacacgcttttggtgacagcaatagttatgcgtttacccatgttgaaaacaacatgtttatcaagccgaaaggggaagttcccagcgatactaaccttgttctggtcacgaacaaacgcacttataacattgtgctgcactatgtaggtgactacaccacgaaagacgcccagggtaacgttaaagccaactttatcaagacgccgtggagtatgaaaaatgccactctccagcttacttatctctatccatttgaggatatgaaaaaggctaataaaacgctggaaagtaaccgcgtgaaaaaggcgttgaaagaccttcagaacgggccttacaacctgctttataaaatgtcagatgaagatgaatatcggacagtggccccggtaaacgtttgggataatttccgcttcacatacttcaaattccctgcaaatgccgatttacccgttgtgttctatatcggtgacgatggtaaagaacacaccgttaaccagcatccagccggggaatataacaacattgttgtggctgaaacggtagcaaaagaatggcgtattcgttacggaaataaagtcgtgggtgttctgaatatgaattacaacccaaatttaggggcgatcagtaccggcactacgtcaccagatgttaagcgcgtgaaaaagggtgagggggataaatcatga

SEQ ID NO: 143262 - DNA, 1155 bp, Enterobacter cloacae
atgagaaaagacagagaggaaaacttagattatctcgatgaagaagataccggcatcgaggatgagcgtcagggcttcagcggttccccaaaaaaacgtattgccggtgcgcgggcctttgtcgggctgatggtgttgataggttcggcaatggtgggatggttcatctataaccagatgcacgttaagaagctggccgacgatcccaaaaaggataaagagcaggttatgaccagctctttaccgcgccagtcttttgatgatgtgcccccgactatcgacaacacgccaaaaaatagcgtcgttcctccgttgcagacgacgcaggagtcgcagcagcaggttgcgcgtcaaacattgaataaccagaaaaaggaattatcaccggaagaaaaaattatgcgcgcccggttaggggtgtccttcaacggtgtcgatcctgagaaacaggctacgactgcgaaagagcaggagcgccggtcaggtcaggacaatacagaaaccagctcaaacagccaggcactggcgagccgaatgaaaccggcgcgtatggctgtcgcccaggcatctgtaatgccgcatccaaatctgaccattgcgcagggaacaatgattccttgcggtacaaatacggaactggataccaccgttccgggccaggtgaaatgtactgttagccgtgatgtgtactctgctgatggcactgtaaaactgattgataaaggggctgtggtcactggcgagcagaatagcggtatccagaacggccagaaccgtgtgtttgttctatggacgcgcttacgtaacccggatcagaccattgttaacctcgacagcagcggcaccaacgctttaggcagtgcaggcatacccggccaatataattctcattggtgggaacgtatgggcgatgcagtctttttctctgtgctgactgacggcatgaaagccggtatcgcgtcgattaacaacaacaactctgatgtgtcgtttaacactacggaaaacagtaccgaccagcttgctactgaggcattacgggcgaagattaatatcccgccaacgctctacactgcgcagggcgatgccgtatccatctacgtagcccgcgatctggatttcagcactgtatatgggttagaaatgaatgagtga

SEQ ID NO: 143263 - DNA, 1032 bp, Enterobacter cloacae
atgagtgaattaaccagtaatattcaagatattcgccaacgcccccgccgtgagcagggggtatggctgacgctcgaaccacttcagcgctacctgagtgatcccgatgtgtgggagctgagaattaacaaatatcagcaggttgtctgtgaaacgtcgaaaggccgtattttccacgacgatgagaaaattacggctgaatatatatcacgcttaaccgacacgctttgtggttataacggactaccgaaagagtccgttaataacgtgcttctgccggacggctcaaggggaattatttgcttaccccctgccgtactggagggaacagtagccatcgcgtttcgtaagcatctgcccgttgataaatctcttgaacaactccgcgatgagggccgtttcactggctggaaacgaaaggttcagggtgaagtagcccttcagccattcgagcaagaattgctggagttgctcgataaagacgacctcgtttcgttttttaaaattgcggtacgcaacaagctgaacatcgttgtatcagggtctaccggttcgggtaaatcaacgtttacccgctccctgcttcgggaagtgccttataccgagcgcattgtcgtttcagaggacgttcacgaaattgggtctgatctgcatcacgaaatggtttatatgctgtacggcgatcaggatggccgtctggccccggcggtcagcctgaaagcgtgtatgcgtctttctcccgaccgtatcatgatgacagagcttagggatgatgcagcatgggattacataaactcgctgaataccgggcatccgggcgggatcacatccacccacgccgacgatgcaaaatccactttcagccgtattgcgctgcttatcaagcaaaccggcgtcggccagacgctggattatgacgtgattatgaaaacgctgtacaccacgatagatgttgtggtgtacatggaacaccgccagattgttgaggttctttatgatccagcgtttaaaaaagcgcaactttctctttaa

SEQ ID NO: 143264 - DNA, 555 bp, Enterobacter cloacae
atgatccagcgtttaaaaaagcgcaactttctctttaaagcggcactggttgccgccgtactttacggggcttcggccccgtctctttttgctgcatcggcgcaagtaggtttctcgccggaaggaaccgcgcagcagctcgttatcaacgttatcggctcggcaaaagataacatcagaatgatggcctacagctttactgcccccgatattatgaaagcgctgattgcggccaaacgccgcggtgtagacgtgaaaattgtcgttgatgagaatggcaatacgggtcgcgcaagtcgtgcggcaatgaatcttgttacgaatgcgggtattccgcttcgggttaacagtaactacaaaatccagcatgacaaggtgatcatcgttgatggccgtcatgtggaaactggcagttttaactacacggccagtgccgagaaatataactctgaaaacgcgattgtgatgtgggacgcgcccgaactggccgggcagtacctgaagcactggcaatcacgctggaatcagggccaggattttaccccgtcttattga

SEQ ID NO: 143265 - DNA, 483 bp, Enterobacter cloacae; identical to SEQ ID NO: 76851

SEQ ID NO: 143266 - DNA, 195 bp, Enterobacter cloacae; identical to SEQ ID NO: 76850

SEQ ID NO: 143267 - DNA, 2910 bp, Enterobacter cloacae; identical to SEQ ID NO: 101608

SEQ ID NO: 143268 - DNA, 1578 bp, Enterobacter cloacae
atgaatgaagcggataagggcaaaatttgcctgggggcattgctttttaccccccttgttacgtggtttatcgcggcgaaagccttgtatggttttacgccaaaagatgcgcgtgaacgtctggttttacttattcagcagacttttgatttatggccgttatggggtgctttattagtcggtgagattattgccatcataggcttaatcatatttttcaaatttaatcaccagatatttaaaggtgcaccatttaagaaaatatatcgtggtacgcggcttgtttctcagcgggctttagcatccataactaaagaaagagagccacaaataacaatagccgatattccaatccctacaaaagcggaaggtacacatatttcaatagctggggcgaccggtgttggtaaatcaacaatctttgctgaaatgatgaaatgttgcttgatgcgtggaaaaatgcaacgtgttgcctcaaataaagaccgcatgataatcctcgatccagatggcgatttcctttctcgtttttataaaaaaggcgataagattttaaatccctatgatgccagaacagaagggtgggtatttttcaacgaaataaaaagtgattttgactttgagcgattcggtgtttctatcgtacctacagcgaaggattcgcaaacagaagaatggaatggatatggtcgtcttttatttaccgaggtatcccgtaaagtatttaacacaagtcgaaacccaacgatggaagaagtattctactggacaaatgaagtaccactggaagaacttgaagaatatgtcagaggcactaaagcacaggctttatttgctggtagcggtcgggccgttggtagtgctcgctttgtgcttagtaataaacttgccgctcacctgaaaatgccagcagggaacttctcaattcgtgaatggctggaagatccgaaaggcgggaatctgtatatcacctggacagatgaaatgcgtgaagccttgaaatcgcttatttcatgctggacagatagcatattttctattgtgttaggtatgagcaagagtaactcccgtaaaatctggacgtttatagatgaactggaatcccttgattacctgccatcattacgtgatgcgttaacaaaaggtcgtaaaaaaggactacgggttgtcaccggctatcagtcttattcgcaggtcattagcatctatggcagtgatgtagctgaaacccttctgtctaaccatcgtacatcggttgttatggccgctggtcgcctgggtgaaagaaccctcgaatttgtctctaaatcattgggggagattgagggcgaaagagaaaaaacggggattagccgccgctttggtcagttgggaaccaaaaatactaatgatgatcacaagcgcgagcgggctgtaacgccaaccgaaatcgccacgctggatgatctgaccggctacatcgcgtttccaggaaatctgccagtggctaaatttgagactcatcacgttaactacactcgttctaaccctgtaccgggcgtggtcttacgtgaaagcaccgcatttgcaggaatgtaa

SEQ ID NO: 143269 - DNA, 348 bp, Enterobacter cloacae
atgccatctatcagtttaagagtgaccgaagcgcaaaaaatcgaccttgaataccgttcggagggcaacgtatcggagtacatcaagcaacagctttttggacaaaaagagagtgccagtgaagtgatcgcccggcttgataaactgctggaacgttcatcttcagagcagcaagccgccggacgagatcgatacatcgaggcaatgttgattgaggtgttattgatacttcgccaggtgagtaaagcagatgcgcagaaagttgccggtggtgaaattcgccggttagggctggagccgtggtcagcagagctggcccaggagagagaggaacagagtcatgaatga

SEQ ID NO: 143270 - DNA, 435 bp, Enterobacter cloacae; identical to SEQ ID NO: 22495

SEQ ID NO: 143271 - DNA, 711 bp, Enterobacter cloacae
atgaaaattgcagtaatgaactacagtggcagtgtcggcaaaactattatttcgtcatacctgctgtatcctcgcatggctggcgcaaaattctttgccatcgagacaatcaatatgtcggcggcggatttgggtgttgatgaagtaatgagtttgaccggggataattttggtcaactggttgaagaaatcgtatttgaagataacgccatcgtggatattggcgcgtcgaacgtagagcgctttctttctaccatgacaaaatacgagggtgcaattgatgaatttgataaatatctgattcctgttaccccggatgataaagcatggcaggaaagtattaagaccgctctcgcgttaagcgctgctggcgttccaaaatccaaaattgttcttctgcctaaccgcattaaagcaactccgcaggaagatattgcttctgtgtatgaatgggcgaaggattctaaaaaagcctctattcataaagatgccgccgtttttgaaagtgaaatttatgaatacctcgcgtatcacaaaatttcgtttgaagaactgctggctgaagatccagaaacatttaaagcgaaagctaaatcctgcactgatgccgacgaacgcgcggcggctgcgcgacgttatcgctggatgaaattagcgctgccggttaaacgtaatcttgatcgtacctttgaaatattaacggctgaataa

SEQ ID NO: 143272 - DNA, 369 bp, Enterobacter cloacae
atggaaaagcaacctgataaattagatatcctgatggactggtttttaggcgatgcgaaagaaatcacctcaaaactggaaagcgtaaccacaagcgttaccgaaacagtagaacggctggataaagcctccgatgaaataaagaaatcatctgaggtggcgaaaacagaagtgatcgcaagccagcgcgagctggtcaacactctgaagaaggagcagaaggttagcgaccaattttttgaacgtctggccggggcgcaaacagggttttcgcaagcgcttatcaggcggattctgattatcacggttgtatgttccttcgttggtggagcgctcggcgcggcggctataacgttcctgcttcactga

SEQ ID NO: 143273 - DNA, 771 bp, Enterobacter cloacae; identical to SEQ ID NO: 76843

SEQ ID NO: 143274 - DNA, 252 bp, Enterobacter cloacae; identical to SEQ ID NO: 76842

SEQ ID NO: 143275 - DNA, 258 bp, Enterobacter cloacae; identical to SEQ ID NO: 76841

SEQ ID NO: 143276 - DNA, 156 bp, Enterobacter cloacae
atgaaaaaatttatctgtaaccgcaacggcaaggcggtttttcaggaaggtgatcgggagctggtagccgcttaccagatgaaatcctctccggttccggtgacaccccgcaagctgaaagctgaaatggaggctatcgccagaacagcccgataa

SEQ ID NO: 143277 - DNA, 243 bp, Enterobacter cloacae
atgggaaacatcatcctgatggccgagaaagcaaaaggcgcggttactgaagaggctgaagtgtatgaatttgagggaatggatgatttgatccggtttcgtaagaaattccctgaacagatgaaatatgaataccattacatcctttccggcggcacgaaaaactttcagcatattgcgctcgttgaagccaaccattttaagcagttcaaaaagctggttaatcagtaccaggatcgttaa

SEQ ID NO: 143278 - DNA, 288 bp, Enterobacter cloacae
atgaatacgactcttgttgttttagtcctcgccataacaggcgcgttatatctcccctggcgtcttgtgcgcgacggttacaaagaactggtgcaaatgtgcctgttttgctcctgtatcgtcacgctggccgctgtatacgccgtgttagttaatctcgatactccacacccgtttatgccaatgtttatcgcggtaacggcgttcggtgcggcattcgtggctgactgcgctttatctctctggctctatcagcgtaaagctaacgctaagacggctaaccactaa

SEQ ID NO: 143279 - DNA, 573 bp, Enterobacter cloacae
atggacgggcttcacccggcacttcgcccacctgaagtcaggcgacctggccaaggacaaaaacctgttgctgaccacgatcctcgccgacgcgatcaacctgggcctgaccaagatggcggaatcgtgccccggcacgacctacgccaagctggcctggctgcaagcctggcacatccgcgacgaaacctacggggcggcactggccgagctggtcaacgcgcagttccgacatcccttcgccgggcattggggcgacggcaccacgtcatcgtcggacggccagaacttccgcaccggcagcaaggccgagagcaccggccacatcaatccgaaatacggcagcagcccagggcggacgttctacacccatatctccgaccagtacgcgccgttccacaccaaggtcgtgaacgtcggcgtgcgcgactcgacctacgtgctcgacggcctgctgtatcacgaatccgacctgcggatcgaggagcactacaccgacacggcagggttcacggaccacgtcttcgcgttgatgcacctgctgggcttccgcttcgccccgcgcattcgtga

SEQ ID NO: 143280 - DNA, 270 bp, Enterobacter cloacae; identical to SEQ ID NO: 12731

SEQ ID NO: 143281 - DNA, 216 bp, Enterobacter cloacae; identical to SEQ ID NO: 12730

SEQ ID NO: 143282 - DNA, 825 bp, Enterobacter cloacae
atgttatctagccgttttcgttctgcaaatatcctgcgttctgaccgccctcttaacgatgatcagatcatgcgttatgccccgtctatctttgccactgaagcgcatgaaagccgctccgaccgttacgcctacattgcgaccagcgaagtattaaatggtctgcgtgataacggttttcatccattcatggtttgccagactcgcgttcgtaacctggataaacgcgaacacaccaagcacatgatccgtctgcgtcatgccgggcaaattaacggcactgaagcgaaggaaatcatcctgcttaactctcatgatggcagcagcagctatcaaatgctggccggtgtattccgtttcgtctgccataacggtttagtgtgcggtgataccgttgctgacattcgtatcccacacaaaggcaacgttaccgagcgtgttattgagggcgcttttgaagtgctggatcagttcgataacgttgaaaaccatatggatgctatgaaatctgtcacactgaatgcgctggaaaaacgtatttttgctgacgcggcgttagcactgcgttatgacgagaaagacggccccgcaccaatcgccgcgagccagctccttgaggcgcgtcgtttcgaagatcgcaaagatgatttgtggacaacgtttaaccgcgtacaggaaaacatcatccgtggcggtttgagtgccagaactaagcagggcaaatcaacccgtacccgcgccgttaccggaatggataaggatacttctttaaaccgcgctttatggattctcagcgagcgcatgaatgaactcaaagccgcttaa

SEQ ID NO: 143283 - DNA, 480 bp, Enterobacter cloacae; identical to SEQ ID NO: 97923

SEQ ID NO: 143284 - DNA, 303 bp, Enterobacter cloacae; identical to SEQ ID NO: 76887

SEQ ID NO: 143285 - DNA, 342 bp, Enterobacter cloacae
atggcaaaagttagatttgaaaactcacttaataagatgatttttgaaattcgtggttatgaatcattttccgaaatggaaacagcattactagatttttgtgatgaaactatgggggcaaaccatcctgatatagtggtggaatatccggtttattataagcattttattaatgataaaatttcatatgagcatataggttatgtgaatttaggaatagatcaggatgatggttcttgctatacgattgaacatctgacattagaccgcaaaacacttaaaaaccactggcatcctttctatttttataaaggtgaatgtgagtacggatttaaaaattaa

SEQ ID NO: 143286 - DNA, 231 bp, Enterobacter cloacae; identical to SEQ ID NO: 126204

SEQ ID NO: 143287 - DNA, 423 bp, Enterobacter cloacae; identical to SEQ ID NO: 104257

SEQ ID NO: 143288 - DNA, 237 bp, Enterobacter cloacae
atggatgccagattttggcagcgaatcaatatctttgctaagcggctgaaaataaggaaagccaatcgctggtgcctgttttcagacagtgacaacggattccgatctgccccattcggggtatatctgcacaataatggtgcattccgttggcaaaaacgtcagtttgctgattttgtcagcaaacagtctaaagtcggcgatccatcctttgacaaggcgtacgtaggtcgataa

SEQ ID NO: 143289 - DNA, 132 bp, Enterobacter cloacae
atgtggatgatttatattatgttttttacgaatgtatcccgtcgcgccatggctaaaaaacaggttgtgcaattctggtcactgacaataaacaggatcttacaccatgttatccacagaaaaatgggataa

SEQ ID NO: 143290 - DNA, 147 bp, Enterobacter cloacae
atggcagagggaaggcaaaaggggaaggaaaaattcaaaaaggccagcaagctactgacctttatctgtttaacgctcgatgatctgggagacttcgtcgcgattaatttgcatttgattgccttcgcgatcgcggtaactcactag

SEQ ID NO: 143291 - DNA, 834 bp, Enterobacter cloacae
gtggcggtaagcgatctcatcgctttcgatacccagggcaacgccttcggccgtcggcgtgcggcggatgcgggtaatctggccgctcaggtcgcggaagtagcggtactccgcgtggcgctgagtgcgcccgatcagcagcccgctgtcgtcatagctgaactgctggacgcgacgggcgatgccgccgtcggcggcaggccgtccgttttcttcgagcgcgcagagaaaccctcgcgcgtcccattccatatggcgcacggtctcatccgggcgcgtttcgctgagcgggcggcccacggcgtcgtaggtgaagcggtattccgccccgttgccgttatcgagccgcagcaggttaccgcgcgggtcgtagcgccactggcgcacgcggccaatacggtcggtaaggctgaccgggaggccgagcgcgttataggcccagctcacctcgctttccagcgggtcgcgccagcccgtgagctggccgcgttcgttccacaccagcgactcgcggctgccatccggatggatcacgacgctcagcagcccggcacggctccactcccgccgcgtgatattcccttctgcatcttcgctggcaatcagttgcccgaagcggtcgtaggtgaagcgggtgacgctgccggagcagtcggtgcgctgcgtcagcagcccctggtggttccagaccaggcgcaccacgccgccgatggcgtcggtgatgctctccgggaggaattcttcatcatcgggatagcgatacgcggtggtgctaccggccggatccgtctccgacagcaggcgaccgcgaaggtcgtacatggcctgcgatga

SEQ ID NO: 143292 - DNA, 1242 bp, Enterobacter cloacae
gtgatactccgtgcggcggcccgccgggtccgtctcgctggtcatgcggccgtatttgtcccacgtgctgcggcgcatcgccccgcccggcagaatgacgtggcagagctcgccgtcgcggtagacaaacgtcgtctggcgaccgtcgtaatccgtgaagcgcgcgacgttgtcgtcgtcatccaccagccagtgcgcctgcgcgccgtcttcgcgggtcgcgcggcgggtgccgttctcaaaatcgtattcgaacgtcagctgttcgccgccgctatggcggaagccgaccacgcgcggcaggccgtcaatctcccgccagcggtattcgctcagcaggccgttggcgtcctcatgagcgctcatcagcccgtcctgccagctgaagcgtcggcgcacgctaccgccccggccggtcacggagaccagctggcgctgttcatcataagcgtaactgaccaggcagatctcgtcatccagccaggcgccaacaagcctgtcgcggtcgtagcggcagaccacgcgctggcccgcacagtcggtcagggcatgcagggtattatccacattccactcaaagaggatatcgttgccgcagggttcggagaggcgctggagcagcgacggggcatcatcccgcagcggcgcatagtgccagcgctcgccgctgacgtcatacaccgaccagctgtcgtcctggtgatgttcaagccagtttttttcgctttcgcagtaggagcgcatccctttcgggaccttcgggaaggcgacgtaatcgccggacggtgcgcgccacaccaggccgtcctgataaggctccaggcggctttcccagaacaggctccatccgcggcccagcacgctgtcgccggggttgccgctgcgccagtagcgctgccagcgcaccggaagacgggaaggcaggacgaagtccagctcatcatccccgctgagaaacttctgtccgctgacgatatccaccgggcgggcgatgatccccgcggccgccacgccggtcatcagcgtgccggcgcgacaggcgatacgggccagcttgttgatgccggggattttgcccagcagcttagagagcgccccgactttgccagcggcgccgccccagccgccgagaagcccggcgaacagcagggtaagatcggagaccttatagagccactcgggcacttcagactgaatggggagggtttgctgcggatcgccgccgataatgacgttgtctga

SEQ ID NO: 143293 - DNA, 282 bp, Enterobacter cloacae
atgacgttgtctgaaccggtcatcaccttcgcgtcgcaggtggtgcgatccccgatgcgggacgcaggctggctgttaatggagacacgctttgagccttcggccatctgctgcgagccgtcgtcagaacagtcgacggtgctatcggtggcaagcgcggcgggtttaccgttgataaacacgttgggcgagccggaggtgatgacgcctttcttcgtcatgctggatgccccggcgtcggcgatgctgtccctggcggcagtggccagctccccggtgtaa

SEQ ID NO: 143294 - DNA, 954 bp, Enterobacter cloacae
atgcctgagtcctatgattactcggaaccaacccgcttacttagccgtattcgattaagtagctataccacttcgatggcaactcaaactgatgcccagcttttaggggcatattgttggaatcttgccatcgtcggggcattttatcctcttattcaacttgttgaagtagcactacgcaatgcgcttcatcatgtagcatcctccaagtatcaaggtgctaacaacgaacattggtttgggattgttccatgcaggcaagctaatgatgaaaatggccaaccgataaccgcagaacaagtgcgtaagttccatgactgcataaaaaatgcaaagaagagtgctaagcgcacgcttgaaagcaaaggaattgcgagccccataccaaccgtagatcaggtcatttctcaatgcgattttgcgacctgggagtatctccttgataagcatttttatgatggttcagataaaaattttctttggccacatgagcttacaaaagtctttcgcaaacttcccagagtagaggaaactaaaaacgctatgtttcatcaacgagatgcgcttcgtcgtcgcattgaggaagtacgttcgttcagaaacagaatctctcacaatgaacctgcgtggatgactgaaggcgtgcaaaacaagcaggacataatcgatcgcttgatcgagaaacttgaccatatcatggagttacttttctggatttcaccaaaattcaggaagtacgtcatggatgtcggtatcgaatcacgtgtccgtcagttgatctgtatgcgcgagttgaatcgatacatgcattcttatgaacggtacgctgtagaggatttgcagttaattggcgaattagtattggaatctaacaaaaataactatcgatgctattttcatataaacggagtgcctggcattatctctccaaccaattcgtctctgttacaatga

SEQ ID NO: 143295 - DNA, 324 bp, Enterobacter cloacae; identical to SEQ ID NO: 141613

SEQ ID NO: 143296 - DNA, 201 bp, Enterobacter cloacae
atggaaaagatgcttagcgtgtggtggaaagaattagttaggcttgtgatgcaagtttatatacctattggtttaacttttatctttggtatactcgctgtgaccctttgggaagattgcgcattaatatctactgttatattcctgatagttgcgtttattgtaagtgatcgtatattcaaaccaaaaaacaagcaataa

SEQ ID NO: 143297 - DNA, 879 bp, Enterobacter cloacae
atgagtttaattaatgttgatttctctggactatctgaacctgcaacgaagcttgtagaaaaaatcagtgatgccataggcgttctttatgaaccaaccaaaatgaaaaatatcgctaaagcacagtccgaagtaaagaaaattgaatttcaaagttcaatagagctttctgatttagaagagcgagctttgaggagaaccataaattcacaagccagaaagcaacgtaatatagatagcataacaatcaaagctgcaaaagagatcgacgaacaagagcaaaatgatattgagctcttagatgaagactggattaatcacttctttaatcagtgtgaagatattagtgatgatatgatgcaagggctttggtcgagagtattaacaggcgaggctaaaaaaaatggtagtttttcaaaaagaacattaaatttcttatcaacgctggataaaagagatgctgaactgattacaactttaggcacaaccgtatggaatcagcacaacttgccactaccaattgtctttagttatgaggacgattcaatccaaaaaattggcttaaattatgattctttaagacacttagagtcaataggagtaataacattaggaaatatgagttattccgttcaatttgagaaagattttggttattttatttactatggcagaacgattgtgataaaaattaacacatcaaataagaatccttttttgcctaaaaaaccaaatagtgttgacatcggtatggtactgttaactaacattggtcgtgagcttataagaatttgtggttccaagccagatgaagattacttttattctacactgcaggaatttatggaagagaacgaagttttcacccccttacaataa

SEQ ID NO: 143298 - DNA, 126 bp, Enterobacter cloacae
atggcaagacttacgaaaaaggaatctactaatcacataaaagtgatggaattaatccactcggataagcagctcacatatgaagacaaagaatttatttttaataactatagggggatggtatag

SEQ ID NO: 143299 - DNA, 312 bp, Enterobacter cloacae
atgaataagccagttttagaaattattaagcgttggacccgtctagcaacggaggccaagcagttggggcttaccaccatccccatcgacccggaaaatatgttgatggtgctgggtgtaatgccggacagttcggcggacttttccgccgattaccagaatgactatcaggctgcgatcgacattctgcgcaagagagcggccaacgaacttgatggcggttttagagcgcaccacaacgcacttatctatgcggcaaatgaactggaaaatgcccaggcatttgggcgggaggtcggtcatgagtcttga

SEQ ID NO: 143300 - DNA, 708 bp, Enterobacter cloacae
atgaaaaataaaaatcgccttaccgaagaacagcagaaagacgcagagcgcctgaaggctatatatgactcaaagaaaaaaactctggggatcactcagcaggacatagcagatgagctaaacatcacgcaaagcgcagtaggtcactatctgaacgggcgaaacgcgctaaatgtaagttccgctttgatgtttgcaaaaattttagaggtccaaatcgaggagtttagcccgcacttagctaaagagctggagcttatgcatgctgcggcgcagaacatcaaatttgtgggtacttacgaaaaaaggccttcttaccctctgatcagctgggtaaatgctggtgcctgggctgaagcctgtgagccttataatattaagaatattgatgagtggcttgagtcggatatcaatgtcgaaggagacggtttttggctccgtgttcaaggtgattcaatgacatcgccaacagggttaagcatcccagaaggaatggacattttggtcgatacaggaagagagcccaagaacggcagtttggttatagctaagttagatgatgcaaatgaagctacgttcaaaaaactagttattgatggcggacagaagtatctaaaaccattgaatccacagtatcccctaatgcaagttaatggtaactgtaggattgtaggggttgtagttgaggcaaaataccgcttcgtttga

SEQ ID NO: 143301 - DNA, 378 bp, Enterobacter cloacae
gtgaacgaacaggcaaacaaagttctttctgagctgttgcagaaagcaagtaatggcgttgatgcagcggtttcattcagtcaggctcaggttcctgatgttattcatcaactgctgatatggaatgcagtaagtagcctgatgtttcaggcggtagcgattctgacggtaatgggattcttattgacggttaagaaagcatgggtaatagcggaaggatactctggtgcagatttctttgcttttttgtacatagtctgcggagcattggcttctatcattatgtttgccggattctggttcaactttgactggctaaaaatctggctggctccgaagctttacctgattgaatacgccgcctcactgatgaagtag

SEQ ID NO: 143302 - DNA, 453 bp, Enterobacter cloacae
atgaaacgcttagcactattgattttggcatttactggtatgcacgttgaggcaagaccaattactgaagaagaaaaatcttcagtagaaaatgttatcagagaagaaatgaaggaccctgatgctgcaaaattctaccatatggattttccatatccagataccacttttacttattgtggatatgttaatggtaagaattcatacggcgcttatgccggaaaacaactgtttgcaacattcttaggtaaaaatgcagatggtaaacttattgcggcatcatttgatgttaactctcaaaccggtgaacctattgaccaggcagtgatttctacgctgtgtgcaagcgcaggatatgatatccccgttaagaaaatctttttcaaagatgtgaataaaaacagggcagagaaaaacatccccaaattaagctctcaatatatgaggccttag

SEQ ID NO: 143303 - DNA, 591 bp, Enterobacter cloacae
atgcaagagataatgaccagaattgaacttggtggcgttctgggtaaaacgtatgggagagtacatcatcgtcttatacgtactacctcagaagcaatcaatgctcttgcaaaaacaatcaaaggtttcgagacgttcttgaatacaagcaaggcgcgaggccttacttacgccgtttacaaagataaaaagaatatcagcgttgatgatttagggttccctgtaacgggtgaagtcatccgtattgtgcctgttgtcatcggcagcaaaaaggctggagtgttgcaaactattttgggagcagccctcgttgctgttggcgcagtacttaattttactccctgggcagcagcatctccgtttttctataaatttggcgctgcggtgatgctgggaggtgttgtccaaatgctatctcctcaacctgggggcctggccagcaaacaaagcgcagataaccgtgcatcgtacgcattcggtggggtgacaaacaccgccgcacagggttacccggttccgctcctttacggccgccggcgaatcggcggagcaattatttccgccggcatttatgtcgaggatcagcagtag

SEQ ID NO: 143304 - DNA, 234 bp, Enterobacter cloacae
atgaaaaatatgattctttgcctggcggtggcggtattgctctccggttgcgctggcgttattgacaagcagcaacccgtatgcaccggaacagccctggtcggcgggcaggaaagcagcgtccagatctacggagtccgtaaacaaaacaatcagacacagtaccgcgccggttatccctttaactggacctgggtgagcgccaacacgttcaccagcaccacctgccactaa

SEQ ID NO: 143305 - DNA, 204 bp, Enterobacter cloacae; identical to SEQ ID NO: 84392

SEQ ID NO: 143306 - DNA, 1164 bp, Enterobacter cloacae
gtgagtgatgagttatggatcgacattaaaagctcgcgtgatatcaggttatttctgtggctaaacggggatgatgtcgctatttacaattatcgtttgaaagatagcagcaagaaatacagcgcagatctaatttatggagaagattatagattagcagcagaggcaataaatgacgcgtttcgtctgttttataaagacccagatatacttcgtgcatatgcatctaattttaaaaaagccaaagatgcaatgttgccattaaaagaattcaactggtttaaacgctgcaatgatgcctgttactttacctgggtgtatataagggttctcagtaataaaaataaagcacttggtagttttaatataaatgaaccgtgcactgtttatacccggacgtattatcaccggctgattaaaattcagtatcctgtaagccatagtgaacgccttgagtgcataaaagatttttttgacaggtcatcgatggatctttcaacaaaactattgataatgtcgaagataagatacgagtgggacagacactctcctttagtaaataacctccccctaaagaaatctgagaaagtaaaaatacaatgggcgtgggactatatttctaaggacaaggttaacgttatcattggttcaataaagagagcgcaagctaagatagcaaaaggaactcaaccccatcaggacaatataccttctgagcatatttttaatgaggcgtacaaagcagctttacagggatacgtccacaaccctcatttcgttagccttttcaggccatcaacgacaactgagaagtatcttgcactacgttgtatttatatttgcatgtattgttacgacaataaatttttatccagatttaagaaatcgtgggaatcatcggtttacaggaagacaaagaagaaagtcacggttcgcgaaaaatcaacgtcagaaccagtagggcgggaattcagtaatgtaactgatgcagagaaaatcatcgcaaaaataccttcagaagctgaaaagcttcatgataaattactcttacaaacatccaatgaaaagctaaatgaaattacacctactcctgaaattgatgccgcagaaaacaaagaagtcaaagatgactcagtaaataactggtatggcattcctttttag

SEQ ID NO: 143307 - DNA, 435 bp, Enterobacter cloacae
atgttgaagataagttccgcattctttttcagtacggcactgttcagcgcggcggtacacgccatgggccaggagcaacaatggggcaactggtttggcactgttaatgcgatggagtttgaactgaataccgacaatagcgccggagaacgcatgacgctcacctgccgggacaatcatctgatgttgaactacagcgggtctgataagaaacccctgggtgtaccagatgaaggtcaggaagccatggggattaatatcaacgcagtacattacctgccaggcaaggcggctttcatcgcactcaaaaacacagacagccatgggaaaattgaaatcaccaggatgaataaatccgtatctcacccgttcaataccgcagggctcagggacgcactggagaacctcaactgggaagactgcatcagccattaa

SEQ ID NO: 143308 - DNA, 171 bp, Enterobacter cloacae
atgcgaactgtcaaagcgtatgtgtatagcagggtatcaagtatgcaacaggttgatgcctttggcttagacagacaaatcagcactgtcatggactttcttgaaaatgccaaactgcctgacgagttagggtatcgactcgatccaaataattatgaagtacgaaagtga

SEQ ID NO: 143309 - DNA, 618 bp, Enterobacter cloacae
gtgaatgccaaacggctttacaggataatgagcgagcataacctgttgttgttgcatcacaaaccagagcgaccgaagcgtgaacataagggcaagatagcggtggcagaaagcgatatgcgctggtgttcagatggcttcgagttcggctgcgacaacggcgaaaaactgcgggtaacgttcgcgctggactgctgcgaccgtgaggccatagactgggcagcaagcacgggaggctatgacagttcgaccgtgcaggatgtgatgctgaggtcggtggaaaagcgcttcggcgacaggctgcccgacacagcggtgcagtggctgacggacaacggttcagcatataccgcgcatgaaacgcggaggttcgccaaagagctgaatctggagccatgtacaacagcggtgagcagcccgcagagcaatggcatggccgaacggttcgtgaagacgatgaaggaagactatatcgcgttcatgccgaaaccggatgtgagaacagccctgcgaaaccttgcagcggcgttcacgcattacaatgaaaatcacccgcatagtgcgctgggatatcactctccgagagaataccggcggcagcgggcatcgttaacttaa

SEQ ID NO: 143310 - DNA, 531 bp, Enterobacter cloacae
atggtgtcgctttcaagggtgaaaaaaaacatctatatattaacgacaggggcaaaagagttacttgcgctggataaactatccacacaggtaacgctggttaccggttatgagaaatttgatggtttaaggctaaaactggatatgccgcatggaaatgaccttgtcatgcatttttccgatgcgcttgtactgcaggttaatgaaagcgacagcaaccttaccactcaggatattgatgaccttaaaaaaacggggttctggaatgagggtggaaggtatgttaagcaaatacgcctggaaggggtaattattcccagagataagaacgacagtctgtttaataatagcgagaaattggttaaaaaacataatgtggaattttattctacagaagactcaactcactttcatcctctgcgactggcaacaaacatcgtgttaacacccttcacggccgttgcggatattgtatttttcccaatatcactgcgtgtattagggctcatcacccatcctcctgtacattaa

SEQ ID NO: 143311 - DNA, 969 bp, Enterobacter cloacae
atgaggattttatacagaacgggggggattcttattaccgttttgtcactaatctcctgcgatcagcaaaagcagttggtgctaccctccccaaaaagcagcgctgaactctctaaatttgtgggtgagattaaggccgagcttatctttgtacagggtggtgaatttctgatgggagattatggcgaaaaatacggcccggaacatttaccctatgatgcaaatcagcatagtaaaccattacataaagtcgagctgacaagttattcgataagtaagtttaaaaccagtaacaaacagtaccagttttatttggcttataataatttagctggaaggagtattgatttgaaaaccagaaatggacagcgctggcgggaaaaaaatatgacacccgatacacctgcttatgtcgactggtatgaggcggaaaaatattgtcgctggctgtctactattactgagttacctttctcattgccaacagaagcgcaatgggaatatgcagcgcgtagtcgtggacaatttgtaattgttccaaccaatgacgggaccatacgaattggagaaggagataaaagcaatgtagcttcagaaaaagatagcaaactgtatgcaaaaaaaatgggcacgtctttgggactctactctccgttgcccggtgatctttatccaccaaaccccttaggtatatatgacatggccggtaatggatgggagtggataaaggactggtatgatcctgattattataaatactcaccagtaaaagaccctcaaggccctgaaaaaccagtgtttaaagatagtaacggtaattacacaaaagttatccgctcacaggatttctccggaccaagacgcggcgcaacaatattccgcttcgactcagaccctgctaatgagggatatctcccaggcgacaaagcggttcgttgcgttgtcaacagcccgaaaccggtcagataa

SEQ ID NO: 143312 - DNA, 258 bp, Enterobacter cloacae
atggaaaatccagccatcctgttacgccgtcttaacccttactgtgcccgtgcgatggaaggggccgcgtccctgtgccagacccgcgcccatgcggaaatcctgcccgagcactggctgctgaaccagcagattctgccggtcctgagccagcagttgctgagccatatggcggcggggcagaagccgcataccctgacgctgggctgggatgaggaagaaggggtaatgattgagctgcggcaggaggatgagtga

SEQ ID NO: 143313 - DNA, 609 bp, Enterobacter cloacae
atgcaggaagtcatatggtccgaacaggtgatgctgacagggcgttcccgtatttctatcagcggagccaataatgtattttgttccgcgctgatggtgcttttcaggaatattatttcgccagacattattaccatgccagagatccaggtgcaggtctttgtcggaatgacgctgccacaggtgttcgtatggcggatgaaggaggatgcggcaatggaagggaagatccctcgtattgttttctgtactgactcttgcttccgaatgctgtcagggaccagcggatatgaacgaacactgttcattactccagataccagcatttatgcggtggctgaaataatcagacgctggattgccggttacgcctcgcacgcttcggacaacgttctgcctctgctcactcgatgtgataaccgaaccatgcaaatgctggaaaaagatatcccacttcctcttgaggccagacggctctttcgctcggtaaaaacgctttattgtcagcgcgctttactgtcggaccggatcgggacgcacagccgtcaggaattatatctaaaagcgcgtctgatactcagtcaaagccaaacattagcgcttggttag

SEQ ID NO: 143314 - DNA, 3498 bp, Enterobacter cloacae
atgaagcgatgggttcactttaagctgctgcttattttattgccattgtacgcctgtgcggaaccactgagcgacaaatctctgtctctggaactttaccccgatacaaccatccagcgtttttataagcaatctctgaaggtgggtgtttacagacccgattatccgcctttcgatatcgttattaatggcgaataccttgatgggatcaatgccgacatactgcggacaatccgtaataattcggatatccatttctctgtcacccttttcgataacgctgtcgctgcttttgacgcgctggcagaagggtctattgatgcgatcacgaccactggtccggtaactgaaacgaaaaaatccaggtattcttatctcccggttatttcaacgaataaaatagttgaaatcgcacccgcggaaaataaactcgatacaaaagattacgagacgattgccatcgttgatcggtttatttctgatgagtttataaaagagcgctatcctgaagcaaaaataaaccgctacgattccgtactgaatgcgcttgcctctgtcgccctccataaaaacgatatctatgtgggtgatgcaataagtgctggttatttttataacaatagcgttttcaacacccttcacgtcagtcgccagcttaataccattgaccaggcagaaggaaaagtatacttcgcaatacgtaactctgatataaaaaccagacaaatcataaaatccgggctacaaaagatatcccagtcagatctgtcagaattcataaggggctgggataaatccagtgattttatcacgccgggttcaccacaatatctcaccgaaaaggaagcccggtggttacaaggtaaaaagcagttttatgttcagctgccaacaaccgcgcaacctttttcagagtatgctaacggtacgtttactggcatcatccctgatgtatttagtctcattggcaaaatgcttaacgtcacgtttgcatttttgccagaaaacccgtcatcaaagaacattaaccctgatgagatcgttggctttgccagctccgtatacaacaccgatacgcgatatcggtttacccgaagcttcattcagtttcctcttgttttcgttactcgtcacggtgagagcctaaaaaaagtgcctacacgcgctcgccggatcgcgacttttatggatgttaatcatctcgagggttatgatctcacttcgcataccgttgtgcctgtatcttcgacggcagctgcctatgatttattaggcagtaacaaagtcgatgccgtacttgataattttgtctccgctaattattacacacacacgcatcaatattccctggccatagacgatatagttgatggaaattttgccaaactttccctgggcatttccgcgcacaatgaaattttgtatgaaataatcaataaatcattaaagaacctcgccggatctgaactcgacgatatcaccacgaaatggaccgccgcgccctcaaaaacaagtttcatcgaagcaaacaaaaccgccattctctacacggtaatagtccttctcctgctgggcatgatttccaccggctgggcgcttgtccttcgaaagcacgttcgacatgcacagcggacccagagaaaactggacgatcagctggctttgacaaacgcgcttatcaacggcacgccgaatcccctgtatgttcgtaataaagatgcagagctcatatcgtttaatgaggcctatacggaagctttaaaagatttccatatcgaacaggaatacgcttttagtcaggctgagtatgaaaatacaacggcctcacatctttcgtctcttgaaacataccgccaggatttcttcagcgtgttacgggataaggtatcaatatcgaaagaccgggcaattacattcagcgatgggcgccctgatgccgtgatatatcactggatggtgccattcctggatgccgaaggccgcgtaaatggcgttattggcggctggattgacatcacgtcgagaatcgaaatggaagagagcctaagagcagccaggaaggaatctgaaagggcgaatgtagcaaaatccacttttcttgccaccatgagccatgaaattagaacgcctctgaatgccattatcggtatgctggagcttggaacaaaaaaactccacgatggaatcatagacagtaccgcattcgacgtcgcctattcttcgtcaaacgtactacaggaacttattggtaatatccttgatatttccatgattgaatctgaaaaactggttattcattatacagaaatggagctcagaaaaaccattgaacagattatctccttattcaggcctggcgcgttcaacaacggtatcgagcttgtactcctatatccagcaaagctcgacgacatcattgtgacaacagatgagcttcggttcagacaggttgtcagcaatatcatcagtaatgccatcaaattcacgaatgaaggcgaagtgcgtgtcgcagtagaatgcgttaattctcaagtcacagacgtcgccctgctgcaaattgccataacggatacgggctgcggtatatcgcctgaagggcaacagacattattccgacctttttcccaggctgatattaacggctattctcatcagtcaggctccgggcttggactcctcatctctcgccggctttgtgaagctttgggtggaggcatacaacttcatagtcaaccgggcgtgggaaccagagtcgacattacgttaaaagtgggcgtaagccaacagaagagcaagcgtgctgcggcagaggttatagatatccagcgtcaaaacagctcagccaccgttcttgtcgttgatgatttttacccaaatctcatgctgttaaataagcagctgtcataccttggctacgtcgtgatcgaatgtagcgatcctcgtgacgcatatgctcagtggagaagcaccggtgccgagattattatcactgactgtaatatgccgtatatctcaggaattgagctgacaaaattaatccgtaaggaaaacagcgatactgtaattatcggcctgacggctgatgcccgcgatgaacaaagaggagcctgtcttcaggccgggatgacggaatgcctctttaaacccgtttcgctcaaaaccctatccctcgcattaagcaaatttgccagcgctatccagcccgccacaaacgcatgcgcaaaagcggaagatcgggtcgaccagcatgtatttaactcctgcttagcgcatctcgacgtcaccatcagcgatttgcacgacgctatcagcgcggaagatttcttgcagatcgccgaacttgctcacctgatgaaaggcggtttttatcttctgaagaacgattcgctggctgacttatgtactgaactggaagaagccgcagacaggaaaaccatcagcctctgccttcagcttgcgctacgtcttgaagatgcggtaagcgatctctcgtcatga

SEQ ID NO: 143315 - DNA, 606 bp, Enterobacter cloacae
atgaaaaccgcacttgttgtagacgatcatccttcagtccgcatggcattgaaaatgacattagaaaagataggcttcactcatgtggatgaatgtgataacggtgcgcaggctataaaccagataaaaaaagggaaatacaatatcgtcatactggatattggtattcctaacatggatgggatgtcggttatcgcggcggtgcgaaaagcagagattaatacaaaaatcctagtgttcacctcacagtcagcggaactctatgccagcagatgcatgatgtccggcgtgtctggatttttgacaaagaatgagggtatggaagatgtttcagcggcgatcaaagccatcaattctggttttacattttttccaaatataagctatgccaacaattttacatcaagaaaatcatcctcactgacaaaccgcgagctagaggtactgcgtaaaatcattgctggaatgaaaaatattgaaatagcagacagcatgtgcctgagcagcaaaacaatcagtacctataaaacccggataatgacaaaaatgggcgttacgacactggttgatttgatcgagattgctaaaagagaaaagattgaatga

SEQ ID NO: 143316 - DNA, 177 bp, Enterobacter cloacae
atgaaattacattttttaaaaaatgcgctactgctgctttcaataacgctttttaccggctgtacggctaattcatggattgatgcggttggaagtgtgttagaggagaaagataaatatgagaaagactcgcgatccaaaagaattaaggctgccaataaggcagcaggctactag

SEQ ID NO: 143317 - DNA, 210 bp, Enterobacter cloacae
atgtttgtcttacgatcgaacgttaatgtaataattgtgataaaactatttttagtctgcttaatggcggtgtttgcactaatggttgtaaacccaagcgcgatctttggaaacaggagtaatgaagaaatcaatgaaagcgaagaccattatcgtgctcaggatttagcccggcaaaaaccggttttatttgtgaccggctttagatga

SEQ ID NO: 143318 - DNA, 360 bp, Enterobacter cloacae
atgaaaaaaagagcgatagtattattcagtatggcgttaaccgcatgctcagcaaataacttgaaccagggcgctgaacgggtacgtattactaatactgaaccaaccggcaattgtacattcctgggggaagtgacgggcagccagggaaacttcttcacgggtggatggacgtcaaactctaatcttgagactggcgcacgtaatgatttaaaaaaccaggcttacagtatggggggtaacgttgtcgttattcttacgcagcgagcagggcagaccgggagcgcctacttcggctcaggttccagccaacaaactaacgtcacgctaagcggtacagtgtatcgctgcaataactga

SEQ ID NO: 143319 - DNA, 216 bp, Enterobacter cloacae
ttggagcgggaaagtaaatacgacgcccaattacagcgagtgacgaatgccgcaatgttgcttttcgggggcagaaaacaggatgcgcttaattggctgaacatgccagtcaaggggctgggcaatgttgcttcggtttctcttttaacgacagaggatggtgtgcaagccgtcatagacctgattggtcagctcgaatatggcgttttttcttga

SEQ ID NO: 143320 - DNA, 1143 bp, Enterobacter cloacae
atgaacgaaaccatcgaaaaactgattgccagtggaaaagaagggccatggtgggactttaaacaaacctaccaccaaaacaatgccgctcttattcacgatatcctctgtatggcaaacgtcctgcatgacggtgaccggtatctgatttttggtgtgactgatgaagggctgattgtcggcgtgccggaagatggtaagcaacttaaccaggcaaatttaatcgatctgttaagaaaagtgagttttgcagaacaccattgtccggatattcagctgcaccacatcacactccagcataaagtgctggctattctacaaattcgtaatgtcagaatgaaaccttattatctgacccaagactatagcaaagagggaaaaactgtcagagccggtgtcgtttacacccggcaacaggatgccaatacgcccgtaaatggctgcgccagcccaggagatgtcatggccatatggagagagcgctttaacctggacctggcacccgccgaccgtatcgtcagactgcttctggattacgacaactgggaatacgacggtatcagcgaggcctattatcgattggatccggattacgccattcacattggtgatattgatgaagacatgggaggacagcattggtggtcaacaattagtattgagcaaccgttccagtacgaatacatactcaaatatcgtgggcgagtactcgagcgagtcccaatcgtacattacagaaatgaaggtttaaagtttccctttccagagatggacacgctggcttatccagaaaaaagggatggattcgtgacagcttattatgcagacgttttttactttgtgaaaaacagcttacagtacaatctgttaagtcatatcagagaatttcactccctgcctggccgtcattcaggcataactatgccgttaaccacccagaccaaaccgccgattatcgagctgccattcatggtgtttgagaacgcagtggaaaaagaagaaaagctgaagttaattcaaagtcagcttgctgatttttgtccggacggcatgcctgatacaacctcgatgaaaactaacccggaactaagaatggaagtagagagacaattttcctggtgggtttttaaccatatacgttga

SEQ ID NO: 143321 - DNA, 537 bp, Enterobacter cloacae
atgaaaattgcagactttcaaattggaatgcgctttctgacatgcactgcccagttatggcaatgcacagatgtgggaatacggacgattctggcaattgaaatcgatccatcgcgtgatgaacattggtataacggcccaccatacgcggtaccagaagaggtttttgatgaaaccagtattcgcacctgctatcgaagcgagaaagaagccattctggagtcgttgactgacgactttgagcaaaacattcatccggagtatccgagcgaggtgataaaaacttttatccgttatttatcagaacagcagacatatcctaatgagcgtctctttcgcatcgaccgggttggcgaagacggtgaaattcatcatccttacgctgcaagggaaatcgatgatgaatggcaaatcctggtatacctgccatttacgcaggcgtttactgatttttctgaagccgcgtttattcgaatgcgtgttgccactgagcaggatttttggcaaaggaaaacagcatggatagtcttaaattag

SEQ ID NO: 143322 - DNA, 315 bp, Enterobacter cloacae
atgccgaacacgccggtcaccaccacaaacagcgccaccagatccggctgtccgccgagcggtttagccgccgccagcgcgaacggtgtggtcaccgagcgtaccgccaggctgcgctggatttcatcagacagggtaaacagccgcgccagccagaccgagctgcacaccgccactaccgtcgcggtgacgactcccgcgctgagcgacatccagtggcgtttaataattgccaggttgtcatacaccggcaccgcaaaggcgatagtcgccgggccgagcagccacagcagccagtgggattcaccaatgtag

SEQ ID NO: 143323 - DNA, 1827 bp, Enterobacter cloacae
atgaacaaaaggacgttactgagtgtacttgttgctggtgcttgcgttgcaccttttatggcgcaggccgcctctttgcaggcgaccaccggcgagccgtacaccatgaaagccagcgatctggcgaagaaagagcatgagctcactaacttcccgctgatggcctccgttaaagagactattcagaccctggacaacgcgcaggtcgaactgattgagccaggccgcgcggcgaacccggacaacgtcaaacgcgttgaagggattgtgaaagccagcgactgggaatatctcttcccgctgcgtgcacaggcttatacctacagcaacttcctgaaagccgtgggtaaattcccggcgctgtgtaagacctacaacgacggtcgtgacagcgacgctatctgccgcaaagagctggcgaccatgtttgcccactttgcccaggaaaccggcggccacgaaagctggcgtccggaagccgaatggcgtcaggcgctggtccacgtgcgtgaaatgggctggagcgaagggcagaagggcggctataacggcgaatgtaatccggacgtctggcagggacagacctggccttgcggtaaagacaaagacggcgatttcctgagctatttcggacgcggtgcgaaacagttgtcctacaactacaactacggtccattctctgaagcgatgtacggcgacgtgcgtaccctgctcgataaacctgagctggtggcggacacctggctgaacctggccagtgctatcttcttcttcgcctatccacagccgccaaaaccaagcatgttgcaggtgatcgacggtacatggcagccgaacgatcacgataaagccaacggcctggtcccgggcttcggtgtaacaacccagatcatcaacggcggcgttgagtgcggcggcccgactgaaattgcgcagtctcagaaccgtatcaagtattacaaagaatttgcgaactacctgaaagtccctgttccggcgaacgaagtgttgggttgcgccaacatgaagcagttcgacgaaggtggcgcaggcgccctgaagatttactgggaacaggactggggatggagcgcggataccccggacggcaagacttactcttgccagctggtgggctatcagacaccgttcagcgcgttcaaagagggcgactacagcaagtgcgtgcagaagttctataacgtgaatatcgtgaatgacgacggttcctcggtgacgccggacgaaaccccggtcacgccaacgccaacaccttctgaagatgttacgccggccccaacgccagcgccagttccggatgaaactccggttgaacctgtcgcggtgaaccacgcgccggttgcgcagattgcgggcccaataggtgccgttgaagcgggcgcgcaggtttctctgagcgcggaaggctctaccgacgcagacggcaacaagctgacctacacctggcgttctcaggatggccagaccgtgaccggcgaagataaagcggtggtgacctttaaggcgcctgagtctgcaacggcgcagcagtatgaagtgagcctgaccgtcagcgatggcgagctgagcagcaccacgtcttacctgctcaacgtgaaagcgaaagcggcaacgccatccggagaagatacgtcttacccggcatggagcgcgaacagcaagtacaacgccggtgatatcgtgaacaaccacggtaaattgttccagtgcaaaccgttcccgtacagcggctggtgtaacagtgcgccgacgtactatgagccgggtgcaggcctggcttgggctgaagcctggacggctctgtaa

SEQ ID NO: 143324 - DNA, 192 bp, Enterobacter cloacae
atgactatccctgcactgggtctgggcacttttcgcctgaaggacgacgttgttatcgcatctgttaaaaccgcactcgagttgggctatcgcgctattgatacggcgcagatttatgacaacgaagctgccgtaggtcaggctatcgaggagagcggcgtaccgcgccatgagcttttcatcaccacctaa

SEQ ID NO: 143325 - DNA, 372 bp, Enterobacter cloacae
atgcttactctacaacacttcctagataacccgacatgggccgcggcggacggatacgacttcaattatttcgactgcatggcgtatacagcagcgcaatatgacggcgtgtttctggcggttctcggtgtggcggagaattttttagacacagaggtacgcgaactgccattcgtgattttagtgctatttgttgctctcgttggggtgattatctggcctcttacgttttggcttacagccatatggatatggttcagatgccggcaccatcgccaaaaataccagtacggaaacggcatgacagagattgctcgcaggaatctagacaactggaagcggaagttcgagcgcgagcgaaaggttaagtga

SEQ ID NO: 143326 - DNA, 219 bp, Enterobacter cloacae
atggctgacattatcgataacgcatcaacgcttgaagatttacagcgtgaagcggcactgagcatgcacagactcaaccactcagcagtatcagctacgcactgtgaggagtgtggtgacaagttactggatgctcgccggaaagcatatccgggatgcacgatgtgcgtcgagtgccagagcaatatggaattgcgtaagaagattgggaggatgtga

SEQ ID NO: 143327 - DNA, 219 bp, Enterobacter cloacae
atgacgccagaacaggaaaatgccatccgtgcacagggacgtaaatgcgtcgatgaaatccgccaggcacttaaagccagaccaaagccgaaatggaatgtggtagtgcctccgatcctgaaaaaacatcaccagaaaattgctccgcttggtatcagcctggtggcattcgttagcagcatcggccggatgcaaggccggtacggagtggaatcatga

SEQ ID NO: 143328 - DNA, 477 bp, Enterobacter cloacae
atgtactttttctcagagcaacttattaagcgtatactagtcgatatttctaatagcaaaattaataattggggagttttttacgcatcctttttaaccgttctcaagcaactttatagtattaaacttgctgatcgtcaacttaatctgaatggtaaatggtgtgatattaagaaatctctttcatctaaaaacagtacgcttatttttgatttcagtggatatataaataagaatctgattacctttggtctcaaagctagagaagccgaattcgtaaaactgcatagtgattggttagataaattagattgtgatcctcgattgtgcattaggggacatgattttgtagagcttatgtcgagtgcggttaaggaatataaaggaatgaaaaacttccaagaatcagaagctcttcaacgcattttattggcttttattgatgaaatagatcatcttattcatcaattaagataa

SEQ ID NO: 143329 - DNA, 1050 bp, Enterobacter cloacae
atgaaattcacgcttatcagtgcaatgctactcacggcaatggccggagtgacctcagccaatgcggctgattacaaaaaaaatccattcacactcgtctatgacggtgccataactgagaacgtcaaaggcaaggtcaacattcatccggtgaaatacgatctgcatggcattcagattgctgcgaatgtctatacccctgctaactacgatcccgccaaaaaataccctgcggtggtggttgcacatcctaatggtggcgtaaaagagcaggtcgccgggttgtatgcccagcgtctcgccgagcagggctacatcaccattaccgccgacgcggcttatcagggtgccagcggtgggatgcctcgcagcgtggataaacccgctaatcgcattgaggatatccacggcatggctgactacataagccagtatcctggtgtagataccgcccgccttggtctgctgggtatttgcggtggcggcggttattcacttgttgcggctgaaactgacaagcggtttaaatcgatagcaaccatcagcatgtttaattcaggccttgtgcgccgcaacggcatgcaggattcacagctggatactatccagcagcgtcttcagcaggcttctgacgcacgtgctcaggaagccgccggaggcgaagtgctttactccggcgatgccaacctgactgatgaacagattgctaaattaccctttgccttgtatcgccagggctacgagtattactggaaaacccacgcgcatccgaactccacgtttaaatacaccaccagcagtcttctggatttgatgagctttgacgtaacggaccatatcaatctcatcaataaaccgctgctgatgattgccggtacaaaagcggatacgctctatatgactgaagacgcgttcgcgaaagccactggtacgaaggacaaagaactcttcctgatcgatggcgctacccatatcgagacgtattgggtgcctgaatacgttgataaggctttgcaaaagttagacgtcttcttcgataagaatatttag

SEQ ID NO: 143330 - DNA, 1167 bp, Enterobacter cloacae
atgaaaagacagaatgccccaacaatgccagagcggcgcaagctattagtcgccggggccggtattgccgccgcctcgctgattccccacgtatcggcggcgagccaatcctctcaggtcgattcatccagacaacccagccaacgcaatgctgctccgggcaagcgtaaactcgggaagctggaagtttctgccgtcggtctgggcgcgcagaacatgagtcgcaaatacgacacctccgttccctggcgtcctgagatgatcaatgttatccgtcgggcatttgatgaaggggtaacgttcttcgacgcagctgaagcctacggcccgtttgaagtcgaaaaaattctcggggaaggcgtcgccccgttcagggacaaaatcgttatcgccaccaagtttggctggaacattgaccaacagacgggaaagcgtctgccgggccttaacagcaggccggagcatatcaggcaggtcgtcgaaaacatgctcaaacgcctgcgtaccgatcgtatcgatttactgtaccaacaccgggttgatccacagatcccgatcgaagatgtcgccggtgtggtgaaagatttaatggatcaaggaaaagtcctgcactggggtctgtctgaaatgggcatcaacacgttgagacgcgctcatgcagcattacccgttacagctgtacaaagtgaatactccatgctctggcgtggccctgaaaagcaggtatttccggtgtgtgaagaactgggcattgggttcgtgccatggagcccactcggcgtgcaatttttaacgggctggattgatgagaatacccggttcgctaccggtgatttccgcgcgacagaaacacgcttctcgcctgacaacctgccacacaacttacagctggttgaactactgaaatcctgggcaataagaaaaaatgccgcgccggggcagattgcactggcatggctcctggcccgtaaaccctggattgttcccattcctggcaccaccaataaagaccatatgctgcaaaacacagcggctaccggcgtatcgctgacttccgctgagatgaccgagctcacccgctcactggacgccatcactatccagggtcaacgtctgccggatgccgtgcaggtttattccgatgttgaagcaccgatgaaaagttaa

SEQ ID NO: 143331 - DNA, 681 bp, Enterobacter cloacae
atgcgcctgttgttagtcgaagatgaagaaaaaacgtcaacctatctctcccgtgcgctgggtgagtccgggtttacggttgatgtctctgcagatggcgctgaaggtcttcattacgcgctggagttcgactacgacgcgataatactggatgtgatgctaccggggatggacggctaccgggtactcgagggggtgcgagcagcaaaacagacgcctgtgctgatgctttcggctcgcggctcggtcgacgagcgcgttaaagggcttcgtcttggcgcggatgattatctgcccaagcccttctcgctgattgagctggtggcgcgtatacaggcactggtacgtcgtcgttctacggatggtgcggacatcacccaactgcaaattcacgatctgcatctcgacctgctggctcgccgcgtatttcgtgccggaacacggctggagctgaccgcgaaagagttttccctgttgagccttctggcccggcatcagggagagattctttcaaaaatgatgatagctgagcagatatgggacatgaatttcgacagcgatgccaacgtggttgaagtggccattaaacgacttcgggccaaagtggatgcgccgttcgatatcaagctgttacataccgttcgtggcatggggtatgtcctcgaagtccggtcagaataa

SEQ ID NO: 143332 - DNA, 1458 bp, Enterobacter cloacae
atgcttaagcgttccatctccgttcacctggcgctgatgtttgccttatccgcgctactgattgtttccgttatcggtatcctgctcagaggctctttgcatgactctttgcaaaagcagatgcacaacgagctgttgttccgggaatcattaatgagtccgtggatcaccgcacgaacctcggctgacggctggtcactgcttgccaataaatttaccgtattaaccaattctgaaggtgagcgcgttcgctactggatagtaagcgataacccacgctttagcatggggggaacaccaccggtgggtgttcagtggtcttctttacaggaaggctttaataaagtaccaggtgcatcagaaggtgcatgctcgctgtttctgttagtgaaaacgatccccgccaacggtgaaaggcctgagctgcgctatgtggttgccatcgactccacgccgtatatgggcacactcgatgcgttcacgcggacattgctgatcattaccgcactgggcgtcgtgattgtcgccttactgggatacgtcgtgtcaaggatcggtcttcgtcccgttggggcgctcagtaaacaggctcggcaactcgctcccggggaccatggtcagcgcctgaataccgaagcattacctgacgaattacagcagttagcatcatcttttaatggcgtgctggaacggcaggaggtcgcctggcggcagctcgaaagctttaatgccgatgttgcgcatgaactccggactccgctgactaacctgatcggccagacgcagctggggctttcgcgccgccgttcacatgatgaactggaagagttactgggttccaatctggaagaacttgaacgcatgacgtctattgttaacgacatgctgttcctttcccatgcccatgcgggtgaacatgcatcccagcttacccaagtctccctgcgcgaagaaaccctaaaaacagcggagtatgtggaaccctcttttgctgaaaaacagctctctctcgatgttcagggcgacgtcaccgcggacatcgaccgacgactgttccaccgttcactggccaatttactggaaaacagcgcaagacactcctcctccaacagtacggttacggtgcggttaagcgaaaccggtcatcaagcctgtgttgaagtgtcaaacccgggcgatccaatagcaccagagcacttacaccggcttttcgagcggttctatcgcgttgacacctcccgggccaggagtgatacccatcatggactgggcctgtcgatcgtacgtgccgtcgccattatgcaccggggagatgtctttgcccgtagtgaaggaggcatcaatacttttggcctcacctttgcgctacaagcggataaagcggcgggcaatgctcattccgatactgagccgggaccggggttagctgacagaattgtcaggggggcgtcagcctga

SEQ ID NO: 143333 - DNA, 480 bp, Enterobacter cloacae
atgatcggacatttacgttacctcgggctgttactgcccttctacacattttcatcctgggcagcggaacaaaatcccgctgtccatatcgccccagcaggaagtcagaacgcggtgttcgggccagccgagaactttaccggtcgtgtcagggttgatcctctcttcaaaccggataatgacatccctgtttccggggcttatgtcacgtttgaacccggcactcgttccgcctggcatacgcatccggcaggtcagcggctgattgtgacctcgggtgttgggctcacccaacaagaaggccagccggtgcaggttattcgcgccggagatgtagtctcttgcccggcgggcgtcaaacactggcacggcgcggcccccggcagcgcgatgacgcatctggcgataaccgggattgtggatggcaaaagcgttaactggatggagaaagtgacagatgaacaataccacgcccattaa

SEQ ID NO: 143334 - DNA, 762 bp, Enterobacter cloacae
atgaacaataccacgcccattaaagcattaacggcagcggtactgctgacctttggttttggtctcgcggcacatgctgcgcccgtcaataaaggagcctcagaaatgaaccacgaacaaaaggtttcagatacgctgtcagcccgccaacaggccatcccgttgattgcggcatcgatggccagcagccagatggataagctgaatgcagccctgaatcagggtcttgacgcagggctcacgataaacgaaaccaaagagattctcgtccagctttatgcctatacgggcttcccccgtagcctgaatgcgcttagtgaactgatgaaggtcgtcgaagcacgtaaacaacgtggtatcaaagacgttgagggtaaagaaccggttgccccgatccctgtcggggatgagcttcgccgtgtcggtaccgcaaaccagacaaaaatctcaggcgctcccgtccagggcccactgtttgattttgccccggtgattaaccagtttctgcaaacgcaccttttcggcgacattttcgcccgtgataaccttgactggcaaagccgcgagctggcaacggttggcgcattagcggccacgccgggcgtcgaatcacaactgctgtcgcatacgcgagcaagcatgcgggtcggcctgacggtgtcgcagctgcgccagctggcacaggttctgcgtgaacatggcgaaagtgatgcagcaacgcgagctgaaaaggcgctgcagcaggcgctcgcaaacaattag

SEQ ID NO: 143335 - DNA, 585 bp, Enterobacter cloacae
atggagcatgatcccaaccgcagaatgttaatcaccgcacttgccgggctgacgctggcgaacgtttcttttgcctcagctgcgaccggaaccgcaaacgtgcagggtaaaagccgtgttctggtggcgtacttttcccgcagcggaaatacacgagtcattgcgggcgtcattcaccgctgcctgaataccgatctgtttgaaatcgaaccagctacgccttatccggaagactattttcagaccgttgaacaggcgaaaaatgagcgtgagcgaggcgtaaaaccggcattaaaaaatagcgttgcagatacctcacgctacgagaccgtgtatttaggctttccgatctgggggaccagcgtgccgcctgtagtgcaagcatttctcagcagccacaaccttgcgggcaaattactcatcccctttattactcacggtggctacggtaaaggagacagcgacgacatccttgccagtctcgccccaactgcgcgtcgggaaaaaccgctggtcattgaatgcgatcaggagcgaagaaccactgaaacggtaacaagttggttagagacaatacgcagctga

SEQ ID NO: 143336 - DNA, 1065 bp, Enterobacter cloacae
ttgaagacacttttaaaaacactgtccgtctgcatgatagcgagtggcctggtggctcagtcggtatacgcagcgccgctggtcattcaggaacagggaagcttttctgctggcggaactatcaccactgccccgggtaagtttgacgcgaagaagccgctggattctgctggccaaacttatcatggcgatcatgcctcagtgttctaccaaattccggaaaatccgcataaataccctatcgtcatgctgcacggtgcaggtcagttctcccgtacctgggaaagtactccagatggtcgcgaagggttccagaacatcttcctgcgtcgcgggttctcaacctatcttgtcgatcagccgcgtcggggcagcgccggacgtacgactgtagaaggtactgttacgcctaaaccggatgaacagatgtggttcaaccagttccgcgttggcgtgtggccagagtattttaagggcgttcagttctctcacgacaaagaagcactgaatcagtatttccgtcagatgaccccaagtaccgggccgtttgatatcaatgttatctctgatgcgatgtccgccgtcgtggataaatccggccccgctatcctcttcacccactctcagggtggcggaccaggctggtacacggcgatgaaaaacgacaaggtcaaagccattgtcgccttcgagccaggcagcagctttgtcttcccggaaaaagaactccctgcccctatgccaagcgcgttcgacacgctgaagggtgagcctgttccgatggagcagtttatggctctgaccaaaatcccgattctgattatttacggcgataacataccggataaacctgtcgccatgcccgcgcaggacagctggcgcgtacgccttgcaatggctcgggagtggcgcgacgtggtgaacaagcatggcggtgatgtgacggtgacgcatctacctgaagtgggaatcaaagggaatacccacttcccgttctctgatttaaataatgtgcagattgctgatttggttagtcaatttttgaaggaaaaagatctgcaatag

SEQ ID NO: 143337 - DNA, 831 bp, Enterobacter cloacae
atgaacttatcaatgccttggagtttagctggacgcctttttaagtggatgtgggataaaattactcgattatgtttactaaagacctatcaaaaatctcacgagtacaaagctagtcgccttcggttaggagcgcgttgggaaccactcggcgagtacctagagtactcgttgcgcctttctagttctgccgatcatgaaacagtaaaatcctgtatagcttttcgggcaaaagatattctggtagagaatattaaactttattttgaagcgtctggacatggtattcgttaccagcagaaaattgatttggtaaatctggaccaatctgtcctgattgttcacttagatcaaattcctcggcaggagcttgtggaggcttctgagcgcggtatatttttttcgattaccgaaacgcagttaactcaatgcgtcattacgttagctgggggccaacaacagcaaccctttgattcaataaggtcccatctaacatataactggttgctaaatgacaaatgggtgcgacgctggggagagttatggaactgtaatgccattgagcatgcgaaaaccgaaatgaagtcttattggcgttggcgattgggagaatttaaacatttttccctttacagtgctgggctcgggccttatccctggaatggaatattacgcaaaagcctatgcaaacttttgagcaaccaccatattatcacaatacagttctggctagcggtacattctggacggtatgttcttggagatggaaaactgaagctcaatcagcgacgaattagaaaagtgaaacccagcaaagcttcgaacctttga

SEQ ID NO: 143338 - DNA, 288 bp, Enterobacter cloacae
atgttaaaaattaccggtttagacaagctacaaaaagagttgaaagtggcccagttggcactgagtgagttggatggaaatttaggtactgtgcattttgacccacaagatccagccagtattgaaaatgcaattcaaaagataaatcaaatagttgacgaacgagtctctcaatactcatccaattcgattattggtccattggccgagcaaatgaagcaagcatatcgtgaaaatttaatccaaaaagctacaaagttcagaattaaaaataacgaggaaaattga

SEQ ID NO: 143339 - DNA, 852 bp, Enterobacter cloacae
atgcaaactgtaaaactgaacaacggtattgaaatgcccttgctgggctttggtgtcttccagatgacagatgctgctgaatgtgaaagagctgtgattgacgccatcgatacgggataccgcctgatcgataccgctgcgtcttaccagaatgaaacccaggtcggaaacgcactgaaacagaccggtatcgcgcgtaacgaactctttgtaacaaccaaactgtggctacaggatacccattacgaaggcgctaaagcccagttcgaacgctccctgaatcgtctgcaacttgattacgtcgacctgtatctgattcaccagccttacggcgatgtccatggggcatggcgtgctatggaagaactgcaacaggcaggcaaaattcgcgccattggtgtcagcaatttccatcctgaccgactggccgaccttatcgccttcaacaaggttgcccctgcggtgaaccagattgaagttaaccccttcaaccagcagctgcatgccgttccatggaatcaaagccatggcattcagccggaagcctgggcaccgtttgctgagggtaaaaatggcctgttccagcaccccgtgttaacggcaattggtcagaagtacggcaaaagcgtgggccaggttgtgctgcgctggatcttccagcgaggcatcgtttcgctggcgaaatcggtgcgcaaagaacgcatggaagagaacatcaacattctcgattttgaactcagctctgaagatatgctgcagattgccgccctcgacactgcaaccagcgccttcttctctcaccgcgacccggcgatggtggaatggctgaccggccgcaaacttgatgtttaa

SEQ ID NO: 143340 - DNA, 990 bp, Enterobacter cloacae
atgcaaaaacgttatctgggtaaatcccgactcgaagtctccgcgcttgggctcggttgcatgggcttaagccacggctacggcccggcgaccgatacccgacaggctatcgagctcattcgcgcagcggttgaacgtggcgtcaccttcttcgataccgctgaagtatatggccccttcctcaatgaagaagttgtcggcgaagccttaaaaccgtttcgtgaccgcgtggtcatcgccactaagtttggttttacttttggcgacgacaacaagcagcagattttaaacagccgtccggagcatatccgtgaagctgtggaaggatcattacgccgtcttaagactgatgtcattgacctgctgtatcaacaccgtgtcgatccggatgtcccgattgaagatgttgcgggtacggtaaaagacctgatagctgaaggcaaagttaaacatttcggtctgtccgaagcgggtgcgcaaaccattcgtcgtgcgcatgccgtacaacctgtcacggccctacaaagcgaatactcaatgtggtggcgcgagcctgagcaggagatcctgcctttactggaggaactgggtattggttttgtacccttcagcccattaggcaaaggattcctgacgggatcgattaagccaggaaccacttttggcaaggatgattaccgcagcaccgtgccgcgtttcgccgggcaggcgattgaagccaatgaaaagctggtcttattgctgggtgaactggcggcagagaaaggcgtgacgtctgcgcaaattgcgctggcatggctgctggcacaaaagccgtggattgttcctatccctggaactacgaaactgcaccggctggaggaaaacctgggggccgccgacatcatcctttctcaggatgactcgcgacagataacccaggcgcttgaaacgattaaaatcgtcggcgaacgttactctcctgagcaccaggctcgcgtaggccgttaa

SEQ ID NO: 143341 - DNA, 894 bp, Enterobacter cloacae
atgctcaaagaaaatttcaacgaactgcaaatctttcttgtggtggcgagggagcgaagttttaccaaagcagcgggcaaactgggcgtttctcagtctgcactcagccacgcgatgaaggccctggaggaaaggctaaatatccgcctcttgacccgcacgacccgaagcgttgcccctacggaagccggtgagagaattattgcctgccttgaaccccgtattgccgatcttgagcaggagctggaatcgttggttcagatgaacggcaccgcctctggcaatattcgtttatcagccggggagcatgccgcgcgaagtctggtatggccgaagctaaaacccttcctcagggaatatccggaaattaatctcgaactggtggttgataacggctttgtcgatattgttgaggggcgttttgatgccgggatccgcttgggcgaaagcgtggataaggacatgattgcggtaagaattgggccggacatgagaatggccgtagtgggagcaccgtcttatttcgctgcaaatcctgcacctgaaacgccgcacgaactacaaaatcaccggtgcatcaatatgcgcctgccgacagccggtggactttaccactgggagtttgagaaggaagggaaaccgttgcgggtcagagtggaggggcaggtaacctttaatctgcaggcggaaaggattgatgcggtgttatccggttttggcatcgcctgcatacctgaagacagggtgcaggattatataaagtcaggagagcttattcaggttttgcaggagtggtgcccatcttttcccggatattacctctactacccgagccgcaagcagcatccgcctgcttttgcgctgatgatcgatgcacttcgctaccaggaataa

SEQ ID NO: 143342 - DNA, 792 bp, Enterobacter cloacae
atgaaaatactcgttgcaggggcgacaggaagtattggccttcatgtcgtcaataccgctatcaaaatgggccatcagcctgtagcgctgatccgaaataagcgcaaagtgaaatcgcttcctcggggaacagatattttttacggcgatgtttcattgcctgaaacactcaccgaattaccgaaagatatcgatgccatcatcttcactctcggttccgatggtcagggtcgtattggtgccagggcgatagattatggcggagtgcgcaatattttacgaatattcagggatgtatctgttcgtatcagcctgatgaccacgattggcgtgactgaacgactcagcacctggaatcaacgcactgaggttcatgactggaaaagacgtgccgagcgtctggtcagggccactggtcacccctataccatcgtcaggcccggctggtttgattacaacaatgatgatgaacaccgaatcgttatgcttcagggggatcgtcgccatacgggaacaccggaagatggtgtgatatcccgggagcaaatcgcccaggttctggtcagtgccctgacccacgacgaggcaaaaaataaaacgttcgagctggtggctgaacgaggtgaagcacagcaggatcttaccccactgtttgcagacctgcaggctgatgatccacaaaaaaatgatggggttctggacatagacaatatgcctctgcgtgaagaacctgactgcattattaacgagctgaatttgtattcaaaaaaactaaccaatcgacaaccctga

SEQ ID NO: 143343 - DNA, 252 bp, Enterobacter cloacae
atgaaatcactacttattacttcattggtcatgggatttattacagtgaatgccgcatctgctgctcaggaaattaaccatgcagatgggaaagaaaagctcggtgtagtctcagccagcaatgcctatacgcttgatgagttatcggatgcgctctctcgtaaggctgatgagcaaggagcaacatcattcaaaattctgtcaaccacagggaataaccggctgcacggggttgctgaaatctataaataa

SEQ ID NO: 143344 - DNA, 852 bp, Enterobacter cloacae
ttgcagttacgttcctatccacaggttaaccattctttggataaagaaactttacatcttcgctcacaattaaatgagtttacgaaagaattaacgtctataaggcaagaaatacgagcgttagagaaacagtcagaagaagtaaaaaaatataatactcaaggggaattgatctcccgttttattggtagattggaagaagctttacgcttgtatcaaagtacagatgtgttaactaaattaataagtgaaattaaagaattacagtcagagcagaataagttattaaaaatagtatcggagaaagaaatttcacgtaagcttgatatagtgcttgataaaattcaacgagcaactgggaaattgttaccccatctagatggggagtggccagactcacctgtcaggttaattattaatgatttaactgtaaaagttagtagagggcagcgagatgattatctttgggaaactggtagtggggcaaactggttagcttaccatattgctacaacattagctttgcaatgggtgtttacgagaaatcctcagcatcctgtaccaagcttgctcatttatgaccagccaagtcaagtatatttccctgtaaggcaagcaggaattatagacaacgaaaataatgagccagaatggcaaaacgaggatattgttgctgttcgtaaagtatttaaagttttaaataaatttatatcttctactaaaggtatatttcagtttattgtactagaccatgctaatgaagaagtttggagtaatctggagaacatccatttagttgaggaatggcgtggtgcagcgttgattccatatgattggattgctcgtgattaa

SEQ ID NO: 143345 - DNA, 207 bp, Enterobacter cloacae
atgaaaaatatcatgacgttattcctctctataatcctgcctttttcagtctgtgctcaaaccgtgacggcaacaggcgatacactggagcagacggaagaaaaaattcgccagcaggctgacaagcagggtgacaggtattataaaattaccgaagcccgcatgggaaataaagtacatatcacagcagaaatcctgccgaaataa

SEQ ID NO: 143346 - DNA, 1173 bp, Enterobacter cloacae
ttgaacgcagaagccccccccaagaaaaaaggtggaagatttaacaccaaatccgaagtaaaacagatggtatgggtaaggatggcaggacactgcgagctttgtggaacagacctgacgcatgattttcgcgtgggcacatccatgcagtggggtgaggtcgcacatatacttccggctagccccaaaggacccagagggcgagaagagcatagtgatgaacaggctcaaaatcttactaatgacttctcaaatctgatgctgttgtgcccaaattgtcacgaaaaaatagatcgcgatgatgacggttatcctgaagatgatttgagtggcctgcatgaaagctgtcttgctcgtatacgccttgcagcctctcagcctgctgaaggacgggctataccgctaattgttcagagtcagcattttgcatctaccaataatatcccggcaggggaattgctgacagcgatgtcttccgagggactgactgcgtttggtcacacaattaacatcactttcagagagcctggcccccgcggaagggatgacttgtactggcaattaattaaggacgatatcgagcagaagatttcaggggaattagccaaacgcggaggcagcttcggcgatatgcctgctttagccctcgtgggtctcgcagacatccctgcattgattatgctcggacaagccatcggagaccgctctaaccggtatttattttccagaagtcgcacacatggtcttcgctggccatctaaatccgcttctcctcctgattatatattctctccagcacctcaaggtaatgggccactggccttagtcctttcgatatcggcgactattcctgaacgggatattgaagcagtgctgccgggcgtgcgaatcgcgtcgttcactattccagagccctcatatgcgatggtttcaaaccggaatgttatcaacacattccgggatgaacttcaaaagcatttgagtcaacttgaagcagaatcggagcaacctatcagcgtctttgctgcgatccctgcagcgcttgcaattgaatttggtgctttgctgacgacgcagcatcagcacccttatgtaatttttgatagagagagtaattcaaaccagttccggtcaatgctgactatcggccaccctcaggagtcacagaaatga

SEQ ID NO: 143347 - DNA, 1248 bp, Enterobacter cloacae
atgaataatgaacagactaaacacagcagctgggaatttttccttcttcgagcagcaagagcgatttctctgaccggtccgcagtatgaaaaaattaatggccgctacgcacaactgcagacaatcctctcagcttccgatgatcctattctgcaggatgcacatatttttccgcagggatctatgcgccttaaaactaccatcaaccccgtgtctgatgcgccggcagacctgggcacaattgatgcagatgcaattgtctggctcccgaattccagaggagtatcagcggacactgtgcttgaaacgatagaaaaacggtttcaggaaggcagtcgcgttcatgaggacataaagcctctgcgaagaggggtacgtgttgtttatgcagatcagaacccaggttttcatattgacgtgaccccagcacgaccccgcagctggaatgatgaaactcacggccatggcatgcttgaagtaccagatagagaaactgggtggaaagcgagcagccctatcccctatgcagactggctccatgatgcttcggagagtcaaatcatgcttgaaaattatgttgctctcaataaaagtcgggctgttgcagattccgcgaccatagccccactacccgaatatgaagaatatcagactgaggatccacttagagccagtatcaagcttctgaaacgtcatcgcgatgaatgggctattcgcactaaaaatgaaagatcgcgcccaatttcagctgtcatcacaacgctcgccgctcacgcctggctgaatgtagcaatgcaatcgcggcaaaggccatttacgccacttgaagccattcttgagatcgtcagaactatgccaaacttcattcgaagcaatggacaggaatacatggtctgtaatccagaggatagcggcgaaaactttgcagaaaaatggaatcgcccaggagaaggctctgcttaccaaagggcgttctatgaatggcatgaaagtgcctgcaaggcattcagccttggacttgaaagctattcatccgtggaatcatttgccaaggcagtaaacgaaagcttcggaatcgggcgttcatttgtagatgaagtaaatactagtatccccgctaactggacaatgccgggtcggccttcaggtatgaaccgaaactctgtttcaatgggagcgctgtttggaggtgtggctggcagcgatcaatctcaggctgatacgaaaccggtaggtcgacttggttaa

SEQ ID NO: 143348 - DNA, 1779 bp, Enterobacter cloacae
ttggttaatattccagatgatgcggttgcacagggaattgccacacttgaggcactcctaaacacaggtaatgccgcaggtctactgcagcacaccaaagcgcgctcagatgaaaccgtagcataccgtttcccgcttccaacagattatctgggcatagaaaggacattgcacataggatttcccaagggattcccatccgctggtctcaatctgtatgtggatccctcaccttggcttgtttggccacacgcaacaaaagcaggtctatgtcttcacgggtttaaagaagagccagttacggggtcacctgacacagtagttcgcgacagcattaatcggctgaagaaaatattgtctttatccatccagggcgcaaacgcagataaacgtaatctcgaatttcagaatgagattacgtcttactggataagacagcacggtaggtctgtacggaatgtattgctcattgggcggccagaatatgcttctgaactattcgcactcagtgattctcgatacatcgttccctcaggctatgagtcagtctggttatcatcagatataaaagctcttggtagccatgcccgccggattatgggaaggcaagtcacgatacgctctccacatgcaggcggtttttttgtaaaactcaaaagttttcctggactcgtgtttccagcaccggcagagctgttgtcgtggatcctccctcatgtatctgaggcggatgcgacaaaactttccacgtggtttagtaccagtagctcacttatttcccgatggctgattctagagttacctggcaaagccggcgcgcctttatacacactgaatgtttttgcaaaggtagatactcgtcgccgtagcccattcttcggatcgcgctccgcacgtcggaaacctctggcgataaccgggcaacatcctgcaattatttattcctccagattaaacgtcattgatcgtacagatttctatgcgcgagatttaagcggcagcatcagagggctggaagcagcacacgttgtgttcatcggggtaggatcgctgggtggggctgttgcatcacaacttgcaaggtcgggacttaagcatctgactcttatcgacccagatacttttgagtccgccaatatgggaaggcatgtgcttggcatggatgatttaggtaaattcaaagtcgatgcacttaaaaccaggctcatgcaggatcatccaacttctgaggtcaaagcttttaatacgtatgtgcaatttgccttggaagacaagcctgaccttcttcaaactgctgatttagtcatcatcacaacagctgactgggagtctgaagctagtttgtggaaactaaaagcaaaaggtcaatcatgggcatttattcagggatggagtgagcctcatacgcttgtgggacatgcattagcgtcacctcgaggtgactatgatggcaggcacttattcagtgacaacggcgactttagtcacaaatatacagagtggccggaaggaggggttgttccgctacctgcctgcggggaaagttttattcccgggaacgcagcgggtatgaataccatcgccacaatgataacgcaggcatcgattcagtatctgaacggtattaaaaaggaatcgctctggttaacaagcataaaccgccctgctggtgcacaggtgcagggcgggacgtatatcggccctgacttaccgacaggaaccattcaaactgttctggagcgggcttggcccgagtctacacatgagggtggaaaataa

SEQ ID NO: 143349 - DNA, 489 bp, Enterobacter cloacae
atggaggttacctggagttggaaatggcccggtgttgaggacgtcttactggtatcccactccgcggctgatatttttcactgtaatcggcaaataagtggggaacatgagcgagggggtcagctttttgtcgaccccaatcatccagacggtatcattttgtctcttgcaacagcaccacacaaagccgacaacgcagggcgaacatgtcttgagttagaccctgaacgctgtaagaaggagattcagaaggcaaatgctcttgggttacgattaataggatactggcatacgcatcctcaggtaataccgcagatatcgagtgcagatatttcgagcttttcccgctttgcgaaacgttactctcaggtacttccgcatcctgtagccattatcgtcggcacctctccagatacttcaggaattaaagcttggttatttagagagggggggtattttgaagctgtcagaatggactgtcccttttag

SEQ ID NO: 143350 - DNA, 546 bp, Enterobacter cloacae
atgcgcaattccgagatatatgtgtcagttgatattgaaacgtcaggtcctgttcccggaatttacagcctcctatcaattggggcttgtctggtgagtgatcctgagaacgcactgtaccttgaacttcaaccagagggcgagaagcatgatgctgaatctcttgttgtgactgggcttgatattaaccgactacagagcgagggacttgctccagaacaggctatgttaaagctaaaagactggcttgcttctttaatttctcaacatcggaaacccatttttgtcggtctgaatgccccatttgactggtcattcatcaattactactttcacaagtatattggcagcaacccctttggtttcacagccatagacattaaagcctgctacatgggggctatggggtgcgagtggtcagacacaaaatcatcacatatgtctgcagtccttgcccctctaacccaacccacgcataatgcgcttgatgatgcccgttttcaggctgaacttttttctttattactcgcgcgatcaggccgttag

SEQ ID NO: 143351 - DNA, 246 bp, Enterobacter cloacae
gtgggaatatatgggtttggatctttttttcgagctcaaacttacaatgacatcgatataatgatagtggtagattgcccttttgaagagcttctaggcctttatgaggagtgtgtagaagctttaagtttgttaggtacggaaactggagaagagtttcacttgcttttccttacttatcaagagtttaaagagaaaccattgattgaatctggttctttgatccctatttttattggttcatag

SEQ ID NO: 143352 - DNA, 408 bp, Enterobacter cloacae
atgaataataattcatggggtgtcagtttcgcatcgatttcatggtttgacgattatttgaaatatcataaaaatgtcaagggttttattcgcgaaaaggatatagtctttcgtgttgagaggaaaattcaaaatgatatgttgacgatcattcttctgaatgaatacacaatgagtgtgacaaaaatactcaaagttatcaaagagtttggtggggtggatataatcgttgttggtggtaattggaatagctacacatctggtgccaaagagcatgctatacagcaagaacttgggttgtttaattcggcagaaatcggcgcggctttattcaaaaatgattactggaatttccatagaaaagatagaaacggcagtccgcaatatcatattagagaggagcagtaa

SEQ ID NO: 143353 - DNA, 669 bp, Enterobacter cloacae
atggcgggtacttcagaaaaagatatcaagttactgtggggccgcgcagcagggcgctgttcttactgccagtgtgaccttacacatatcatggatggtttaggcaattatcatgtaggtgaaatggctcatgttatcggtaagaaaaaaggtgcagccaggacaactgagggtacaggacctgatacctatgacaatttgatccttttatgcccaacccatcataggatgatcgataaggctccagaaggggcctatccgaatgaaatgctttttcagtggaaagagaaacacgaatcttctgttgcaaatgcttttaagaaggctgtttttgatagtgttgagcaacttaaagaagaaattgcgttaatgctttatgaaaataataaatgctttactcattatggaccatattctgaagctgcaaaagatatgggttctaatactcaagaattgtgggagctaaaaaaactaagtgtgatggtgcctaataatcgtaaaataataaatgtaattgaaggtaatatgggtttattaagcgccaggcaaaaacggttgtatattgactttagagatcatgccgaagcttgggaatacaatcagtataatagattggatacctatcctttatttcctgaagagttccagaaggagttcggttatgaataa

SEQ ID NO: 143354 - DNA, 252 bp, Enterobacter cloacae
atggatataaaagaccttttacttctggcactctgtctggccttgcttttttttatagtgaaaggcatcgatgcgtttgaacttcgccttccactctggttactgcgagtaatctatgctgcaggcatttttcttggcgcatcaacgatcctggcaagtatgtggttattgcatatatcgacacgagccattatcactgacctcggtaaagtcttcatcaggcgtcagaggctcaaatcgttcgtgaagtaa

SEQ ID NO: 143355 - DNA, 516 bp, Enterobacter cloacae
atggccattaacaaagtcaaatcaccaacggtttttatgctccatgggtttcttggtagtgggaaaacgacttttgccagacatctggaacacaaatataccgctttacgttttactcatgatgaatggatgcagcagctgtatggcatcgatcccccgcaggctaattttgctgattacgcacaacgggtgttcaacgttatggagcccctatggacgcgatgcgttgagcttaacaataatgtcattctagatttcggattctggtcgagagaggaaagagtccgggtgcgtgaaatcatcacagctcataatggtcaggcagtcctttgccgtctgtcctgcccggatgacattgcatgggaacgtattcaaaaaagaaataaaacgccgacaaatagtctctatatagcgagggagacatttgatttacttcacgaacgatttgagcctctgacgcctgatgaagactttaccgaggtcagtgataatggctcgtgtcgatatatgcaataa

SEQ ID NO: 143356 - DNA, 423 bp, Enterobacter cloacae
ttgagctatggcattagagccaatgaggatgaggtatggcagtctttttctaagaatattgtaactctccaggcattgggtcacaatgtaatcgttatttaccctatcccatctgttactgaagatgcaaagaaaatgtatttatcattaataaccgatcttaaaccccaatttgacggtattatatacgagaaaaatatcaaagggaaaaccgatgctatagaatttgctaagaaattagattctgtaatcgttaataaagaaaacctaactataattagacctgttgattttatttgtgataataaaggatgcaaaataatcactaccgaaggatctctatataacagcgggagtcatctgtcaaatgtcggtgttaaattattatttagcaaaaccgatttcaatggggctaatcgttga

SEQ ID NO: 143357 - DNA, 1221 bp, Enterobacter cloacae
atgtttaagtcttttttcccaaagccggggccctttttcctgtcggcatttatttgggcactgctggctgtcattttctggcaggccggtggcggcgcgtggctgacccgtcttacgggggcaacgggcgacattcccattagcgctgcgcgcttctggtccatgagctatctgcttttctacgcctattacatgctctgcgtggggctttttgccatgttctggtttatctattcgcctcaccgctggcaatactggtcgattctcggcacgtcgttaatcatctttgtcacctggttcctggtggaagtgggcgtggcggtcaacgcctggtatgcgccgttttacgatctgatccagacggcgctgagttcgccgcataaagtgaccattaaccagttctaccatgaggtggggatcttcctcggcatcgccctcatcgccgtggtgatcggcgtgatgaataactttttcgtcagtcactatgtgttccgctggcgtaccgcgatgaacgaacactatatggcgcactggcagcacctgcgtcatatcgaaggtgccgcacagcgtgtgcaggaagacaccatgcgttttgcctctacactcgaagatatgggcgttagctttattaatgccatcatgacgctgatcgccttcctgccggtgctggtgacgctctcatcccacgttccggaactgccgattgtcggccatctgccgtacggcctggtcattgccgcgattgtctggtcgctgatgggaacgggactgctggcagtggtggggatcaagctgccggggctggaatttaaaaaccagcgcgtggaagcggcctaccgtaaagagctggtgtatggtgaagacgatcccaaccgtgcgtcaccgcctaccgtgcgtgagctgtttggcgccgtacgtcgtaattacttccgcctctatttccattacatgtatttcaatatcgcgcgcatcctttatcttcaggttgataacgttttcgggttgttcctgctgttcccgtccatcgttgcgggtacgattacgctcggtctgatgacccagatcaccaacgtttttggtcaggttcgcggttcgttccagtacctgattagctcctggactacgctggtggagctgatgtccatctacaaacgtttacgcagtttcgagcgtgagctggacgataaggatttgcaggaagtcacccatacattaggttaa

SEQ ID NO: 143358 - DNA, 222 bp, Enterobacter cloacae
atgcttaacagtgaaccatcctataaaaaattaagacttttacggatgtcggatgtaattgatttaacgggtctaccaaagtcaactatttatttaaaaatgaaaagcaaagagtttcctagacaggtgtctatcggtgctcgatctgtagcatgggtcgaagccgagattaatgactggatagagaagaatattcagaacaggaaagataattgctcataa

SEQ ID NO: 143359 - DNA, 864 bp, Enterobacter cloacae
atgattaacccaaggaatgctaataaaatactctcaatcaagaatgaaagcacatcactattagaagcatatcaggtaagtatattcaaagatggatatagtgatgctgcatgtatcgcaagaatgattgagatttattttttgaataaacttcgcagtaaaggacagaaactatgttctttaactggtctaatgatcccagatacagaggcgactgccgaagaaactaatctcttactgagccgatttgaggtgctctgtcaccgtgaagaagaagagttatccttccggcaaagagaggttaaaactgccgagtacgcattaaaaaatgcagggttgaatgttaactccagaacagtttctgaagtaaaaaacaaaaatgccgttaaaggggcgcgtgatgcttatgaacgacagtaccattctgcatttttacggcagaaagagcagcaaacgcgagtaagtctcttcagaggattcggaagtttgttacttgaagaggctgaacatatcgggaagaacgttagtaaaaaatatcttaactctttttccagaccgttaacttctcccgatgagtttattaacgttttaaacgatgcgactttagttcgggatgtgagatttatcttggatgctctatgcgcactggataatgctgttgagcacattcttaaatgttgcgcatacccaaatgaccgttacgaactggaaagaggtgggataagtcgaactatggcctatcgggagtactaccgcgctgaaaatgccattcttcgctccgtagtaagcgatcgtgaatatgcagagcatgctgttaaatataatcagctctctgaatacaagaaaaaaatatttcgtaaataa

SEQ ID NO: 143360 - DNA, 591 bp, Enterobacter cloacae
atgcctgggtttatctttatgttcaacaaacaaaattcggttataaaattcttgcgccatgctaattgctcgggctatattcgcagcgttgccgcaaaatcggcaaccgggcgtaggaacccgagtaatctaacggcgacaccacacgcgccaggcgtgtttttttgtgtcgtagctttgactcacccttattttatggtgtggtggttaaccgtatctattcgttatttacgccacatcatccaaattatggtagtccaggcggggcagctttcgggctggccggtatccgttagagccggtattcctacccccgtctgggctaccacccatgagcgtaggaactccggtggtagcgttacccgctatctaacggagattgccgccatggctacgatccctgctttgtctcacccccaatatacctttgtatttctcgctgttcgccgtactgattatgccgcgcgtccattcgctgtgcgtactgttgcaacctgcgagcgtgctgcccgcatgaaactcgttgccgattttgtactgagcttcgccgcacgtattccgatgaacaaactcggggaggtgagcgcatga

SEQ ID NO: 143361 - DNA, 240 bp, Enterobacter cloacae
atgagtcatttacccatccctaaccacggttgcaccttgactgaagcaggcgagaaccgtcttttacgggctgcgctggcgagcgagttcctggccgaagttctgtcatttcctgcgatgagtgggcagagaacagtttctgctgagggagccgcagcaatcatggcctgtattgcagaacagctggagggtgtggtgagagaaactagtaccattaaaggagaaaagcatgaacgctaa

SEQ ID NO: 143362 - DNA, 2688 bp, Enterobacter cloacae
atgaaagttcagtctgtatctgcggtttcgggggcagcaaacgggcgctggccacatatcctttccgcgttagggattaatgttccttccgcccgacgccacggtgcctgtccggcctgcggcggaaaagatcgctttcgtcttgatgacaaagaggggcgcggaacatggttctgtaatcagtgcggcaatggcgatggccttgatttagtccgtctggtgactggacgctcagtgaaggaggtcgcgggaatggtctgtgaggttctggcattgcctaaagtacaggataaacccgctatgccagccaggaaaaagacggggggaaacgagaccggggcagaccgctatcagaaacttaaaaagctgtctcaaaacggtgaatcagcctatctgaccggaaagggattacagggttactctttaccgcttcttactgccaccatcaatctggcggggatgtcttttccagccgggtcgctgctgctgcccttaactgacattaccgggaatgttacaggcggccagcttattaactctgatggtgataaaagtcttttacccggcagtcagctgtcaggtgcttttattgccgtggctgatgttccgtctgatgctccggaacaggtcattatcactgaaggatatgccactgcgttgacggtcagcctcctggctgacggctggatcgttgcagctattgcggccacaaatttggtaaaggtcgctgagcaaatccgcattcgatggcctgacacccggattatcctggctggagataacgatcttgttgacgggaaagagaacactggccggatatgggctgaaaaagcggcgaaagccgtagatggttgggtaacgctgcctccggtacgtcataaagccgactgggatgattatcgccaggaaaccgggaaggaaagggcgcgtgaagccttccgggaggaaatgacattacacggaaaagggcaaaccagattgccgcaggggttcaggctcacgaaagaatatttgtggtacgacaagctggtgaacaaatcagatggtgacactgagatccgcaatatcaagatttgcagcccgctgcgtgtgacagctatcaccagcgatgctgacggcagcaactatggccgactgctggaatgggaggacaccaacggtatgagccgaaaatgggcaatgccgatggaaatgctgggcggcagcggggaagaactgcggcgcgtgctgctggtcaatgggctttcttatatcaatatcaacgggatggccagagcacacctgatggaatatatctccctgtgcaaacccgacagaaaagtgacctgtgtaaataaaacaggctggcatggcggggtttatgttcttcaggatgaagtgatcggcaaagagtcacagtctgtcattctccagacttccagcgttcaggggcgtgattttcgggttacgggcaccacggaagaatggcgggaaaatataggtcgctattgcgtcaataatgcccgactggcctttgccgtaagcctggcattcgccgcgccgcttctgaagctggttggcataggtggcggcggttatcacctgaaaggtgaatctacagacggtaaaaccacgaccatgaaagtggctgcttcggtgtgcggtggtacggatttctggcatacatggcgtgctaccgggaacgcgctggaaggaacggccagccgccgcaatgatgccacactgatgcttgatgagatccgcgaggtggatggcagagaggcggggaatattgcctacatgctggcgaacggccagggcaaagcccgcgcccgaactgatggttcggtacgggaaacaaaccgctggaatttgttgtttctttccacgggggagctgtcactggtcgagcatgccgccaatgctggagagcgaacctacgccggggttgaagtacgcatgatccagatcccgagtgattcgggcaagcatggggtatttgaggagctgcacggctttagtggtggtaaagcgctggcggagcatctggaacacgccgttattcattatcatggctcacccttccgcgactggctgcattgtctgacagccgatctccaggaactgaccagccaggcgaaagcgctgctgaaggactacacccgcaggctgaccccagcggatgcaggaaaccaagttgggcgtgccgttacccgttttgcgctggttgctatggctggagaacttgccacacaagccgggataaccggatggcctgaaggtgaggcgttcaaggctgctgagtgttgcctggcctcatggatggctgatcgagggcataccgcgaaccaggaggataaaaccgcactggagcaggtcagggattatatgacacgtaaccagttcagccgctttgctgactggcacgacgacaggaaccgtccactgtcgatgatggggttcaggaaagtggacaagggcgacaacgtgacagaatccactgtgaccttctacgtattgccatctggctggaaagaaatttgtaaagggttcgattcgcgaaaggtagccagattgtgtgttgaggcgggttggctgaaagccggggaagacgggagaacgcaaaacaacgttcgcctgccagaaatagggcttaagcgcgtttaccagtttaatacgcaagtactgggtagcgccgatccagaatag

SEQ ID NO: 143363 - DNA, 378 bp, Enterobacter cloacae
atgaaagttttattgtccattaaaccagaattcgctgaaaaaattttggacgggaccaagcgatttgaatttcgcaaagggatcttcaaaaatcaagaaatcagtattgttgtgatctatgcgacaatgccccttggtaaagtagtaggccaattccagattgaatcgatactttccggtgagcctgagtcgctttggaaagaaacaaaaaaatatgccggcatttcgaagcagttttttgatagctactactcaggaagagacaaggcgtacgcaataaaaatcggagaagttgagcgctatcaagagcccattccgatttcagatttagggtgtaacatcaaaccaccgcaatcctatctttatctacctgcgtga

SEQ ID NO: 143364 - DNA, 1062 bp, Enterobacter cloacae
atggacagcttaaagtatgagaaattttctgattttgatcacaacgaccctttctttgactccttaaaagaggattataaggagtttcctgactggctcaggaagaaagctgatgcaaatgaatccgcatatgttctttatgatgagcatcgcaaaattgaaggatttatgtatctcaaagagaatgacgatgccgaagatattaaacccaaactgcctgaaggacgccacttaaagattgggacttttaagtttgagtcaaaaggtacgctcagaggccagagattcttaaaaaaggcttttgaccatgccttctcatcaggttctgatgatatgtatgttactgtttttgataaacacgctcatcttataaaattatttcagacgtacggattttacgtacatggtgaaaaagaaactcaaaatggtaaagaatatgtatatgctcgttctttacatgacgtgtacggcgatatacttttagattatccaaggatattaatcggcgactccaataaatacttgttagccatttatcctgaataccatactaggttatttccagattcaaaattaataaatgagtcccctgatatcgttaaggatatctctcacgcaaacagtattcataagatctatatttgcgggatgccgaccgtaaatcgcatggccagaggtgacatcatcgtaatttaccgcactggtgatggcaatggacctgcacattatcgcgccgttgccacaacaatttgcgtcgtcgaatcagtaagaaatataaatgactttagagatgaagatagttttgtagaatattgccttcgctttagcgtcttttccgaagaagaacttagaggttattatagggataagcgctatccatatgtaatccgcttttcttataacatatctttaccgaaacgccctaatcgtgctaccctaatagatcaggttggtttaaatggaactcgtggttttagatggagtcattttgaacttaccgaagagcagttttccaagatcatacagttaggtcacgtaaatgaaagttttattgtccattaa

SEQ ID NO: 143365 - DNA, 411 bp, Enterobacter cloacae
gtgtataaaccaaatatttacaatgactctatgaaaaaagaagaacccaacctcgttctggttgaacgccttactgagatcaatgatcgcggcgttaccaaagcagatatggcacggatagctggagtcacccctcaggccgtaaatggctggttcaaaaagggcgtgattagtaagagatcggcactggccatagccgacgctgtaggcatctctgtcgcctggttactcggtgaggacgttggcgagaaagatggtctgaagcctgacgaaaaacgcttgctggagctttaccgtcagttaccagaagaagaacagaaaaatatgttgcggattgtatcgctacgcttgaaggaacttgacgaattgtatgctaagtacatgggccggcgtatcaagggtgatgattaa

SEQ ID NO: 143366 - DNA, 228 bp, Enterobacter cloacae
atgtccgcactcgataaagcaattaaagccgctggctctgccagaaagctcagcatcgcgcttggtgtgacgagtatgtctgtaagtcattggaaaaatcgtgaccaagggatcgtcccgccaagctatatcttcccaattttcaaaatgacaggcgtaaccccccatgaactgcgcccagatctctacccaaacccaagtgacggtttacctaaacaggagccttaa

SEQ ID NO: 143367 - DNA, 1236 bp, Enterobacter cloacae
atgaatagcgcgttaaaagaacttgagagaaattgcgctccaatagaatttattgatccattagctcgattggtcttagatgatttagctatatgggcaaatgataatatatattcatcacactctgggtgtttaacttatgaattgcctcttgatgaaagtatcaatgcagcttgtacaagttatcatgattcacgctatcgagcccatattaaaataaaccttgggatggttcaggaaatctacattcagtcatttacctatccaggttacattaaaaatctagaaagttcgaattggcatttcaacgctcttgatgaaccctttcgtgatgctgagtttttattcgaaggtggtatccccccaagagtcagagcctctgaaacggtcgctcatatggtagaactatacaaatatatacctaacaacagaaatgccatgtggactgatgaagaattaatttgccgttttacaatgtttgaattaatgattgcgtggatattttttcatgaacttgcacatcacgttcaaggtcattacaagataaaaaatgaaataaaagaatcggttacttatcacgaactagattactcaagtaacattaataattccaattctgaggtaactcccagtgtcatcaaaaagaacattgaccagcatgctcgagagatacttgcagacctcgaaggcatgtacttaacaatgagaatgatggttagaaatgatactttaacaccaccaaacacttttttgcttttatatgtccaaacctcaatgtttaatgtgttctataaattatctgagggtgaatatacggatttagatagcgttaaagttacccaccctcaccctgtaattcgaaacaaatttgtacatgccctatatttctctgtgatgagttgggaattggataatgatatataccaagattatcgtcaatctgttagccgaggtcttgaatattatactgtaaagtcatcattgttagctggaatgatatgggcaatgaggcaacctgattacagcccggatgcaatgccccaatttcttaaattcagtgatgagtccgaatattccacagactataactaccttagtgaattgaccttaagcgctgaaagacaatcatccatcatatcactcttgcatatcatcgatgatgatttagataatgtttttaaattaacaaaattagacaagctattctctcattttttaaatattaagggagaataa

SEQ ID NO: 143368 - DNA, 219 bp, Enterobacter cloacae
atggctcaatctccacaacagcaaaagaaccctgtctataaaattggcgaccaagtagttatcaaatctggtggtccagtgatgactatcgaaaaaccagtcagaaatatcgatcagatatttgttggtacgtataaatgccaatggttcgcgggtaaaaagttggatactggaacttttcctgaagcctcactcgaaccatacatcccaaagccttaa

SEQ ID NO: 143369 - DNA, 603 bp, Enterobacter cloacae
atgagtttaagtgatgttcaaagctatgcttggattataagtttgagtagcctgggagcagtctttattggttggaaggttgtgtatcgcaacgcaaagaagatatccacacgtacagaaagcaagtcgattacagaccacttgataaaattgtgcaatgaaataatagacttaagcgtaactttttggatgaaaaaagatgacgatgaacgtaaagagtcacttaaattttctcttgcggtaagtgcgaaatctactcagattggcgattttttcaacatcttagccaacagagacattcgaattgataatgaatttctggctgatttttcttcagcagctacccttgattctgagagaaaaagtagctttactgatgatgagagggcagagaaatgtcaggcttgtgtagactacggaatgagcctaatctcacacatttataatagatttgaagttaaatatccgccacaaaaagactatacattcagtgagatagattactatttagagcattttgaatcatattgccatggttgttcaaagccatatattgaggatggcgttgagaatagaaagactgataaagcgttgaccaattaa

SEQ ID NO: 143370 - DNA, 273 bp, Enterobacter cloacae
atgagcaaggtcattatcgatttattagtaatgggtgatttcaccgatccttttatttgcggagtccgaggggcctgcaccattgaagacctgcaagccattgagaaggaaattattgaaaaccgcgatgagcgccttccaaaagatggaacctacaccatcgaaaccagcttgtttaaaggccaatacggcgaatatggtcgctgcgagcttgcaccaggatgggagtgggaaattgttgagttttcacctttagatattcctgaggaatag

SEQ ID NO: 143371 - DNA, 732 bp, Enterobacter cloacae
gtggatcatctccgtgaccagaacagcggtgagattaactggttcaacaccgacctgaacggcgcgccgctggaggtgaccgacgagcgcggcgcggtgcgctggagcggccagtacggcagctttggcgaggtgcgccatcagagcgaagggttctcacggcttgtgaatcgcacggcgatggcacaccagccgcttcgctatgccgggcagtacgctgacggtgaaacggggctgcactataacctgttccgctactacgacccgcaggtcgggcggtttattgtgcaggatccgattgggttgaatggtgggtggaacctatatcagtatgcgccgaatccgttggggtggattgatccgctgggtcttaaatgttctcattcatcaaagaatcctaaagaatttcatgctgttgtaaacgaaaaatgggggcataaaatgaccgcctcagaaatgagggaagtacaaaaaacaatcgataatattaaattgaatagaccagcttttcctcgtgatggaataccttttgaaaataatttcaaaatttcaccagatagtcagcgccttaatacaggaagcggtccttatagagaatggacagtaaaaacacctggtgtaggaaatcgaggagccaggcgtatagttgtggatacaaaaacaggtcaagcattttatagtcacgaccattacaacactttcatagagatcggtctgggaggatggaagtaa

SEQ ID NO: 143372 - DNA, 126 bp, Enterobacter cloacae
atgaacagaaatatcattgttatcaatttcaccgttctttgtcgctactcttatgccattaataacatgatcactgtgagtttcaactataatctgtacaccatcagatgcgcactttgtaagtaa

SEQ ID NO: 143373 - DNA, 915 bp, Enterobacter cloacae
atgtctagaaaaaacggcgatctcaataaagatgaagctgtacacttagcgctgtctcttatttcaacattgaaatcagcgaggaagataaataaagatttctcaataaatctttctgtacctattggtagctatcaagtttctgataattttacgttacaaatggtgttttcaggtaatgaatatcgtgaagaatgggagttcatccgtcagttaaatagccgttctccgatttcatctcaaatagaagagatgatttgccagcaaatcgaagagatacaatatcaggcaactccgagcggaattgaatctgtagccctgatgtatgcagcattgcttgattctgcaacctttagccattgtattattcctgattggttaaatcctatggttgaagtaatttgcacgagcttacaagatgatggcgaattaaccgaactctcagaacaagtcaggaatatgagtaagcctgaccacgccaattttcataaagattggcttgaaaacttgggtcttaccataaacccctccattgatgaactttgggatgaaagggaaaggagatatccagggcttcgtttcttagaacgtacaaaaaaagatctgtcagctcttgccggagcaagccttcctttttctcaagctcttatttcgttagactgcctctcaagagatgtacagaactggacattaaatactgcttggccatcattttccagatacgcctctcctgaatcgacttctaggaaggattactgttatttccatgatgaaaagaaatcagaaaagctatgttttgagtggcacgttcgttttactggtagctttcctggaagagtgcactttattgtcgatgaagaaaaccatgaaattgttgtgggttatatcggttctaagataatgagggcttcatag

SEQ ID NO: 143374 - DNA, 1065 bp, Enterobacter cloacae
atgtctaagaatattcaaattaacgctgccactgacttaaacaagcctgtaggtgaacagttccgagcacctaacgacaagattgttcactctgagtctatgaccttccgtgaagaggttagtagcttcgcttgggcgtctgacagccccgagttcaatagcattgaggccgctaagtcccctgctgtttatgctaagacccttgagtccagcctgcgtattggcctgaatggcatcaagtcagacgttgagtctgtgaactctgtgttccctgttgagttcctgcctaaccgtaccgacactcctacacctatcgtccgtcacctgttcaacgaccgaggtgctgtggtggcgaccaatggcgactggtctaagcctaagaaagctgtagctatggctggtagtgaaatctttgtggagccagcaaacaaggctatcctgctgtcctatagcatccctctgtatgacttcaaggtcgagtccggtttcacccatgcgactctggttggtgatatgaataacatcgtcgataacatcctaaaagacatcaacgctaaggtcgcttctcaactggcagactctaagttggtgcgtaaggttgacggcggtaagctggcaggtaagttgtttgataaaggtcaggacattcttgatgctatcactgaggctaccgattccgctctgggtgctaacgtagacgactatggcttggttattcatgaagacttagtgaaggctctggcgtctgttgctcgtcgctcaggctttggtggtgaggacggtatcgaagagatgctaggcactgacttctgttcctacaacggtgaagacaaaggtgtcttcctgatgcctaaagcatttacgggtctgagcttcgctccacctaaagtcgacggtgagtggttcactacaatcttgacacgagataccgaccgccaagctttcgtactggaagtcattggtaagctgtacatcctgaatgaggcgaccactgagattaaagatggtatccgcaaggatgctgctgtactgcctgtagtcactaacattacattcactaagtaa

SEQ ID NO: 143375 - DNA, 498 bp, Enterobacter cloacae
atgactaccaagaatactttaacgtggcgtatcgccgtatctgatgtagacaccaagtccaacaccatcaagattgacggacaggagcatgacttagggtttgccttgaagttcctactacctgcctatttctcaacgtttgattcaaagaccatccagtctaacaacacgttcaacgctgtagagcctttggtcgttgctggtattaaggtatcaaacttccttcctgtggctgctgaggctcaccgtgatatgacctaccgtcgacaagctgaagcacgtgaggccattcgtcaggctgaacaacaagctatccgcttcgctgagttgaataagagcaaggaacaagtagagcgtgagcaactggaagccgaagcacgtaagaaacgtttacgtgaacagtccgagcttgtccgaagtgcagggtcgactctgggtaaatcccgtgcggcacagatgctggaaggcattggagacatcaacctgctggctgactag

SEQ ID NO: 143376 - DNA, 264 bp, Enterobacter cloacae
gtgttacgcagtcaggttctggaactgcataacatcagccatggctctgctggcgcaagaagtatcgccatcatggcaaccctgagagacttcaaaatgggacgctggcttgctggcaggctcatgaaagaactggggctggtgagttgtcagcagcctacccaccggtataaacgtggtggtcatgaacacatcgttatcccgaatcaccttgagcgacagttcgcagtgacagaacctaccaagtgtggtgtggcgatgtga

SEQ ID NO: 143377 - DNA, 225 bp, Enterobacter cloacae
atggacaatgttagccaagctcagaaagacatcatggcgatcaaaatcgtggttcaaaatatgattgccttaatgaatgctgaaaagcagcaggtcttaaaagacattacggaaaacatgactaatgaaatgattgcaactagtggggatctagcgcatcaccttgaggatattaaaaaatcagcaatggaaatgatcgacattgcgacattgaagccggagtga

SEQ ID NO: 143378 - DNA, 348 bp, Enterobacter cloacae
gtgccagaagtttttacgtggacaccacagcgagcttaccaggtcgaacgtaccccaaacgtagccgtcgttaagctgggcgatgggtatgagcagcggcaggttaagggcataaatccgctgatggcgaaatacagcctggtgtttcgcggtgtaggggggccatgcagggctaacccggcaaaggaggctgaagctttcctgcgggcgcgtatggcggtcgagtccttctactggacgccatccgatacgggggtacaggcgctgtttgtctgtcgatcctggggcatggtcaagaacgggccgctgtacgaactgacggccacatttgaacaggtaccacgttaa

SEQ ID NO: 143379 - DNA, 432 bp, Enterobacter cloacae
atgaaactgcagcttttcagcaccgggaaagaactcccgccacaggcccatccgttgtttgcagacctggccagctgcggttttcccagccctgcagctgactacgtcgagtctgacctggatctccatgattactgcatacggcatccgagcgcgacttactaccttcgcgccagcggtgacagtatgtccgacggcagcctttacaatggcgatctgctggttgtggactgtgccgagaagccccggcatggcgatattgttgtggccagcgtgcagggggagtttacggtcaaacggttgctgctgacgccacgactgacgctgcagcccatgaacgccgcctggtcgccgatttatcccgacccggacgatctggatatctttggcgtcgtcacgcacatcatccaccgcccgagggagatgtactga

SEQ ID NO: 143380 - DNA, 957 bp, Enterobacter cloacae
atgtttgggccggtgtttaataaggctctagatttaactatccaccacatggaagctggatggcaaaccaataatggaatgatctttaaaggttgcggttcgcttcatctaattgccctaaacttgggggatgagtctgctggaactgttgaacaggttagattccaggcggcagatgatggtacaacatgtgatacagtgcacatcgttagcatgcatgttggcagcagttacagggcgatacatatcgccgcaggtgcattccttcctggggagtcaagttcatggataaaccttgactcgagcaataccagggacgttggcgtatttgttgaaggctggggaatgggtaaaattactcattattcccgtaacgataatcaaagcatgcgcatttccaacagtacctatggatttgacgtagagctgcacagcgttagcgccagaacagtaccagttaccatcgcctctacagttagccgcattcgctttgtcggcggggcaattataaacccggcaagtaccgcatcaggttcacttgtgcaaatttcaactggctcaagtgggtttgtattcatgggaatgcacttccgcatctctgcggtcaacagttctatcttcagtgctacatctaccttgtacagggtaattggttgctcgtttgatatgaccgataacccaaccgctccagtctttgctggcggccttatccctaaggttacaaacaatggtgggtttgtttctgagaatcatgggtcagcagttattccggccggttcaacctcaataaccgttaaccatgggcttgcgctgacaccttcagcagtaaatgtttcagccggggcaaacgctacatcgcaagtcagagctacaaccctaggcgctacaactttcaccataaccatcgcaaccgctcccggttcagatgcgacagtttattgggaagctaaaatatga

SEQ ID NO: 143381 - DNA, 1269 bp, Enterobacter cloacae
atgaacggatacataaaaacggataaggttttcttatttttcgctatattttcggtgactttcattctgttcgttttgcgtcgcccagatctaatcactaaccctcagttttgggctgaagatggaaggtattggtaccatcaggcatatacacttggtccactccattctattattcttccccagaatggatattaccagtctatctccaaaattactgcatcactctcacttgcactgcctttgtggtgcgcgcctatatttttcaatgttatagcaatctccatccgatgctttgtggtaatgtttttactctcatcaagaatgagttcatacaaactattacaaaggtttattctggctatgttcattattgcaatgcctcatgttagtgaggttcatgcaaacataaccaatgctcactggtatttatcaatgtggctatttatggttataatctcgaacaagcctgacggcacctactggaaaatgcatgattttttaatcttgttattatcaggactaagtggtccttttatagtttttctggcgccggttgtagccctcaaattggttgatggaagagtattccaaaatccattcaaaacaatacgtaatgctgtaagaaatttagacgctttttctatagcgtttatctttgtgtgtcttatacaggttgtggcaattttgatttcttcaactgctgatagaagccaggctccgcttggagcaagccttgacctgctcattagaatactatcatctaaaatatttgctggctttgctttaactacagccaagacaattgagctttggaattctggcatatacaattacgtgatatgtattatttcaattgctatcatatgctgcgttctgataaaaggaacatggcgagagtggtccatggtcattttccccgcactgatgatcgggtttgcacttgccaagccaatgattagcaatacagacccacaatggcctataataatgagtggtggtgcagagaggtattttgttatcccaaatgtattctgggcttcaatattgctttcttttttgggcggctttaattcctggtctaagtatttgcactctgcttttctggtggtgatactggtgatgtcgcactatacatataaattaaaaacccttccagataataaatggatagaaagcgtgaatgcgtttgaaaatgcacccgctggtgaggaggtaagcctccctataaacccaagaggctgggtgatggtattggaaaagaaataa

SEQ ID NO: 143382 - DNA, 591 bp, Enterobacter cloacae
atgagcgagcataacctgttgttgttgcatcacaaaccagagcgaccgaagcgtgaacataagggcaagatagcggtggcagaaagcgatatgcgctggtgttcagatggcttcgagttcggctgcgacaacggcgaaaaactgcgggtaacgttcgcgctggactgctgcgaccgtgaggccatagactgggcagcaagcacgggaggctatgacagttcgaccgtgcaggatgtgatgctgaggtcggtggaaaagcgcttcggcgacaggctgcccgacacagcggtgcagtggctgacggacaacggttcagcatataccgcgcatgaaacgcggaggttcgccaaagagctgaatctggagccatgtacaacagcggtgagcagcccgcagagcaatggcatggccgaacggttcgtgaagacgatgaaggaagactatatcgcgttcatgccgaaaccggatgtgagaacagccctgcgaaaccttgcagcggcgttcacgcattacaatgaaaatcacccgcatagtgcgctgggatatcactctccgagagaataccggcggcagcgggcatcgttaacttaa

SEQ ID NO: 143383 - DNA, 1950 bp, Enterobacter cloacae
atgctggatcaaacacataaaactcagcttacttcgctaaaaaattttagcatcaaccgaataaatgaacatcacgaaaatgaaaggataagtgcctgtgaccaaaaacatcggaaactatcattagaaagtatagcgcttcactaccagttttttagaacagaggaagtaagcgaggaagaatcagagaaaaggcttcaggaaatttggaagattcttgatgttcactacacagatttaccagataaagaacaagaaagttatcaagataaaacatggcgtttatatttggcccgtatggacaaaaggaaaatgtcacctgaagtgaaggaagtagaaaatggcatagcaattgatttcaacccagagattgattcagagcttaaggaatatagtgaaacgtctctgcgagaagcgagcaaaccgtttacatattccggtttaaatatttgggctgatagcagactctataatagagataattacaaaaaatatgaatcctatgaaaatgacccactgactgctttgggcgaggcaaaagaaatatggaatcaactttcagaaggtaacatgggggaggaattactattttgtcgagccacaccatcgtatgtgtgcgctgtgttattgcgagactttaaggaaaaattagcaaaaaccgaactagaattttgtagggaagtcatatttgaatatgtaaacatcgttaacaatgatgattacatgcaccagatcggcgacggccttgttcctgctttatttgtgctcccaatattaatagaagattttccggacgaacgactaactatcaagctgctattaatcaaagcgctaatgaggcatgattcaatatctatgatgggaatggacaggataagttcagtagccattcaagcagttcagcacctgtggaataaagaccctcagttcatgaaatcgctgtacgttggttatttagtaatatctcaaaaatatagagatgttcgggagcgtttaaaacaagaagcatataagcagcacagatatgaaattaacgacaaagactttgagcatgagttatctaatgaattagagagtgtagtgagaagtattgaagatgaaaccatcacggaatccgcaatagacaatattgaaagcatagataatgatatattgataactgcttttcagcttgcactagtggatggcgaacacaagaaaccagtaccatttgctgaggaaattattgggataatttcacaacaattgctttcacgagacagaaaagatcggattgattataccttcagacttcaatttttaaagcactatgcccgttttatccttcatctagagaatagcgagaaggacaaataccttaagtgttttaccgctaattttaccttaagtgaaggtatggcagatttgctaaatgaatttgttagcgctgaagactcattgaatatgccggactcattttggtatgtttggagtatatttaaaggccacgtcattgattcaataaacaatcaaggttggaaacatgataaagatcgcataatcgaatcctttttatttgcaagagtcccttggcaggatgaagcaaaaacatggcatacattttcaccggagaatagattattttttagtgatttaagcggtaagataggtggtgaatcatcttttatttatagcatctgtaaactcctttgtggcataggaagcgaatttttagatgacgggatttattggatcagtcatgcaattaagacctttgatatcgatttatcccaagataaatcagggaatacactatttttgttggaaagatatatgagaagatatctatacaaaaatcatgacaaagttagacgaacaccaaatctaaaagcacagtcaatggttgttctggattttctagtcgagcaatattccattaccggttaccttcttagagaagatatagcctag

SEQ ID NO: 143384 - DNA, 324 bp, Enterobacter cloacae; identical to SEQ ID NO: 141613

SEQ ID NO: 143385 - DNA, 669 bp, Enterobacter cloacae
atggctcatcaaatcttaagccatcagcaccataatgcgccatcttataatggcgttgcaggcgtctatcagattaccaacaccatcactggtgaggcgtatatcggctctacggttaacatttcaggaaggtgggcgagtcatcgctataagctgcggaaaggcacgcatggaaacagaaaccttcaggagtcatgggataaacatggcaaaggtgtctttgatttctccgttctggaagtagtgagtaataagtcagagcttattgccgccgagcagcgattctttcgcgaattaaacccgactttcaacatcgcgccaaacgctggtagctgtctcggggttattcacaccgaagaatcaaaggcgaacatggcggaaagtcgacggggagaaaagaactgctggtatgggaaagtgccaccctgcgctactaagccacgaagccaggaattgaaagatgcgttatcgaagcgtcactctggcaaaggcaatcccatggcaggagtgacacctccacatgccaagttcactgatgaccaggtcagagatattcggcgcgccatttcagatggtgattctcttaccactatcgccaaaagatatggtgtctcaaaggctaacattgcccacatccggcaagggcggtcatatacgagggttatctag

SEQ ID NO: 143386 - DNA, 966 bp, Enterobacter cloacae
atggctactacaccaacaaacctgcctgtttcaagcgaatcaccgcgcgatctgaagtttaacgctgggaaaattgacgagttcgttacctcactggtaaacacttatgtcgaccggttcgggaatgagcattacacaatcgaaggcttgcgatggctggcgcagcaggctatttctgcgtttggatacgtgacgctggatagctttgaagatggtaatacattgtcgctgcctaatcaggttcttcgatttgaagctactggtgaatattatcgctgggatgggcctcttccgaagtcggttccatcaggatcaacacctgaaacttccggtgggataggtcctggtgcatggttgagtgtaggcgatgcggtgctgcgatccatgcttagcagccaataccttatcagaacgccagaatcttttggtgctaagggtgatggcataactgacgacacagcggcaatgcaattagcctttacttgggttgcagcagcaaatggcagaaagctagcctcaggccccggtacgctttaccgcatcacgtctacgattacagctgatttcaaaggcagaaaaaactgctcaattttattttcgactcctatatttgctgacaccaacgctggaatttgcctgaagattttagacacgctcatgtcggactttaaatttagtttccaaggagggggtgtttggtctggaggaactccaacctatggtacaagtacaatgccgacaggggcgcaaattggagtgttcattcaagcgtgccgtcaatgcgggtttgacattcaagcggaaaactacaaaggccgtgtcatccatgttaccgaacgtaattctgatggagtaaccgggcagacttggaaaacctccgggcttatgttccacaggattagcacaggcactgcggttgtagactggccccctgaatctccagacagttggtatcacttaagttag

SEQ ID NO: 143387 - DNA, 369 bp, Enterobacter cloacae
ttgcgagtcagtgaagtcagcaacccatgcgtattcatccgcgcccgccgcaaacttagctttggccgcccgatcgagacgctgctcgcgctcccggtaggattcacccaccagcgctccagagttagccttgagcggttgagccagatcggcattgaccatcaggccaacgccctgctctggtgtcgccgcgccaacctcatgaagcagaatggcgtcatggtccatgctgtgaatcttcgccacccactcggcgcccgtagctctctgttgttcggtaggctcaagctggtcgaggaaagcggcgacactggtatgaatgggcggaacgtcatcgccacgctcaatagctgcaacgcgctcaagtag

SEQ ID NO: 143388 - DNA, 927 bp, Enterobacter cloacae
atgacgacgaaaaagacgaagccaccaattctgccgcgtaactatcaggatccgaccggagccgatgcgctggaacgccgggcaatgaaagacttctccaggcggatgaataagattggcaaagcgtacaaatcagcactcgacaaaataccttcctccctcgcagtaaacgccagatacgaataccagctaaacccaacgctactctccatcatcctgaacgatgccagttacctggtggatcaggtgctgcttgaaggtggcgattacgacctgtggttttacgagtacatagatctggcttcggagaaagggaccgggcagtcgttctacaacctcagccagcagtcgccggtgtacgccgctggtcgtgagtcgttagcgtccatcctcgcaagcgacccgtaccagcaacgaatggcgctggtgcatgcgcgtgtatttgaggaaatgaaggggctgagcgctgacgttaagcgcgacatggcgcgcgtgctgactgatggcgtggggcgcgggcttaatccgctggagattgcgcgcaacctgacagaccagaccggaatcgagaagcgccgggcaaaccgtatagcacgcactgaagtgactaccgcgctgcgccgggcaaagtgggatgaagaccaggaggcgaatgacctattcggccttaagacccttctggttaacatctcggcgctgtcatcgaccacccgacatacccatgcagtgcgtcacgcccacctctacaccaatgaagaggtccgtgactggtacagcaaggatggcaactccatcaactgcaaatgcagccagcagtcggtgctggtggatgcggacggtaagccggaatacccggacaccattacgaaactaaaacaggaatataaatcgatgcaggcgcgcggttacgcctgggcggagaaataa

SEQ ID NO: 143389 - DNA, 201 bp, Enterobacter cloacae
atggaacagttcgatacagatgatggccgtccacaaatcgtcataacatttgaatacattgatccagaaacaggcaagaaggtttttgtctcaagagctgttgataaagcaacatatgatagcgattcgggcgctttgtatgcggaagcagaaatgatggctcaagaatttaaatatcggatgaaagaagagggcctgtaa

SEQ ID NO: 143390 - DNA, 639 bp, Enterobacter cloacae
atggctaacgatgacgagcgcaggccatacccgccagttaacttcatcgcctccgacaactggcagccatacaccagactgatcccagccaatgaagtgcatgagtgggtaaatcgccaaatcctgagcgataccggcagcatccataaccatgaccacgagcacttggttgaggccgatctctgcttcatgtgggcgtcagactcattcgcgaagaaggggcgctacgtcctcggccaggccgaacaggtaatgctccgtgccggtggttggcagaaagccagaatggaacagcagatgcatgaatggttcgggcgcatcccaaagttcatcatcacgctggcagccgattactgctcacaatgcagtgacctcgaattttgcgcactggtagagcatgagctttaccacatcgcccaggccaccgatgatttcggcgcgccaaagttcaacaaagagactgggcagccagtgcttacactgcgcggccacgacgtcgaagaattcactggtgtcgtacgtagatacggtgccagcaaagaagtacaggagctcgttgatgcggctaatgcgccagcagaagtggctcacatcgatatagccaggtcatgcggcacatgcatgctaaagctggcctaa

SEQ ID NO: 143391 - DNA, 219 bp, Enterobacter cloacae
atgtccgacatctaccaaatcacgctaaccacccaaacaggcgaaaccttcacgggcaagatgtcacgacgtcagcctgagttggttaacggctttgtgccgctggcgactgaaacgggccagtggctgtatttcgctcctgccgatgtgaagcgagtggagttcacgccggtaccggcagaggaagaaccggcagaaactgaggagtccgcatcatga

SEQ ID NO: 143392 - DNA, 606 bp, Enterobacter cloacae
atgcgtaaaccatcccgccgtaagtgcaaagtatgcggtgaatacttcctgccgaaattccacgacatccggatccgctggtgctgcccggagcacggagcaattctcgcgatggaagaacgcgagaaggagaaggtgaaagccgaggccaagcgcatcaaggagcagcatgaagcagagaaagcagatcgccggcgccttgctgagaagaagcaacaggttaaaccgctcagctacttcatcaagcaggctcagcaggcttttaacgagtttatccgctaccgcgaccgccatttgccttgcataagctgtggccgccaccacgaaggccagtaccatgccggccacttccgcacgaccggggctaatccagagttacgcttcgacgaagacaactgtcatcggcaatgtgccccctgcaataaccatctctcagggaacctcatcaactaccgacctgcactcattcagaagatagggcaggctcggtttgatgcgctgatgggcccacacgagctaccgaaatggaagcgtgaagattacatccgcattcgtgacgagtaccgcgcgaagctaaaagcacttaaacatcgggaggctgcatga

SEQ ID NO: 143393 - DNA, 1743 bp, Enterobacter cloacae
atgacccagaaaaaggaattgcagtcggcacgttatggattttgggggtattttattttgattattggccttgctggtataactgcgtttttgctgtttattaatcaggatgccttgcttaagtatggtctggcatatcgccaaattatgtctgtatggggtggtgtgttttgttttttatttttaggcactgtttgctctcctttttattggcggaggaagcaaagaaaaaaacaacgcaattatttaccaccggattcctcgggggctgaaactaaaacaaatcctgatgtgatgacaacaatcacagattatacagatttaaaacagcaccttaatcttcgttatagagtcttttggcgtcgcaaagtccggttattattaatcaccggcgatgaagccgcgattgaacaactggtacccggcctgcaacagcagcagtggcttgaaggcaaccgcaccgtgctgatttacggcggcagcctggcatcggagcctgaccgcgaaaaatacaccgcgctgcgtaaactacgccgcgggcgcccgctggacgggattatccgtgtactgcctgagtcgcctaagttgaccccacatatcagcgacagcgatttacgcggcctggaaaaaatcagcgaactgctgcgttattccgctccggtctggctgtggcaactgtgcagcagtcactggtcgcagggtacgcgtcctgagcaggcggtaggcgcaagctttccaccacgcgcaaaagaagatgatgtaatccgccagctggaactgatgctgccggccctgcgggcgcaggggatgagtcaggtcgcggaaaacagcagccacgacttcctgctgcgcctgagccagcacctgaacgacggtgctattgcccgctgggctcagcagttgcagccatggttctttgtttctcagcagcgcgtcccgctgcgtggtctgatgttcagcctgtcggagaagaaacctgccggaatgtcagcgggaacagccgacgctgagaattatggatcacagcgtcatgccttgactctgccagcaacctggcagggtattgttgacgactgcacccgcgtacgtggccgtcgtgtcggtatgccgtgggaacgagcgctggcctggtcactgatggccatcatcagtgtctgggggggagggatgctgctgtcgtttgcggtcaaccggtcacaaatagtttctgttgcacagcaggctcatgctctggtggagcacccttctgtatcggattaccagctgacggccctgcatgctttgcgtaatgatgccggtcgcctgctgcaccatattcaggacggcgcgccatggtatcagcgctttggtcttaaccatgatcagcagttgcttgacgcattgctgccctggtacggggtggcgaacaaccgtctgatacgtgatccggcaaatgaagcgcttaagcagaagctcattgcgctggtcaattcggcacccaacagcgaccagcggacacagatggcgaaaccaggttatgaccagctgaaagcctggctgatgatgtcccgtccggataaagctgatggtgcattctacgcgcaaaccatgaaaaccgtgcagccgacgcgtttaggtatctcaactggcctgtggcaaagcctgtcaccggatttgtgggccttctacatcaccgaactgcctaagcagccactgtggaaaatggattggcccctatatttccatacactttttatcacttaa

SEQ ID NO: 143394 - DNA, 162 bp, Enterobacter cloacae
atgatgacagtcacccacaacggtaagcagtacaccgccaaaaaggtcaacgataacgagtggcagctgacgtcggtatcggcaccgcgtgaaaagctggtacttaaccgccagcagatgcatatcactggcctcctggaacaggttgaggtgaaggtatga

SEQ ID NO: 143395 - DNA, 261 bp, Enterobacter cloacae
atgagcactgtaaagatgattggcgccagtccactaactggaacaattttcgaaggacgacttaacccagtcaagagttgctgggttggaaagaaaacagatgttaccgatatggttctgagagctaccgctgaccacctctacgttgtgaaaaaggaatatgcgttcccgttacgagacggaaaggtggctgtgttgagcatgcagattttcgatgaaatgccagagcgcttcattggtggcacggagcatggcgaatga

SEQ ID NO: 143396 - DNA, 153 bp, Enterobacter cloacae
atggataaattgcgctggttgattatcggtgtccttctcttcctggtgattgctgtcgatttcaccgggaagttgatgtcgatgctggctgacggtgtgttagtggcaggcgtagttgctctggcatacccaatgattaagcgaaacacatag

SEQ ID NO: 143397 - DNA, 567 bp, Enterobacter cloacae
atgcattcacttgcgtatcaacagagtaccggacttgaacaacgtccgttgatttcgatttatcaaagtgttccgcgcaataaccgtaagctaactcgaatacgggaggcagttaaggcctggcaaaaagctacgccgggccagtctcaggttcacatttctcagctggttgcgaaagagtggctggcgcgcggcgggaaggggttgttactggcaggttctgaacacaacacgaagcagaacttcttccggatgattaacgatccgggcccgaagaacgacaaggggttgatgctattgatccccgtcattatcgacgtgatggcgcgggataacgagaaagtggcgagagagttcggtctggtcgcaaagactgaggccgaactgatagccgaggccatgaaagagtgcactgaagcgcatcaggcgaagttacttggtcagccgatacaacgccttgagaaagaggtgagagaagctgctgaagcactgctgcgcttcctgccaactgaatcaatcgctgcggtggtgacaagtctggccgctatggcgccgggagttatgtga

SEQ ID NO: 143398 - DNA, 348 bp, Enterobacter cloacae
atggctcgtcaattttccacgcagaagaggctgtctgttttcactaagacctctggcaagtgcgcttattgcggcaacaccctctccatcgaaagcatgcacattgatcatatcaagccgaagaaacacggtgggaataatgatctcggcaatcttaatggctcctgccgcccatgcaatacagcgaagggtgacagagatttagatgactaccgcctgcacatgatgattaaaaaatctgaattcagtggcgtgatcaccttcaagcaatggcaggacctcaatgaaagaggggtgctaattaacctcccgacccacttatttcactttgaggttgagtccttatga

SEQ ID NO: 143399 - DNA, 504 bp, Enterobacter cloacae
atgtgtgaattaacccaagagaagttgaaatctttacttcattacgaccctgaaacaggaattttcacacggaaaaaaggtggtggtggaagagctgcgggtagcatggcgggttgggttaatgggcatggatatattcaaattagcgtagatggaagggattacaaagcccaccgccttgcaatgttatacatgtacggggaaaggcctgaaatggttgatcacatcaacatgattcgttccgataatcggatagtgaatctccgggcggcaacacgcgctcaaaatgggcagaactcgaagacaagaagcgataatgccagcggagttaagggcgtgtcctgggacaaaagaataaacaaatgggttgctcgatgcacctgcaacggccatgaaacctggataggctcatttgaaagcaaagagggggcgattgaagctgtgaggttatttagagaaaaaacacacggtgaattcgctaaccacggggaggccgcccaatga

SEQ ID NO: 143400 - DNA, 198 bp, Enterobacter cloacae
atggaatttattgctttcagtgaaggggacgtggttgctatatcaggtgatgatgatgaatggcttgtggagcaattccatcctgattctcccgatactgacgttactatctataacctgaggactggtgactatattgctcagaattacaaggatatgcggcgaaggatagtcagggtaatcaggcatgaggaataa

SEQ ID NO: 143401 - DNA, 156 bp, Enterobacter cloacae
atgactatcaatcatcagttgctgcggcttgcgcagcagaaagctcgtgacgccaaagcgcagcgcaatggcgccaaatggatggaagccaacgaagagatgaaaagagctgctggcatgccgtggtatcgcggacgtcaggtttcgacgcagtaa

SEQ ID NO: 143402 - DNA, 159 bp, Enterobacter cloacae
atgacagtcacccacaacggcaagcagtacaccgccaaaaagctcaacgataacgagtggcaactgacgtcggtatcggcaccgcgtgaaaaactggtgcttaaccgctggcagatgcatatcgctggcctcctggaacaggttgaggtgaaggtatga

SEQ ID NO: 143403 - DNA, 597 bp, Enterobacter cloacae
atggttagctcaattgttgatggcttaccgaaaaggtgtggcaaatctcaatgcaatgatggggcggttagaaagcaaggtcaccaatttctatgcgccaagcattatcggttcgggcagatgagggttttagctaagcggagaggtctcgcagttccttcacatgaggttttgcatggactgtgcgacgaaagattaatttgcccggattgcggaaggctaatgaattggctgtcagaggatgggatgtcttcagtggcatctcttcagcactacagggatggttcgtttggaatagtgtgccggtcatgcaatacccgacacgcttacatgcagggagatagcttcagagatatcccctccgaccacaaatattgcccctgctgcaaaacatctaaaagccgatctgaattttatgtggatgccggcagatctggcgagctgaaaacaaagtcgcactgcaaaaaatgcagcgatgaagccatcaataactggagaaaatctaaccgtgaaaaatacaacgatcagcaacgaaactacagagcaaaacggaaagcagaaggcaatcccgttcgtggaagaggcaaatctgcgtga

SEQ ID NO: 143404 - DNA, 507 bp, Enterobacter cloacae
atgatgcttactcagaaacgcctcaaggaactatttcactacaacagctatacgggtgtcttcacaagaataaagtctacatctagcagggctattaaaggcgatgtcgctggcacaactaactctcatggctacctgcgtttttgtgtggatggcgttgtttatctttctcatagactcgcatggctatacgtacatggagagtttccagaaggaataatggatcacatcaatggtgacaggaaagacaacaggatcgccaatctccgtattgtctctttaaggcaaaacgcgctcaacaggaagatacagtccaccaatacttccggaataaagggcgtttcttggtgccggaactctaaaaaatggaaggcctcaattatgtatgaaggcaagcacatcaacgtgggctctttttctgataagcaggaagctgctgaagcgataaaaaaagctcgtgcagagattcatggtgagtttgcgaatgatggaggtaacgcccaatga

SEQ ID NO: 143405 - DNA, 591 bp, Enterobacter cloacae; identical to SEQ ID NO: 143382

SEQ ID NO: 143406 - DNA, 219 bp, Enterobacter cloacae
atgatagaaaactattttgttaaaaccagtaaaacagaagaagctaatcagagggctcggcgcttacatgcggttaatgcacgtctcgagattgggaaagcgtcggtaagaactgctgatacggaaaagctcgctaaactgatgtttagtttgagtatattgcgctgcttttggcagattttgccgatgttattcagtgttagccacttaatttattga

SEQ ID NO: 143407 - DNA, 309 bp, Enterobacter cloacae
atgcccaaattagctattagcttattgctttacttggcctgcttttatgcagttggatacggcgctggatatataacaggtggaataacttggcacacactgtatatgcttgaacgtataatcaccgtagccctacttgcattcattccagtgtttatctttgcggttttaataaaggcatccaaagaacagagaataataaaatcactttctgtcgcagcaattaatatcatcccttcggctatcgcattacttgtggggtttactgacgcagtgaccagagaatttcttacttactttctcggttaa

SEQ ID NO: 143408 - DNA, 192 bp, Enterobacter cloacae
atggctatgattgacccgcgcactccagaaggccgtttgaccctgcgttaccgtggtcttcccacttctattttgttgtcgatgcttggagtagacaaagcggctacgaataaccgaccattttattctcgcaatgagctaatagaacagttggtcattcgcactatgtcagttaaccgagaaagtaagtaa

SEQ ID NO: 143409 - DNA, 486 bp, Enterobacter cloacae
atgtctcaacaagaatacaccatccatatcttcggtcaggacctcaccagtcaggacggattgtttcgactggatgagatacgacgggtcggcattcagattggcacagttgcagatggcaatagtacagaagtcagacgctttgctcgtaccaacgtcgggcgctatcttatgggaccgaaaagtggtcgcataaagaaagtcgatatggggcgcctcggtacgtcatggcttgctgaccccacgtccgctgtcaagtttggcgagtggctggactttgagtatggaatagctgtagcggatgccttcgtgtctatgacatccagtgccaccgtacaggccgctgtaacatcttcggatgatatctcgccggactctaagtcattcattaagaagcacactgtatcgcactacagggctggacaactcgtctcgaaagaggagtttgaggagctacgggtcggtcgctgtgagtggagactttaa

SEQ ID NO: 143410 - DNA, 1050 bp, Enterobacter cloacae
atgctcctcaacaaatacaacatagacacatgctcatcgttatccattggaaatgatgctcatggtaacttattaaaaataagaattgacaaacttactatagtaagtagttttactgacaaatttgaaatgaaatatatctattcaaagcttaaaaaaatattcaacaatagacacaaaagatattcaattttttatattaaaaataaagaagacatgccatatcgaagtgcaattttgataagaagtaaatgcagaagaaagcctgttatattaagaatagattactctcccataaacaaaaatacaggtggtataagattcgatttccatccacaacatctcacatcaaagaaaattgatcacttaatatcatggatgaataagcaattggggggattatttcaccaattactatcgagagcatggatcacacagatagatattgcattggatctttattcccggcgcttagatgattatatatggggtttacaaggttctgcttcagcagaaccttatgacgagcctcagggattacccggcattcgtgtaggaagcaaacgttctaaagtacatattctttgttatgagaagattaacttgggaaaagataaagattcttcatatcatagaaattcaaagtttattaatgtcaatttaagtcaacacgaatcatttttgcgtattgagtcgaggtacaggcctaacgcgaagcctacaagcaattatggtaacccattgatgctttctcatcttaattatatggaaaatgcctttaaccgacttcagatatattcaaaagatctagcaaaagagttacttaaaaaagggtatgtcatcaaaatacctcgagagcctagtataaatgccttaaagaaaagagttttaagagacatgaactgctctcgtctaccacgtcgggtgcagaaaattttcgatagtaatagagtttatttattcgatatagatgctatctggaaaagatggccactttatattaaacaattaagcagcataactgatttaactacttcattcacaatataa

SEQ ID NO: 143411 - DNA, 1335 bp, Enterobacter cloacae
gtgggatcgaataaaaaatccatcaaatccagtggttccaaacgtgttaactcattctttgctggtatcggtggatttgaccttgcatttgaaacacaaggattcgtgacgactttttattgcgaaaacaatgagttctgtcgaagtgttttaaaacgacactggccaaacactaataattttcgagatatcaaagagttaactgctttcgaaatacctgacgcagaggtttggacggccggatttccatgccaagacctttcacttgcacgtacacctcatgggaaacgcaacggcttgaaagggacccaatccggtcttttttatactttcttagatctcctatcagttagaaagcccaaagtggtcttgttggagaacgttgcaggccttttaagctcccataaaggtaaagatttcaatacattacttaactcattaacagaactaggatacgcggtttcttggagagtgctaaatgctcgttattttggagcaccccagtcgcgccctcgggtctttatttgcgcttggcatgggtcacctgaaaaagcagtgagagcattgtatgaagataacatttctcataaaccaaagaacgagcgccagggttttttgaaagaatataaatgcgaagaaacaggaatttctgtaccgcaaatttccttctgtatatcagctacatctggaagacatacaggtcttgactgggctagaacttatatttcatattctgataaagttcgcagactcactcctttggaatgtgaaagacttcaaggtttacctaatgattggactttgccagacaacgattatgtcattccgattaagggtattgaaactagtagatatcatgctataggtaatgctgtatgtgtaccggttgtaaaatggatctcatcgagaatttcgaaattactcgaagaagatacatgcaccgttgaaccttttgagcttttaactaagaaggttatgtcaaaatctgcagccatagaagaattaagttcagacaaagaagaatataaatggaaatctggtggagcaagctttgaacgattttacgtttcagttcctgtctcacctagtccattaactcctgtggaatctcaactaattgatattattgagaaaaatgatgtgcacgaacgttacttcctgagcgtaaatgctgtacaagggatcttacgtcgtgtagacaaattaggtagaaatttgttttcaccgctagatacaaccttgcggttaatagcaaaagctactcctgaaccaggcgatgtaaatgatgattacattgacaataaacttattgtaaacaagattggttgctcatga

SEQ ID NO: 143412 - DNA, 867 bp, Enterobacter cloacae
atgaaaacagaatttgaagagaaagattttgaggctcctttatacaatgagttaaggtttggaagtcatcgaattgctactcccggacaagtgtttgaaggaaaatttggaattgatgcagcactggaggctgaacatcctttattttgggatttgtttggttttcatgatgttccaaagggtgtaatacttgaagatcttagatggggattcatgtggcgtcagcttagaagaaaacgtaaattacccactttcaacacaaatttattgatccaagcaaagcgtccaaccccaatgaatagaccgtcatctatcctaaaaggctatggtttttctagcaagttttggcgatttgatataacagtacatcagcaagaaattcttgaaagagtatcgcgaaatttgcgtagaaaggctcttgttgtatacgcttcacctgcatttcattctctagatgaactttatgagtttactgagagtcagttggtaatggaaaatactaattttgtcaaggttgaacgattacataatcataaacagtggaactactatcaaccaggtacaaggggtgttgcgcattcgacacctgagttcatagacgatgttccattcggctcaatgcttagacaagcagttgagcttaataatgaagatggaaatgtttctgaaaatcttagtttccttcatgaaaggacaattgaagcatgcaaagatattcaggaccacaatccaatagcaagatattatctacgacttcaagaccgaattatgggtttgggggaaatatatgaactcaaggaaacactacactatgtttcttttaatttgttttgcaatgttgcgaagttgagatggctagtcctatag

SEQ ID NO: 143413 - DNA, 960 bp, Enterobacter cloacae
atggcacgaaaattaataatattcggtaacggtctcggcatggctttagatcctactcacttctccttagacagggcgttggcagaaatttggtatcgtcccaattttttaaccgatatccacaagcaacttgtcgagcgttgtcttcagcggcaaggtccaccagcaggggaacatgagctggatacccttcaccaagcaatcacatattgtaaagcactcgctcaaattggagaaggaaacgtgcattggcttactgaagatggcctaagtttccccgaaatcaccgccacttatatccacaaagttgcaaccaagttgcataattacgatgaaggtttgccgcaaatattcgaaaatgcgcttgtggaatttgtaaaaactacacgtactcatattgcaacattaaactatgacaaattattatacaactcattcatagataatgatatattcagcgggtatgatgggtatttagttgatgggatgttaggtcacggattttcctctgcagcgctcgaacggaaatatgatcgtaggtttggttattatttgcatttacatggctcaccactatttattaatcagggtgaaaatgttttaaaactttcacgctctcaacttacggttgacagggatgaacctagccaacatattgtgttaactcatataaaaagaaaaccgtcagttatagcagcatccaatgttctttctacgtactgggactatttgcagtttgcattatttgagtcagaggaaataatactatttggttattctggtctcgacattcacctaaacatgcttattcggccttacctaacctctaagcctttaagagtagttgagtggagcggtgcaggtgaacaaaacgcccgtgaaacatactggagaagtttgttgggacgggcagtaattgtaacaaggttggataacatcactgattttatcgattggtag

SEQ ID NO: 143414 - DNA, 591 bp, Enterobacter cloacae
atggaaagcctgtctttagataacaacgcaaacagcttttcaaaacgcatttcctacacagcacaggctaccgacgatcagaaaaacgttttcgtaaaagcctcctctgataatccgatatctgtgggtgccgctgcacttacatcgctttcaatcatcaaccctatcgttgaacagcagaagatccaacaggctaaggatgcccagcagagccaaattgaagcgcaacagcaggctcaactcagggcacagcaacaggcccagtacgaggcagagcagcaaattgagagacagacacagctgcaggcacaagaaaatgcagaacagcaggcccaacagcaaaccactgggagccttgatcagtcccgaatggcctttgcgaatgccgactctgatttgaataccgcctggagcacattaacatcggcgaagaaaaaagagttactgccttctcagcgccagtggatcaaaacaaaggatgctatgtgtggcaaagtttcaatgcagggaactgattcagaagttaagaaaatggtcgactgtcagacgcaaatgaccctttcaaggactgctttcatcagaacacaataa

SEQ ID NO: 143415 - DNA, 324 bp, Enterobacter cloacae; identical to SEQ ID NO: 141613

SEQ ID NO: 143416 - DNA, 678 bp, Enterobacter cloacae
atgtctacccctgcaaacttcaacggtgcacgtcccgttattgacgtcaatgatgccgttatgctgcttatcgatcaccagagcggattgttccagactgttggagacatgccaatgcctgagctgcgcgctcgtgcagcagcgctggcaaagatcgcctcgctggcgaagatcccggtgatcaccacggcgtcggttccacagggaccgaacggcccgcttatcccggagatccacgccaatgcgccgcacgcacagtatgtggcacgcaagggtgaaatcaacgcctgggataatccggagttcgtggcggcggtgaaagccaccggacgcaaaacgctgattatcgcggggacgattaccagcgtttgcatggccttcccgtccatcagcgcggtggcggacggatataaagtgtttgcggtgattgatgcctccggcacctacagcaaaatggcgcaagagatcaccctggcgcgcgtggtgcaggcaggcgtggtaccgatggacacagcggcagtggcctcagagatccagcgcacgtggaaccgtgaagatgcgggagaatgggcagaggtgtacacacacatcttccctgcctaccagctgctgatcgaaagttacagcaaagcgcaggacgtcgtgaaaaacagcgaagtgctcgattcgcagcgttga

SEQ ID NO: 143417 - DNA, 249 bp, Enterobacter cloacae
atgtgcagggtgaatgccagattatcagcgtgcgtaaaaatcgttaaatcaggtagttgcgaaggtcgtagaagaagacccgaacacaagatttatcgcgtgttacactcctattatcggcaccatttcaagctcttcccaggtctaccgaaatcaactaaaagcccgtatactgcggtttctggcccgtatcttatctcctgttatcaactgtgctcaaccgaaatcaagttacagttgggggcataa

SEQ ID NO: 143418 - DNA, 507 bp, Enterobacter cloacae
atgcggcgctgcggcggcatccaactgaaagcagaactcagcattaagggaagcgaagagggctggaggagtacgccagaggtcacgctggtcgagcggtgttttacttccgccataatcaccattcaacttctctactggcagcgctgcggcgatgcgctcaccgatccagcgcataaccggcacagccatagagttacctatcgccttgtagcgcggtccatcggccgcccgcccgcagcactcttcaaacgtcatctttccaccgcgcatcaagtatttggcaaaatcacggtccattttttcggggcttactttgcgaccgtattcaatcaaggtgtgatcgtcggggaatccctgcaggcgctcacactcacggggagtcaggcggcgaacctgcataccccacccgatagctccgacccccataccagcgcggccgccattcggtgtcaaaagcgcgttggcagttccgtcatttctcacttcgaccgtgctcccttctga

SEQ ID NO: 143419 - DNA, 165 bp, Enterobacter cloacae
atgcctgaatggacagcagaagaagttgcatacctgtggcgccacacaaacgcagaagtctcagagatgaccggacggagtatcgaagaggtcggagataagcgtctggctgtgaatattgagcgtaatggctgggatgttaacgatccggagcgtacatcatga

SEQ ID NO: 143420 - DNA, 402 bp, Enterobacter cloacae
atgtacgcgctgaatgagttcgatgcggaaatcactgaagttggtctcatcgatcacccaaccatccccggatttgccgccagcccggacggacttgttaacgacgacgggcttatcgaaatcaaatgtcccaacacctggacccatcttgaaacgctgaaaactggcgagccaaagcgccagtacatgctgcaaatgcatgcgcagatgatgtgtaccgggcggaaatggtgtgatttcgttagtttcgatgatcgccttccgcctgacctcgcctacttcaagaaacgcattcacctcgatgaagccttggcgcgagaaatcgaatctgaagttaagagcttccttgcagatctggaatcggagattcagaaaatcaggatgcatggtaaagcggcatga

SEQ ID NO: 143421 - DNA, 324 bp, Enterobacter cloacae; identical to SEQ ID NO: 141613

SEQ ID NO: 143422 - DNA, 591 bp, Enterobacter cloacae; identical to SEQ ID NO: 143382

SEQ ID NO: 143423 - DNA, 240 bp, Enterobacter cloacae
atgaaattcattaatgttgctaaagatttttctaaaacaccgtttgggcgattttcgtcggatggtcctaacaatggtgaaaaattccgcaaggaccatcttgtctctgcgttttgtggtagcgattctgaacaagtgttagttgattttgatggtattgctctagttatcggttcatcattcttagaagaggcgtttggaggattggtacgattagaaaacttggaaaaatctaactga

SEQ ID NO: 143424 - DNA, 813 bp, Enterobacter cloacae
atgcatattgatctctctcaaataaaatatgcaagtgcagcagcatctgtattgctttttgctgtgttgaatagagcatattttgttataggacaaaggttgcgcgttcgatttacttttcctaaaaaagagacgaacccgcaagggcatagatgtatagtcagaacaggtttagcaagagctttggttgcgaatacccatgaaaaactcgatgcgttggtgcagcaggagaggtattttcagtcctctgtcacccccgaattggcgctttcaacgacgatgacaatgctgcagaaagctgccgttttggatgaaactcaagcaacattgctcatgatggggatgaatgaggctatgttgaacgttagaaatcatgcttacgaacatgatttctatactaagggtgtcgagttaatgggcgggaagcgctggtggcaatgcgcatggtttgatcctgagcaggatagagtggttttcatcatatgtgatctcggcatgggtatagctcaatcctatcaaggtgaagagatagattctgttgcacagtttatacttgaacaaaacctcgtttctgaagctctaactagtggtaggtcaagatttcgtgagcccaatcgaggtaacgggtcagaggatatcaagcgtcctattgcgctaggtactactaagtatgaaaagcttatggtgttctctggtggaagtctgtacgaaatggattcagatttatcggagactcgagccagaattgatacactgagacctagaattcctggcactatcatactttgggcactaacacctaacagggggtag

SEQ ID NO: 143425 - DNA, 492 bp, Enterobacter cloacae
atggcaataccagtctatctgtggctgaaggacgacggcggcgcggacatcaaagggtctgtggacgttcaggatcgtgaaggcagcatcgaggtggtggcccaggagcacaacctgtacatcccgaccgacaataacaccggcaagctgaccggtacccgtatccacaccccgttcctgttcaccaaggaaatcgactcctccagcccgtacctgtacaaggcggtgaccaccggccagaccctgaagtctgcggaatttaagtggtacagaatcaatgacgcgggccaggaagtggagtacttcaacacgaagcttgagaacgtgaagctggtgaaagtgaatccgaagatgcacgacatcaaggatccggcgttcgagaagcacaaccacctcgagcagattgaactgcgctacgaaaaaatcacctggacctacaaggacggcaacatcattcattccgattcctggaacgaacgcgccaccgcgtaa

SEQ ID NO: 143426 - DNA, 471 bp, Enterobacter cloacae
atggaattctcttacgacaaagaggaaggcgcgtgcacctgcaagatttaccgcaaagatcgcaagcacccgacaatcgtcaccgagtacatgggcgagtgcaaacgcaacagtcagccatggcagtcccaccctacccgcatgcttcgccacaaaacactgatccagtgcgcgcgtctggcctttggtttcgctggcatcttcgaccaggacgaggcagagcgagtgattgaaggaacaacggcagaggttcatgcgggccatgaatcagatagccgccgcccggaactgatcgcaaaaggtgagtccgccgcgcgccttggaaccgttaagtaccaggaattctgggtggcgctgagcgctgaagagaaacaggtgatcggcgcagttgagaagcgacgcatgtatgacttgagtcttgctgtcgacaacgccgaacctgtcaatgtcgcagagacggaggctgaatga

SEQ ID NO: 143427 - DNA, 297 bp, Enterobacter cloacae
atgagcatgatttttgtgctgctggtgaccggggtgatcatctggcgtccgtattttgcgcactatttcccgattcaggtagtgcgttatgcgctactgatccacgcgacctcggccattattctgatccacgccattctgatccatatgtatatggcattctgggtgaaaggatcgattaaaggcatgattgaagggaaggtgagccgccgctgggcgcagaagcaccatccgcgctggtaccgcgacgttgagcgtcttgaagcgcaaaaagagagttcggaagggttgaagtaa

SEQ ID NO: 143428 - DNA, 555 bp, Enterobacter cloacae
atgaaaattaatttatcaagtatttttaggaaaaaaaacgctcttcaaaaaatttatccaaggtcatcatttttccccctgattgaattaaagtgttcatatcctttttttagatccttagaaaggaataatatatatgcttattcatcaagaattatggttaaacctgaaggcataaaaaaaatagagagcacagttaaagcgcttttttgtaaagaaataactcaggaaaaggagtttatttcctttaagggaaaagcactgcactattttaaatttgaggagtttgatcagactgtaattgatataattacaaataatgttgatttcataagaaaaatactgtgtgaaaaacttgaaccaccagcacctgatgttgtttttccagattgtgattttgagtctcttggtagtttgcaaggaaatatagagttctggtgggatgtctattggtctcctttttggaacgctctgtctgaagaagataagatgatttatttacatcaaaacaatatatcaaatgggctaagagattttttaatgttacataactga

SEQ ID NO: 143429 - DNA, 885 bp, Enterobacter cloacae
atgactgaacaatcaactttaaccaatgaaactccacattcaacgtacgatgtaactgggttattaatgcccgctcgagcgtttttctttataattgttgatgaaccagggaaagatggttttttagtaagaaaaatatatgcatcgacagctaatccttacctctcgaaaatggacttggaaccactcagaatgctttctgagacagatcctgaaagatatggcttaatccctaaaaatactgattcagcagttagtgttgctgagcatgttatgggtaataataaatccccttatatttctacaagctcagcttttcctgaaggctctcccaggtttgatggtaaaacaatatatattgatgttgaaaaagcattgaaatcaggagcggagttaataacaactgatgaaatactaaaagcacttgaagaatacaaggcagaaaaccctcacttggaaaagcgtattgataaaattgctgcgtatgttagagatgtagataaggaaatattggttaaaggtgagaaagtgcctgcaaatgctatcttcacaccagaatcgcttaaatttgtaaaaggtatagcaaaggcagggcgagtggtacaggttgtggggattgtgttaacagcttatgatcttgagcaggcaacagaaaaatctataacaaccggaagtgtaaagcctgtcagcgcagaagttattaggcaagtaggggggtggggaggatttgtggccggagctaaaataggaaccgctaccggtatggctgtaggggtggagacagggcctggtgtcgtaattactgggcttatcggtgggataatatgtggtgtggccggatactacggcgcagattgggttgcggattacatagatgaaaattaa

SEQ ID NO: 143430 - DNA, 1770 bp, Enterobacter cloacae
atggatgatttaaccctgcgctattttgaagccgaaatgcgctatctgcgcgaggcaggaaaagaatttgcccgggcacatccggaccgggcggcaatgctcaatctcgataagcccggagcccgggacccgtatgtggaacgcctgtttgaaggctttgccttcctgatgggccgtctgcgagaaaagctggatgatgatctgccggaactgactgaaggactggtgagtctgctgtggccgcactatatgcggactatcccgtctctgggcatcgttgagttttcgcctgactggcgtggtctgcgtcaggccgaaatgctggctgaaggcttttccgttttgtcacgtcctgtcgggccgcataaaaccgcctgtcagtatcggacgactcgcgatgttccgctacaaccgctgcaccttgcagatgcccacctgcatactgaaaccgatggccgctctgctatccgtctgcgcttcgaatgccctgaaaaagtggactggagtaaagccgggatcgacaaggtcgccatattccttaacgcagagagtcctgtgagttctgcactgcatctggcaatgacccggcgtgtacatgccatgtatgcgcgtcatgccgggacgcatactgaacgacatcagtttgatggctggtgcaaacccatgggcttcgatgacaatgacggcctgtggaaaaaagccgatacggccttcagtggttaccagctgctgctggagtatttcagcttccgtccaaagtttatgtttgtggagctgcgcggtctcgacattatcgggctcactgcggccagcacctggtttgaaatcgacattgtactcagtgaagcctggtcatccgatctgccctttgagacggaagacttccggctgcactgtgcgccggttatcaacctttttaccctggaagccgacccgctgacgcttaacccgctggagaacgaatacctgctcaggccattgcgtcttcaggatggtcacaccgagatttacagcgtcgataatattcacggcgcggtgaagaatggcaagcatccttatgtaccgttcaccagcttccgacaccggggcggtatgatgcgccacgatgcccctgaacgttattaccacacccgcgtgaaacgcggtccctctggcctgtatgacacctggttaattctcggtggccgctcgtttgaactggagcagttgtccgaaaaaccggagtcactctcgatgcgaataaccgggaccaacggtcagcttccgcgtaaggcactggaaagtaccttgctggacagggtggtcaaatccggcaaggtgcccgtcagggtcctcaacctcacagcaccgacgatgccgctgtatccccctgcaaacgaccgctttcactggcgagtgatgagccacctcggctcaaacttcctcagcatgatggacaatcctgaggtcctgcggggcacgctggcgctgtacgactggaccgacgatgaaatgaaccgccgtcggcttgaagcaatcgtcgccgtgaaacacactctgatccgccgttttgagaagggctttatgctccggggtgtggatattgaggtcacgctgaacatggacaattttgcaggcgagggcgatgtgaatctattcggcgagatgctgcaccgattcttcgcgctctatgccgatattcacctctttaaccagctcacgctggtactgcaaccgacagggaaacgactgagatggcgcgagaatcacagccagcacgtaccgggctga

SEQ ID NO: 143431 - DNA, 1209 bp, Enterobacter cloacae
atgccagtcttgctggataccatccctgaaaaggcggcgaaggttccacgacctgatacccgccgctggctgctgttcctggcatttgtcatgtcaggaggggttgcgttaacgctctggaactggacgacagaacgcactggctttattttctggtttactgcgctgggattgcctttctgtctttggggactgcttttctccctgcgccggtttgcatacaaagcagagcaggtgggggccgagtcccggaatgtggagcgcgaaacgcttattgatcgcgaaatttgtcggggtcagcgctgtgcttggatactcgatacatgcgttcaacatttttcaggaaatagccctggtgcactagtgagagcacttaattataccgttccagcttcagaggcctcaacgccacgtggttccaaaaccgctgtcaggtatgcagccttagccagttttcagacagatctgaatacagaactcatcgccgccacgtcaactcttgtcgcccatgtacaaaaaattaccgacaccctgtcgaaggatattccttgctgcctgatgctggactgtgacgacgatatccgacccagactggaggagcacttcagaaatgaactcatcgccagaaccgggcgggtcttcagactccttgcgggcaaaggtcttgcggggtttgatgcctggctggaccagcgctgggacactccaggcattcttgcaggagtgacgttttcattgcctgctcagcctgatgaaggtgacgccgatgctattacccttgtggtgctcagcaaccgtaaagctgttggttatcctgatgcagtatgtctccatcgccctgaaaggggccaggaaacacggcttgtaaaaacactgggcagggcacttttatgggccgcaacagcgcctgaagcactaaaaacggcctggtatacaggaccaatcctttcaagcggaagtggctggaatatggcttgtgaagataacggggtgacattcagcttgtcaaaagacaatcatggtattgatcccgctctgggatatgccaaacgcgccgccccctggcttgctattattcttgcctcttctgcttgtagcggtaatggcccgcaggttatcgccgcacaacccgccgctgccaaagacgacatctgggtcgccgtcatcaccaaagaagaagttcgcaaggaatcgcctaagaatgtctaa

SEQ ID NO: 143432 - DNA, 369 bp, Enterobacter cloacae
gtgattgctcttgatagtgaagatattgatgctataaatttgaatgatattggctgtttaagtagttgtgatatagactttgattcagttaattatatcgggaagttgaacgataaatttaaaatgggtttgcacctcgaatataatgataataatgcttctggtttttatttttatgaaaaaatgaagaaaaaaataaatgtaactggtcgtcgggacggtgataggttgacgctgtcagcctctgtccctgagggaatggagacgtttgatggtctgttggagaaagggcagtttaaaggaatatggtcaaatgcagcagggaataaaaaatatcctttcaccttttatatgaagctaattcagtaa

SEQ ID NO: 143433 - DNA, 594 bp, Enterobacter cloacae
atgaaacaatttagtaatgtgtggtgttttcttttatcagtatgttccttttatgtacatgcaaacgctgacttagatgttacgaactgttctctaaaggaaagtatttcttgcgatgttttcttgaatatggaacgaaatgttgatgatatatcttacaaagttgaattggcagatgctgaaaatgggaaaaacatattcccttattttgatatgaatgaaacaacagaaagtgtctctttgcaaaagtatggagaaagatatgttttttcaaaagtgtatcttgatagcaccaaagctatagagtttatttcgtttaagtatgacaataaacacctttcacctgtaaactattattacattgagagttctattgattttaataacaacgtgaagaaatggtctggcaaggaatgtgatacatcagcagggaaaatgcctgaaaaaaaagatggcttactattacaagtagcttcagaattatgtgtcaatcaaaataagctatcatacggcccaaataaatataccggaaatgacatcttattttatctgtcacaaattattgatggtgttgaaaaaaacagctttctgtga

SEQ ID NO: 143434 - DNA, 2703 bp, Enterobacter cloacae
atggcagcagttatacctaaacagagttttcccgtcccttcagatgctaaaggtcaggagtttacttctgctgaagagctattattgaagcttgaacgcgaaaggtcgggactatatctggtgggaagccagggaatgtggcatggcggtatccatattactgatgccaccattccctggtgtgccctgagtacagatagtgagcccgaaaaagaatattgccgtgaaacttataaaggggagcaatttattcgttgtatggctgatggtgagatagttgcctggcgtgtctgtaaggattatgaggggcccgcgattgaatggcgcggtgaaaaactgtttctttcaacatcctttgtgttggtgaaacactatatccagccgggtgatacagaagaaagtggactgacatttttcactctgtatatgaatctggcgccctttgttgcttataaacagcagggaagccagtcagacagaaaagtggcaggagtccagcgttactacaccagcgcggaagatttgcaggcggggagcgcagccggaaaactggctaaagacacgcccgtcacgctgagtgatgccatagtgacccgcagcagcgacgggcgtcagtttactgaagtgaccattaccagtgagacgaaaaatgccgcaggagaaacgcttgcagcaggaacgaaagtctggacggtgtctgaccggggttctctgaaagcggcggcgtcagcgcccgttccgtcctggtgggcaaaatgtaccccggcttacactaatgagtcagaaggtgttgtgaactgcacttcgcgtacaaactgggcgtactatctgagcagtgacgatgttctgcaatataaaaatgcaggcagtctggtagccgatttcccgctttcatacgagcccggtaataccgcacagcaggtcatccgccccggcaagaactccggcgatgcagcaagaacattcagtctggtcactctgggccgggataaggataagttgaaaaagggcgaccgggtatgggtagtatcagacggtgacagtctgacgtcggttgcaccggcagcatccggtagtgaacccgtttttgatgatgtgtatgtaccttcagcgcctgtaccggtcaatgccggagacagtctcgggcatatgggtttttatcagctaccggaagaaaatggcaaacgctcgcgctaccaggtgcatatagagtgcctgagcatggatgatatggaaaagttcatcaccaatcctggaaaggcgggagaggatgcgccggtttatctgacctggaaagctgatgcaccgttgtttgacaagagcgataccggaataacagcaggcggtcgaaaaacaaaggggccgggtattctgacactggcaaaagtaccaggcgttgatgctgaggggaacacgctgtccagtaaccaggatgcggcatactatcagatacgacctgaaggtggctggctggccgcagccagtgttcagaaagtatcgcaatatgcgcttggtgagctcggatttgttacgctgaataaggcttcggaaagttttgacctgattgatgggataaaacaaccaaataacgtggtgaagggtattctggagcagttgtataaagcagcagaggaggaaacccgcaccactcacgcgctgaacaagtataactataaacggctgctggaattgatagacagtaaccaggacgggcattactcggagcaggagtatcttcaggcggttcataatgtgtcgtatcgcgaccatctgtaccgtgtgatagcgaagcacgccagtgaatggtattacggcaaggatgactcgctctggaagacatacctggatactttaaccacggacgcaccgttatggaaaacgtacctggaagcgtttctggataagatgacatggatgaaggcagtgtccgaaaaggatgtggcactggggccggaaccgtggcatatgcatcctatagtatttttggaggcgatgaacagttcatctaaatggtttgatattgaaaaatttattcaaaagtataaagaaaaacattctgtagtttttgggttctatgatcgaggaaacaaaataaccatcccagcattgactcaggactctgaagagtcattgcaaaagcttctaaatgaaatgaagaaacagtattataattactttgacgattttaatgaaaaatttgtctcgtatatgcttgctacaataagaatagagtcttatgactataggcaaaggttgttctttaaaccaattagtgaaaatatttcatatgacaaggcggaagtcgattatggttcaggtccaacggcatctaaccgacaaagagctatgttgaaccacaatacaaatattggtgatgggtataaatatcgcggacgtggtttagttcagttaacatggaaaatttcctatgagaaatttaaatccataacaggtatagacattgttactagtccagatctctgtcttgagctcagcacggctgtttcaattatgatgaaaggtattaaagatggtggtttcagggccgggcatacattagatatttatttgggatcaggtaaaaaggattactttaatgcaaggttaatcatcaatggctatcgacatggtattcctgataaggctgatgagtttaaggattatgctgaattatttgaggtgataataaatgaaacaatttag

SEQ ID NO: 143435 - DNA, 1482 bp, Enterobacter cloacae
atgattagcaaatcttttttatggaattatcggtggtcattactggtcgccgctttcacatctcttctttacattttaccttttatcgttcatgaaaattacataattgatgactggcttagatcggatacaggcgttacagcatgggaagacaatgccagacctcttgccagtgtagttatgtggctattctccctcggtacgtctggattcaggttctttggtgacggggttctactggacaccttcccattcactttgatagcgtcaacattttgcattattcttgctgcattgattgtcgtagagatgatttctatacggtcaaatggtcttattgcagtttcagcaatttctcttctgacaagtccattctggattgggaacatgctattcagacatgactcatttatcatgggtctttctgctttgtctgctgtttgtttttcagttgctcttgtaaaatccaggccacagagctattttttgggggtagtactaggatttgtggtattcactacatatcaggcatcagtaaacgtcatattctctacgatgttattgatcatatgctctaaattatatgctggagaatatgttaagaaacaggctccttatgttttaaggtgcgcaatctcactcattgtttccgccgtactttataaactatgcgtaaaacacgttatatctctaagtgaatatactcagagccatgaaagtctggtatctttcgatatgaatggccttaaacggatcggggagaattcaagtaacttctatgccatcttcagagatgcgatgaagggattcaatggtgttgtcacctgggtggttatagccgcatctatttttcttggagccttcctgtcaaaaaggcgcgggctacacttgccatccgtaattgtgatcacaatcacccccatagcgcttttctcattaacggctggaataatgcttttcttgcaaaatccagtcgcatcctcccgcgtcatgatcgcctttgggttcgtattaatttatttttgctggttgctggataaataccctttcaagttaaggatgatattaccgattactttagtgctttgttcattctcgttgtcatctacagtgtctggtgttgtaaatgacatgcaaaggcttgatagatttgtcgcgtcctatgcagcagaaaaactgtatgaaaatggttacaaaaagggaatgaaggtgtacatctttggtggaccttcatatccaccaagcgtggaaagatcactttcagccagaccattcctcaaagactttgtttactcttcttttgcaaatggaagattcaaacacagtctcatgaaacaatacgggatcatctcatcacctccttcagggcaggacttttgggacagggacaggaggatgaattccagcacggttgtttattctgacagactgatcatgatctatcgcttaaaggatgaaatgggatttagggttttgaagtga

SEQ ID NO: 143436 - DNA, 1917 bp, Enterobacter cloacae
atggctactacacctactcagaattcggttccgagcgaatccccgcgcgatttgaagtttaacgccgggaaaattgacgaattcgttacctcactggtaaacacttacgttgaccgattcggtaatgagcattacaccattgaagggctgcgctggctcgcacagcaggcgattgctcagtatggatggattcctgtaggcacattccaggccggtgcgactttaacccttcccaatcagatcttaaaagacacaaccgacggtgaatactatcgatgggatggatcattccttccgtcaggaaagtttgttcctaacggctctacaccgggaacaactggtggcgttggggtgggggcatggataagtgttggtgattccacactcagagcactccttgcttcagtaaatggagcaacacaaataggcaccagtcatcgcgggttattatcctcagatcttaatgctatcgaccgcaggcctagtgggtatggcgattcagtttcagcggttctggccaatggtcaggacgtagaaattgaaaaaacatatttactttctagcccgatattgcccgcggattttcaggttattgacggaaagggcggcagtttaacaatgaatgcagtagctcgcgcagttcattcagagtttaaaaaaggattcactctgcgtaacctacgcatcgttggtaacatcgttaatggaccttcgactggtaacgttgcctacggtgtacagttagaagatagtgaaaactttaaaattctagggcttgatgctaaacagtttagtggctctatggagcttctgcgttgtacagattttgtagtgagagatgtatatgcccgtaacatgcgctaccacgataatgtagcggcaggtggctatggagtgctgttaggaggtagctctcgtgggttgattgatggaattaatttccgagccagtgctgaagatggagatttaggccgtcatgctttctacatttccttagatgcgtcaggcaacatttgtgaagacatcattatcaaaaatatagtggcacgctatgctgatattgataatagaaacatgcccgcgggcgtcattcgcagaagtaaccgttgcatgattgatggatttaatgtcgctggttctaatggtggatttggccttaacgcacagaacggtgtcattcaggaccttcaaatacgcaacggtcatatgaaaataattcagtatgacgataatgctgtatatggcatctcaggtggagttgatgggcagcctaacactgtagtaggtctgcgtgtagacaattatacatttgagggggaggtaaagtcaggtgtaactcctgcgtccgtgcgtcttcatgcactagctgttacgtgccgtgacagttatttcactaatacccgtattaaaagtcacggcagtgcaaaccccatccttgtagcttctggtgcgtttaatgtcacattcgatggaatcaaggactttgtttcggctgggaatgcttcaggcgcagccttaatacgctttatggggagcaatagtaatattaaagtgtttaacatcgacaccgcccgtgcgccattcgttggccttgataatgtcactgatcttacagttaactgggagaggtttgctcgaattgttagcgctaacggaacggtcacaactacggatacagaatcattgataagcactgtatctgcaactggcactggtgaattaacagtttcattcaaaccacatgttaccgctgatgctgtgcgaaaatgcacagtcacccctgctagtgttgcaggtttggtaattctccctgaaatatccagtaaaaatctgatacttagattctataatgggagcggcgtacttgttcctttgggttcatctatcgttagtgctgatataaggttacactcatag

SEQ ID NO: 143437 - DNA, 189 bp, Enterobacter cloacae
atggatatcgattcgctcacaatgtctatctcagcgctggcggtggctatttctgtgtacgccgcctcgccggtacgcatgaagaaatttaatccgccagagcgtaaacatcgtgatcagcttccacccgaggtgagaaagctcattgagaacgttgatgagattgagcggatagcaaaaagtctctga

SEQ ID NO: 143438 - DNA, 174 bp, Enterobacter cloacae
atgaaacagggtgacattatcgaaagcgtgcacaccggaaacaaattcatcatcgaatacatctctaaagatgggaaaagttttgtgcttgtctaccaggctgatgctactcagccatctcggtgttatgcggattatgacatcagacgcagtttcaggaaggtgaacccatga

SEQ ID NO: 143439 - DNA, 456 bp, Enterobacter cloacae
atgaaattattcgagatggaaggttttctacgtggcaagtgcataccacgcgatctgaaggttaacgaaaccaacgccgagtatctcgtgcgtaaatttgccgcacttgaagccagatgcgcggcgctggctgcggagaatgcggtgctgaaggctgcacaccctcaaccattcggacctgtgatgatgaaggctcttgatgcgtatgagaaacatcaggatgaaactcctgaaataggcatgcttgatgcattctttatcctgcgtgacagcatccgagctgatacgacggcgaccgacgctttcctggctgaagtgcgggcgcagggggtggagatgtgctcagccgagatacagaaacaaacctgggatgagcgagaaggtgatgggatggtcgcggcaattgacgctatggaaatctatgccgcactccttcgcaaaggagtgcagtcatga

SEQ ID NO: 143440 - DNA, 201 bp, Enterobacter cloacae
atgacacagtttcaacttgctttaatcgccagggaagttgatggagaagtcatccatcttcgcaccaaagacggatacatcaatgccaccgcaatgtgcaagtctgcagggaaactgcttgctgactatacacgactaaaaacaacacaagattttttgatgaattatcacgcgatatggggattcccatatcggagttaa

SEQ ID NO: 143441 - DNA, 165 bp, Enterobacter cloacae
atgaagttttacgaattacctgaacaagtgcagtcaatagctgcagagcttctggctaagaggcttaatgatgaggtctttattgatgagaaaaacaggacggaaaaagcaaaagcaattgctcaaaccgtccgggaggcgttttttaaactatacgacaattaa

SEQ ID NO: 143442 - DNA, 183 bp, Enterobacter cloacae
atgtcagatattgctaatcctaaaacacaccctgagcttgcagccgctcaattggtaattgagttagtgcgcgctgaacgtgttcccattcatcatgacaatgtgaatggtctattgaagatttatgaccaggcattacagcactttaaaactgaccattttgaagatggcagtgataggtag

SEQ ID NO: 143443 - DNA, 669 bp, Enterobacter cloacae
atgattcgtcttaacaacgaaattaaaaatcagctatgccataacctgcttctcgcatccccattgtttgagaaagcgaaagctgcggttaatgagagggcgaaaattgttgaagaaattcgacaggcattgctcaagcaggaaaacactagcgatgagcaaataactaaggctcgggaagatttcaaagataactcgttcatcaagatgcaggtcggcgctaaaactgcaattttaaaggccattatcaatggtgagtatcacgaattggccaggaacggtttggatcatcgctatcgccaccgtggaaaacatattggtaagcacgatcttgaaagcgacctgttcttcggagcttccttcgcgccggtagttgaatcgggtttcgttcctgaaagttacatcacgctgaagaaggttggaaaattacacgaccgactcactgaatcgacggtaaccatcaacgttctttacgatgaagttgatgccttcaaattgcaggttaagggcgctctaaccaaagtctcaactgttaaaaaactggctgagatgtggcctgaggcagtgccatatttgcctgaggtggaacgtcgtgaagcgaccagcaccgcactttccattcccgttgaaacactaaacgccctttgcggcataccaaagaatgaatga

SEQ ID NO: 143444 - DNA, 309 bp, Enterobacter cloacae
atgacaacagaaattaaagccctacccgtcgaacgtgaccaatacggctactggactcacccgctttacgatgaattttgcgatgggcgcgagtctatctcaccagatgaatttaacgcctggctggataagaacggccttgagtggaaagtggagtaccgcgatgaggatgacgccgatcccgatgtggacggttatgacatctcagcgtggcagcccgaacccccagccggtgatgggtggtttgtcggttcaattcacgaaacggaagatggcgcggtctgcatctggctaagggcgaagccgtaa

SEQ ID NO: 143445 - DNA, 171 bp, Enterobacter cloacae
atgaagttcaccaagggcaggaatgttaagggtgaagcctatcagtttgttcagtctttaccggaagatcgaattagctggatgttaaaactgcaccgactttatatcattcaggcaatgctttttacgctgtggcttgttgtaggtattgttttttcagtaagccgttaa

SEQ ID NO: 143446 - DNA, 717 bp, Enterobacter cloacae
atgacgaatacccctgcgatgaaccgttatagctggtatggcaaattacccagcgccggagattttttgcaacgtcgctttccggataccctgcaacgccagtggtcgcactggtttcaggtcggcctgctggcctggcaacaggaagagcagcgcagcggcgagcgcccgttttctaaagccccggtgtggaactttgtcgtcccgccgatgctcggtagccagatgattcagatgggctgcctgctaccgggccgtgacagcgtaggccgtcactatccggtatgcctgcaactgagcttcaccccggccgagtggtcatcccgtctgctcgggcaggctgaaagctggtaccagcagcttggccgtctggggctgcacgcggtgcgtaacagctattctgcctcccagctggatgaaatgctgatgaccatcccggcgccccagccggttgagccgcaaaagcgttccgacattctcgacgtgattggctatgacgacgagggtcagagcacgctgggctggccgcaggcggcggagtgttttgatccgctgcgccagaccagctactggtggacaaaccgctgcgacggctatccgctttacacccacgtccacagcggaaacttcaccgggcagctctttacgctgctgttcgatccggcaggcggcgcccgtccgggccgccacggtctttacccgcctatgtttgaataa

SEQ ID NO: 143447 - DNA, 414 bp, Enterobacter cloacae
atgacgaaagcagaaaaggtcgtctggaccgagggcatgttcctgcgtccccaccattttcagcggacagaaagttacctcctcaaccacgttcgtgagtggggggccttgcagcgttcgtatctctggggctttctcgaccttgagctggatgaagcgatgcttcgccagggctgtattgccctgagctactgtagcggtttgctccctgacggcacctttttccaggtgcgcagcgaccgcaacggtccggccccgctaaaaatccccgataatcttaccaatgaaaaggtggtgcttgcgctgccggttcgtcgcggtggacgtgaagaggtgattttcagcgaggagcagtcttctctggcgcgttttattacgtttgaacaagaggtagaagacgacaacgccatgtag

SEQ ID NO: 143448 - DNA, 174 bp, Enterobacter cloacae
atgttcttttttttaatggcgagaataacgctaatagagaagagtatttccgtggctaaaaaaattaacgcgatcctgaaaaaaaatctaaaggttggtttggaccagacgataacacctttgacggcgatgaagccgaagggtggaaacccaaatctaaccaaacagatttga

SEQ ID NO: 143449 - DNA, 768 bp, Enterobacter cloacae
atgaacattgacaatattaaaataagtatcattactccaacttttaattcgggttcgactatagtagaaacttacaattctatttcgaaacaaacccatgagaattgggaatggcttgtaacagatgactgctcaagtgatgatacgataaatattctaagctctatttgcgaaaaagattcaagggttagagtattcaagaattcgacgaattccggtgccgcagttactagaaataattcactttcgaatgtttctggagattttataactttcattgacagtgatgatttgtggttttcatcaaaacttgaaaagcagctaaactttatgattgttaatgaattagattttacgtttactgcgtatgaacttgttgatgcacaaggaaatcctttaggcaaagtagtggacttgcaaggtgataatttcagcgttaattattcggatatgcttaaaaaaaaggcgacactaggatgttcgactgtaatgatcaaaaagaacgctttttcagatttttccatgccattaattagaactggccaagattatgcgctttggttaaaattattgaagtctggcaaaaaagcacatctgctaaatgaaatattaactcgctatcgaatcctaccaaattctatatcccgtaataagtttaaaaaaagtcagcggcaatggaatatatacagggaaattgaaaatttgtctgtattacaaagtgcttattgtttttgcttttatgcctggcgcgctatattccgtaaataa

SEQ ID NO: 143450 - DNA, 1242 bp, Enterobacter cloacae
atgggacaccagaccatacgctacaccattaaacgtaacggggtttattacgttcgttttcgcctgcctgataataagtttttccgtaagtcgttagagactgacagccacacccaggcgcagttgctcatgtcttttgcttctcctgtaattccactggttcaacgtggaaccatccaaccggatcacttcggtaagcgtctttccgagtatggcactagcctgaagcagcagaatgaacaatggctggcgcaccaatttctcagtgaagaacgtcgcactcttcagccgatagttgtccaggaataccgcgagcttgttgcgccttcagaagatgaggaagaacaaacagaagcacagtcaaaggatgtgttaacactggctggcgcctggaatatgtacaaaaaagagaaagcccaaaactggatgaaggcaatttcacaggccaatgagcgctttatggaagttgttgaaaacttgcctaagcgtgtagtgcagccttatcggtcaatgactgttcagcaactgatcgagtgtgatgatgtcccgcctgaagatttggttgtcgctgagtctatccacaagcatttgaagatttataaatcgctcttcaaaaccttcctgactgataataaagatattctggagaagtctccgacagatggagtagtcgccgcaccgtcgaaagcgaggtttggagcttacagtgcagcggaaatgagaaagtttgtagggtgggcgctcaagcagcctgacgggtggcagaagtggatcaccttgctgttggcgtacacgggagccagaagaggggagatcgtcaagctggagaaatcacaaatcaaatttgatgaagttagccagaggcactatctcctgatcgctgaaggaggacagggtaaaaccgagtacgttacaaagcaggtgccgatccatcccaaactgatcgagtggggtttcctcgattttgtaaatcatcaatggaaagagaagattttctcgcctgtgtctggcaagaatatgccgaagatcggcaaaattttagccgatgtccgcgatcagcttggtattccgtaccgtgatgattatggacagcggcggctagttcacagtgtccggcacaccatgatttcaacctgtttagctggctgggtgggtaacttggcacatctgcaacagatggtcggtcatgagaagagcggctctggtattaccagacgctatttgcacacctttccgttatga

SEQ ID NO: 143451 - DNA, 405 bp, Enterobacter cloacae
atgatctcgacgatgacccctattggagtcctcgctggtgcactcttagttgcagatggcgctaacggtataactaaagaagtgaataaatttttatctgaaggacaatctaactctgaaggtgtggtcgctgacaaagtgattaatattgctcagtttatggggtttaaggctgaatctggcctggctttttataacactctaacactaagcgcaaacatctacagcattgttggattagcgcgaaaagcaggtgcctggcgattgttccgttggcttccccacgattactaccgtcaagtcaacacaatgagccgccccaagttaactatgaaaatagtaggctacggtatcaaggctaaggttatttttgacctgctttccaccgaatcaccgaatcattag

SEQ ID NO: 143452 - DNA, 1329 bp, Enterobacter cloacae
atgtattgtgataaaaatgtaacttcaaacgtaaagcggaaattatattacacctatcttagagcgggtgtttactatctccaggtagttttacgtgatggtagtctttaccgtcgttcccttcttactgatagtttgcgtgaggctacaaacctcatgacaatcatcacccctcatatctatcaatacaaacgcaacctaatcactttagaagcgtttgattcatttattgatgctttgcttaccccttctcaatcattacttacctctccggtgattcctctcgttgtaccatcagctacagcaccattaatcaaaacagtagaacacaaatcagtattaacccttgctcaagcctggaatgattttaaatatcataaaatagggaagggtgaggtttggaacattgaacaggcaaagaaaaatgaacgttcttttgaaagcctcttagcgttattaggggatgatttcaatgtttatgaaattacacgtaagacaatggatcgcgttatggaatccattgaaggattaccagacgctagaaaaccgccctacaataaaatgagcgttaaagaacgtcttgaatgcgatgatataccagaagaacagttaataggcgcttccacgtataacgctcatatcaagatctttaaccagttttttaatacttatttggttatggataagcaaattctctctacttctcctatgaatggtgtgaagcttaagaaagagaatagccgttatggtgtttatactaaaagcgaggttaagcaatacatcaatcatgctcttacacgtaaagatagtatgaagtggattctacttcttctgatctacacaggtgcaagacgtggtgagatagctaaactcaaagcctcacaagttaagtttgatacagattgcaaacgttattatttgcatattgcagaagatggtaacggtaaaacagagaatgcaactagggaagtagccctacatgctgatctgattgaatacggttttattgactacgttagtgggtgtaatagttattatctcttccctgatatagctagcactagtttaaaccaacttacacaggagtttattactatccgtgatgatctgaacattgcaccattagataaaaatggagcacgtagagctattcatagtttgcggcatacgttcattacttacgcttcaggatggatgaaagataatacgcatttgcaaactgtgattggtcatgcaaaaacgggattaggtgtaactaaaagatacatacatactataccattagactctacagcatatataatcgatgggttgaactggaaatcatga

SEQ ID NO: 143453 - DNA, 669 bp, Enterobacter cloacae
ttgaacaataatagattagaagttccagaaacagaattgggtgatcacttacataccactgtcaaagtggctttaggtgctgttccatatatcggaggagcgttagctgaggttttttcatcagttattgaatctcctttccaaaagcgaaaacacgaatggatgaagcgggttgtagaggcaattcatgatttacaagaatcaggtattcagatcgatacactgaaagataatgaagctttcatatctgctgttttttatgcttcacatttagcaatgaaaacgcatcaagatgaaaagttaaatgcattgaaaaatgctatagaaaacgttgctctaaatgtggaaaaagatgaggtttatcaacaggtatttctaaactatgtcgatacactaacagttttacatatgagattgctcaggtttgcgaaaaatccaaatccgccgtctaatatgatgatgggatctttagaatcaatattcgataagcagaatactgatttaaactacaatagagagtttatcaatcaagcatggaaagaactatataacaatgggttgatagatattgaatcaatgaatatgcattcatcatctggcggtttaagagaatcaaggttaacagatttaggtaaaagatttacaaaatttataactaaagcagagtag

SEQ ID NO: 143454 - DNA, 1182 bp, Enterobacter cloacae
gtgagtttaataaaaaacacattttggaatcttagcggttatattataccttctttgatagctattccatcgctaggatatttagcaagacatttaggccctgagaaatttgggctttttacattggctacggcacttgtaggttatgctagtattttcgatgcaggacttaccagagccgttattagggaaatatcattttatagagataactcacaagaagtaaagaaaatagtatctaattcgacagtaattcttacaatgcttggcttcctcggagggggatgtatttattttggagcaggaaatatagttggtttcctaaatgtcaaagaagcgttacgcgttgaaacaaaaaccgctatagaaatacttggcataacgctcccactttttttgcttaatcaagcttggttgggaatattagaaggctatgagaaattcaagaaaattaattttatcaaaactttcaatagctcgtttatagtagggctgccagctttttttgttttcttaaataattcattggtctatgcagtgattggtttgctcactgctcgtttattatcaataataattacatttgtagcatgtaagcatcatatattaaagtcaggtctgagactggactatggaacagctaccaggttattaaaatatggtgggtggattactgtaagtaatatcattagccctttaatggcatatttagataggtttttcatatcaaatatacttggtgcagcacatgttgccttctatacagcaccgtctgaaggagtgcaacgattatccatattcccaggagccctatctagagcggttttccccaaattaagcagtttaagtgcaaaaaacgaaaaaaataagcaaaaaaaattagcgtacttattaatggctggagctatttttccactttgtttaataggatttgtcttttcagaagaaattatggtcggttatttttttaattgcatagcacaaataccttttgctgatatacaggcctcgggtaaatctaaaactacggcaatgttacatctgtgtgaagttttaccgtactttgctcttctattcatgctcgtgaatttttatggaattattggagctgcattcgcatggtccataagaactaccatagattgtttgttattggtatggttaaataacaaagtaaggtaa

SEQ ID NO: 143455 - DNA, 651 bp, Enterobacter cloacae
ttgcgtaaacatgccgccttttttgatgttgatgaaacgcttataaatattaaaagcatgtttgatttctatgatttctggtgcagggaaaataatcaaaacgatcgtcttcaacgctatatgtctcgttttcgcgccgacgtaaaaaacggtgtgctaagggagactctgaaccgagaatattatcgccagtttaaaggtgtgtcttgtcgttatctggaagaaatgggtgagaagtggttcaggcgtaagctggaaagcgagttttttattgagagtgctgtttcagcccttaaaaaacatcagaatcagaacatgtataccgtatttatatcgggctctatgcttccgattctttcacctattgcaaaatatcttggggtaacggaagtactctgtgcgccggtgataataaatgacgcaggtgagttgacgggtgaaatcggcctgcctcaaacaattggaacaggtaaaaaagacgcgcttttagccttttgcgatgataaagagattaaccccgcggattgttatgcctacggcgacgatctttcggatattccaatgcttgaagccactggccatcccgtgtgtgtgggaaagcattccgcgcttaccagatatgcaactgaaaaaaagtggcacattatttaa

SEQ ID NO: 143456 - DNA, 300 bp, Enterobacter cloacae
atgaactgtaaaaagttggtagttgttggcgataaatttaatgaatttgccaatggtaaagatgtactgactatatctcagctagaattattgactcaaatccctgcgaatatcattgataaagaacatgaaattattgttgggcagggcgtgcgcaaggattttgctggaaaggtaatttcaaatcaggcaagaaatgcgatccatggtaataagttgaaaatatgctctctggaaaaactggttagcgacaaaaaaatgcttattgccataaaagactggaacagaatgtacttatag

SEQ ID NO: 143457 - DNA, 552 bp, Enterobacter cloacae
atgactgatttctccggaagtaatactccagctgatcagcgtgatttatggcgcacgccaccagctatcttctcagcgctagatgccgagttctgcttccagttggatgccgccgcagcgcctcataacgcgctgtgccgcaagttcatcactgccgagcagaacacactggaaacgccatgggctgattacctgaatgtgccaggcttcgtctggatgaatccaccgtacagcgacattacgccatttgtaaagaaagccgccgccgagagcgccaatcagatcggcaccgtcatgctggttccggcagacacatcggttggctggttcagggaggcaattcagaccgccagcgaggtgcgtttcatcaccgccgggcggctggcatttatcaacccggtcactggtaagcctgtcagcggcaacaacaaaggatcattactgattatctggaagccatacccgagaacgcattgcgagtttacaacggttgaacgcgatactcttatggcatatggcaattcccgcctggcaagacgggaggcagcttaa

SEQ ID NO: 143458 - DNA, 1023 bp, Enterobacter cloacae
atgtctaccaacgcacttaaggcagcagcgaccggaaaccaggttgcacagcataacgagaaacctaccaccctggccgggttgctcgcggatccaaaaattaaggctcagatggcgctggctcttccaaaacacatgacagccgaccgtctggcgcgcatcgccactaccgagatccgcaaggttccaaaactggcagcatgcgaccaggccagtttcctcggtgcaattatgcaatgcgctcagctaggactggaaccaggtggcgccctgggccacgcgtacctgattccgttcgacaagcgccagaaagttaatggccgctgggaaacagtatcgacagaagcgcagctcatcatcggctatcgcgggatgattgaccttgcccgccgctccgggcagatcctgagcatctcagcgcgcaccgtccatgcaaacgacaaatttagctactcatacggcctggaagaaacgctcgagcactcaccttgcgaaaccggtgaccgcggcgaactgacccatgtatacgcagtggcccgcctgaaagatggcggcgtccagttcgaagttatgagccgggcagacgttgaaaaagtacgggccctgagcaaagccggcagcagtggcccatgggttgaccacttcgacgaaatggcgaaaaagacggtgatccgccgcctgttcaaatacctgcctgtctctatcgaactgcaaaaagctgtggtgatggatgaacgagctgaagttggcctgagtcaggataacgcggcagttatcaccggcgagtattccgttgttgatgatgagcagcagagcctgacggtggtttctgactctgatcgcgaagaggctcgggaatacgtcagcgcaattctgaacagcctcgattcatccgcagcagatgccaaggcgatgtttaagcgtgccgaagatgagatcaacgccatggctgaaaagctcggtgaggaataccaccagggattcatgacgacgcttaacgatatgcgtcctgaattcgaataa

SEQ ID NO: 143459 - DNA, 900 bp, Enterobacter cloacae
atgatgcagaacgtcggcagcatggacaggaccaaatacctcggcggcagtgatgtcgccggtattctcgggattagcccgtggcgcactccgcttgaggtgtatctggataaggttcagccacgcatcaagccagtagatccttcaaagcagaaagttttcacgcgtggccagcgtatggagccatacgtaattgacctgctttctgaagagacaggcctcgaaattattcatcgcggcaaccggtatatccatcgcgattacggctttatcgcagcagagatcgatgcagaagcagctaccggcgagaacatcgagatcaaaacggttagcccattcaaagctaaggaatggggagaagttcagacagatgcgatccctgtgcattacacggcgcaggccatgcatgggctgatggtaacagggaagaaggtatgcgtattcggtgtcctgatcggcggtgatgatttccgtatttatcgcgttgagcgtgatgaggaaaccattcaagcgatcctggagaaagaagtttccttctgggatcgggtgataaacctgaacccaccggaggcgacaacagtcagcgatatttctctgatgtttgagaaggattcaggctcaagcatcgaggcagacggtaaggccctggcacttttcaacgacctgcgcgacatgaagtcacgctgcaagtcgctggaagcagaaatcgccgtatcggaagagaagctgaaactgtacatgcaggatcactcaatcctgacgctggacgggaaaccgatttgcacgtggaaatctcaggtaagcaaccggttcgaccagaaattattccaggttgagctccctgacctgtacgaaaaattcaaaacagcaacgacatcacgcgttttcagaatgaagtaa

SEQ ID NO: 143460 - DNA, 204 bp, Enterobacter cloacae
atgaagcgattaactcagcgtgaagctctcgaaatgggcctcgccaggttctacaccggcaagaagtgcattcacgggcatgacagcgagcgctataccctcagtggtgaatgcgttaagtgcaacaacgagcgggcgcgccgccagcagcagctgcgctcagagaaaatgaaagaggctaaacgggccagggtgaatgcatga

SEQ ID NO: 143461 - DNA, 753 bp, Enterobacter cloacae
atgatccactatcacggcggaccaataacccctgatacatgcgcattgaaagcctggaaaggccgtcatgcgttcatcagtttcgctaaccctgggcagattaacctggcatcggaagtcacccagtcattcgctctggataatggcgcattcagcttctggacaaagaatcgtgttgttgactggagagagtattaccgcttcgttgagcgctggggtaaccatcctcgtttcgggttcgctgttattcccgacgttatcggcggcaccagcgaagagaatgacgcgcttattgctgaatggcctcacgggaaagtcgtaggagcgccggtgtatcactttaacgagccagacgagcgctttattcgtttgtgtcatgagttcccgcgcgtttgtatcggcagcatgggcgaatatgacgccaagcgaccaagagcgtgccgggcgaaactgcgcgacctgataagccacgtagtcgataaaaacggctatccaattacgaagcttcacggcctgcgcatgctgaataaagatatcttctcgcacgttccgctttcgtcagctgacagcacaaacgtagctcgcaatatcggtatagacaaagtgtggaatggttcgccctacgcgccagccagcaaagaaacccgcgctgcggtgctggtagaacgcattgaagctttcaactctgcaagctcgttgcagtacgacgaaaaacgggaccgtttcacgccccaactggctttcgaaatttga

SEQ ID NO: 143462 - DNA, 831 bp, Enterobacter cloacae
atggccggtgactggatcaagatgcgtgccgacctgcacacgcacccaaaagttgtccgcatggcgtccgcattgaaagcggacagattgcggatagttggcggactacattccgcatggtgtcttttcgatgtccactccgttgacggtttgcttgacggatacagtgcggacactctcgacgacctgatcggcttccctggtttttctcgggcaatgatggctgtcggatggctcgaagaaaatggcgaaagcctagtaatgccgcgcttcgaggcccataacgggcagtctgccaagcgtcgcgcacaggacgctgacaggaagagaaacgtccgcaaagcgtccgcatcagaagcggacaaaaagcggaccagagaagagaagagaagagaagatataaaagataaaccccacatagggggcgagcaaaattcacctgtggataactcagctggtggcggtgaaccagatccggatgtgaacaacgcgatgctgaatggctacgttgcgcctggcggaatgggtgagtttggaaaattccagatgcgcgacaactggaagcctgatccgcagttcatccagcgcgctgcgctgtggggcataaccctgaagacggagatcacgtcgttcgagctggcagacttcatcacgtactggaaagcggagggcaaggcattccatcacgaccagtggcagcagaagctggcgagaagcgtgcagcagtccagggcaaggccggtggcccagcagcagcgaagggatatcaacgacgtacctgagcctgacaagaccataccgcagggattcaggggctaccaggccacatag

SEQ ID NO: 143463 - DNA, 744 bp, Enterobacter cloacae
atgagcacacttaccaaagaatggctcctgaaaacaatcgcggagcttgaagaagagcgcgatgcgacgccaggcgcagtaaacgaagatgcagcccgggcgcttgctgcgatgaagctagcgctggcatcgctcgaagcggagccggtgacgaatgagattgtcatccctgaacctgcgacgcaccgtaacatcaatgaaatatgtccgccaggcgttaatcagaccctattcgcatctggttggaacgcgagccgcaaatcagggatgaatagcggccgcattccgccgatcgtcaaagggattgatgcagaatgcgtgggctggaacgcctgccgcgccgccatgcttcagggtgccgatggcaaatctccggtgattccggatggtctgcgcttggcgctcagcaacgctggaatagcaactccggagtcagatgaaatgctggcggcaacctgtgaggagtacattcagacactggttacctgggtaaaagaaagaaagcctttcaggtcagcggtgattccgggtggttgggtggcttgcagtgagcggatgccggatgataccgttgacgcagatggcggagctacttgctaccttgttttctacgcagaaggaaggcagccaaatggagggtctaacgttcaggtgagcaacgtgacttacttgcgtcgatggcatgaagggatgataactcactggatgccgctgccagcagcaccgcagcaggaggtgaagtga

SEQ ID NO: 143464 - DNA, 171 bp, Enterobacter cloacae
atggatagtattattgctgtgtatattggtggaattatcgcttgtatgccttaccactggcagctacagcggaataataatttgctttatagagccatcaatactttcacctgctctgcattctggccactattgcaggctcctaaaattacggtggtggataatggctaa

SEQ ID NO: 143465 - DNA, 633 bp, Enterobacter cloacae
atgatgcccgcgacaccaaaaacccacaaacgcaaatcaacgcaatataagcctcttacagcgatgcaggaggcttactgccagtcctacattaagacacctgaaaaccagtctcaggctgcgattgacgcaggattttcgcctaatacggcagccgtcaaagccagcgtgatgatgcgagacgaaagaatccagaaacgaatcgctgagctgatggaggagcgcaataagcgtatgcgcgtcagcgctgattacgtcctcatgcgcctggtggagatcgaccagatggatgtgctggatatcctgaacgatgacggcgggatgaagccgatcgctgaatggccgaaggtatggcgtacctctctcagtgcaatggatatcgctaccatcaagacgactcaggcctcactgcagaaagagaatggcgaggcggatctctctgttgatgatgtcgagcatatcctgaagaaggtgaaatggccggacaaggtgaagaacctcgagctcatcggtaagcacgtcgatgtgaatgcgttcaaagagcgcctggaggtttccggcaccgtcaccatcgccgaccgcatggcgaaagcccgtgaccgcgttaagaaacaggctggtggtgaagaatga

SEQ ID NO: 143466 - DNA, 186 bp, Enterobacter cloacae
atgagtcagacagtcgttaatgttcagaaacaatctcctgccgaagagatccgccgtgagaatctctaccacacgaaattgcagtgcctggctgaagtgcttagtaaaagagctgtacttgatgagcgaggtgctgttcaggatgccaaagccatcaacgccgcattcgatgcgattactttctga

SEQ ID NO: 143467 - DNA, 297 bp, Enterobacter cloacae
atgacggacttcgatgaagaagaactgcgcattcagaacgagcgtaagaagcacgatctggaacagcgcgagaaggacgacatcaagttcgtcatggatagcgagcagggtcgccgcgtcgtgtgggctctgctggagaaaggtcaggtgttcggtacctgcttcaacgtggacccgaacatcaccgcattcaacgaagggcagcgcaacctggcgctggttctgtttcagcgcgtcatgacgcactgccccgatcagtatctgaagatggccgcagaggccagtgaacaggagtaa

SEQ ID NO: 143468 - DNA, 729 bp, Enterobacter cloacae
atgaatttatttgaacgtttgctgcatcgccgtctttgcaatgagcaatcaactgaaggtggtcaggcagatacagcttcaacgggagcaactgaaaccactcagggctcgggtgaaacgcaggagcaaactcaggagcaaacccagacgcaggataacgccacgggtgctgattctaacaaaagttcagaaactcagaaaactgaggaagaacttgctgctgataaagctaaggccgaaaaagctgaaaaagagcagaagccagaaggcgcgccggagaaatacgagttcaaagctggcgaaggcgttgagcttgatactgcagcgctggagcaattcgagcctatcgcgcgtgagctgaacctgactaatgaacaggctcagaagatggtcgacctgtacggcaccaagatcatgccaatggtgcagcagcagcaggcagaagcctggcagaaaaccaccgagcagtgggccgcagatgttaaggctgacaaggagatcggcggcgacaagctgaccgcaaacctcagcgctgcgcagcgtgcactggaacaattcggcgatccagaactgaaagaatacctggattcaaccggtctgggtaatcacccggcgcttgttaaagcgtttatcaaagtcggcaaggcaatgtcagaagacaaggttgtcaccggcggtcatgaaagcggcggcagtgaccttatctccgccttctatcccaaaaagtga

SEQ ID NO: 143469 - DNA, 1008 bp, Enterobacter cloacae
atggctttaatcggtcaaactctgccatcgttgcttgacatctacaatcgtactgacaagaacgggcgaatcgcgcgcatcgtggagcagttggcgaaaaccaacgacatcctgaccgatgcgatctatgtgccgtgtaacgacggctctaagcataaaaccaccatccgcgcaggtattcctgagcctgtatggcgccgctataaccagggcgttcagccaaccaaaacccagaccgtaccagtgaccgatacaaccggtatgttgtacgaccttggcttcgttgataaggctctggcggaccgttcaaacaacgccgccgcgttccgtgtttccgaaaacatgggcaagctgcagggcttcaacaacaaagtcgcccgctacgctatctacggcaacaccgatgctgagcctgaggctttcatgggcctggcgccgcgcttcaatacgctgagcaccagcaaagctgctagcgcagaaaacgtattcagcgccggtggtagcggctctaccaacacttctatctggtttatgtcatggggtgagaacactgctcacatgatctatccggaaggaatggtagctggcttccagcatgaagaccttggtgacgacctggtaagtgacggtaatggcggccagttccgtgcgtatcgtgacgaattcaagtgggatcttggtctgagcgtgcgtgactggcgttcaatttcccgcatctgcaacatcgatgtgaccacgctgaccaaagacgcatcaactggtgctgacctgatcagcatgatggttgatgcatattatgcccgcgacgtggcgatgctgggtgatggcaaagaagttatctatgccaacaaaaccatccacgcatggctgcacaaacaggctatgaatgccaaaaacgtaaaccttaccatcgaagagtacggcggtaagaagatcgtttccttcctgggcattcctatccgtcgtgtggatgcaatcctcaacactgaatctgccgtaacggcgtaa

SEQ ID NO: 143470 - DNA, 393 bp, Enterobacter cloacae
atgttgcttgatcaacaggctttgttctccgcggctcaggccattacggccaccgcggcatcaaccaacgtcattgacaccggatccagtaaggatgtcggtaaaaatggcgatattccgctgctgattcaggttgttgaggcattcaacactttgaccagcctgactgtaacggtacagaccgatgacaactcgtcattcagctctgcaactgatgtgatctccatggtcattcctctggcatccctgaccgttggttacaaaacgccggtcatcacgctgccgatgaagctggagcgctacatccgacttaactacaccgtcaccggtaccgcgccgaccactggcaaagtaaccgctggcattgttggcggggtgcagaccaatgtctaa

SEQ ID NO: 143471 - DNA, 285 bp, Enterobacter cloacae
atgtctaaatatcgcgtcaaagagcgctccttcattaacggcaagctctgcgagcctggcgatattgtggagttttccggggaggctggcaaaaacctgatccctcataacgacggtgatgtcgtggtgaaggaagacgctctgccaaccaatgaagagcttcaggaactggaccagcttcgtaccatttacgaagagatgttcggcgaagctccgcataaaaacaccagcgcaaaaactctcaaagagaagattgacgcccggcgtaaagaactgggcgtgtaa

SEQ ID NO: 143472 - DNA, 336 bp, Enterobacter cloacae
atgaaaactgtaaacatgaaaacaggcaccgactcattcgttggtgaagatggaaaaccagaaaccaaagatcagtatccgtggggtctgcgcatcacgctggataacgaatctctgcaacgtctcggcctgaatgcaaaatcactgccagcggtaggtgatagcgtttctgttattgcaatggctaacgtatgttctgtgtctacccgcaccacagatcacggtgaagacaactatgttgagctgcagatcaccgatattggcatggctccacagaaacgtgatgatgccaaagagctgaaagatgcgttctacccaggcggggaggatgattaa

SEQ ID NO: 143473 - DNA, 192 bp, Enterobacter cloacae
atggatatcttgatcaagatagggttgattctgttctggtttgctgccgttgttgtctgcggcacggcgtatctttgggcgataattttcgctatcaggaaaggatggcttggggagacatccgcgaaggtcgtttacttcgcgaccttcgttattctggctgcaatagtatttaaactaccattgctgtga

SEQ ID NO: 143474 - DNA, 2184 bp, Enterobacter cloacae
atgacggtatcaaccgtagttgaccataacgattacaccgggaacggcgttacgacatccttcccgtataccttccgcattttcaagaaaacagatctcgctgtatcagttgtcgacctgagcgaaaacatcacggtgctggtacttgacacggactatacagttacgaacgccggtggttacaacggcggtagtgtggtgctcaccactccgctttccaatggctggcagatctcaatttctcgtgaacttgagccaacacaggaaaccgaccttcgcaaccagggtaagttcttcgctgaagtgcatgaagatgcctttgacaagctgactatgctgatccaacaggtcgccagcatgtttcgtctggcattgcgtaaaccgtccagtatcgcgaactggtacgatgccctgaataactatatccgaaacctacatgatcctcgcgacccgcaggatgcggccaccaagaactatgtcgatacgctggcaaatagcaatttcacacgaaccctgcgcgtcccggagcctattccacagcttccagacgcggtaacacgcgcaaacaaaatcattgcattcgacagcgcaggaaacccgattgttgtattgcctccttctggttcagcttctgatgttttgattgaactggcgaagcctaccggggcaacgaaaattgggaccaaccacagggggttactgtcatcagatcttgatgctatagatcgcaggcctagtgggtatggagattcagtttcagcagttcttgccaatggtcaggacgttgatattgatgagcaatacacacttagtgactctgtagttgttggcgatgggcaggttatttacggcgctggcgggagcctgaatgctgtcagccctgcaacatatgccgtttatattgataaccagagaataagcgcaacgcgcggcatgcttgtagatctgaatttaaccggcacaattaccccagagggatctccagggtactcggttcttgtgcgagagactcaggataacgttatctcaaatatgcactcatcaggattcactggtggggtagaagccaaccagactaagtggcttcaggttcgcggcatccgagtgaccgattcagtctatcatccatcaaggaccgcaggcggttatgcggtcgtgacaggtaacgcggaaaatactcttattgatggagttatgtttgacgcatcatcaggcaatgatggccgtcatatgatttatatttcgcgatatgacagaaccgatggaggttacgacggtagcaaaaacaccattgctaccaatatgattgcacagtaccagggaaaagatgaccgtaatttccctgcgataaacttcagaaagtctgacaaatcgattgtcagtaatttcattgtcgatggcgccaatggtggggtggcttcaaacgttcaaaacgggaacattttgacccaattggttggtagcgggatcgtcaacgttcttaaatatgttgatggcaccacggtttatgggattgggcagcaaacagtcgacacctacacgcatatcggcttcctatatcatgatctcatggttgaagttaagcctaaggtgcaggatggaactttaaactatcaggactgtgttgcttttaacattgtgggtcagcatggtctggtcactgattgcgtaacaaatgtagccaggagcggtagaccattttatattggcgccggagccgctaacgtcacaatagatggagttgtagattatatcagtgacaatggcaccggaactataacaccaatgtttacattcactggcacatgttcaaacatttcgataaaaaacattcgcacttcaagacctatgttctcaggattatcaaatgtaactgacatgactgttgattgggtgcgaagagccactattactataacatctggtagtgcggtagttagtaacgacacctacagtattgtaagctctgtgaatgccggtgcatctgcaattacgatagttcttgcctcacatgttacacaagagtcaactatcacggcgaggctcattccaagaacggctaatcagttgataatctccacaacatcaagcaagacacttggtgtagcggcttatacagttacagggacagctgtgacaccttcaatatcatctcttacgtttgatgtgattctgcaaagttaa

SEQ ID NO: 143475 - DNA, 1434 bp, Enterobacter cloacae
atgaatccatttcaggactatttaaaacgcaatgggatatatttatccctggccttgggtgtgctttatgttctgcctattatactggcaaatttctattatgttgatgaccttgcgagaagtgtagccggatatgcgcgatggtctgataacggcaggcctctggctgagtacataatcaaaggtatgtcatttggtggaagagttattgaccttgcgcctttgcctttaatactatcagttttggtagtggtgttatctggctattattactgctttaaggctggtatagaaggaagggtaactgtagccattacatccgtctcgttgctgatctctcctttttatctccagaacatttcttaccgttttgatgtttttactatgtcactttcggtagctgcttgcgtccttagcgcagcagttttgttgaaccgaagtggttatgtgtggttcctgctatcaggcttgttaatagttgcctctcttagtctttatcaatcgtctgcgaatatatgcatagcgatgatcgggcttaatgcactcgtttcgtatcgaaccaccctcttcaaatcgacggtattagaatcggttctttacgcaatcacgatagtggttgccctgctcttctataaattctgtatagcttccgtttttgtcagcggtatttatagtgaatcacatgctgagtctgcttctagcatggaatcagtaatcaaggctataaatgcttatgcatggatgttcaaagaaacatttatcggcaactatggcaaggcaatgtccctgctggctatcattccacttatagctatcgtgtaccacgttgcagcaaaaaaagacgctaaattccttattgtttccatcctgtcaataatatctatcgtcttttcatacattggcgtactcatagccttgcatgacccggttatctatccacgcgttttggttggattttgcggcattgttttttcgggatttgttgttacaagcgtcttctgcaagaggatgacacctcttctgcttatccctctggtggcctgccttcttctctcgtacagctatgggaattccttgagtgctcaaaaggagaaggaaggtttcatttttgaattggttgctaatgaggtggtaagtcaccctggcgttgaaaaaatacgatttaatggcacagttgaaattgcggctacggcatcaaactccgctgagaaaagcggaatcataaaaatcatcaccccttcatacatcagaagtgattggatgtttggcgcattccaattgcatagaatgggtgtgaaagttgatcatgactctgccattgatatcaagtcaatattaaaatccgattgtaaaaatcgaatcagcaacaattctttgttcagtacattaaagaatgggaatactttgatttttgactttaacaaatgcaaatag

SEQ ID NO: 143476 - DNA, 915 bp, Enterobacter cloacae
atgaaaatttctctggtcgttccggtatttaatgaagaagaagcaattcctatcttctataaaaccgttcgtgaatttgaaggccttcagcagcatgaagtcgagatagtcttcataaatgacggtagcaaagacgcgacagaatcaattattaacgcacttgctgttgcagacccgcttgttgtgccgttgtcgttcactcgtaactttggtaaagagccagctctgttcgctggccttgatcacgcgtccggtgaagcgattatcccgatcgacgtagacttgcaggaccctatcgaagttattcctcaccttatcgagaaatggcaggccggtgctgatatggttctggctaaacgctctgatcgctctaccgatggcagattgaagcgcaagaccgctgagtggttctataagctgcataataaaatcagtaacccacagatcgaggaaaacgttggtgatttccgcctgatgtctcgccaggtggtggaaaacattaagctcatgccagagcgtaacttgtttatgaagggcgtcctgagctgggttggcggcaatactgatgttgttgaatatgctcgcgcagaacgtgtggcaggaagcacgaaattcaacggctggaagctatggaaccttgcccttgaggggatcacgagcttttcaaccttccctcttcgcatgtggacctacataggcttactggttgccggcgtggctttcctttatggagcgtggatgattttcgatactctcgtatttggtaatgcagttcgagggtatccgtctctgcttgtctcaattctatttcttggcggcatacagctgatcgggattggagtcttgggggagtacataggcaggatttatgttgaggttaagaacagacctcgatatgtgttgaaaaggaagtga

SEQ ID NO: 143477 - DNA, 375 bp, Enterobacter cloacae
atggacgtaaaagtgcttaagttattcgcaaagtacacatcgatcggcgttataaacactctcattcactgggttgtgttcgctatttgcatttatgcgtttcacactggacaggcacttggcaactttgccgggttcgtcgtggcggtgtcattcagcttctttgcaaacgccaggttcacgttcaagtcttccactacaaccatgcgttacatgctttatgttgggttcatgggctcactgagtgcgattgttggatggtgcgctgataagtctggcatggctccgatcgtaactctcattcttttttctgccatcagtctggtgtgcgggttcatctattcaaagttcattgtctttagggatgcgaaatga

SEQ ID NO: 143478 - DNA, 531 bp, Enterobacter cloacae
atgatctgggcattcgtcaaagcgtactggagaccactggcagcactgctgctagtggctgttggtgtgctgatgattctgtgggctggctacagcattgctgataggtcatggcaggctaagtggcaggctcgtgaccaagatgacctacaggcaaaactggaattcacagaacaacagcgccgcattgagctacagcggcaaggggctatagatgcaatacaggaacaagcacagaatgacattgctacagcgcagcgtaatgctgccgttgctgctgctgaatctaagcgcctgcaagacggtatcgcagatgccatcgccagactacaggcagatagcggcaataccggcgctaccatcagcagcaaggcaagggccagcgccagcagtttgcttgccgtcctgtttagagaaattgacgcagcggcgggagagtatgcagcagaggctgacagagcaaggaaagcaggattaagatgtgaagctgcttatgatgcggtgaggaactctaatgatctcacaaagtga

SEQ ID NO: 143479 - DNA, 507 bp, Enterobacter cloacae
atgatctcacaaagtgaattgaagaagttgatacactacaatccagaaaccggtattttcacttgggttgttaacggattaaaccggcgagaaggcaggaaagcaggtaatgtttgcccttatcacggctacgtaagaataggaattaacaggaaattatataaagcacagcaccttgcgtatctttatatgactggtgaatatgcagaaaacgtagatcacagaaatggaattcggcatgataaccgctggtgcaatatcaggaagtgcacaatacagcagaacaacatgaacatgcccgttcgctccgataataagagtggcgctcctggtgttaactggtatgaaagtcgtaaaaagtggcgggtaactttaaggcttgatggtaagtttaaaagtcttgggtactactcagattttgagttagctgctttggtttctgaagaggcgcgggataaattctttggcgacttcgcctcatcgaaacgggtcaatgatttccggtga

SEQ ID NO: 143480 - DNA, 249 bp, Enterobacter cloacae
atgccctgtaacggccgcggcggcgaccggatggtcagcgttagcgaccacggtcgcgcgggcgacgggatgataactaccgtctgttgcagctgcgacggcgacagggtgatcggcagataccaccgccgtggtgcgggcgacaggatggttaccttcaccggtggccgccgcaacggcaacaggatgatcggcggaggcgacggcagtcgcacgggctaccggatgatttgcaaatgcagaaaatga

SEQ ID NO: 143481 - DNA, 249 bp, Enterobacter cloacae
atgtttgaaaaagcccccgacgtatggggatggttttctttgtctgttacctgggtgaagtccaactcctatctgtactgggggagcttcacggccttcctggcggcactgtggtcagggctctgcgacaaacatggctggtgctcctcgttgtttggtgggctactggcgaccatcatcaccctgagtattctggcggtaatgaaaaagaccgggttacacgaagagtggatgcccaggttgggctga

SEQ ID NO: 143482 - DNA, 219 bp, Enterobacter cloacae
atgcatggggcttttttcctcaaattcctgagcgcaggctcttcagctctctctggatcagtacctgtgaaaaatgcacgtcttgcgctggctgccgccccgcttttcctggtcatggcggtagattttaccgggcggatgatgtcgttcctggctgatgatgtgctggtggtctgctttattgccgtcgcactgccgcttatccgccagaaagaatag

SEQ ID NO: 143483 - DNA, 528 bp, Enterobacter cloacae
atgcaaaatactctttctaaccgactgagaaacacaatattgaaaaagcaagccatatggcacgtaaacggaaaaaatcgccgacctggcggtgcatcatccgatgactacgatcgccttcatgaagcaatggagtccagaaattactttcgcgaaattcaggacggagccggaaattggtttaatcttccatccgctgagtacgtagccgaaaaaaacgcatcagcccgcgcagttcgagacgaagttgtagccatcgccgggacgataaaggataaccctcgggtgctggtctctcaggctgcagatcactcatggcatttaatcaagaagttagctttggtcgccgtcaccggttatcccattcccgctacgtccatcatcaactctgacgccaggggcgctatcaaggcgttccattgcaataaacgcggcggccacatagcgaccaagattttcgttatattcctctccccgctgcccctgagccacaataagctggcccagtctttttgcgtaacgcactaa

SEQ ID NO: 143484 - DNA, 297 bp, Enterobacter cloacae
atgatttatagatacctggatcaccttatagcgacctacttcaatcaggattatgacctcttcggagaaaccattgaggaggtgatggatgaataccttaaatgcgaggggcctgagtatgcccgaggcgtagtcacagattgcataaatttcatcaatacaagcaaagacttagaaatggagtttcttgaactgtataagttcgactttcaccctgagttatgggggatcacagctaagcagtttttaaccatgatctccgcacaggccacccgttaccttgaagaggaaagataa

SEQ ID NO: 143485 - DNA, 198 bp, Enterobacter cloacae
atggcgcgcctgaaacagaaaaggccggatgagtacggtcttctttttgaccattatgtcaaaaatatctctaagcgtgtgcttgggcgaaagttacgtctgtcagagggaatgattcgcattaaatttcagatggcggaagcttttattgatggctgcccggcgatgctggatattcggctggagatggattattga

SEQ ID NO: 143486 - DNA, 1374 bp, Enterobacter cloacae
atgagtggggggaaattgccggaggggtgggtaaacacaaccattggagatatctcggttaaatgttcacaacgagtacctgatgaaaacgagcaattcatctatgtcgatattggtagcataaatcgtgagctcaagctaattgaaaaccctcaataccttattggtaaagatgctccaagccgggcaagaaaagagattaaagcacatgacatcattgtttcgctaacaagaccgaatttaaatgctgttgctttagtcagcgaaaaatatgatgaacaaattgcctcaaccggcttcgaggttattcgaccaactctggtagaaagtcgctatatttttgcactggttcgctcacgtcattttattgactcaatttcaggattagttcagggagcattatacccagctgcaaagtcaagtgatgttcaatcctatgagtttcctctaccaccgcttgctgaacaaaaaatcatcgccgaaaaactcgatacgttgctggcgcaggtggaaagcagcaaagcacgtcttgagcaaatcccacaaatcctgaaacgttttcgccggtctattctcacatcagcaactgaagggagattaactgaagaatggcgagggggagatgcatatgaaacagaagaaaaaaatcttgaaaaaattatttcaagcgctcaagttgggctagttcgctcagcggttgagcaaaatgaattgtgtaatggaataaaaagaactccatattttaagatgaataatatcaataatgattggggatttaatttaaacaatttagtttatgtgagttgtgttgacgctgagctggagaaatatcgattagaggatggtgattggttgtttaacacaagaaatagccaagaattagttggtaaatcttgtgtctggtatggcgataataatattgtatataataacaacattctaaggattagggttaaggataattgtaatccacaattcttggatttttggtttcactcccagcgagggcttcgagaactaaatagaattaaatcatcgacaactaatgtagctgctatttaccagaaaaaattattgaaaacttttattaaattaccctctctaaaagaacaacacgaaatcgtccgccgcgtcgagcaactcttcgcctacgccgacaccatagaaaagcaggtcaacaatgccttagctcgcgtcaacagcctcacccagtcaatcctggcaaaagccttccgcggcgaacttaccgcccaatggcgtgctgaaaaccctgatctcatcagcggtgaaaacagcgccgccgcgctgctggaaaaaattaaggccgaacgcgctgccagcggcggtaaaaaagccgcgcataaaaaagcgtaa

SEQ ID NO: 143487 - DNA, 6321 bp, Enterobacter cloacae
atgactacacgctttttttcgtcgcttattgaacaatcgttgtctcgctcaaccgaagcaacgctcagtattatggggatcacaaacccgaacttacgcaagcatctcgcagagcaaatgggtgccgattgtgggaaatcaggctcatttcttgcctcaccagtattccagcaaatgtttggctggaaagagtcaaattatacaatgcgcaacctgaccgaaggtaaggcattactgagtaaagctgttgttgattcactagatgatcataacaacggtcgttaccgttttggtgcagactggaaacccttcactcaccagctagccagttggaaggctttactggaagataaacattcggtagtggtgacaagtggtacggggtcaggcaaaacggaatgttttatggttcctgtgctggaagacctctacagagaattacatgaaaatagcaacaacccacttgtcggcgtcagggcccttttcctctaccccctcaatgccctaattaattcacagcgggagcgcctggatgcgtggacacgtggatttggtactgggatccgttactgtctttataatggcaatacagaaaatcttcacgcttcggtaaaaagcgagcaggcaaaaaggccaaatgaagtgctttcacgcgaaaagatgcgtgaagaacccgcaccaattctggtaacaaacggcacgatgctggaatatatgatggtccgccagattgatgctccaattattcaacagtctaaagcacaaaaatcattacgctggatagtactggatgaagcgcatacctatgtcggatcgcaggccgctgaattagctctgcagttacgccgcgtgatgacggcctttggcgtgacgccagacgatgtgcgtttcgtggcaacctctgcaactattgccggaagcgatgccgaaaaacaactgaaaaaattcctctctgaattatccggtataccgcaggagcgcatcgatgtactggacggaagccgagtgattccgaaactggcatcgtgcaaacacgtttatattcctttagaagaaattgaacaaatccctgatacagacatgaagggcgtaagcccggagcgctttgaagctcttacgcattcacctgaagcacattacttgcgtgagatgttagttactcagccggatccaatgaagctggatacgatgacgcagcggttgaatacgctgaccaagcagaattatagccagcaggaagtacttcgctggatcgacatctgctctggtacacaacctaatcctaaagatccggcattcctgaagataagagcgcatattttccagcgcaatacccagggagtatgggcttgtgttgataaagagtgcagacaaaagcatggcactccgctggaaaagggctggccctttggttatgtgtatgtgaatcaacggcaaaattgtgaatgcgggagcccggtctacgaactggcattctgcaatgaatgtaacgaaccgcatcttctggcccgggataaaaatggcaaacttgtccaatgggaaaataaaggtggcgatgaattctctttgcaggatgaggtgaatgttgaaaacgacgctactgaagaaaaagttgagaaagaaagtagttaccgtcctccacttgttattgcagcagaaaagaccagcgaaacaggttatatcctacagcgactcgatcgcaagactcgtcgtattggtgtagttaataatgaaagtattgaactgattattaatgattttgaacaggtatgtagtgccagtggctgcggctacagaggcacgagtggaaaacaacctttccgccgcgcattgttaggtggaccgttttacgtcaccaatattgtgccaaccgttctggagtattgtcaggactttgtcagcgaagatggaaaggaaggagtggggcctgattcactgccaggtagaggccgccgtctcattaccttcaccgacagccgccagggaacagcgcgcatggcggtacgcatgcagcaagaagctgaacgcagtcgcttacgtggcagcgtagtagaaatattgggctggcatcaacgaacacagacttccaccacaccaaatgccaatacagatctggaaaagttagcagcattggcaaaacaggcacgccaacaggccgatgaatttagaagctggggattacctgaacaagcgaagctggcagaagtacaggcagagcagcttgaacaagcttttcaggctgcgaccggaggtaacgtagcgaccattctcatttcccgaacctggacagaaatagtcaatgagcttagagagaaagccgatattagcggccctattctgcaatataatcactatctgaagcctgaaattttcaacgaaaacggcgggccgctgaagctttcggaaatgttgcttttccgggagttcatgcgtcgtcctaaacgaactaacagcctggaaacgcaagggctggtgcgggttggttatcaggggctagagaagattcataagatgccgatgcattggcaagagcaagggctgacgctggatgactggaaagattttcttaaggttactctggatctgtacgtacgtgaaagcaacttcacacaactggacgatgagttaaaaaactggattggtagtcgtttttcgtcaaaattcgtccgtaacccggaaacaaaagatcctgaagataatcagaacagacgctggccacaaattcgtaatggcaatttgtcccatcgtttggtgaagttattaatgctgggtgcgggattaaaaaaagtaaatacggcgacgattgatattatcaatacttggttaaaagaagcatggaaccagcttaccgggtcacttgccgtactgaagcctgatggtaaccgtttctatttgccgaaagagcatttgaccttctctttaataacggatgcctggatttgtccggtcaccaataaaattctggacactgcttttaaagggttaaccccatatctacccactcacatttcatttgaacaactcacccagacgcaatatgacgcatttgtcgcgcaaaaggtcaccatgccagagatctggaaggtggatcgctcacaagaagactatgctccgggtttggctaaagtacgtgactgggtcagcaacgagccgctgatcgcaaaattgcgttcggaaaatgtctggacggatatcaacgatcgtgtcgtggaaggcggattttactaccgcactgccgagcactctgctcagcaatcgtcagaacgtctgcaaagctacgaaaagatgttcaaaaacggacagcttaatgttctcaactgctccaccaccatggaaatgggggttgatatcggtggcattaccgccgtagtgatgaacaacgtaccgccccatccggctaactatttacagcgtgccgggcgagccgggcgtagtcaggaatcgcgtgcgatctcttacacactatgtaaagggaacccgcacgatcaacaggtttttgccaacccactctggccatttgagaccatgatccccgcgccaatggtggcaatgaattccgcccggctggtgcaacgccacgttaatgcgctattactgtccgactttttatgtcacgtcattggcgaaacggataaagaaaaaaccagtctcgatagcctctggtttttcggtgaagacgacgggcaatcaaagtgtgaacgctttaaagtctggctcgagcgtccggttcttgatatcgacgcggcgctggaacggctggtgaaaggcacagcattacatggtgccagacccgacctgttgcgagataaaacaatccatgcgattacgttcatgcagcagcgatggctttccgtctaccgcgatcttgtagcccaggagcgagagtcgcagccacaaacaccttatcgcaagcgcatagaactggagaaaaaacgacactgcggcgagtatttgctgcgtgacctagcggccaggactttcctgccgggatacggcttcccgacagatgtggtgacgtttgataacttcactatggaagactatatccgtgaaaaattacagaaaagccgggataaaaaagatcgcgaagataatgtgtcacgttataagggacttccctcgcgtaacctgggcgttgccatccgtgaatatgcaccaggtgcagagatcatactggatggccgggtcttccgctctgctggcgtctcactgcactggcacaatattaatgccgataccaatgaagcccagcgtctggattgcgcctggcgctgtcacaaatgcgggaccataggctatgaagaggggttgagcagttccgggacgctattttgcaccaacagcgcctgtggtgaaaaaatcatcatggataatcgtcgccaggtactacagccagccgggtttgtaactgatgcgcacgcgccggtgacgaacaatattgaaaccatgaaatttatcccggttgtccctgcctgggtctttgttaaagcagaccccgtatcgctacctaacccgataatggggtatatggcatctggcgctgatgggcatgttttccagcaaagccttggagaaggtgggcatggttacgcactttgcctgagctgtggtcgcgcagagtcgatgttgaacgcaaacgatgcgccgaaaagtatggaagcccactacccgccgcgtccgggaaaagcggatcgcgacagccagaatcaacgtctaatttgccccggttcgacggcgctcatgaagaacgtcacgctgggggcattggcgcgaacggatgtctttgaaatggttctacgcaagccgcaaaacggtgaatatctgccggatagcacggaagaaggccggattgttgccatgactctggcggttgccctacgtcaggcgctggccggggttttgggtatctccgcggcagaactgggctacgccgtgcgtccggtcagactggaagatggacaatcggtattagccgttcaactttacgatgtgattagcggtggtgcgggttttgcatccagtgcgccgatgcacattgaggccattctgcggggaatggtgaagcagttgggttgccaccactgcgatacagcatgcagtgaatgcctcctcgactcccagacacgccacgatcacgatttgctggatcgtaaagcggcacaggcatggcttggtgatgacttctcgtactacatcggtttgcctgatgaagagacattctcactaccggatgcccgctactgcccgggagccattggcgatacccttcgtcgggcgattaacgagggagctgaaaaactcacactgtggatgaacgggccactcaatgagtgggatctttatgcccgtcaattccgggcggctattcagaactaccggattaaagacaatgttgtggtcgaccttgtcattcctgctggcgtcgatgatccggagttgttgcacgaactttcgcagtttactgctttgggcgtgcgcttgtgtcatagcgaacagactctggaattgccgattgtggcgcaaatcgcctttgccgatcgcgtaatgacgctggcttcacgcagccagcaggcaactaccccagggccaggctggcacctgaatgacgaactggtcgttcgcagcctcggctataaaacggtaaaactgaacgagtttgttctgccggggaaagcagcgaacgctgttgagcgtgtaaaagacatagagattcataaacagttaaatggtccactttcgcagttcggacaacgcttctgggacgcgctgtttaatagccatgaagaagcacagtcgctgatgaaaaaccagcaaattacccacgttcactataccgatcgctatctgcaaaacccggttgcgctggcgctgctgggggcgatcctgaaaccgctaaaaacaaagctgaccgatgacgcggagcttgagcttgatacgctgtttaagcccaaagatcgtcccggtaaccggccgttccatgactggatgagcaacgtggattttcaggatttcgccgaccagtggtttactgcggcgatgggcagagcggtagaactcacggtattcgattcgccacgtgatattccgcatcatcgtaagctgacggtgacctttgaggatggtcagacgttgaagattcgattcgaccaaggaatgggatactggcgtatcgacttcccgtatgcatggcgtaactttgactttactgacgatgtgacttatcaactagtaaaactggcgcaagcctgccaggagggcaaagtccttaatagcgaggaaagctgggcaacggatgtgctggtagaggtgatggcgtcttaa

SEQ ID NO: 143488 - DNA, 249 bp, Enterobacter cloacae
atgagactgttaagcgattacacagaaaaagaatttttagaactggtacgcaaaatttgcaatgcggacgcaccaactgaagaagatgagaatcgattggttagagaatttaaacgacttaccgagcaccccgcaggctctgacctgattttttatcctgaagagggtaaagattatagtccggaaggcattgttagagaagttaaggagtggcgtaaagaaaatggtaaatccggatttaaagaataa

SEQ ID NO: 143489 - DNA, 603 bp, Enterobacter cloacae
atgaaaaagatcggatttttgtcgtttggtcactggacgccgtcttcccagtccggcacgcaaaccgcagctgacacgctgctacagtccatcgatctggctgtcgccgctgaagagctgggcgcggacggggcttatttccgcgtgcaccactttgcccgccagctcagttcgccattccccttgctggctgcgataggcgcgaaaaccaaacgcatcgaaatcggtacgggcgtgatcgacatgcggtacgagaatccgctgtatatggcggaagatgctggcgcggcagatctcatctccggcgggcgattacagcttggtatcagccggggctccccggagcaggtgattgatggttggcgttattttggtacctgccgcaggacggggaaaacgaatctgatatggcgcgccgtcacactgaggtactgcttgatgtattacgcggtgaagggtttgcgaagcctaacccacagccgatgttcccaaacccgccgggattgttgcgtctggagccgcattcagagggcttacgcgatcgtatctggtggggggctggctccaatgcaacggcagtatgggcggcaaaactggggatga

SEQ ID NO: 143490 - DNA, 288 bp, Enterobacter cloacae
gtgacccgcgaaaccatcagcaaactcaaagccatggataagttggatccagatgaatatgacgtgcctgacgtcgatttgttcatcaaggctcagggatatgaagatgactgggacatcgtcagtgcccgggcgctggattacgatgccgcctgtatgcaggtttatatctcattcggcaaaaagcgggatcacaccgtgattgactgtatgctcaaggaagatggcgtgtggaaagttgaatccgtggccagtatgaatatttcagacaacctgatgatggaataa

SEQ ID NO: 143491 - DNA, 2544 bp, Enterobacter cloacae
atgacaacggcatttaatacagtgcagcctgcgcgcctggcaatattcattgccctcgcgcttgcgggtttctctcccacactgtgggccagtgagacgtttaatacggaactggtagaactggataatcccggaatgggaaaagcggatttatctgcctttgaatccggctcgcaggcgcccgggacgtacctcgttgatattattcttgacgatcggctgctggaaacgcgggatattcgtttcatggcagtgaaggatgctaacggcagtgaaacgttgcagccgtgcctgagtatcaggcagttaaaagcgtggggcgtgaaaacggcgcttttcccgcagctcgacgccgggcaaggagaatgcgccgatctcaaggcgattccacaggccagcgcggacttccagtttggcgcccagcgtctggcaatcagcatcccacaggcggccatagatctgccagcgagaggttacgttccgccggagatgtgggatgaaggcattaccgcggccatgctcaactacagcctgagcggcgcgaacagccgggcaagaagcggggcaggcacccgcagcgacagtcagtatgcaaacctgcgaccggggatcaacgtcggtccctggcggttacgcaactacaccacctggtcccgcgatgcgtccggccaggataagtgggacaatgtctataccttgatgcagcgcgcgattattcccctgcaagcccagcttacgctcggagacagttccgcccctgccgatgtctttgacagcatgccttttcgcggcgtccagctggcgtccgacgacgatatgctaccggattccctgaaaggctatgcgccggtggtgcgcggtattgcgcgaactaacgcgcaggtcgtggtgcgtcagaatggctatcaaatctaccaaagctatgtggcgccgggcgcgtttgagatcgcggatatgtatcccaccggcggcgcgggcgatcttgatgtcacgatcgtcgaagctgatggcagtgagcaacatttcaccctgccgtacgcttcgctgccggtcctgcaacgggaggggcgcctgaaatatgcccttaccgccgggcagtatcgatcgtataacccaagcgtggagaaaacccccttcgggcaactgaccggaatttacggcctctctcacggcctcacgctctatggcggcgtccagcgggcagataagtaccagtcggcggctctgggggtgggcaagaacatgggcgatttcggggcgatatccgcagacctcacccagggctggtcaacgccggagcatgccgcgaaaacaagcggtcagtcgtggcgggcccgatacagcaagaattttattaattccgggacgaacttttcgattgccgggtatcgctactcgacccgcggctattacgggatgcaggaggtcctcgattcgtacggcgacagcagcgcgcttcaggacaggcgacgtaaccgtgccgagttgacgatgagccagacgctgggggacaacctgggcgcgctcaccctcagtgcggcgcaggaagattactggaatgacggtaagtcgatggcttcgtggagcgtcggctatagcaactactggcacaacatcagctatggcctgacatggacctacagcaaaaatgtccgctcagcgtcagaaacccgcgacaaccaaaaaaacgctgatcacgaccagcttctggcgttcaacatcagcattccgctggataaatttttgccgcagacatgggcgaactatggcatgaacgccagcaggaataacgggatgacacacagcatcggtctgaacggggtggctctcgaaaaccgagccctgaactggaacgtgcagcagggatacggcacagagggcgtgggctataccggcagcgttaacgcggactacagaggcacctatggcgaagccacggcggggtatggttatgacaaaaacagtgaacgcctgaattacgggctacaaggcggcattctcgcccatgctgatggcatcacgctttctcagccgctgggggagaccaacgccttaattaaagcgcctggcgcccacggcgtggatatccgcaatcagcccggtgtacggacagatgttcgcggttatacggtcgtgagcaacctttcggtctaccgaaaaaacgatctcactctcgatccggaaaatatgccggaggatgtcgaactggagatcaacacccgcacggtaacgccgacacggggagcggtggtgagagccgattatttgccgaagtcaggtcgccgggtgctgatgaccttgaccgacaacgaacgcgccgttccgtttggggcggtggtcacccttgtcggtgatgagagcagcagttttattgtgggcgatcgcggtcaggtttatttaaccggtatgcgcgaggaggggacgttagtcgcgacatgggggagtcagcccagccagcaatgccgcgctgatttcagcctgccgacacactcaacattcggtgggatcgctgacatgcgcgcctcctgccgtcaggaacgttaa

SEQ ID NO: 143492 - DNA, 873 bp, Enterobacter cloacae
ttgctttcaaaattctacgttcagaaagttttcatccctcaatatgatgtatatgagcatgtccttgattttatgtataccgatggtaatctaaattcatttgatacgaaattaacaataaaccctgtcgaaacaataaaatctatctcacccaatacaatggttattttagtaaaaaaacacacgtatgggaacgagtcagaggggcgaactatcgatactttagatgatggtgaagttattaatagcggtactttattacgttcatgtgtccctgattgggtttttattccgataaattatgataatagcaatcgttcttcaatttttaagaaagacttaaaacatcataacattgaatttaatagctcgacagattttattgctgcgtggagtacaaaaaaaataaaaaatgaaataaaaaaagcatttgagaggctacctaagaatcaaaatgaaaactctatggttgtttattcgggaccaaatgcggaacaaaaatattggcagtgtatgcaattatcgttagctatacatttcccacccttcattccattcatctcgactgatgctggctgcatatattttggagactatgaggttcatgatgatgcatggaagacaatagatcatgtacttaataagtattacggttttactggtgtaatacagattccacatcatggctcatcagagaactatagagatgaaattaatatgaaggatttcctgtattcagttatatcatacggaactactaatacacacgggcatcctggttcttttactactgcatcggttacaaaaaatcgcggtattttattgggggttacagagaatccgtctacaagggtgcatttccttgtcaaataa

SEQ ID NO: 143493 - DNA, 558 bp, Enterobacter cloacae
atgcagaaccgtttttacaacagtatgaaattcgagaaaaatccactaaatccgtatattgcacttgccctttctcaggtatcaaaaggaccattcaccgtcaatgatcttgtcttacaccttccggccattgaacgtttttccggacagaggaaggcctggcactttgtttatcagcagattcgtaaactggtgaacggtagttatctgataaaaagaagatgctacgggatctcccgatatgaatatctgcgtaccccggaacttgaacagttatatttacccacaaaaatgatggctcagccttctgatacgtcgttaactccatcgatgtctcgtgagctactggcaaaacggcttgagggtaaaaaagcaagatacgaagaagaactggagtatctgaccggggaacgggatgttattaccgaattattgcccgaatatcccgatattgaatctgaaatcaggcacattttcactgagctggacaaaaaaacttgtcggttacgtgtcaagatcagcgccattgaccgtatcatctcaggggtttcactctga

SEQ ID NO: 143494 - DNA, 1362 bp, Enterobacter cloacae
atgccagcaatttttgttcatctgtcagatattcattttggtcaggaaagagatgacagggttcatattcatggagatgtaaagcagcaactgatcgtagatgccagagacgtaatttctaaaatcgcgggcggctcagcagatggcatacttgtcacaggcgatattgcccagtctgggcagtggtctgagtatgaagaagctgccagatggcttgatgaactggcttcgaacattggtgttgggattcattgtgttcagatggttccgggtaatcatgatctggatcgttctaagctgtcttttgccgggcaacagatccttgatcacattcgtgaagggggggctcctgaatatgaagccatactcaacaacccgacggacagggccgctcttttcgctcgttttgaggattatgatcgttttagcttcggttataactgccctcttaatagtgaaggagcctatgcttccgacatggagataagtcttgcaccggggagaaccatccgattcataaggctcaattcttctcttctttgtcatggaaaggaacgggatgaacaccctgaactgatgattggtgcacgtcagttcacgatcccccgcgaggatggtgtggaaaatattattctcgttcaccacccactgagttggtacaaagatcagaaacaagtgagagattacatccgcagccgcgcccgggtgtttatttctggccatgagcataatcccagggtatcagtagataacgtcgatgagggatgtgatgtcctgatgctggctgcgggcgcgactgttccatatcattcagacgaagtttacaccttcacttataacatcattgaatttgactgggatgaagggattgatggtctgtcagtcacgatgcatccacgggcatggaaccccagacgcacatgtttcgaaagtgatgaaaatcgtctgggaggaaaggatcctcatttccgtttacagtccccttcatttcgtaaagcgccccgcccggaaaacaccgttcagcaggatgtagtgttgccggttgaaagtgctgagccgcatgcagaggttcctcctgttgaggcacccatggcggcctcaacaggggcgcttatcatgcacccggacacaaccagtggttatgagacagcacgattacgtttcttcagggaccttttcgaaggagaacgtctgcgcattcttgttgaactaagcgcacttactgagaacttcaatgaacgaatgacgcagggccttgaacgtcggttatttgacagacttgttagggaggggcatctggaaagtataaagacaatgattgttcagttaattgacgaaaggaaaagtggggcgaggtcatga

SEQ ID NO: 143495 - DNA, 1029 bp, Enterobacter cloacae
atgaataatattgcagttcatatgaggatttgttctgccactgtaagtgacagtgatgttgagtcaaggctggcggcggcgaaaagccttgccacgtcctggaaaaaagacagagtgacgtccagcatagtgacgacatctgcggatattgctatggcattgggcggtgacggaattccttccgttgtgcttggcgagaaaattcagacagctattcagaataaatctccttcctatctttatgaagaacgcccgctagatgtgggggtttgtgccgggatggcaatgatatctgttctaaataccgcttatgcttcgcatggatggacaacagctgatgtttatgcgacagcactctggtcagctctttcgtatcagccagccctgtcggttgatcggcgggaaaatcttcgccgggaagttcttactgctgcgtttgaacgaagtttaatggctgcggataaagcgagagcgcgtgaggaagtcccagatcctgcacagattgagattgtcatcaatgatgataatgaggtgacccagaatgttaattccgcagtacttaatacagttgaagccctgcgtcgaaatgctgttctagatcgtgaagaactggattttttatggtgggcccaacttgggcgtagccgtttactgcataagccgtggtccgagcttaatgagccaacacgcttgattactgccggtattgagggtgccaggttgcttcgccggttaccctgcgaagttcaccgtgaaattattctgcgtacgctggagcaggatcaaaaaatcgatctgtcagaattactggaagcggcaggtgatttgcggtcggaactgagtgaggcatttatcgggtccagtgtaacgaatcaccctactgtgttcccgcttctttatgcgttaaccaccggcaatgtcgattctgttggtggggctattaaaagatcggtttcagagtggggggaacgtgcattgcttgaagctacatttgccaggttaatgcatcagggggcggataaaatatga

SEQ ID NO: 143496 - DNA, 1032 bp, Enterobacter cloacae
atgagtgggtcatgccggttcgaaggttgtactgtcgatgaaacggggatctgtgctctggaaaactccacgtcaacctgtgccaaccgacagcctcttgatgaagcaaaatcaatgtcaggaaatgttcctggttatgatgatgccgatttacagtctgtggaacaactgggggccccggtgctggttcagcccgccagtacgaacacgtttggttcagggcattcacttggtctgaaagatatcaacgcattaatgggtgcgcggtatatcaatcttgtcggtattcttggggaaccagagtccggaaaaacagcatgtctggcaagtctgtatcttcttgtgtcacatgccgctcttgatggttggtcttttgctgacagtcgaagcctgatggcttttgaagatattgctcgtggggctcgtgactggaacgatggtcatgtcccggaacagatgacagttcatactgaactagcggatgatcgcagccccggctttcttcatctcaggcttaaacgtcattctgacgggcaatatgtggatctcgcgcttcctgatgtgcctggtgaatggacacagtctcttatgacgactgccaggtctgatcgactggattttattaaatcgtcagaggttatctggatagttattgatggccggaacctggctaatattgaaaagcgtcaggggcaaattgcaagggttggtcagcttgctggccgactgaacacaatgtttgaaggttgtattccacggttgctgatagttatcactcaccacgatatgcacagtgttgaggataaagtgcgtatccgcctggaaagagagctgattcgtcgtggcgctcgtgcagatatagtttgtgtcgccccgttttctgaccggccggatgacatccctcccggattcgggattgccagtctgattgatatgacggcgggtgacacagctgaacagccggttttctggccatcgtacgaaccttctgacagtgcccgggcatatcttagctacaggagagaccggtga

SEQ ID NO: 143497 - DNA, 843 bp, Enterobacter cloacae
gtgagtcgatcaattatattacttggtggtcctgattcgggaaaaaccaattacatcggtcgcctctggtgcgcactggatgagggtaacggttcgcttcatgcggctgaacaaccaaaagatattcagtttgtactggaggttatggatcatctgtttgaggggggatttgctcctcgaacggaacacagtgactcccggcgggattttgaagttgtccttgctgtggacaaaggtgggcccgaagcccgtgttattgtacctgatgtttccggggagctctggcgcaacgctgtaatggataatgaaatatcatccgaatggatggatgaactcacacaagcagatgcagcattactctttcttcgtgttggctccgatcaggatgttcgcccgcttgactgggtaacttcgcggaacctgcttgagaagatcggcaatgaggacgatcagggaattccaacgcaagtcatgctttgcgaattgattcatttcctggaagactcacttgctgaacgtgaagacggagaattacctcgattatcggttgttgtggcggcatgggacctggtagatgcccagcagtttgaacaggggccgatggcatatattgaacgcgagtatcctcttgtggctggccgactggctgatatcaatgcactggatgttcaggtgtttgggttgagtgtggtgggtggagacctgaagtatgatccggaataccgtcaggccttcctggaagagggactggatgggcagggatgggtagctgttcaggatggtgatacgtggcgtaaagatcctgacattacgctccctgttacatgggctgtggggctttaa

SEQ ID NO: 143498 - DNA, 486 bp, Enterobacter cloacae
atgaatttcgtccagcgatgccgttcatcctgcaactggcggccatccacacgacgtccggaccagtcagaaaaacgggactttgcatttgacggtgagaacacgagatcgagatcgcgacctccaatccgtcttggcgacagtgcaaatgtagacagtgaaaatcgttgtctgatatccggccataacgcagtaagtaaacgcagtgcgatatattctggctccggcgcatcaaagactacaacaggattaggttcttcaagaaaaagagcttccagaaactcatttgtattaaaaccagatacccgaggatattcctctccgtgcaattcattcaattctgcacaaacagcatccttttcttccggcaacgctgatgaatcaagcagccggagtacggcaacgagaggcatcctgtatgcccagtcatgcatgttaaccagtacgcttttcgtacgaacacaacccgcccggggtacactctga

SEQ ID NO: 143499 - DNA, 1842 bp, Enterobacter cloacae
gtggggaatgtgtctgttctgcgcgtggcgttgttatgggatgaactgttcagtaagctcagccataccccctccgctgcacttgggctactggatattgctaattcaggaatggtggccagtactgatgcgttactggcgctggagcctcgtctggttgaggctgtcctgagcttcaggcaaacgacgtcaccggatgatgcctgggattttctgggcgcaatagcacgaaaattgtatggacgggacatgccagcaggtaaggctgctgttgttcgtcttgccgaatatctcgcggaacaggctccggaaggtgcattccgcctgctggaacaggctgattctggtggagccatctacagtttgctccctggtatcgcgaagggactcagcagagggcctctgttacgggttaggcagggacttctcaatgcatccatagatatttttgcccgcctgatttgtgctggcggtgctctggctgaacggatctcggctgacaatgaacttattaagaccgctggcgttgtattgcggggggctgagaagcccctgtctcataaggcgggcagagcattacttccctttttaacagaggatcgtcatcttccggcggcagagattgtcatcccggaactcaattccggagacgtcattacagaattgcgctggttaagggatgccaacaattttcagtcccgggacatatgtgaagtgctgataaaacgggcagcgaaagtcgacgcgttaaatgatgttcgtgatgtgtttatggagtctgaaattaacggcagagtggcggacttgcttgcgctgacgctgacgccgtcagaaagcgatgtacagtggctcctgaatgaaaaacgcctttcaaaaacggtttcaaccggactgcttgtagatttgttgcgcaaagcagatgacgtgcagtttgaagctgtaatgttgaatgaaaacctttttgcccgggtgatctcaggtatctttgatgatgctgtcgatattcttatgcgtgcggccttacagcaacatctgcctgttgatatgttcattcgtctaattcggtatgtctatcccagaattgattcagttcagcaatccagcctggcggaatatacgcttaagaggtgcctgcgcaggcgctttgaagggaatgagggcgagtttttgtctgccctgctgggtatcctgggcgaacgacttgatggtcgatgggttatcaaagaggggaccggaaagggtgtggctgcggatattgctagccgaaatatggtcattttcgagaacgctccggtttcggcacgtctgcgcattgttgctgcagtggatgaaatagcctacgtactgaaagacaggcgcgttttggacctgtcggaagaagcgaataatgcctgtgcgcagctcatgtttgatgctgaaatgagtgtgacttcccgaagggcgcttgtggatgcggcaaatacgcttattcccattcttcttaatgcccgccgtcagccagtctcactgattattgctgcattattcccgatagtttacaaggaactagaaaaatcagttgatgtacctgagtctgttaatctatttttttatttccttgactgggatcgatgtaaaacagcccgtaatgacctggttcatgcatttatgacctcctcatggaggccgggccatttagcccttacggcgtgccgctgtggtgaggtttcccggatgataaaaaaggttgcccggtcgtatgaaggtgaagactatctcatacaaatccgtaatgatctggaaggactggatgacgataacaggtgcatagtaaaagcaaagattgctgaattattgcaataa

SEQ ID NO: 143500 - DNA, 327 bp, Enterobacter cloacae
atgccggaatttttcgttttgttaagtgaagcatttaatgaatctgtgaattatatgacatgggctttttatgcactcatcactgcctacgtttcgatggcgtttcaggaacgaaataaggataaaacgtggtgtaatgttttattaaataaattgctgtttttaatctcgatgtctatctttatcccaaacatatacttcgtatccagagtgttcagtgaaaaacttggacctgcagccggggtgttctcatttataattggtttgctttttatgatgattaattcgatccccgccatcacaggccttgtacagcaaagaaagtaa

SEQ ID NO: 143501 - DNA, 297 bp, Enterobacter cloacae
atgaattcagtttattctgtgaaaaccctgaaacacatacgcccattgctggtggggtttcgcaaagctaagggtttgactcaaaaagaagttgctgaaaggttaggtgttacccagcaaacgtatgcccgtctggaaatcaatccagccagtgctagtattgaacgcctgttcagggtatttactgtgctgggtgttgaaatcgttctagcctccgaaacaccttctgaggttacaaagtcagcagaacagacagatatatatgctgattcaccagccagacgggagcagtggtaa

SEQ ID NO: 143502 - DNA, 177 bp, Enterobacter cloacae
atgttctccccgccagggcacgtgccaaaagagggattcgtcgggattgacggggtacgaatttttatgccagcggaggcctttgagacgctggtccgggagttaaccataaagtgcgctgaaggctcactggcagaggccatgaccggactgcgctgcctgtacggagacctttga

SEQ ID NO: 143503 - DNA, 2229 bp, Enterobacter cloacae
atggctgatatcgacgcaatgagactggatcagtctgtctcccgtccggaacaggatcgctatggctttcgctatgttgccgcacagctggcacagtctgttcgcgctattgggcgagaaggaagcgccgttatcggtattgagggagtctggggctccggaaaaaccagtctgctgaacctgctgcgtgcggcactggacgaggagggtaaagaggataacacctttgtcctgagtatctccccctggcttgatggcagtgataccagtctggtggcatcgttactgctcccggttgctagcatcatcgctgctgaggaagaacgccgccttccacccgaagagaaggagagcctcgaaaagaaaaaggcgataacccggactgccagaacaatcatggactataccagagcgacggcccgccatctggctccgctggctcaggtcgcgacggtgatcccgggtgtacctgatgcgagcggtgcgctgaacgcactgtcggaaactggctggttaaaagaaaagcaaaaaaccgcctcggtgatgcgcactgaaatcgcagaaaaaattatcgaaatggatctcagctttattattctgctcgacgatctggacaggctggaacccgcacaggcagtggaagttgttcgtctggtcaaatctgtcgccgatttcccccgcttccgctacatactctgttatgacaagacggtgctggctcaagccatcaggaaggggctggacgtggaggatggcgaactttacctgcagaaaattgtgcagatttcattcagcctgccacggccagaatctttcgacttacgtcgtgagtttttgactggcgttgtccgattgtatgaaaccattaacgaaaagtctccggacgaagaatttctgagtgagttaaaccgggtgacagatatctacggtgctgcactgaaaactccccgtgaggttcacctggctcttaataatctgcggttcagatacagcggaatacgcgattacgtctatttgccggatctgagctttctgcagcttatccgtaccaccaatcccgggttgtatgactggatcgaagaatatcttaccgagcgggctgttgtggaatccggtgacggaagtgtaagtgaggaagaacaaaaactgctggagcagaatttgctcgaatgtttgtctcattttcgatcttcagaagctaaatctgtaacctccctgagccgctgggtgccgggtatttcggggttccaggctaatatacacaagttgttcgcacaggctgatgatgaagagaaagcgatgatgacagcaaatcgccgtctcgggagcaatgcatactggcgttattattttgcattttcctcacctcagaacgttttgtcgccgacgtatttcgatgagctgttccgtaaaagcagagttcctgaagaatatccggcgatgagccgggaacttctggacaggattaacagcaatggtgtgtcttcacgtacctggtttgagcatattttgagtcagttgacatggccgatgataaacgggcatacagccgcagaatgttccggtctgctgacgtttttcttcaacacaggtgatgagatacatgcacgttaccggcaaagaaatcgctggttttcccgttatgatctcgatgtaaaccgcgtggctgatcgtcttctgaaaaggatgatggatgatgaccggacgaaggcgatggaatccctgctttctctgacaaagaaaggaaccgcctgggtctggattgcaaattatatccgcgatttgctgtggcagaatgggctggtcggcaaccgggccgaaccggaacgcgagcgtgtactgaaagatgaggaactggagtgtatacgccatcatttctgcgagcgcctgaacgagggagaaatgaactcactgtttgagcgagatggtgaactgggtggctttgtctgggcctggcaggatattgcaggtcccgaatcagttatttcctggatctcccaacaaagtgacagtgataaagcgtttctgatgttgttactgagcctgcgctcccacattatctccagtgcaaccgggcactatctggcactaaacataaaggatatagctcacctgttcggaggagaagatatgctcctgcgaaagctggagcgtattgagtccgaagaaaatttcccggatctggtaaaagacgtcagggccgccatcgacctcagtaagtcattctga

SEQ ID NO: 143504 - DNA, 453 bp, Enterobacter cloacae
atgcctaaaatcatatcaaaaaaacatgttcaggatattgtcaacctcatacgtaactggccagaagataccgcattaagctgggatgaaatttgccttgtatccagagatatacttgactggtcaacaccaccaacccgtcaggcactcgataagaaacctgcaataaaatttgcctataacacaaaaaaagacgctatcaggaaagaaaaagaccagttggcgcagatacctgcgcctcgcagcactcttgatgccatgaaaaaaataaaccggctccagcaagagaatgctcttctcaaagctgagttatcccgaatggctgaaactgcaaatcgttttatttataatgcttctcttgcaggtctttctcgcgaacagctgatgaccccattattggctatcggggggcgaacaattgtaaaaagaagaacgaataaagacagaacataa

SEQ ID NO: 143505 - DNA, 2055 bp, Enterobacter cloacae
atgagcaaaatcatagaatttgttccaagactggatttatctggagtagaaaatttgaaaaacttcatccgtgtagcacgtgatgaattaaccctatggtctgaattaccaggattcaaatgggaaaacgacttttgggtaacgacacataaaaactttaacctgaccaatcttactaagaaatttatcgggaggcattcagaacctgaagataaatatctgatgagccctgtattcagagagtttgccaaagcatggctacgatacagtcagactattagacccactaaaactattatgcgcacacttaatgctttgaaaacaatggacgcggctttgggacctgatatcacgctgaataaaattgtacgttttaatgagcgagattattttaaagcactaacatttattgatgataacactcaaagacaaacgatctgtagtgctatgctggttatattaagaacgatgtcagatttttctatcattacttcagatgcatactactggaaaaatccttacacaggtattcactcatatgatgcagaaagaggaacccaggcacctcctgaaatcaaagaaaagaaaattcccgaccaaaatgctcttcttgccgtcgcagatgtgttttcccgatatgaaacagggggtttgcatgatgtcgatatcatgatcaccagtttaaccggtatttttattagtgtccgcatgcgtataaacgaggtcctacgcttacgtattgacgctttaaaaacagatgaagataaaacaggagctccacagcaatatctggcctattgggttccaaaaactcgggaatttgctcgtaaagcaattcctgcatcaatgggttatgtttctagagaggcgattaaaagactgattctcatcactgaagagggacgaaaacttgcggcttatatggaaaccagtcctgaaaaattttatcgccacccactatgcccggatgttccggacgatcagatgctctcaggtaaagatatcgctgcagcacttggcatgagcagcgtgaagtgttgcaatgattttttgcaaacctatacaggaagtgcctcagtaaagaactacacgcttgacagcctctggaaagttgtacttatggctcacaggaagcttaaccctcattttcccttccaggagccctttaccagtgcgaacttaatccccctgaaaatgtctgaatcgctactttgttttcgatcccaccagctggtatatcatatcaatacgagccccgtccttttacaaccctttgcacagacgcagtaccgacgtcggctcaatcctctcgaaaaaaaacaatcttttttcatccgacacggattcaatgacctgtatttaaagtcgcacagcatacgtaccttattgaatcgtattgctcgtcagagtggcgtgaatattgaaaccataacatcatggagcagtcgtgcctccgtgctccagaccagaacttatcttcacgataaaccagccgaatttgccgaaaaaggcgcaatgttattcagaacgacacaacatcataaccccaggcctcctgtcgccgattcggacgttgagatatttaaacagggacccttccataaaagtcgatatggactttgcgtcagaagctggcgggcaggcccctgtaataaatttgctgactgcctgaactgcacagacctgttgatgtgcaaaggggataaatttgcacttgagtctgttcgtcaggagcatgagaatctgcgggcatcttgggcatctgctgttaaggcgattgaaaatggggagcgttctgcatcaatatggaccgaaaagacagcgtttcaacttgaaagaatggaacaactactactattgcttacagatcacgatatccctgacggcagtcctgttgcgctggcaggtcagaatttcagccatgaaaaagcgattatggatgaaaaaaaattcacttatggagttgagtcaaaagctcattttcagatagcagatatttacagtgaagaattgctgaactgtcttaaattactggatgatagtaaaaatgcctaa

SEQ ID NO: 143506 - DNA, 1662 bp, Enterobacter cloacae
atgaaagataatgctcaaaaattaacatcagcccccacacactcaatagatcttgatcgcacaagtagacatgaaaggtaccactgggatggagacgttctggtgagacgatatattgctagtgatttttcaatgaaggcagcactatcaaaacttaattattctttacgagagtcctttaaagacagtgtaattgagtttctcaataatggtaattattcacaaagcgcttacttcaggttacttacagctttaagagcggccctgaatgcaaaccctactgacgaatttagtatgcagtggttatctcaggcattaaaacgaccaggctttcataagtgcctttctgtcattaaaaatttctttatattctggaatatgcgaaacaacgcagtgataagcagagaagcactatacctgcttatcaaaacggaaccctgtcgtacaaccaacagaaacgtactttcagatgatccagagaagagttggctaaccgacagagaatatgatgctttacttcatacgatatggaataattatgataaagaaatatctgacacacagacgacactgattaagatactttccatgcaatatgcacgcaggcccattcaactagcaaatctgaaaaatggtgatattcagtatcgcaacagctcatcttctggcagaaccggccatgatattcatttcccggggacaaaagatctgcattccatcactggcttcagggattctaaagttgaaatacatcctcttggtgaacatatagcagatttatttttgatacattttaaaaacatccgaacaatgtatgagcatatattgaatttcactcttactgatgaacagtttaatagcttaccctgttttagcacacaagagcactttcgtttcgccataggtatattaaaaaaagatcatccccacttcattaatgatcacctggaacttaaaatattacacctgcctgccgaaaaactttccaagataattagatggcagaataatctagagagtcctgaacagctagtcctctattcagggatggtcagagttccctcccctccagtcagtcaccggacgcaacggaatattgtaattacagcaactcgccttcgtcacactcgggcaaggcaacttgcccgaatgaatattccccgttatgtcctctctcattggctcggccatactaacgaaaaatccctgagcgcttattacaatgaccctgcagaagaatcacgtcaacttgatgaaaaaatggctcatatcctgagtccaattgcaatgtcgtttacaggtaaattaatcgattcccgtcatgagtttgacacactgatcaccggctctaataatctggagcttttaaaaaatggagatttggaaaatgttggcctttgtgggaaacacagtttttgcgcaacaacgtcagttcctgtcccttgctatcggtgtaaagactttcgccccttaatttctgcaccacatcaggaagtgctggatgcattgctcatgagacagcaagctaaaaaagagagtctgaaagtcggtgggttgaggaatattctattaccaatagatttatcgcaagatatcagagccgtacagctatgcatagacctgtgtaatgctcgtaaagctgaactggagcaaaaaaaatga

SEQ ID NO: 143507 - DNA, 1212 bp, Enterobacter cloacae
atgacatacaaaatcaagacattcatttcaactactggtgaacggttttcgcagctgtataaagttgacggtgatgggttccctctattttaccctacagcctacattgcccgtacagcaaggctgaacaccagtcatgaaactcaaaaaattattcgatcagtgattaaacgtgtctatgaatgggagcaagtacacaatattgacattgagttccgtttacattgccaaaaatttcttaatcttactgagattgatagccttgctgactacttgcgaatatgcaagcagggaaagtcaaaaagcataattggcatccccaaattcaacacatacataatttatgcagcacaatacattcaatggttaacgtaccaacttattaaagatttttccaagcaagaaattaaagagtcaattaaacaacaaaataactttctaacaagcaagaaaattcgaaaagcaggttctaagtcttatcaggaacaaaaaacgttacactcaaaacttgatgcaatcgaaaggcataaactccaggaattattcaactccccctttgaatcacttcagagaagtgagaacactggccaacgttttcgaaatgtccttatgctacgtatactttatgaaacaggcatccgtgcaggtgaattactcagtttgaaattaaaaaactttcaggaaagtattgggggggagagcgcctatattgttgttgagcgtaaccacaacgatccaacagatctacggcttcaccagccagtagccaaaacatcaggtcgtattttgcctgtttcccctgaactggaaaaacaactgtatacttatataacaacctggcgtgcagatgtaccttatgttggattttcccgggaggactttattttcataactcacagaggaggtcaaagtcagggtaaagcattaaccaaaaaatccttcgaatcagctatcaataatattaagaaaaaacatccagcactaatgtcgatacatcctcatctgttacgccatgactggaactatcgtttttctcagattgtagatgaacaggccctcagtgaagagcaagaaagagctcttagagaaaacctgatgggctgggctccaggctcctcaatgtctacaatatataatcgtcgccatatctacgaaaaagcacgagaaatcggcttaatggttgcgtcaatgacgaaaaggcggattgaatga

SEQ ID NO: 143508 - DNA, 747 bp, Enterobacter cloacae
atgggcggttttattaacacttataatgataacagggtagtagttcttgataccgaaaccaccggtatgaaccagattggcgcccactacgaagggcacaaaatcattgagattggtgccgttgaagtagtgaaccgtcgtcttacgggcaacaacttccacgtttacctcaaacccgatcggctggtggatccggaagcgttcggcgttcacgggattgccgatgagtttttgctggataagcccaccttcgccgatgtcgcggatgaatttctcgactacatcagaggtgcggaacttgtcattcataacgcatcgttcgatatcggctttatggactatgagttcagcaagctcaaccgcgatattccaaagaccaatacgttctgtaaagttacggatagcctggcgctggcaaggaagatgtttcccggcaagcgtaacagccttgatgccctgtgctctcgctatgagatagacaacaccaagcgaaccctgcatggcgcattgctcgatgcccagatcctggccgatgtttacctgaccatgaccggcgggcaaacatcgataaaattcagtatggaaaatgaatcccagcagacgcgggacgaaggcggtattcagcgggtcgtgcgtcaggcgaatcgcctgcgggttgttttagccagtgatgaagagctgatgaaccacgaatctcgcctcgatttagttcagaagaagggcggaagctgtctgtggcgtgggtga

SEQ ID NO: 143509 - DNA, 915 bp, Enterobacter cloacae
atgcttattcagaagaagcgaattagaaacatcaacaactacatcactgtttttgatggcagagatgtatttatcgctcatgcactgccaagccaacaaaaggggcaatcaattgggttcactgctaaccaatctcttggagaggaagttcttcctcacatcgttggtgcaataactcgcttcaacgccaacgggaaatcagtgccagacaaaacgttgcctaaagaaacagcttatcggcaggtatcatggacctggaaaaaatgggttggtagaggcgagactgaagaggtcactgagactcgagaaatggagtatcaacgttaccagaggattttcactccaccaccaagtatcgagttgaaaattgttgagaacttgaatggtcaaaagctattgatttcacctaagttgaccttgacagaagaaaacaaagaccttgtaacacattgcgttaacttgtttttagagttatttggtctttgcgaagttgttgacgaagatctcaacactatcgttactactcaatctataaaactaaactggagtctcctccctcaaggacaatatccttggaccaccattggttcgcaaattatgtcagctatcaaaccgagaggaaaaggaaatgctgctgttgtagagggtagacttgaactcattaacagtaagcaacctgattttgtcgctgtcggaagagctggcttccagggatatgtaatttttggatttcccaatcacaatacctacgtattggaaagctcgcaatgtaacaacgcaacctatatttttaacaacgattggcaacaattatcccagctaactaaagctgagatattagatggaaatttgcaccgcgccagagtaattcatcgaagaaactgggctgctgaaatccttagatacttaccttaa

SEQ ID NO: 143510 - DNA, 177 bp, Enterobacter cloacae
atgattgtgatccctttgattacaacttggagcactattattttcgtggatggtcgctttagttcgatagacggggacaggactgcacagacattagtttccatcactgtggggatactggttttttttctcagcagccacatcattagcaagctactaggatttaaaaaggattga

SEQ ID NO: 143511 - DNA, 180 bp, Enterobacter cloacae
atgtatccaatcagcgattttgcgtacggcatgctttcgattgtcattttgtacgttacagttggcttaatcttccaagcgattaaaaaaacccttactagcattaaggatggtcttaatgattgtgatccctttgattacaacttggagcactattattttcgtggatggtcgctttag

SEQ ID NO: 143512 - DNA, 321 bp, Enterobacter cloacae
atggtggaacatacggggctgttacgttggttgtttacgattgtgtggggaaagtacttcatgatggcaacgccgctaggaggatatcgcctgttgttggtgggttgtctgatggtgaaaccggatgaatgcatctattttatgtcggaggcctcactgtacacgcataagagaatactgagtctattaacccccttagttgtgggaaaacatcagaaaagagacgtcagagacagtaaaaagtctatgcaaaaacagacctcttttatgcagtgtttatgcactcggttttatcgccttttcactagaaaacatcgctaa

SEQ ID NO: 143513 - DNA, 201 bp, Enterobacter cloacae
atgaaaattcaatttcagacgaataacggtttcccactgctgattgttgcagacgagcgcgtttcagactttctgaatgttagcgccgtgtgtcggttcctgaaggttccacgctcttcgttcatgatggacgttgaacaaaacgggcttgagaaggctatcagtgaagcgctgttgaagttgagaaagaataaaacataa

SEQ ID NO: 143514 - DNA, 609 bp, Enterobacter cloacae
atggacctacaagcatgggataacattatctctatcgcttcgaatgcagtgacagcgctgggtgtggttggaggtgtagtttttggcggttcgaaactgaaagactatcttgatgtaaaaaagaacgatgttgcttttcacaccgcgttagcattatatgatgagatcacaaacactcgtgctaagtatagccaaatacgtatttcattaaattatgtaatgaacatgttgggtgaactatgcaaaagcaatacaaatattacttctagttcatatttccaaattcaagaaataggcaccaccgcttttcagaattcattgaccattggcaacctccttatcaaaaccaacaacttcaatgtattatttaaaggtgattcattttccaaaatacatgatatcgttaacaccactaataaaatatcacttaatatcactaatttcttcgcttgtgccatcaactcatcaaaagggaaattaatttcaaaagaagagctagaaatattgtcaggacactataaagaatatgaaaaactgacaagtgaatatctagacaagtgttctgaaatacagaaaacaaagtttgaggacttcattatgtttaaataa

SEQ ID NO: 143515 - DNA, 219 bp, Enterobacter cloacae
atgtcaagtatcgccgcattgaggctgggtaatccagttgaacgtttggcacgggttctgaaagagaaccaggacaagctcaatctgagtaaagatggttttgtgtccgtagatttgtccaacgaagaagctatgaaagccatcagagatcagatggataagcttgaaggcatcaaaacgagcactgtaaaagcaaaacattattacagaacccgataa

SEQ ID NO: 143516 - DNA, 843 bp, Enterobacter cloacae
atggcaacattacttttagcagtgattttggttagtggttttatatatgtaaacctatcactttcaacacgttacagatataagcgttccaatggctgggacgcttatttttttgtcgccgcctggggaattgtgttctttctgctcggtggctttttaaccttcgtcctgaatattacaggcgggttccgctggctatccaatgagcttaatcttacgccggatagcttcaacggcatgttgtctacttcatccgacaaagcccagcgtatcaatgaaatcaagcagattgcatgggttgttatttcaattgtgctttctgcaatttctggcctgggtaataagttgcgtacaaagagcggtgatcgccgctgggatgcgttggctaaggctgtggggaataactcttttgagtcattgctgatggaagcatcagcacgacaatttccgatcatcgcgacactctcatcgcgaaaaatctatgttggcctggtgacgtgtccggcgctagagaatgggctgtcggaacacctggaaatactccctatgttaagtggctatcgtgataaagacgatctcacgataagcatcacgacgaactatcatcagcactatcttgaaagcggtgttatcggtgggatgtcgcgcctgaatatccaggatttccgtgtgctgatccctaaagatgaagttgaaaccatctcgttttttgacactgaaacgtataacaaatttaaagaagacgaagcgcgcgaccggaaagactgtcgcaagttgggtggtaaaaagccatctacacgcaggagaaggactgctggcgatgcagagcagggtagtgcatga

SEQ ID NO: 143517 - DNA, 1068 bp, Enterobacter cloacae
atgaagcggttaacagaagagcaaatagaatactctttaaccagggcgaggaagatggcccggcgagagtcaaggaagcagcctggaggaagaagggtgttccatccaatgcgagtcttttctcgtgtgagaatccctgcacctagttccttagatttatttaatcctgagaactataagttatttatagagtttataactttaatcagagattgtataaatgatggtgaaaaagtcttaatcgactttaggaatacaaaagctctcaaagcttgtgccgttatcgtactatatgcttatatagattttttacaacggcaaacgaaagataaaactgtaatagctattactacttgtggatcggtgcgagcaaacaactggttcaaaatatgtggaatatggggagtcacaggatttcaacgcgttacagctgataaaatgaactcaatggagattgtctctgctgttgcaggtaaaactaaagataatcaagaaagtgctgaggcacggcaaaaaataaaaaacatattgaaatacatcaaaggaactatttatgaagggaagatctcagtttctgatggtcaaaaactttatgcggctttaacagagtctattagtaacgtagggttgcatgcatattcaaatgaagaacatttttcagaattcatttcagatattggaaagagatggtggatcttagcgcataaagttgaagagcaactttatctgatggtttatgatatgggagaaggaatccccgttactcttgtcaaaaaagatttttttacacttatagctcagatgtttaatcccaaaactgattctgataaaatatatgcagctgttcagtacggggagacaagaatgaatagtcaaaagcatggtaagggattgccagatatgaaaagatatgtagtagacaatcccgaaggtcaattacatatttttagcggcatggggagatattcctataatgctgaaaataacgccgaagagcaattcgatctgccatactctataggtggaacccttattcaatggaatgttagtttgagaggtactgaatga

SEQ ID NO: 143518 - DNA, 321 bp, Enterobacter cloacae
atgaacatcaaagagatacatattgctgaggatttttcagatgtaccctatggacgatacgatgaagatggtcctgacaacgggcagcgtttccgtgaagagcatctcctcgacgccattcgtgactatgatgaagttcatgtctacctcgatggtgcaatgggctatggctcatcgtttcttgatgaagcatttggtggtctctatagaacagatggtattgagaaatcagtattaaaaaagaagttaaaaatattcactgagttagatttcctcaaggatagcatttggggatacatagctgatgctaagaaggagtaa

SEQ ID NO: 143519 - DNA, 489 bp, Enterobacter cloacae
atggaagaaaattcatcttttgtgacatttttacaatatctcgctagttcgggcattctcgctattgttacagctttgattggttgggtttttgtatataacaactcacgagccttacaaaagagaagcgagacttggtctattgtaaaaaatgtttccgataacttgaaagaaatagagtcatcttcgcgaaaattttgggtgcctagcgattcaaaagaaatagatgcgatgtcttttcagaatgaaattacagccctcctcgctgagactgaacgttggttgaatcacttgaagcaacgtatcgaaattgatggtgattataaacctttgattactgatttatttaaagatgctactgctaatatcgaaaaagttaaaacttatgataaaagccaaaggacgagggtaagtgtattggtttcaaggcgtacaaaaataattaaggctcttgtggatgaatcatatcaggcaaagtttttaagctag

SEQ ID NO: 143520 - DNA, 1044 bp, Enterobacter cloacae
atggctaatcgcaaaaaccgcagcaaggcaccgcgcggacagaccgacaccgatacggccaacatggtcagtaatgcacatgcggaggcgtttacgtttggcgatccgatccccgtgatggaccgccgggagttatttgattacctggagtgcgtgcaggtagaccgctggtacgaaccaccgatcagcatggatggccttgcgcgaacttaccgcgccgccgtgcatcactccagcgctattcaggtaaaacgcaatattcttaccagtaccttcatccctcaccgctggctgtctaaacaagccttttcccggttcgcccaggactttctggtattcggtaatgcctaccttgaaaaacgcatgaaccggttagggcagatcatggagctgcgcgcctcgcttgccaaatatacccgtcgtggcattgaccaggacacctactggtttgcacagtatggctacaactcgcagccctatcagttcgatgagggaagcgtgttccacctgatggaaccagacgttaaccaggagctttacgggatgccggaatacctctccgccattccctccgctctgctgaatgaatcggccacgctgtttcgccgtaagtattacctaaacggaagccatgctggttttatcatgtacatgagcgatcccgccgcagaccagaacgacgttaacaacatacgcgaagcacttaaaaaatcgaaagggccaggcaacttccgcaacctgtttatgtacagcccgaacggcaagaaagatggtattcagatcatcccgctttcagaagtcgcagcgaaagacgagtttctcaacatcaagaatgtgagccgtgatgacatgctggcagctcaccgcgtgccgccgcagctgatggggattattccaacgaataccgggggattcggtgatgttgaaaaagcgagcaaagttttcgtaagaaatgaacttattcctttacaaaaacactttgaagaattaaacccatggattggggagaaggttatacagtttgaatcttacaacttagaataa

SEQ ID NO: 143521 - DNA, 585 bp, Enterobacter cloacae
atgttcatttatacaggagtgtctgagcgttcagacaatggcgccacggcagacgcgggaaatttgcggtacagtgttgatatgcccacatcaaaaatcagagcaacgcgttttcgcgtttctccggcagccagcaaccggccaatctgcgcccactcatcctctgatagctttggccgtcggccaccaatcctcccttgcgcacgcgctacagccagcccggcacgggttcgctctacgatcaactctcgctccatttctgccagggcacccataacatggaaaaagaaacgcctcatcggagttgatgtatcaatgctatctgtcaggctgcggaaatttactcctctccctcgcaggtcttctatcagagtaacaagatgccgcatactcctgcctaatctgtccagcttccaaactaccagcgtgtcaccttctgagagtgtgcgcaggaccttctttagccctggccgatctgaggtttttccgctcattttgtcctcaaatatcagctcacatcctgcgcactccagcgcatttcgttgtaaagccgtgttttggtcatttgttgacaccctcacgtaa

SEQ ID NO: 143522 - DNA, 249 bp, Enterobacter cloacae
atgcccggccagatgctgatgctggaaaatgcacatgcggatggtgttacggtattcgccattaataaagaactcatggatcagttcaccttccaccataaagccgagcttacggtagatatgaatcgctttttcgttctctttatcgacgatgaggtaaagcttgtagagattcaggacgttaaacccataatccatcgccagctttgccgcccgcgacgcaagacctttcccctggtgctccggtga

SEQ ID NO: 143523 - DNA, 276 bp, Enterobacter cloacae
atgagtgattacgacgattacgctgagtggcaaaggcaacaggccaatgtaaacgcggggcgttctgctggaaatggtggaacctttcaggaagcattgaaacgtcctcgttacggggaaccgggccgtgtgacctcgaaggagctacagaatcagattgaaaacccctcgcaaatgccagaggagaactgtgagctgccacccacaatctacactgatcagaacggaaaaaagttcaggtttattttggggcaaagggtttactttgaagagtga

SEQ ID NO: 143524 - DNA, 1146 bp, Enterobacter cloacae
atggaaaaaacaattaaaaaattcggcaacgagctgaattactctctgattgaagattttagagatgttgtgaatgaaggggagtttgcatatcattatttcataaacaaggacggaagaaatcagtttagtccaatgtgctcttgcatggactggattagtgtatctataaggtacattaaacatttccctgccttttctgatgatattgatgttaaggcgatgcagttttattctctggtttcatctatagacatcgttgtagaagctgtgacgcaattgcatcgtattataatggatgagggcaaaaaattacaaaaatggcctttcaaagactcttcttatatttttactgataaggtggagtatctttccaataaagatgatgatggttattttggcgagataaggtcgatttttggtgctcacccaactaacttgcggaatgataatggggagggattgtttgcaagttggccgcatcctcatcctttcaacatgaatgattttacagttagcatttacagtaatcgacccggtagtgatgatgttatatttggtatcaaaattgatgaggtgttaaagtatttaaatgagcgttactcctacattgccaagttaaaaaatatactcattggaattcgaaaacaccactacaaaaaactcagtaaagtaattatcccggtcactgaaaatatttatgaggaattacgggttttacatgatgaagttacggcaagacaggataatgattattacagaatggagttgcatgatataactcatttgtttacgggggtagtgactgaggctcatcttattgatgaggtcagcgcgttcagggataagctgtaccccatagttgctgagataagaaaaaatctacaaagcatgaatctggttgatttgatcactacaaaggggataatgatttcacgtcttcctgatggggctttgaattatgaaatcccgaaaattttcagatggttacactctggaaatgctgacccaatggcgcaatattacattaataacttaaataaatattcgaatgggaaatattgtttcaacatggaggatgatgccagtacgactttgttgaagctcaggatgatgatgtacagctcccaagtgaacaaagattaa

SEQ ID NO: 143525 - DNA, 1197 bp, Enterobacter cloacae
atgtccacaccacgccgttttaagttcactcaccgcctcattgatggcctgccccctaatgaatctgatgctccttcacgtgaagccgagtatagcgataccgaaatcagcgggctcaagtgtctggtaggcaaaggagaaggcaagaagaagtttctcctgcgctatctctggcagggccgcaaacgtgctatcagtatcggtcactggccggagattgatgtcattgttgcccgaaagattgccactgagatgaaacgccagatagccaccggcactgacccgcgttacgagcgggacaaatgccgggccattcctacccttcaggaagccttcagtcagtattatttcccgtgggcgaggctgcataaaaagagctggaataaggatgaacagcgctttcgtgaccacattgcccctgtgatgggaaatttgctgcttaatgaaatcacgccccgccacgtcacccaccttcagtcttccctgtgcgaaacctgccagcccgccaccaataaccgggtgattgccctgctgaaggccctcctcagatggtcactgcgtcatgagatggtgacggtgaacccggcggcaaacatcccacttctgcgtgaaaataacgcccgccagcgttatttctcggaaacggaaatccggcgcatattcgaggctgccagtgaggacaacagccgtgtagtcgggatttatattcgtttactgctgctgaccggattgcgacgtgacgagctgaggctggcaaaatggctacattacaacaggcaacagggaacgctgtggctaccggaaaccaagaacggctcagggcgactggttcatcttaacaactgggcggtaaagctgattgatgagctgccgcgctttggcggcaatatctggatgtttggtggcaaaattccgggcaaaccggtctgcaatgtcactaaagcattcaggcgcatcatccggcgggcaggtatctacgatgatgaagtctgcattcacacatgccgccactcggtcgcagcattgatcgtttcacggggaggcaccttatatgatgttcaggcccagctcggacaccgcagcattcaatcatcacagcgttatgctcatttgcatccgcaacggctgaaagcaactggtcagttgatagagcaacatattggtaatgcactggcattttccggatcatctgattaa

SEQ ID NO: 143526 - DNA, 1206 bp, Enterobacter cloacae
atgccaacaaaaaacgccgaagattttctcaccgcactagccgaggaacttgcaatcagtgactcacgatacgagcaggcatgtcggagctatacatcacttggagaatggcttcaccgtccggagtccgccgttgccaaatacgatccacaagtttacgtacagggttcattccgactgggtacagcgattcgtcctttgaatgatgcggaggagtacgatgtagattctgtttgcttactccaaagcctcggtaccaaggatcttactcagtataatttaaagactctggtcggcgatgagatcaaagcttatcgtaaagctcaaaatatggttaagcccgttcgtgaaggccggcgctgctgggttctggactatgcagacggcgcccaatttcacatggatgtcgtcccctctctccctaacgctacccagcaacgtatattacttgagacttatggctacgatctcaaatggtccgagacagcaatggtcattactgatatcgaatctcctgtttaccaggtgctttctgataattggcagcgatcaaatcccaagggatatgctgagtggttcaaaatgcggatgagagatgtttttgaacagcggagaaaaatgcttgcggaatcaatcaaagctagtgtcgaggagattcctgactacaaagttcggaccccgctccagtcagcgataatgatcttgaaacgccaccgtgacggtatgtttgaaaagcgttacgacgagcgccctatatcgatcattattactacccttgccgcgcatgcttataatggtgaagtaaagatagccgatgctctctattcaatcctttctcgaatggactcgtttatcgaacgtgatgggggtcgttatatcattcgtaacccttccgaccccctcgaaaatttcgcggataaatggccgaatcatcctgagagaaaagatgctttctacgagtggctcgaccaggctcggcaagattttggaaatttagcacatcagattgaaaaacgccgcttagttgaaagcgtccgacctcatatgggagcggtagcagacagagctgcaacacgccttagccctacgccaggatcaatgttgcaaccagcaacaggagttgcagctctgggtgttgttgcagcgagcacaccggcatttccaaatactcgtcgggagccaacttcaccaaaggggtttgcatga

SEQ ID NO: 143527 - DNA, 1719 bp, Enterobacter cloacae
atgatttggtgggttgatcagtctatccgtgtgcagtccgaacgtaccaccatttcggatctggaagagcggaatacatggctcactaatataaagtggcatgtagtcagtaatttgcgacttgctgctgactttgatttgcaagttgcagaacgtctaattccgttaacaattacataccccgaatatttccctgatgttcctccttcagtcgttccacgggatgggaaacgtttgtctgatcatcaatatggagaggctggagaactttgtttacagtttcgctcagataattggactcccgaaatcaccggcgcaatgatgattgaaagtgcctatcgtttacttttatccgagcaggagactggggaacccgctccatcagaacatcgagtccttcccgctcagcgggcaagaaatgccgtatttcgtttcctttactctccaagagtctttgaaggtttgttgatggtagaagagggtcaggtggtcgatgcggaaattcaagagcacctttatgctggtgcttttgcagctcagcttacacgaattggacctgtagatgattctatgtggatcgcaccgaacaggcgtggttacggggcgagtactgtagcgactaagattattcgtgtgcccgaaggcgcatcagtcgcgtacgacaatcttgatgaactggtttcattgcttgaaagccacaacttcgaatctgtgctccccgaattattacaggtatcaggtcctttagggcttattcttttcaatggcactaatcatcaggtctcaatggcttacggtgcttcagacaatcgcaagctggtcaactacgacaaaattattgttgatattgaccgtgtgcgtcttgctcccgagtttgctcgtcttaaaactgcgaaagttgcaatagtcggttgcggatccgttgggtcaaaagtagccgtacatctcgctcgatctggtgttgggcaatttgtactcgttgatggagatttacttgcttcagggaatctggttcgcaacgagttagattggcgggccgttggtatgcataaatcacaagcactggcagccaggcttaaggaagtcaatgccgaatgcgaagttattagccgtactacagttttaggtgggcaagagagtggaggagcaacttctgcaacgatgagatatatcgcagagagcgatttaatcatagacgcaaccgctgacccagtggttttcaatctttgcgcatcaatttcacgaagggcaaagaaaccgatttgctgggcacaagtattcggcggtggggcggggggtatagtcgttcgactacgcccgggtatagatcccacgccacttaccgccagacagcggatagaaaactggtattccgagcagggcatagcctggcctgaaagtgagatttcgcagccatactcacaacttgatgcctctggggaaccgctaattgcagatgacgccgatgtttccgttattgcagcgcacttatctcgttatgcaactgatcttctcgtccgccccaattcgacaattttcccttattccgtctaccttatcggaatgactgacagctggatattcaccgccccatttgacgttagaccaattgatcttggagaaagtgatggatgggatatagaagtacaaccaggagatcccgaggcttaccagcaattgctagccgacttgttccccggagaaaatgatgcaggttga

SEQ ID NO: 143528 - DNA, 465 bp, Enterobacter cloacae
atgcaggttgagatcgctgaaaatgtcaaaggcaaactgcgtaaagccctcaaagccgctggcagcagagaaattggtggtgtgatgatgggagaacaaattgctccgggccattttcgagttgttgacctgtcgattgatagtcagactggcgggaaagctcattttgttcgcgattcagagacacataacgaagccctaaatgctttttttcacagaacagggcatcaatatgatcgattcaactaccttggagaatggcactctcatccccgtttctcagtcacaccgagctctcaggacgtttcctcaatgaccgatttggttgaaggggaaagaggaatcgagtttgctgtattgctaatcgtccggttgcgatggtggcgaaggcttactctatcttgtactttattctgtcgaaacactaacccttcagttgttgaagttttggagtcatcatcttga

SEQ ID NO: 143529 - DNA, 1074 bp, Enterobacter cloacae
ttgataagctattttctgcgctcactaattgactgggtcttcaggaaacggtctgtaggcctagctctagtgagaattggagtaccgctctttgcagtggttcttacaggattgactcttggtgtgacaataccctcatcccagggcaactatatttttagctgggactcttccggtagtgctggcgcgctaagttggggcgtgtttatcatcgctatcataatcgtcttcttaggaatttcactgattgttcgagatatccgtagtgaaagcagaaagaaagtgatcgttattgaagcaagagggctgagagattaccagggacaacctttagcttccgcagttcctttatcaataccgggacaccgtgaacaggtgacaattgaccttagaaaggggggaatggccgatggtgcgatcttcagtcccgatgcagcaatacgtcggctgacgaacctcccagacgacttagctcgaagatgtgatgggctagacaggtcagatatatcattcgtactcggtggacttgcaccagttccatttctctttttgctcggtgtcattgtcgatgatgagtctcgaacattaatcatggactgggatcggagacagcatacctggcgagcgcttactgatgaagatgatggtaaccgtttcgttgtaacagggcttgatgccataaacactactgtaaaacgggtagctctctgcgtgtctgcatcttacgatgttcttgaagctgatgtgcaaatggttgaaagtgatgttccaatcatcaaagcagatttagtaggacgtaatactcattctcactggtcggaatctaagcagcagcatctcgcgcagcagtttctggatattgtcatgtctttagcacagcaaggtattgtcgaaatatcgctatttctggcggcccccgcgagtctcacgctgcgattgggtactatctacgacaaacgtaatctccctcgtatcgaagttaaccaatatgaagcaagtgaccctaagcgatttccctgggcggttcgaatgcccgtagccggtttgccccatgcagagttgatgcaacgataa

SEQ ID NO: 143530 - DNA, 519 bp, Enterobacter cloacae
atgggattttttaacgcgttcgacaaaatagacagtgcagttacccggggttatgcccgctggggaaaatggctctggggtgcactgatactgccactagtgatttattttggctggtcggtgtgggctgcggtctggggaccgccgtcggggccggtgacgctgattattcacaatgaactagacaggcctgttctggggtttagcgtaaatggcgtagcgggggcaaatgcatttgcttatggcgggggaaaggccacctgctgcggcagcatcagcggggataaggctgaagtggtctggacgctcagtaccacaagagcccaatacgatgcagggctacgtagagagacccgcaagttaacactacctttgccaaaacgccagtggggtgaaaactatctccatgtttatttcctgcctgaagataatgtccggttatggtggagcaccggattcaatcatcctgactcccacgatattaaatatcaaactacagaattaaaaaaaggaaaataa

SEQ ID NO: 143531 - DNA, 549 bp, Enterobacter cloacae
atgggatttttcagtgcgtataaaagaatagacggtgcggttaaccggggttatgcccgctggggaaaatggatctggggtgcactgttactgccggtggtgatttatcttggctggtcggtgtgggctgcggtctggggaccaccatcggggccggtaacgctgattattcacagtgaactcgacaggcctgttttagggtttagcgtgaatggtatggcgggagggaatgcgttcgcgcgtgataaaacaaatccttacgggactggtcctggcgcagccacctgctgcggtaatgtcagcggggataaggctgaagtgatctggacgctcagtaccacaagagcgcaatacgatgcagggctacgtaaagaaacccgtaagttaacaattcctttgccaaaacgtgagtggggtgaaaattatctccatacctatttcctgcctgatgacaaagtctatttatggtggagcacgggttttaacagcccttcagccgatgatattgccgcacaggtcgcgaaaaaacagcgccagaatatgcactga

SEQ ID NO: 143532 - DNA, 2340 bp, Enterobacter cloacae
atggataactggctggcgctcttcgacggacagacccgttacaccctggacattacggactcccgcgtcacgcccgacgtgctgcgttttaagggccgcgaggccctcagcgagcccttccgctggaccatcgacttcaccaccccgcagaataatctcgcccccgaagaggtactgatgaagtacgccaccctgcgcatgcacagcgggaaggcagtgcacggcatcatcacccgtctggagtggctttccaccaccgccgaccagtcgcattaccgggtggagctgagctcccgtctggcgctgctcagccgcacccgccagtgccgcattttccagaaccagtccctgccggaggtggtggagcaggtgctgcgtcagcacgggctggaagggccggactttgagtttcgtctggagcgcagctatccggcgcgggaacttatcacccagtggcgggagacggatttacagtttatccagcgcattctgtcagaggtggggatttactggcgtacggagatggatgatgtgcgcggtctggatacgtacatttttgccgacagccagcttaactaccggtttgacgtgcgcctgccgtaccgtgagccatcgggtctgtttgacggcgcggcagaatcggtctgggatgtgcggacctggcacagagtagtcaccggcaccgtcgccacgcgggattacaactaccggacagccaccacgccgatggatgcgacggtcagtgtgcgtaacgatgcggtcaccaccggggaaaattaccgctacgcagcgccttaccgtgacacaggtgacgacaccagccctgagccggaaaccgaatccggcgctttttatgcccgcatctaccacgagcgggagctgaacaaatcagcccgcatccacctgttcagcaatgctgcccacctcacgcccgggcaggtgctggagccgcagggcgatgtcattacggccctgaaagagggtgttgtcctcacgcttgtgaccttccggggagcgcgggattcccgcctgcacgtgtcggtgtggggcatgccctacaccgagcgttactgtttccgcccgacggaagtttcgcgcccggaaattcacggcacgcttccggcgcggattgagagccgggaaaagaacgatatctacgcccacctggacgaccagggccgctaccgcgtcaggctggactttgaccgggacgatgctgaacagggattcgcatacctgtggctgcggatggcgaaaccgtatgccggcgagacgtatggctggcatacgccactgaccgacgggaccgaagtggcgattgcgtacagcaacggtgatattgacctgccgtacatcgcgtatgcgctgcacgactcggaacatcctgacaccgtgaacagggacaaccatacccgcaacgtgctgcgcaccccggctaacaacaagctgcggatggaggataaacgtggcgaggagcatatcaagctcgccacggagtacggcaaaacgcagctgaacagcgggcatctggtggacgcgcaggagcagccccggggcaaaggctttgaactcaggaccgatgagcacggcgttattcgcgtcgcaaaggggctgtttgtcactgcggacgggcagcagaaggccgcaggcggggtgctggacatgagcacggcgctgagagaaatcgacgtctgcctgaaacagcttcagcagctggaggtggcggcagagcaggcgcaggcgctgaaggcggatatcgacagccagatacagatgtttgagcagcgcctgaagccccttaacgaaaccctgctgttctctgccccggaaggcgttgccgtgaccagcggggagcacatgcagatgacagccacaaaaaacgtcgccgttaacgccggaggggatatcagtgccggtgtcatgggcaacatgacggcgctggctggggaaaagctgggactgtttgccagaacggaccagctgagccttaaggccagtgaaggcccggtggagatgcaggcgcagaacgggaaaatgcagctgttcgcggagaaaaagctcaccctgtcgtccgcgagtgacatcacgtttgcgggcaagaagcgcatcacgctcatcgggggcgggagctacctgcggctggaggcggggagaattgagtacggcacgacggcgatgtatatacggaaggttaaacggacaatggcggcaaccccagccacaatgccgctatccataccgcttctcccggttcagtatccaccacttaatggcaagatatgtattgagtgtctcctcaatgccattaaagccaacgacactatcgtgcagggagcgtag

SEQ ID NO: 143533 - DNA, 615 bp, Enterobacter cloacae
atgatgcaaccctgggaacttaactctgtacttacagctgatcgattgaaacagctagcatctctaattagggatgttagagatgaagttattgatcggcatgatgacgagataggagatactgcccgtggcactggtatgagggcttatgaatgttcgcgttcacgtatcattcgtgcggtaaaggatggtaaaaattggccttggttaggaattgtgaaacctgatggacgattcactttttcgattcaatccgttcctgtgaggctctacaggggtaaacctagttgtcctgaagaaagaaggttaataccttcaattgaagcattaaggcaaatgtcatggcttgagccagaggttggtgatgctgcttctgtgctttggttttttgcaatcgaattagatgaaatgcgctacgttgagcgtgttacttttgtcggtttccttgaagggcagcagatttcgtgttgggaaattcctcttgatgagcgtgttcctgcgtttggtcctgctatgagtgaattgcctcagccagttgaaacgaagaaagcattagtctctgtcaaaaagaaagagagaaaagcagagaatgatggcaaagataatggtcagtaa

SEQ ID NO: 143534 - DNA, 990 bp, Enterobacter cloacae
atggatgtcagaaacgctttggcagaataccttgatgtatcttctagcttttttggtatacctatgtctggagatgtcaaaccggagcaatgtcattttcggaagagacaaacaaccccagtgggtgtaaaagagcgggtgcaagcgtatagcacggtacttgaacagctagtggttgagctgcatgagcatttggatatgcctcaaaatggctttaacttaatcgataatacaaagattactgaacttaccccccccataattgaaaaaattgctgagggggcgcgtctcagatggaatttatcagctgatgctccgatcgacaatatggttaacgtactggaaaatcaaggagctattgttacttgtttcgatggtgtttctgataaagtcgatgctctgtctgtaaatagaaaatatccaataataatcaggaataatgccaaggaaagtgtttgtagaatgaggtttgatttggctcacgaatgtggccatttaattatgcacgatgggattgaaacaggttgtaaacaaacggaaagggaggcagatgcgtttgctagtgcatttttgttcccaaggaagtcatttgccagtgaatttccagcctgtttgaattttgatggttcttttaattggaagaaaatatacgatttaaaagttcgatggaaaatgagtgcaaaagcgataatctttagagctcattttttaggatttataaatgcacagcagtatagaagtgctaatgtatggtttagtcaaactaggcaatcaagacaagagaagttagatgatgttctccaaatggaagagcctcacatactgaaagaaagcataactgttatgaaagagcagttgggtataacatttgaaaagatggccgataaattaggtataaaaccaatattattagccagtgttacaggggtagaatacaaagaaaccacctctgatatttatgatgatgtggtcgttccattcaagttttaa

SEQ ID NO: 143535 - DNA, 129 bp, Enterobacter cloacae
atgcaaaacggtaaccgtcaggttaccgttttttatgtttgcgccctctccctgtggctgagggttccccacaaattaatgcgagcactgagcaatcccctcgcccctccggggagagggttagggtga

SEQ ID NO: 143536 - DNA, 321 bp, Enterobacter cloacae; identical to SEQ ID NO: 103996

SEQ ID NO: 143537 - DNA, 636 bp, Enterobacter cloacae
atgaagcagatgaccttcgccgacgccgagtacgctggcaagcgcaagcaaacccgcaaggagttgttcctgatcgagatggatcgggtggtgccgtggaagggcttgattgctttgattgagccacattatccgaagggtgaaggtggccgtccggcctacccgttgatggcgatgctgcgtgtgcatctgctgcagaactggttcggctacagcgatccagcgatggaggaagcgctgtacgaaaccacgatcctgcgccagtttgccgggctgcacctggagcgcatccccgacgaaaccaccattctcaacttccgccgcttgctggagaaacacgagctggcggccggcatcctcgctgtcatcaatggctctgggcgaccgcggcctgtcgctgcgccagggcaccatcgtcgatgcaacgctgatcaatgcgcccagttcgaccaagaacaaggacggcaagcgcgacccggaaatgcaccagaccaagaagggaaaccagtattatttcggcagtgcgacctgaaagtcgcatgggtttctgttccgcaggttaacgcccgacggaaccgactgttccaccactcgttccctacccagacaggcgtggccggtaacagccgggtctga

SEQ ID NO: 143538 - DNA, 384 bp, Enterobacter cloacae; identical to SEQ ID NO: 101428

SEQ ID NO: 143539 - DNA, 690 bp, Enterobacter cloacae; identical to SEQ ID NO: 101430

SEQ ID NO: 143540 - DNA, 270 bp, Enterobacter cloacae
atgtcagttcacacttcacaccccgacatcattaaaaggctgaaacgtgccgcagggcatctgaagagcactatccagatgctcgaagacgaaaaaccgtgcctggatatcgcccagcagttgtccgctgtggaaaaggcgataacgaatgccaagcgaacgcttattcatgatcacctggaccattgtctggaacatgccctggaagacagccagcatgcatctgacacgtcgctcagcgaatttaaagagataaccaggtacctttga

SEQ ID NO: 143541 - DNA, 1125 bp, Enterobacter cloacae; identical to SEQ ID NO: 101432

SEQ ID NO: 143542 - DNA, 1557 bp, Enterobacter cloacae
atgagaatgttgcctgttttgcctgatgaatccttgttcagccggttttgtcggacaactaccgtgtacggtatgtccccatcttctctgttaacgatcattttcaacaaacctgatatgaacgtccatccaattctcaattcaggattaaaggctatttctcttcatacatccgaaagtgcagatcagctctggcatgaacagactttactccctctttttgcctgggcactaccaatcagtcgtaatgaaattatggatttcaacacgacccctgccaggcttaatcgattgtgccgccttagtaatttttcactagggcagcgcacactattgaagttttgcccggtttgcgctcgtgaagatacttttcattatggtgttacttattggcatctggcgcatcagcttcatggggttacaacctgccatcggcatccggtagcgcttgaaagcatccatgtcccttcttcaccgcacatacgtattggactgatgcctcctgtttcgtatacagaacaacttagcaatgagatagacttcgattttgctaagttttgttatgagtccataaatataatcagaagaaaagatattacacaccccaattacatggatgtacttaaaaagttgaatttattatcattggatggaaatttaaagaaaaatgtattctacgcacatgtttatgctaagtgccagttatttggggagggttcatcggagcttttaccaacttccctaactgattatcactactgggagcctatactcaaagacaaatgttgtcagcatcccacaaagcatcttttgctttgttattgtttgttaaatacttgctggccaacgtatgcaggaagtcgtactaataaaaagaaagaaacctttaaaagtcataagaaatacagttttcatataactgaaaataatactagtgttagcaaccttgggaaggaatttagtcgcagcagatgttacattaaaacacttatttataaaaaatacctgaggacgtttaagcgaaacacaaaaattaatatattcactgaattgcttatcaagtctatggctgtaagggggtttagtctggcatccatagctgagaaaaactcattatcggaaggagctgtatcctctgtaatttcatcttgttacggtttatgctcatggcgtaaaaaatgtaaaaaagattctttaagacggcgtcataagcagaagatattaagatttatacataatcaatccgtttctataacacgaaagttagtcaaagaaagttgttatgcaagtttctattggctaaataaacatgaatgtgactggcttaattcctgtcttcctaaaacaatacgatgctataaaaataaaagagtagactggagcgagagagatattatctcatcatcattaataaatgatgttttatctcaggggcagtactcgatgtcacttacaagtctagatgctttactgggagggcatggctggcttttaaaatacagagataaactaccaatgacaatgatacttctcagaaaaatggaactaattaaataa

SEQ ID NO: 143543 - DNA, 603 bp, Enterobacter cloacae
atgaaaaagcagaaaaagaccagaacatccctgtgcgcaagcattatgttccttgcgggaatgaccgtaagcacaacggcgtttgcccactgcgacagcatggatgggcctgtgatcaccgaggctaaaagcgcccttcaggcgcgtgatgttaccccattattaaaatgggtaccagaaaaccgtgaagatgacgtcagaaaggcgtttgacgaaacaatgagtaaacaaggcagcagtcaaacctctcaggaaaaggcccagcaaaagctttttaccaccctggtacgtattcaccgtgaagcggaaggtgcatcgtttaccggtgtaaaatcggcaggtcatattcctgttattgtacaagaggctgatgccgcacttcgcaccaacagtgttgatagcctggtggcaaaggtgaccgctaacattgagcatgctatccgggaaaaatttaccaaagccgaactcagtaagcagcaggcgaatcaatcggttaagcagggacgcgaatatgtaaaagactacattcactacatacattttgtcgaggaaataaacaaaatggcggagggtagagcgcccgatacggagcatcagcactaa

SEQ ID NO: 143544 - DNA, 927 bp, Enterobacter cloacae
atgcaggctgcattgctctctgtttttcttcttttgccgtctaacatcatacaagtcagcaaccggctattggtgatcgttctgctgacccttgccgccggttttggtgaacttttcctctatggtagcggcgtgagttttttacacccgaactacgcctatatcggtacgcttatctctctgcttcagccaccggccatctatctgtatacccgttcgctgatgtatcgccattttcgaatccggccagctcatgctgtacacttaatcccgtttgctactggccttattgtgtttttcacgctgtacgttccgttatctgactcagcaaaaataacgctcttacagcagcaggatttaccgggcatgccagtatcactgccccttgcattggcctatcacggggtatttctcggctggcttggctattccctcagacgtttgcggtcatttaattcggatattcagcatctttattccgatattgcccgccagcaaatgctctggctccgcttcctgctgtcaggttatttgggactttggatagtcagtattatttgctgcctgtttttctatctgttcaggctaaccgataaaacgagttgggtactgcccgttgtcagcatagcggggtttgcatttattaatacgttattagtttgtgcgctgcggcaacccgctgcgtttatggggctaacgcaggcagatgaaatcctgctggagaatattcagccggttaaagcaccgcagttacggggggctgaacaggtggataaggtggcagaatttatgcaccggaatcagccgtttctggattccaccctgtccttaagccagcttgcgcatcagttaaaactctcgccgcacgatctgtcagccattatcaacaacgggtttcagcagaatttttggcactgttgcaaatag

SEQ ID NO: 143545 - DNA, 939 bp, Enterobacter cloacae
atggatatacttttctatcacccaacgtttgatacggcatactggatcaaggcgctttcgtcggcgttacccggcgcacgcgttcgcgagtggaagcgtggcgataatgaacatgctgactatgcgctggtctggcatcctccggtagaaatgctccagggccgcaagctgaaggccgtttttgccctgggagccggcgtggattccattctgagcaaactgaaggcacatcctgaaatgatgccggaagacgtcccccttttccgcctggaagataccggaatgggccagcagatgcaggagtatgccgtgagccaggtgctgcactggttccgtcgcttcgatgactatcagctatttaaacagcaggcccactgggaaccgcttccggattaccgtcgcgaagactttacgatcggcatcctcggtgcgggcgtgctgggctcaaaagtggccgaagcgcttgccccgtggggattcccgttgcgctgctggagccgcagccgcaaggattatccgggcgttgagagttttgccggaacggatgagcttcctgcattcctgaaagggacacgcgtgcttattaacctgctgccaaacacggcggaaacggtagggatcatcaatgaagccctgctcaatcagctcctcgaccagagctacctgatgaacctcgcgcgcggggtgcatgtcgtggaaggcgatctgctgaaggcgctggacagcggaaagctcaaaggcgccatgctggatgtctatagccgtgagccgctgcccgcggaaagcccgctgtggtcgcacccgcgcgtcgcgatgaccccgcacgtggctgccgtgacgcgtccggcagaagcggtggcgtatatatcccataccatcagcgaaatggaaaagggtaacgcggtcaccggacaggtcgacagacagcgcggctactga

SEQ ID NO: 143546 - DNA, 2139 bp, Enterobacter cloacae
atggaaacagtaattacttcaaaacattttgaaagtgttccgttagcaaaacttgtagttggacatctcaagtcgaactgtgaggcattaggtcttgaaaaagccatagtttattttggtttcccaaaattctacggttatgaatcagatgtaatgaagacatctgacttggttattttaagtgaacaacatggtattttagcactacgatttagtatttttaacaattccacttcatctaataaaatagatttggaatgggatgaatttagaagcttgatattttccaatctgtatgaaagtagattactaagagctaaaaaaaaacgtactcaagaacttacgattggatttgacgcatatttttatgcagaatctatagaagaccttgattgtgattctgatttatttattacatctataacagagcttactgacacgctcaatatcatgaaggaagacttaagtgaaccattatcacaggataaattcaacgaatgcagagcaatattagaagggactaaagcgttatcttctgacaatcaaagaaacgttgacgaagatggaaagtccaccaaagcttttactttaatgaaacttgaagaagagattaaaaccttcgatattagacaaagaaacagtgcagtaacaattattgatggcccacaacgaattcgtggattagctggttcagggaaaactgttgttttagcaatgaaagcagcacatattcatatggaataccctgaaaaaaaaatcctctttacctttttcacaaagagtttatatgttcatgttaaaaatcttattactcgattctatcgtcattataaaaaagtagatccaaactgggacaatttgcatatcaaacatgcatggggtggtactggcgtagatggggtttactatacagcatgcaacaacaatggtattccgattgtaggatttacacacgcaaagatgcagtcaccaaataatccctttgagtatgtttgtgctgacgccattgctagcaacaaacttcgccaagagtacgattatgttctaatggatgaagctcaagatatgacatcctcttttttccggttagtctatcggataacaaaaggtgaatctgatactaaaaacataatttggggatatgatgaactccaaaatattttcaaagttaagacacgttctccaagagaactatttggtcaagatgaaaatggtagagacttcattgatctacaaagagcagggcgtaacatgcccgaatatttagaaaatgatattgtccttacaaaatgctatcgaaacccacgcgaagtattaatttcggctcatgctttaggcttcggtttatatcgcaaagatggttgtcctgttcaaaacttagagggtaaagcacactgggaagacgtcggatacgaagttataaatggcaactttgaagttggaagtaaagtaattctcgagcggcctagtaagaatagtccattgtctatctcttcttacgagccgttagaagaacttattaaatatcgttcttttgaaagtttacctgaagagtctgattgggttgtaaaaaatatattgtcgcttctcagtgacggcctgcagccagaagacattatgatcattgcattagatgatagaaacgctcgcacttattttaaatacattcaaaataaattaattgcaagtggtattttgtcgaataatgtcctattgaatccatacagctccaagtcatttattgaaaagggacatataactatgtccactatccatagagcaaaggggaatgaagctccagcagtacttgtattaggaattgattcgcttttttatacagaaggcagccattatgcgcgaaatagaattttcactgcttttactcgagcaaaagcttggcttagagtaagtggtattggtgcaaatgcagaactcttcttcaatgaactacatatatctctaaacaacagccctcgtttagagtttattcagccagaccctcaatatattgaaactcttcaaagagatttatctgaaaaaagtcagaaattaaaagaattgcagcgtagttatcgtgaacaattagaattattgggtatcagtgacgaagaaaaatccgatttttttaaaggtatctaa

SEQ ID NO: 143547 - DNA, 738 bp, Enterobacter cloacae
atgaacatcaaaaattttaataacggcataacacgttcaatggcgatatgcacaacgttaaatttagaacccaaaatggtgtttcccgttagtttaaaagttaatcagacatttaataatgtcgccttgcgcgatggtgcaactcatgaagatatatatttctcaggtcttaatgaaggttattataattttatccttaatgatttttcatattttcacttttcctttcaagaggtacaacaaacgattggaaatccaaaattagtgtatccatatgaaatcaggatggcattttacccaaatccaatgaattcatccacttacaccgacactccagattcaccgacagatctcttgcaaacttaccataagtacttcatcgacgatgaatggtcatttgaagaatatactcaagcgctttgcgaattaaaagcaaacatatcaacgcctatattacgctacgatttaagtgaggatcagcataaaaggattaatcatccaatagctcacttacatttaggtgtaaacaatagctctagaattgccacaaataagattttcactccagaacttttcactacctttgttcttagtaacttttatagagaaaaatgggagatattaagtggcagtgatttaaaaatggacattcaatatcaaagaactaaaaatagctgcataacaataaagtctgatttttattgtgatctccaacgcggtgctttaaatattgtataa

SEQ ID NO: 143548 - DNA, 192 bp, Enterobacter cloacae
atgtcacagcaatatactaacgaactgaccccggaattagtcgccacactcgctcgtccgccgttttcggcggagaaaaaggctgtaatatctgacgattcccgtcacacagtcgaagcgaaggaaacattcatgcatgaacatccggtggtggagatttaccggcagagggctgaattatgtccatcatga

SEQ ID NO: 143549 - DNA, 1254 bp, Enterobacter cloacae
atgtccatcatgagagggtgtagcgttcacggcaagaatgtcggattacacggagataaaacctcctcgggggcacattgtatcgcggcccggcccggtatgtcggtcatggggttgctgaaactctatatcggcgacaagaccacaccctgtccgaagtgtggggaggtgggagtcattgtggatggggatcaccgctgctcaaacagtgccgctgttgcggtggatggtgcggagatccgttgcgggtgtccgcaggggtccaattttctgattgccccgggtactatcccgcagctttcagagccaagcgccgggatggtaccggtcgcagccccagagccggaactgcatgcgcagacggcggaaaagcctcgctctgaacctctccctcttccggcgcgaatttaccagaccacgaggcagatggatgactatcaggccaaggatatgcgctacggcgatctggacacgctgacgctacgtaaccagttttacatcgacgtggacaatgtgtccgcgaaggtgaaccctcgaaccctgaagctacagccgacagcgaacactgcaacacaatattccccttatgccatgcaggatcttgaacagcagcagccgtctgtcagcagggatgaggtgacgcgcctgatgtttgatgagttccgggaactggcgaagctgtattccttccacggtccgtataagaacatcatcaccgagatgattgaccatatgcaggagaatcacggtgcaccatacagcagcccgttgctggacagggcgttgaaggagcagatcctgaatgaccattcagagaaaagctctttgctggaaattaaagatgttctgaaacgagtaattgactatgaacatggatttatactactggataaaaaaggcgatatcttcgacgaaaatggaaaccttaaagaaatagggaaaactgtactgcctaaatttgaccggaagatagataacactaacggtctggtgatctctgtacatgacacctggtccactcatatcacgctggtatcactactggtgagtggtgacagctaccgggcaacggtgcattaccggattcaggatcactttggactcgatgacgatgatgtactgaaccctgtataccgggagtttcgtattttccgtttgtggttcgcgctacagcgttggaatgagtacggatataagccgtttatcactgagatgaatgcctctgtcgaaattaacgggaggcgaggtgaataa

SEQ ID NO: 143550 - DNA, 393 bp, Enterobacter cloacae
gtgaataaacggctgttagctggcgctattgcggtagtagcttgtggttatgtgctctggcagcttttgacaccagttgaaatagtggcggtgcatgaaggggatacgatcttagttaggaatttcccgtatctgaaaagtcgccaaatagcttggtgggaagccaacaaagatataattcaggcgaaatatgggatacctaataaaagcgaaggtggttattacagcgtaactattatggactttggcgacggttatcgtattgatcgagggacggatgaagactctgatttaatttgcttcgatgaaatgcccatagatgcgcgatgtatcgaaaaacaccctcggctatggattatgtctagccaaaataccgggctgttttatagataa

SEQ ID NO: 143551 - DNA, 489 bp, Enterobacter cloacae
atgttgactatcagtctgccttcttccgcgaacctcagtgaccagtggctgctgcctgtggcgatttgtagtatctgtccgggttggctccagagtaaagttaccgaaacaggcacagcagtcgggctgaacggggggctcttgcttacagcccagcagggagtgaactatctaactggaacggggcgttgtgatataggtaaggcttccaccacaacacgtagaccttatgcggtttgcctacgggtggcggatcgtggcggcgcaggtgagtttgatggtgtaacgctgaaaaacctgcccggtggcgctgcgcttaccgggcctacgatgtcccgtatgccctgtgggtcctgtaggccgggtaaggcgcagccgccacccggcaaaacacgccacacttacttctcaaacggatgcacctcccgccagtggtcggcaatctgctggcgggtacagacccacacccgctcgtgctgctgcacgtaa

SEQ ID NO: 143552 - DNA, 1104 bp, Enterobacter cloacae
atgatgaagcgcaatattctggcagtggtaatccctgccctgctggtagccggtgcagctaacgctgcagaaatctataacaagaacggcaacaaactggacttctacggtaaagttgtgggcgaacacggcttcaccacttctggcgtacacaaaaacgctgactcctcttacggccagatcggcttcaaaggcgaaactcagatcaatgaccagctgaccggttacggtcagtgggaataccgtgcacgcgccggtgcagctgaaggcgatcagactaacgtaactcgtctggctttcgctggcctgaaaatcgctgacgcgggttctctggactacggtcgtaactacggtatcgtgtatgacgtagaatcctacaccgatatggctccgtccttctctggcgaaacctggggtggcggctatgttgataactacatgaccagccgttctactggcctgctgacctaccgtaacaataacttcttcggtctggttgatggtctgaactttggcgttcaataccagggtaaaaacgatcgtaaaaacctgaatgaagcaaacggcgacggtgttggcctgtccctgggttacgagttcggtgaaggcttcggtctgatcggtgcctacagcaccgctaaccgtacgcttgagcagaaaaaagatggtaaaggcgataaagctgaatcctgggctgttggcgcgaaatacgacgcgaacaacatctacctggcgaccgtttatgcagagactcgcaacatgagccgcctgggtaacagcggcgaaaactatgttccgaatgatgatggtaatgtttataacattgctaacaagacccagaactttgaagttatcgctcagtaccagttcgacttcggcctgcgtccttccgtttcttacgttcagtccaaaggtaaagacctgaacggcatcggcgaccgtgacctggcgaaatacatcaccactggtgcgacttactacttcaacaagaacttcaacgtgtacggtgactaccgcttcaacctgctggacgacaaagatgcgtccaccagctgggttggctctgacaaccaggctaccgttggcgtaacctaccagttctaa

SEQ ID NO: 143553 - DNA, 285 bp, Enterobacter cloacae
gtgactttacaggtgttgcattgtcctgggcatacgccaggccatatcgtcttctttgatgaccagtcccgtctgctgatttccggcgatgtgatcttcaaaggtggcgtaggacgcagcgattttccgcgcggcgatcacgggcagctgattcagtcgattaagcaaaagttattgccgctgggtgatgacgttacgtttatccctggacacggtccgatgtcgacgctgggctacgaacgtctccataatccgttccttcaggatgagatgcctgtctggtaa

SEQ ID NO: 143554 - DNA, 291 bp, Enterobacter cloacae
gtggcggcggcgacgcagtacccgatcaaccttaccgtcagtgacggcgagctgagcagcactaccacctatacgctgaacgtacaggctaagcagaccaacggcggccagaccgggacttacccgacctggacctccaaaaccaaatggaaagcaggcgatatcgttaacaaccgcggccagctgttccagtgcaaaccttatccgtacagcggctggtgcaataacgcgccatcctactacgagccaggtaaagggattgcatggcaggacgcgtggactgcgctgtaa

SEQ ID NO: 143555 - DNA, 798 bp, Enterobacter cloacae
atgaactcactaatgctgttgcagcaggcgaatctgccggctctgtgcgtcatgagcggagcgctgggcgcaatcctcggcagtttcctcggcgtagtggcggagcgtattccgccgctggtaatggaagaagagggggcaggcaatctgctgtttcccgcctctcactgcccggaatgcaaccacgccctgagcgcgtgggaaaatattcccatcattagctggtgtgcgctgcgcggccgctgccgccactgccatagcgcgattccgctgcgactgctgctggtggaagtctgtagcgctctcttctttgccgccagcgccgcgctggcgccgtcgtttttggcgctgattgcgctgtgggtgatgtggagtctgctgctgccgctggtggtgatcgacgcgcgccatatgctgctgccggactgtctgacccagccgctgctgtggacggggctgatgttccatgccctgttccgtacgctaccgctgaccgatgctatctatggcgcggtggcgggatatctgtcgctctggctggtttactgggcattccgcctgctgaccggccgggaaggattaggctatggtgattttaagctgctggcggcgctgggcgcctggtgcggctggcaagcgttaccctctatcgtgctgatcgcggcgctggggggcattatcatgcattacctgttaaagccctttgagaataaaaataaccttatttcctttggtccatatattgcattttccgggctggttgtatttatcgcgcaaatcccacgtctcatcttttaa

SEQ ID NO: 143556 - DNA, 429 bp, Enterobacter cloacae
atgatgagccgttacttacactgtagcacagtattcgcatgtcttttattcgctgctccaactcatgcgattgagatctggcactcaaacaccgtctgggcaaatcaagggatgtgcagcgccactttcacgctggacagtggcatggaaagcgttggttcgttagagataggctttgacctcgttgatgcaaaaaataaccttgtagctcatgatactttgcaggtagacccattcggcgattctgatgccacgcgataccaaacggctttcgccgaaggcgagcattattgcgaaagcaatctcacgctgcgcctgacgtcactggcattagttaacggaaagaccaaacagcctttacctctcagtttgcttacaccaagggcatttattccattccctatcattaacccgcaggcagatcactaa

SEQ ID NO: 143557 - DNA, 294 bp, Enterobacter cloacae
atgactctcccccaaaatgagggagacaaaacgcaggttcgcctgggtgaaatgacgttctcaggtggaggcgcttattattatcgtttcatcaatggcaactacagctatgttgtttatagcggtacgggaaaaggatgggattataccggcctgaaagtatataaaaaccaaaagctcatcatgaaaaaagagtgcactaatggggggtttttacctaatgaatatcgcggtcaaggcctcgtaaaagaagcggacaccggtgatgatgcaacatacggttatgttgattaa

SEQ ID NO: 143558 - DNA, 483 bp, Enterobacter cloacae
atgcgttatatttttcttgcactcagcgcactcatattagccggctgtgccactaacgcgcgagattgtgacccgacaaccggtgatgtcagcattattaccaaatttaactgcaactactccggcacctgggataagcgcgttgaagataaacaaaaaacgctgcaacacgatcaggaactgaataaagagttcaaagcggtgaatgatgcgattgaaaaagagaaagcactgagcaatgccaacgtagccagtaaacaaaaatcgcagcaagaactgcaaaagtcgatgaacaatctggtcgcccagttgaagaaaaaaacagctggccgggctgatgctcaaaagcaagttgcagacctggaaaaaagtatgaaggaggcgcaaaacaaaccaagcgcttccgaattgcaaaaacagatggaactgcagaagctgcagggacagctgaatgaattacaagaaacactggcttcacaataa

SEQ ID NO: 143559 - DNA, 699 bp, Enterobacter cloacae
atgttaaaggttattcgcacagcactgatagcaggaatgatggtatttctggcggggtgccagaatggcagtacgggaagtagtggcggcgtcgacccgcgccttgccaataatcaggacgttgagtttttcaataaatcaggctggcaggcctgtgctggcggcgcggtaatcggcgcactggcttgcgctgtcagtaactccagcaacaaagcggtatgtatggccgccgccgctatcgccggttgcggtgtgggtatgggggctaacgcctatctggataatcagcgcaaaaaatacgcctcccaagagctgcagttaaacgcaacgattaaggatgttgaagccgaaaacaaacgcattcagaacgcaaccagcgttgcaaaatcggttatcgactctgataaaaagaccctcgctcaaatagaaaaagatatggctgcaaacacggtgaaaaaagacgccgtacagaagcaaattaaaggagtggatgccaacattgcttaccttcgcggcaccatcaccgacatgaaaaaacatgagaagcagtggcaggacgtttctgcagacatgagcaaatccggcagtgatacccaaaatctggatagcgagattgcgttgatgcgcgacaaaattggctctctgcagggcgagctcgatagcctctatacccagcgcaccgcgctgaaagtcggttga

SEQ ID NO: 143560 - DNA, 1536 bp, Enterobacter cloacae
gtgaaatctaaactggcgatgagcctggctatcattggactcgggtacgcctgcgcggcgaaagccacctgggatgaaaagttctggaacccaaaacctctggccgatgacgtgatattgcctatgccgtgcgacggtgccatggcatttcgcaaagtcgctatcccgctgaataaaccgctggaagattacaacatcacgctggggcaagaaggcgacgactggggatacgttgaacaatctcgccaggaacacattgcaggcagtttcccggagaagggtggtaagggccgttattacctgatggccaaatatgaactgagcgacctgcagtatcgcgcgctttctggggaatgcccgacgacggatatgaaaggacgtttaccgaaggtgagtattggctggatggatgccatggtattcgcaaatcaatacaacctgtggttacgaaaagaaaaactttctgcactgcctgaagatgatggtcaggcgggatttttacggcttccgacagaaaccgagtgggagtttgccgcacgcggcgggctcgcggtttcccccgcagagttccgcgatcgccacttccccatgcctgaaggattgaacggttatgtctggtttgcgggggcacagtctgcaaatggaaaacttcagcttaccggcctgctgaaacctaacccgctcggattgcacgacatactgggcaacgcagcagagatgatgtttgacccgttccgcctgaacaagctcgatcgcctgcatggtaaggctgggggctatgtcgttcgggggggcagttatatgactcctcaggcggatatccgcagttcactgcgtggagaggagccgtactatgccaatgcgggcgagaatacaaccaaaagcaccggtgttcgtctggttttagtttccacaaccctgacatcacgcgagcgggtgaaagagattgaaaaagagtggcaatcattaggcacgggtaaaaaggagacacctgcaggcaaagctgatgattcgctaaaaaacctgaatgctatctcggcaaaagtccaggatgacgcactgaagaaacaacttgagcaactgcgcggtgagctgcgcgcaaatagccagcttcgggatgaacaacgggatcaggcaatacgcacatcgttacagttgggcgcctttttgtgcacaaaaatgaaagatgacggcgagttttacgatcgtctcaaccagctcttcaccaaaacctgtgccgcaggcagccagcttgatgctaattgctcccgccgtcaggaacagcttggtcaacatcaaaaagcccttgattttattaccagttattacgctgacaccttggtagacatgggcacaacctatgacaaacccctcatcgaaccgcaggtcgctgtcgtattgcaacagatggctgcacgcggaaaaaccaaccttaacggttatctcaatacctactggaagaaccttcaggggtactggaaagatggaaaagttgcgcgcgaggcgtggcttagttcatgtaaaaaaaataattaa

SEQ ID NO: 143561 - DNA, 1233 bp, Enterobacter cloacae
gtgtcttcttacccagttgatatgccagcgtcaggcaccctgctatgccgtatggctctgcgcgatctcattcacgatcgcaaggtcgcgctgtgcatcatcttctctttgattgccgttatcgcaccgttattgctgctgttcggattgaagaatggcattgtcagccagcttcgccatcagcttctcgacgaccctcgcacccgggaagtacgtataacgggtaatggtaattatgattttgcctggcttgataagctcgcccgccgttcagaagtcggattttcgattccgttaacccgttcgctgaacactcaggccgatctggtccgggacgggcaacactttgtcccgggtgctgaagtgatcccgacggccaaaggcgatcctcttttgcaggatgtcagagcaccggtcaaagacagcgataccgtactcagcgccagtgcggcacggcgccttggcgtgcagccaggagatatcctgcgcctgatggtgagccgaaaaagcgaagggaaaaaccaacgcgccacgttcgctttaaccgttaccggcgtgctggatgacgcaaaattttcacgtcaaggtgcctttattacattgtctttgcttgttgctctggaagactaccgcgatggctttcaggttcccttgctgggggtcagcgatggcaagccgcccagagagagaacccgctattcaagagcacgtatctatgccagttcgatagatgacgtttcactcctcgcgcggtggctggagacgcagaacattgaggctatcactcagtcagctcaaattgagtctgtgcgtgccatcgaccgtgtgctggggattatctttggcgtgattgcctggatctctgcatcagggtgcatcgcctcgttagtcggtgccttcatcgccaacattgatcgtaagcgcaaagatatggccgtgctgcgccttctgggttttcgccgtcgcgctgtgacgctttttattattattcaggcgctgtgtttgaccggcgtctcatacggactgggtgtgatcatctacctgctgggcagcgcattgttcaaccatgtgttgggcagttctttaccggaccaggcattcgtctgtcaccttgacccccttcattttatcgccgcattgctctgtgtccttgccgtggcgttaggcgtggccgctatcggagcactgcgcgcattgaaaatcgaacctgcggagagtttacgtgaaatctaa

SEQ ID NO: 143562 - DNA, 669 bp, Enterobacter cloacae
atggagatcagccggggcgggacgcatggctatagcgtcgccctcccgcacctctcgttgaaaaagggagaggtggtcgctctaaccgggcctagcgggtgcggtaaaagcacgcttctggagatgataggggcgatcctccgcccagcgcatcttgccgaataccggctcgccggtcgcgatatttcaataccgctcatggctgaaaacgagcctgtcctggccgcgcttcgcgcacgcgagcttgggtttatgctacagcacggcggcttgttgccctggttacccgtgatagaaaacatcactctggttcgcaggctggcaggacttagcctacagtcagcctggctcgataaggccatcgacagcctgggcgtgcggccgctgctgacaagaatgccttcccggctttctatcggcgagcgccagcgcgttgccttcatccgtgcgattgcccaccagccacgcttactccttgccgatgaaccgactgcggcgctggatcctgataatgcagaccggctgtttgacctgatgatcggcatggtgcgctcactggatatggcagccattgttgtgagccacgactggcagcgcgtgacgcattttgggattgaccgatatcaggccgtgaccggagagggaaaaagtgtcttcttacccagttga

SEQ ID NO: 143563 - DNA, 1956 bp, Enterobacter cloacae
atgaaatacatgcattggttcagtagcctggtgtgtgccgcaacgctggcatcccccgcctgtgccgcgggtaaacagccgcttttgcaggaaggtaaacatgcgttattccagcgggtactgacttacccaggctgccagctgtccgccaaagcaggtgaagcaggtaaagagcagccggccttcagtcgattctatgtttaccaaaggacaacgcagggtcaggacacgtggctgcaggttgggccggacagctttggtcataccgctggctggatgaattcctcctgcaccgttgactggaaaatgcagctgacgctggcgtttaccaatcctgctggccgtcaaccgatgctgttctttaaagagaaatccgacgttgagtctcttctgaacagcaaaaaccctgcggcaacattgcaaccaatgctcaacagtttgagcagccataaaccggtcccgcaggttctggcacgcgagcctgattacatggtggatcagttaaaaaacttttatctcttacctgttcttggctcagatgatgtgtttaccgataccggcttccaggtacgtgtactcaacgttgcctccgtcagcgaaaagtcgcccgcaaaaaaggccgcgtccgctgctgatgaaaagaacatgatgaaagggttctccgcctcggttgtctttgtgatcgactccaccatctcgatggggccgtatatcgatcgcactaaagaggcgatcgataagatctacaagaggatcgagaaggaacacttacaggatcaggtcaagtttggcctggtggctttccgctccagcgtgaaagcggtgccgggtcttgaatacgacagcaagatgtatgtcgaccccaataccgttaaagatggtaaagacttcctcgctaaagtacatgacctgaagcaggctaccgtttccagcagcaaggttgatgaagatgcttacggcggggtcatgacagcgctggacaaagtggactggacgcagttcggcgcccgctacgttgtactgattactgacgcaggcgcgcttgatggcacagataagctctcgtcaacccatctggatgccgcccaggtgcgtcaggaagccgcctatcgtggcgttgcgctgtatgcgttacatctgaaaacctctgatggtaagaaaaatcacagttctgctgaagcccagtatcaggagctgacgttaaatccattcctgcacaaaccgctctactatcctattgattcaggtgatgtaaatagcttcggtagtatggtcgataacctggcgaatgccattaccggccagattaaaacagcctggagcggcgaagaaacggcggggagcgcgctgggggcaagccctaaatatgccggtaagaaagaagatcccctgctcagtgatgccgacaagttaagtaaggcaatgcgtcttgcctatctgggtgaaaagcaaggcaccacggcaccaccggtattcaagtcatggataagcgaccgcgatctgattgaccaaaacatcccggcgaccgaggtgcgcgtactgctcacgaaaagcgagctcagcgatctgagcgatgtcatgaagaagatcgtcaatgccgccaatgaggggatgatctctccggatgacatgtttgccagcctgcgttctctggcggcaaccatgggcaacgatccaaaccaggcgaaagggaaaaatgcgacccgcctaggagagatgggactgctcggtgaatatatcgagagcttaccttacctcagtgaagtattgagcctggacgaagaaacctggaaaagctgggatggccttgagcaggagcgtttcatccgcaggctgaataccaagcttaattactatcaacgctacaaccaggatgtagaccgttgggtggcattagcgcccgatagcgacccacgcgataacgtttatccggtacctctggagaacctgccctga

SEQ ID NO: 143564 - DNA, 960 bp, Enterobacter cloacae
gtgatcaaacctgaacttaagacgctgacccctatacaaccaggattcgcattgctcttgttgaaaggctggaaaggcgatgccgagggcgtcacaatctcggtagtacgtaatcaggatcgcctgtatctggatagccacggtgattgggtcagtggcgagattttcctcgcccttcctccactgatacaaaatgaggagacgccctgcgttcaggtcggcccttctctgatcgatccactactcgccaaccgccaggcggcctatcgcatcaccatcaaagatggaagtaataaggatatggggattctgaccatcgctgaagggctactcagctcccaggccggtggtgaaaacccactcccggaaaatatacagacgctgaatgatacccccatcgtgcagccgatgtccgttcaagaaccggaacctgtcgttttagaacctgtcgcagaaaagcctgtatctcaacagccgcagaagccgaaaagtaagctgccgttatttgcgggattagccattctattgctcctgctggccgctgctgggtggtggtttacccgtaagccagagcctgcaattccagcggcacctcccgcgcccgtcgcgaaaattaccgggccgtgtggtgatgaacaaatggcgagcggcaatgaaatggcgttcgttaaagggtgcctgcgtagccagccaagtagtgcacaactgctggacgtcatcgcaaaagcgaaagcggcaaaacattgcgatatcgctcagcgcctttacgcctataaagcccagtccggcgatacgcagatggccgttcgttatgcacaagaatatgacccgaaaaccgcaaaaccagggggatgcttcaatcctgacgcagagacagcggcgtattggtatgagtcggttgtaaatctggatccgcagaataacgaggccaaagcccgtttagctgagctgaagaaatag

SEQ ID NO: 143565 - DNA, 2667 bp, Enterobacter cloacae
atgagcactattcatcccaacaccattatccagggctggaatggcgtcgaacaaggtgcaggccgggccattgactggatcgcaagcgttcgtcaggacgcgccgcgcctgaacactgaagccgatcgcctgaccatgaacttgcgccgcagccgtaacaaagcacgcagattggcgcaggccgcagcgaaaccgatgacaatcggcttctttggcttgtcgcaggcaggcaaatcgtatctcatttccgcgctggctgcgggtgaaaacggaaagctggaaacacgcctcggcggcaatcagctcgattttctgacccacatcaacccgcctggcggcggcaaagaggcgacgggtcttgttacccggtttagccgcagtgctcagagctcagacgaccgctggcctgtcacgttacagctcttcaacgaagtggaaatggggaagatcctcgccaacgcattcatccatgacttcaaccaggaaaaatttgactggcagttcgatgaaaaacgcatcagcgatctgttaacgtccctgtcgaaacgacgcctgacctcccgcagccctggcgtgaccgaagatgacgtagtttctttttgggattacctcatccgccatgctgagaaaacgcaaagccgttttgccctgacctactggccacaggcagtaagcctcgcaccatggctttctgttgaagatcgcggccagcttttctccgttttatggggcgaagtaccagaactaaccaatgcctatatccgttttgccaacacgctacagcgtctcggtggagtgcaggagctgcgtgccccactgagcacgctggttcgtaacgaaaacggcctgcttatccagcgggatagcatcatgaacgtcgatatgctggagcggctgaataccccgtcggatcagactattgaagtctgtcctgtggtaaatgggcaaacgggtgcgtctatttcgctatcgctggcagagctcactgcgcttaccgttgaattgcatatcccgttaatggctccgcctcgcgaaacaatcttcgaagccgtcgacttgcttgatttcccgggttatcgcggccgtctggcggtggagtccatgagtgatgtcactcgcgaggttaaaaatgcagagagcaacccgctagcgcagttaattttgcgcggaaaagtggcctatctttttgaacgttacaccgaaaaccaggagatgaatgtcctggtggtgtgtacggcctcaacaaaacagtctgatgtcaaagaagtgggcggcgttctggacgagtggatccgttacacccagggcgccgatgccgacgcgcgtggtcgtcgcttacctggcctagtctgggcattaaccatgtttgatctgcgcattagccaaaacctttcccatgacgaagcacttcttcgccagtcctgggggcttggcgggatgatcaaaatggcgatgaccgagcgttttggccagtacaaatggatgcaggaatggagccagggccaggcgttcaataacacgttcctggtacgcaaaccgcgccagcaaacgccctttatccgcatgaacgcaggtagtgaagcggctttcaacgacgacaatggcgggcagctcgcactgatgcggaaaaccttccttgaagatgaagctgtcgctcgctacatcgcgaaccctgctgaagcctgggatgcgatgctcaccctcaacgacggtggtatgcgccgaatggccgattatctggcccgcgtcgcccgtcctgaactgaaactggagcggatcgcagaacagctcgacgagatccgccacgaactggtcgaagggggactggggaactggtaccagccggacggcgaagaagagctgtccagaaaatcccgaattgcgcaagagatccttgccaccctgaaaaaacgcagcggcatgcacggcgaactgctggcgcggttggttccggcacgccgcgatctccatgcactttacatgcagcaaacgaccctgtctgcgcatgaagcagaagaagaagatgcaggattctttgatatcggtgtggaagatgctttcgaaagcagcgcaactgcggtgacgacgcacagccatgagatcgctttcgcgcaccagagcgttcagctctggattaaccatctgcgcggcctgcctgaaaccgccgccatgctcaactacatcagtcttccgcgcccgattgccgaagcgctggtagacgaattgatcacggggttattgcgttcacgtgtcgaggacgcgctggtcaatgcaatgaaaaataccgagcaggctggcgttcgtcgcgaacgtatggtcgagcgtcaggtttcacgcgtgcttcacgtgatgagcgatttcatcacctggctgggctatcaaaatatgccggaatcgaaacgcccggcccgtctcaaccagcccgaacagccgatctttacccgtccaccaacgtgcgacagcgtggtctggaaaggtgatgaacgcctggcacgcctgacgccgcaacagctgaactacagtgccttctttatcatcgactggctggttggactggaagcactcattaccgaaaacgcaggtcattctgccggacgcgagattagcgtcgcgcagaacgaaaatctgggcgtcattctccgccagattaaattggcaaaggagtaa

SEQ ID NO: 143566 - DNA, 3006 bp, Enterobacter cloacae
atgctcgctgaactcactgattttaaaaaacaggtcaaacttattcgcgacagcgggatccagttccttgatttcgcctttaccctgccaacgcgtaaagaatatggggaatttcttcgtcaacagggcgacgaggctattatgcggcttatctataatgagagggaagataagctgcagatccctcagcctgacagcgaacctcctcgctacgcagactccgactacacattgacgaccgaagagtcgctacgcctctatcgcggcctctggttaccgctgccatttttccgcttcaacccgccacgagcctttgctcacgggccgtataactggtcacgcgtccagttccatgagctgcctgagccggatgaaaagggcaatacctggcgcgctactctgatttttgataccaaaattttcccggaccgcgagaatacgcagtatctcgcaccgggcgaggatgatatccgttcaggggcgggatttgctctggcacgccatcctcacgagatgggggagtttctctcactgccatgggtgaatgaatggctacgggaaattttcagtactcaggctcgcgaagtattacgccaacatattgatgacattgatgaacaactactgcagaaggaacatcaggcgcattatcttaacctgctgcatgtcctggcgacgacgattgtcgttcctgaagtacaggtcaacgacgtaaaaatccgggactcagcgatacctgtagacctcgtgctggacattggtaactcacgtagctgcggcatcctgatcgaagaacatcgtgacgacaataaagggctttctcaactttatcagcttcaactccgagatttgagccaaccgcaatttgtttataacgagccttttgacagccgtctcgagtttgcccaggccgaattcggcaagcaggatttctcgctaaaaagcgggcgcagcgatgccttcacatggccaaccattggacgcgtcggcggagaagccttcagaatggcggctcaacgcctgggtaccgagggctcaacagggatctccagccctaaacgctacctctgggacgatcaaccctattcaccgggatggcgctttagccaggccttcgtgaaaagtgacagagagccgttagccactgcagcaccgctgctgtatatggtcaacgatcaggggaaattgctcattcgcctgaaaaatgaagaagaccgtatgcctgtcttcacgccggtatacagtcgtagctcgctgatgacgatgatgttgtcagaggtattaagccaggctctcatgcaaatcaacagcccttcacagcggctgaagatgaaccacgccagcacaccgcgtcgtttacgaaatgtcattatgactgtccctccggcgatgccaaagcctgagcgcgctatctttgaggagagcatgcatgacgctatccgcatggtctggaaagcgctcggctgggaagagatggattatgaaggcgatgacccgcagtgcttgaaatacgcccatccaggcgtacacgtgaagtgggacgaagccacctgtgggcagttggtatatctctataacgaaacgcagaactactttggcggtcgcacggacgaattttttgcagctactcgccgtcccgatactcaaaaagacaccagcgatacacgctcattaaaaatcgcgtcgattgacattggcggaggaacgaccgacctcgtcatttctcgctacacgctggatgagggccagggcattaacgtccggattaccccgaaacagcttttccgtgaagggtttaaggtagcaggcgacgacatactgctggatgttatacggcttttcctccagccagcagtaaaagcggccatgaccaaagtcggccacagcgatcttgcagccgaatcaatgatgtcacaactgttcggtagtgaatcgatcgaagccggaaaacaggtattacgtcagcagcttacattgcagatcttcgcgcctctggcgttatctattttgcatcgctatgaagagtactccccggaaaatgggcgggagatactgaattacaccttccgtgagctacttgccgataatcttccaaccgagaaagtacaggattacgtcaacgacgttgcccgttccggacagcttgcgagcgaagtaccgttctccattctggatgtaccgctggagttggatcttgcgcgtctgcacaatgaatttatcgaccctcgcagcgggcgaatgaacatttgccacagcctgcgcgcgttgtgcgaagtgctttggcattacaactgcgatgtattacttttaaccggtcgtccatcccgcctgccgggaattcaagcgctcattcgccagcttcaacctgttcccccttctcgcgtgctgccactccacggttatgaaaccggtggctggtatccgtttaacaaaaaaggatgcattgacgatccgaaatcgacagccgttgtgggggcgatgctgtgcctgttagcggagaaatccaggctcaacaacttcttcttccgcactgcgaactttaagccttattcaaccatccgctatgtcgggatgcttgatggaaacaatgtgattaaagacagcaatgtcgcctatcgcgacgttgatttggactccgctgatttccagttaccggaagggaaaggctttgaagcacggggggaagtgcgtatcggtttccgccagcttgataacgaacgctggccatcgaccgcactttacaccctaaaaattaccagtgcgaacctggcaagcgagctgtcgggtgatgctgtaataagcatcggtttaaccgcagaacagggacgtggacgtagtagcgaagaaccggtcagtccggagcgcttccagattggctcgatggaaatgaaaaacgcacagcgcggttatggtcgtagagatgttgcattccagttgaacacaatggtcggtaatgggctgagtgaaacccattactggctggatagcgggagtattaaaagctaa

SEQ ID NO: 143567 - DNA, 1374 bp, Enterobacter cloacae
gtgaaagaaatttttctatgcagtgacaagctcgataaatatcagtcgatgggtgagaatggacaggcagtatatatttccgcattacagctgcgtgaaaccctacgacttagaaaacaaacggcggttgctgacactttagccatcccgcaaatcagcgagcatggcgatcgaatcgactggtatgccccgctggccggtgacgttattccatggacggccgcaacggaagctgagcgccaggccgcgctcgcacaactcgaaaccacccatgcagcgtttcgccagataagtaatgaatttgcccaaagccagcagccggaacgccggctctttgggaaattacttgaaaaagcgatgcaattccccgatcagcagcacgtgtggctggtaggtggaaagccggtcatcagtttttggggatttgtgaacgccactaaccaggcccgcatcgagccgttagactgtttgcgtccaatatctacagccttgcctccgcaatcagccagtattgaaccggtgataccagaacgcactttcacgcatcaaaggcccgccaaaggacgctggtggttgctcttacccgcatggttgcgttggctactgccgctacttctgttactctttttagcactactgttcttacggggttgcatgctaggcataacgatacctggtatttcatcttccgtacccgctttgcccgcgccccaccttccaacagccgaatctcttgcgccgtcgtcaagggccatcatcagcacaacaacgtctaaggcgaacctgcattcgacaacgggcagtgagattttaagcaccacgggcacttcactcacaacgtcacaagagcaatcagcattacaaacgccgtcacaaagcgcagcagcaacggcatctgctgtggatcctgcgtcagccacgaatagccctcatcccggcggaacagcacctgctctcgaagagccatcggccaatacctcaactggcgctaaagtcccgttgaccctgcccgcatcttcactggcccaaggaaacacccgttttctggacgggaactggcacgcaggggctggtattcaggaccaacgcacaggaaagccccttagtctgagttaccaaatcaatgacggtaagggcgaagtacagatgatccgtggcgacggtgtgacctgtcgtggcgcggtcaacgcggctattcagtcaggtcatctcgccattaacaatcagggagaagcactgtgctccgatggctcacgctaccaaatgccagaaattctgtgtgctcccggcgcgcaaaacattgcggattgcaaaggccgttacgacgccaaaacacttttccctatttcgatgaagcaggaggcaagtcagtaa

SEQ ID NO: 143568 - DNA, 600 bp, Enterobacter cloacae
atggttattatttttgatgcttctggctctatggccatgagcatggatgccacaccagaagagataatgcggtggatgcaggataaacctgtacccggtatcgatcgtgaacctcgtcgcattacgctcgcacatcaatccgctaaacacattatcgatgacgtgccaaatgacatggacattagccttattgccgcagctaattgccaccaggtgaacgcaactccggctttcctgccggaacaacgcgctgagctaaaaaagttaattgataaaatccagccggtgggtaaaaccgctctggcagaggcgttagaagaggcggggaaacgagttaatggcgttgaccgtgatgccataattctactggtgacggacggggaagagacatgcggaggctcgccttgcgatgtcgcgcttgagctaaaaaaacgtaagccccgattacaggtcaatgttgtcgatatcatgaataccggcgccggaaactgtattgccagcaatacaggtggaaaggtatttgctgtcaataatacgcaggagtttaataagatgatgaacaacgccgtgaaggaatatataccgcagggttgtgattaa

SEQ ID NO: 143569 - DNA, 513 bp, Enterobacter cloacae
atgaaatatattattgcgctattctttttgtccttaccgatgggcttatttgccaaaaatcatacgcctgaaaagattttacaaatgataaacgacaatggggccagcactgttgttggtgaaatgaactcaaatgataacggtgagtcggaatggtggaaccatgtcatcccgaaaatcaggagcggaacacaagcatggttagcggtggcgagcgcccttgaacccggagtagacgccagtacggctgaagatttaaaggcggcgctttcagaagccatcccgcataaccctgagggtgtcttagcaatattaaaagacgataaaccgttgctcactattgaacaagtctgcgcttttgctaatttccctgagacggaagcagagagcaataagctttatgtagattccatcagggagatgtttaaaataaaaagccctgagggtaaaagatgtctcgccgtcatgatcgccaccgttgaacactctgttccattcgataaggatatttaa

SEQ ID NO: 143570 - DNA, 498 bp, Enterobacter cloacae
atgcatcttccctggccaaacagcggcgattacggcatgaacctgctgaggttgggaattatctcgctcctggggcccatcgtgtggctgtgcctgagagcaaaaacggtgagtatccccccccacttgtttactattatttgcaagcgcagtgctgtttactcttccggcattttggagggagttttcgcttatcttacgctcctgcagcaacccatcagggaaaaggaaacggttgccctgttttatctacttgccgccgccgctgttattgagtgcgcactctctttggccgggttttactgtccgcaatatctaccctttccgctgaattcactggccgaaaaatattccggctacgcaccgggcatctttcaacaggtaaacgtaaccgcctcgtttcttgcgaccgggcttgccgccctgctcggcacggtgatacttcagccgtcggttgtggcatcgctccagcataaaggctctaaccaacagcgctga

SEQ ID NO: 143571 - DNA, 477 bp, Enterobacter cloacae
atgatcggcgttcacccctggcagggctgggggctgggtggtactgtgccgccgacgcaaaaacctctggcagtgggcggcgttgctaaccacgctgccgatcctgctgcttacgcaggtggagtttccgctttactattctgtgcgcatttcttcgccgtgctgctgttgctggccgcctcagaggggaatgctcctgtcgtcaccctgcgccttgctctgttccgcttgccgttggtggcgattgctttatacggcatcatgctctcattccagctcttttgcgccagcatcacgctgggcaattttgaaactgcccggcttgcggatcggcagagcattactcgtctgcatgttccctggctgatgcagatgcgctatcagcgcgatattacactgttgcatctggcgaatttcaatgaacacggggatttgggaagctggaaatattcatgcgtagtaacgcccagtggataa

SEQ ID NO: 143572 - DNA, 159 bp, Enterobacter cloacae
atgcgtagtaacgcccagtggataaagctgcatatggaagaagatgcgtataacgttcagatcaatattctttgttttttaaaacggcatacagaagcgaaaaaattaaaaatggaggcccatcggttaatgccgtggaacgacagatttaaaccgtga

SEQ ID NO: 143573 - DNA, 279 bp, Enterobacter cloacae
atgctgctgttgcatacccctggtacggcaaccaacgtagctgttcaactggaagggaagtccgaagagccgtacggtaacggtaagacgtcaaccattaatattgctgatgccaccgacggcaaaccaacctgggatctacagacgcgagcattcagcaaatcaggtggtgtgactccgataacaatcagctcagtgattacgatgtcctttgcctacaactcatcctgttttgtttcacccgtttacagccagaacatgatattgttttacttctga

SEQ ID NO: 143574 - DNA, 609 bp, Enterobacter cloacae
atgaaaccaatacatgacataaataaaattatttccgttgtctcagaaccgtctcttatccgcacggcgaaaatgcgccagattatctcattggcttcctttccggagcctatggttatcgtgattcatgaaggtcttgtagcggcatacagaaactccgatcagttgttattaagctattttcaggggccattgattgttggcatcaatgaatttagcgagttaaataattttttcctttacaaagcgtatagcgaagtgcggtatgaaatacagccgcgaaaagaggtgctcgaaaaaatcgataaagcttccatctggcgtgaaactgcttatctctatatatatgccctgaagcgtttttctgaggtgtatcaaaactctgcgggtctgtcgacgtacgaactgattcgcatcaaccttaacgcgctcatggaagaggaggaagagctccgtctttcaattaacgtcagtgattatattcaggataaaacaaggctttcgcgcagtcgggtaatgaaaattcttagcgatctgcgcgaaggcgattttattgaggtcaaaagaggcattttattgaaggtgaacaaactgccggcaaattactga

SEQ ID NO: 143575 - DNA, 981 bp, Enterobacter cloacae
atgactgaatttgaagatattaactttagcgaagaatatctagaagtatattgtgtcatggctggacacaatggattcgtatttgttgaaggacttaaggatattgctttctgggaaggcttattaaacgataaggataatgatatacgctttgatatttgtaaccctgttaataaaggaacaaaagggaaaccagtattaaaaaaattcatgagccgagctaatagatatgccatatttgcgatggatagtgatttcgattatgtatgtcctaaaaacagtacagattcagagatgatttgcagtaacaagtatattttccaaacgtttgtatattcaaaagagagtattgagttacaccatgatgttctggagtattgcctttctcaaataaagctcgctactgaaattaaattcaatttcaaagcatacattacagagtattcacggctgatctaccccgtgctgaagaagtttttgttgcttaaacagcatcaagttagacttgatgactcagcttttcacgaagcgattgctccttctaaacctcaattaacgaatcaatttgttatcagaaatgctgtatttgaaacaatgctgcaatctatagcggtttttgaagaagaacttgataagctttttcaagaagaatacgatgctgataaattttatgagcagttatatgagaaaggactgaaagaagataacgcctatcaatatatcaatggtcattttttagctgatagagttgtcatgcctgtcattcaatcactgattgaacaattgaatattaatgaaactgccataatagttacgcaatgcaaggaaaagccaaccttaatctcggaaaggaagcgtgaactaaaaaatattcttgaaactgatttgaatgttaatacgctattaaattgttgcaaagaaaagttcaaaactccttgtgctattgcgatcaaagaaagtgtagctcgagttttagcatga

SEQ ID NO: 143576 - DNA, 777 bp, Enterobacter cloacae
atggccagaagtggtttagaagtgcagcaagcagcggtgaaagcgctgttcttacgcgagataaagacgcgttttggtaagtatcggttagggtacttgtgggcaatacttgagcctgcggctcatctgatggttttgctaactatatttggttttatcatgcatcggacaatgcctgatatatcttttccggttttcttattgaatggattaattccttactttctttttagtaacatagctacgcgttcgatcggtgcaattgaagcgaatcaaggactatttaattaccgaccggtgagacctatagatactataatatcaagagctttattggagactattatatatagtggagtttatataatacttatgagtgtggttggtcttttaggtgaagatttcacattgtcaaatataactcttattataatgacttggactttacttgtggttttttccttaggcataggcttaatcttcatgacattagggaaaacttttcctgaaacagaaaagttccttccgattcttataaaacctttatactttatttcttgtgtgatgtttcctcttcatgctataccgaaagaatattggccttatcttctatggaatccactaattcatgtagtagaacttagcagagaggcggttgttacaggttatataagcgaggggggtaatttaaactatctcgctttatgttccctagttgctcttttcatagggctggctgtatatcgtaaccgtgaagaagcaatgttgacatcatga

SEQ ID NO: 143577 - DNA, 678 bp, Enterobacter cloacae
atgataaagattgagaacttaacaaagtcgtatcgaacaccgaaggggcgacattttgtttttaaagatttgaatgtggatcttccatcaggaaaaagtgtagctctgatagggcgaaacggcgctggcaaatcgactcttcttcgtatgattggtggaattgatcgtcctgatagcggtaatattatcactgatagtacaatctcttggccagtgggtcttgctggagggtttcagggaagtttgaccgggcgagaaaatgtcaaatttgttgctcgcttatattctaaaagcgaggagataaaaaacaaggtagcattcgttgaggagtttgctgaattgggcaaatattttgatatgcctattaaaacatactcatcaggaatgcgttccaggctcggctttggcttaagtatggctttcaaatttgattattatcttgtcgatgaagtgacagctgttggagatgccagatttaaaaagaaatgtgcagatatttttaatgaaagacataaagaagctagttttctaatggtgtcgcatagtttgaactcattaaaagcatactgtgatatcgcactgtatgttggaaggaataatgagacgaaattattcatggatataaacgaagcgataaataagtacgccatagatgaaaacttaagctttgttaaatga

SEQ ID NO: 143578 - DNA, 1770 bp, Enterobacter cloacae
atgttgaaattctctggtacttttcaagagcttagtggaaaattagcttcactcaatggtgagtgggatgattcacaaccgaataaaaaagttttaagactaaatggcggtgtgatgaactggtttgaatcaacgggttctatcagttttcagggaagagaaccggggaaattagcccttgaatctgaagtacctaaattactatacccaacagaaccaatggctataaggccacaatcctcagcattatctcctgatgcgttgataaagtctcaatgctatgatgaaaaagattcttcagtagagcgccaatatcttactactgggatcaacgatggcgaactcgtcattggtattgtgagtgctgttggaactgaatataaacgagttactgaaccattaatcgaccgtttgaaagggtttggttattcggttaaggaaattagggtgtcgagttgtttgacaagtacttcacaaacggatgagtatgaacgtattcgacattacatgcagttaggtgattctttgcgaaaaagtatgggtaataatgccatattagctgcaggggtagcaaagaagatttcagagttaagatccccgacagatacaaagcgagcctatatagtcaactcacttaaacatcctggtgaagttgagttcttaagaaaagtatatgggggaggattctacttaataggtattcatgcagatgagaaacggcggcatcagcatttaaccgatgataagggaatgactcaaagccaggctaatgatctaattcgtattgatgaagatgaatcaattgatcatggacaaaaaactagagatacttatcaccttgctgacttttttttaaatcttggcagtaataatgaccaggttaagaatcgcttgcaacgatttttagaattaattttttcacacccttataaaaacccgacatttgatgagtttgccatgtttatggcttttaatagctcagttcgttctggtgatttatcacgccaagtcggtgcagtgattagccgagatacacaaataattgcaactggcgctaatgatgtacctaaatctggtggaggcctttactgggctgaagtgaacgaagaaactggaaaagttgaagatcaaccagacggaaaggactatacaagagaaggggactcaaataaacatgcgcagtcagtcattatccaagaaattgcgacgaatcttttaaaccaaggcctagtagatagtttgcgtgaacttgatcttaaaaaagcacttaaggaaagtaaaatatctgatttgactgaatttggccgtgttgttcatgctgaaatggatgcattgttatcttgtagtcgtgctggtattcctaccacaggttcaacactttattgtacaacgttcccatgccacaattgtgcaaaacacattattgctagtgggattaaacgcgttgtctacgtagaaccttaccctaaaagtcgtgcgttagatttccattctgaatcgatccatctaagatctgaattggaacgcacacttaaagataataataatctagtcagttttgaaccgtttattggggttggaccacgtcgtttcttggatcttttttcaatgagtcttggcagcggttctaaattacgccgcaaggataagggcggtggtatccttgattgggataaagcatctgcccctattaggacacctttattatcaaagtcttatatagaaattgagaaagctgctgctgagatgtgggatgagtgctcattttga

SEQ ID NO: 143579 - DNA, 234 bp, Enterobacter cloacae
atgaatttgacagtgaaagcgttgatacgaaaattcatcagctatttagccatttatacgttgctaataatttcattcatgctgtttgtgacggtatccggctactatctgtttatctttgactggccggcagaagtcccgcgaattgcaatgcatggattcttatgcactggacttaatgcattagcgatagggatatacgttgtcgcagaaaaatggaaagagaaaagttag

SEQ ID NO: 143580 - DNA, 339 bp, Enterobacter cloacae
atgaagaacgtcggcaccggttccgggcagatacctgatatgtccagttttacggcaagccgtgcgtcaaccggttggcaaaaattgccagggggcctgattatccagtggggacaggctgcgacgaacaccagttctctcgctaccgtggcttatccgatcccattccctaacaacgtattccaggtcatcggctcatgcctcgatgtcaataacgcaaacatcgtggcgattaattctactgacgggataaacttcaacttggtagcctgggttgctacatctggctcggttttaagaactacaactccggtgaaatggattgcaataggtaactaa

SEQ ID NO: 143581 - DNA, 432 bp, Enterobacter cloacae
atgaacaataactatgtcttcagcgctaatactctcgctttctatccggtggaaatgaaagaggcttacgaaaacgcagggaactggccggacgatgctgtagaggtatcagatgaaacttacgttgaattccttacccctccttcgggaaaaatacgcggctctgatggcggtcttccctgctggaaagatattcctcaaccaacacatgaagaacagataatcgaagccgacaacgaaaaacagagtctgataaatcaggcaaatgattatatgaataataagcaatggcccggcaaggcagcgatcggaagactaaaaggggatgagctgacaaaatataatttgtggctggattatcttgatgcactggaggccgttgacacctccagcgcacctgacatcgagtggcctacaccgccgggggagtag

SEQ ID NO: 143582 - DNA, 435 bp, Enterobacter cloacae
gtgaatacatatttttatagcgctaaatacaacagcttttttcctctggaacttaaagacgattatatcaatggtattggttggccggaggatgcggtcgaagttacaaacgctatttatattgaatatagcgaagaaccaccaaaggggaaaataagagttgctggcaaaaatggaatgccggaatggggagacatccctccactgacacaggaagaggttgtggctcaggcagtggttgaaaaacagaatcggattagtgctgcaaacgactacattaacagtaatcaatggccgggaaaggcggctatgggccgccttaaagatacagataaagcaaaatataacgcttggttggactatctggataatattgaagccgtagaaacctcagcggccccggatattacctggcctactcccccggcggtgtag

SEQ ID NO: 143583 - DNA, 636 bp, Enterobacter cloacae
atgctccgaatcgggcaagtcgaagccactgcaacgcaggatggcaaatatactgatggaagtgttgctggtggtattgccgcaacgaggctgcgggcagcagcgtttaatgccatgcaggaagagttagcgcatatcgtagagtcagcaagattggcgctcgacattaacgatatgactcaggttttaaaagccattcaaaaactcacactgagccgtgcaaacccatttgccgatatcaaatcagatggtgcagcggcgatttctacggctctcacaaaccttggtttgggaacagcggcaacgaagaacgtcggcaccggttccgggcagatacctgatatgtccagctttaccaatgcaagtgggtggcaaaaattgccaggtgggaaaattttacagtggggaaaagctggttttcctgttgggcaaactcaggtttctgtttctttccctattcagtttcccagtgtggtaagtaatattcagcttacatttgccgatattaacttttctggtggcaccccctcgcccacattagccgtagtgaatggcactgttaacggcgctggatttggtgcttatatgtccggcgctggcggtttcaatacatacttttttgctatcgggagttaa

SEQ ID NO: 143584 - DNA, 600 bp, Enterobacter cloacae
atggcaaagaaaaagacgtttagttttgctcacctcattggtcttggcccttccgcttctgaggaagaagaggataaaaaagccaaaaaagcgaaagcccgtcgcgcggaagaagacgaacgcgacgatgatgctgaagatgactgcgatgatcctgaagatgactgcgatgatcctgaagatgactgcgatgatcctgaagatgactgcgatgatccggatgcgtcagaagatgatgattctgaagacgacggcgacgacgatcgcaaagagagtaaggcggtaaaaaatgcacgcgctgctgagcgtaaacgctgcgcccgtattttcggcagtaagcatgcagctgcgaatccttcactggccgcgtcactggctttcaataccgggatgagttctgcggcagcaattaatgtcctagcctcttcggctccggccgcagccgcatctcagccatcccgtaaacgctctctcgatcagcgtatgcaggaaagccaccaggtccggcttaatccggatagcggacagaaagagaccggaaagtctgcgctggtaagtaaaatgaccggcctctacaactccacaagaggagagaaataa

SEQ ID NO: 143585 - DNA, 1638 bp, Enterobacter cloacae
atgaataaagtacagatactgggctctgatgggcagccgttgcgacagcagcgtccctctatgctggtggggggtagccgcgtaccttatgacgcagctgactctttcagcgatcaactggcgaactggcaacccgcgctgtggtccccggacaatgaaattaacatttaccgggatcgcatcgtgtcccgcgcacgcgatctggtccgtaatgacggctgggcaaacggtgcggtaacgcgtctgctggataatgcggttggtgccaacttccggcccataatgaaacccgattaccgtgttctcagaatgatcaccggaaacaaagcgtttgatgcttcctgggcggaagagtacggaaaagcgctggacgggcactggcggacctggagtaacgatcctggccggtattgtgatgttgaacgaaaactcaccgtgtcgcagatgttacgcctgggatttcgtcacaagcttattgacggggatgctctggccattctccagtacagaactgacaggcttggtcccggaagaggccgttacgccaccacggtacagattgtcgatcctgaccgcctcagtaaccctcagcagaatttcgatatgccaaatgtccgtggtggcgttgaaattgatgcggacggtgcgccggttgcttaccacatcagggaggcccatatcggtgactggtggagcggggctaaaaccatgacgtggcagcgcatcccgcgtgaaactgactggggccgcccgcatgtggttcacgattttgatcatgagcgtggcgcgcagcaccgcggtaacggcatcctgactccggttattcagcgtctgaaaatgctggtgaagtatgaccagagcgagcttgaggcagcaattcttaatgccatattcgccgcatacattgagtcaccctatgaccctgcgatggttcagtctgccctgggagagacctatgacgaatcagagttaggcacttatcaggatgggcgtgttgagttccataacgatcggcgtctgacacttcagaatggtgcccgaatgcccattctttatcctggtgagaaaatcacgacggttaacgcggcgcggccctacagcaattttgaagtcttcgaatctgctgttctccgtaatttttcttcaggaacagggttgtccccacagcaggtcacccaggactggtctgacgttaactacagttctgcacgctcctcgttgctggaggcatggaaaacactgactcgccgccgggacgatttttctaccggcttcgctcagcccattctcaccgcctttgttgaagaagttcacgacaatgaggatttacccctgcccgcaggcgcacctgattttgttgacgccagagccgcgtattcccgtgcgcgctggatggggcctgggcgcggctgggtggatccggttgcagagaaaaaaggcgccattcttggtctggatgccggactttccaccctcgagattgaggtgggtgaaaacgtcggtgaagactgggaagaagtgcttgatcagcgccagagagaaattgagtcatgtcttaaacgcggattaccgcttccgagctgggcacaggctgaccagtttgcgagccagaccattaccgacccggaggaaaagtga

SEQ ID NO: 143586 - DNA, 255 bp, Enterobacter cloacae
atgaggcgcaaccaaccgggtcggaagtctctcgaagaaaccaccaccaccatgatgatgaaaaccccggttatttttataactattgaagttactgtcggtagtgagaaggatgttgcactggtgcgagcagtcaacaacaacgacatcacctgcattcaggtgcattcgtttgtgaagaaattgcataagtctccttatcaagaggcaatcagcactcctctcaaggctggtacgccaacgtcccaccgctga

SEQ ID NO: 143587 - DNA, 198 bp, Enterobacter cloacae
atgaaaattttagttgaacacaactccaaagttatctggatgcgtgataatgaaacatctgaaggtgtggcctgcaggagttatattaaggacggcgtacagcaaaagattattgccgcccttgaggatgccttagctcaggcaaagggtgagttattatgctggaatgactctgatgctgtgagtgacatttcctga

SEQ ID NO: 143588 - DNA, 519 bp, Enterobacter cloacae
atgaataatccgtcagttattccggccttcgacttccgcgaaatggtcacgaccctcgacaacaagataatcaccacatcactcaaggtggcggattactttggcaagcgacacaaagacgttttgcgtgccatacgtaacctgaaatgctccgatgacttcacccagcgcaattttgcgcccattgatttcattgataaaaatggcgatgttcagcctatgtataacatcacccgcgacggatgcatgatgctagtgatgggattcactggcaaaacagctgccgcagtgaaggagtgttacatcaatgccttcaactggatggccgagcagctaaaccggcgcatggcgatgggtgaagaattgcagcatcgctacgccatcaaagaaactcgctcaaagctgaaaggcacgatcggcagccggttaatgaacgagcggaagaaagagaagcgcgttctggaactcgagcatgagcacatcatgcagttaacgcagccggaattacttattggctga

SEQ ID NO: 143589 - DNA, 468 bp, Enterobacter cloacae
atgattggcgcgctggttaagcgttactggttacagctgctggtgctggtgttaatcggcgtgctggcgctcctcgtgaaccactaccgcgacaatgccatcacctacaaagaccagcgcgataaggcgactcgtaaactcagcctggctaacgccacaatcaaagacatgcagacccgccagcgtgatgtcgctgcactggatgccaaatacaccggagaactggctgatgcgaaagaaaccattgagcgtctgcatagcgatgtcattgctggccgtaagcggctgcaagtcgccgccacctgtgcaaagtcaacgaccggagccagcagcatgggcgatggagaaagcccaagacttacagcagatgctgaactcaattattaccgtctccgaagtggaatcgacaggataaccgcgcaggttaactacctgcaggaatacatcaggacgcaatgcctgaaataa

SEQ ID NO: 143590 - DNA, 693 bp, Enterobacter cloacae
atgaatttacaagaactcgaatatacccgtattgaattgcgccgcgcgctggccgatttctcaggatcgacgaagggacagctgcaggcgttcagtgagcatccaccagcagataaaaataagtatccccggcaccatccagaaatcgtcatggagggtggggaaggttgtggatcgaatgttgtaaaaactctggccactccgctttatgttctggagacaagaagccgtcgacgcccattaccacctatgaaggatgccgagtttgcgagttctgcgtggcgccgctcggtaaatggccttggagagcatctgcaggcgtgggttcggtattgctatggatatgatctgtctttccggtaccagacattaatgtgccagtacgtttgggcacagtttcagcatcagcaggggagtaagaagctccaggacagagtcacaaaaaaattagtggggcttgtctggctcgcggcccaggaagttgcagcatcacgcaataacgatacgtaccaggaatatgcgggggcggcactggcccgcatggtgagcgtggagcgttcaacctggctcagggtatacgctgctcactgggcagcatttaaagcagctttcgtggaaatggacagcctggcgttatgtgaaagcctggcgcggtacgaagagtacgaagaagttaaagtggtagaaatgtga

SEQ ID NO: 143591 - DNA, 387 bp, Enterobacter cloacae
gtgaaactggtgcttcctttccctccgagtgttaacacctactggcgagcccctaataaggggccgctggccggtcgccacttaatcagtgctgaaggccgtaaatatcaaagtgccgcatgcgccgcaatcattgagcagttgcgccgtttaccgaaaccaactaccgcaccagccgcggtagaaatcaccctgttccctccggatatgcgtcgtcgggacctggacaattacaacaaagcgctgtttgacgcgctgacacatgctggcgtgtgggaggacgacagccaggtaaagcgcatgctggtggagtgggggccagtggtgccgaaaggaaaggttgaaataacgatcagcatttacgaaccggcgggtgcagccgcctga

SEQ ID NO: 143592 - DNA, 432 bp, Enterobacter cloacae
atgtgtgagcgctcaccgtccctcgaatggcgttggctctccatgttctcgccggaacctggccagctcttcttgggtgctgtgatagagctccatggtctggcgctgtatgacggtcattctactcgcatcaagagtgccactttccatgtgactcaggatttggtggtaacgaaatacgaaaacatcagggctggtggttccaactttcgccgtctctgcgatttttcgatgctggttccattcttcaagcgcaagagcgaacgcgagttcccgcgtttttgcatttatcccggcgatacgatctttttccgcccggctcctatcggcttcgcgttgtttattaccgtttatcaggttgaaccatccggcgataccagcactaagaacaccgctggataccacgctaattccgatcgtgatccagtctga

SEQ ID NO: 143593 - DNA, 270 bp, Enterobacter cloacae
gtgggtaacaacaaagcgcaacgagcaattatcaagtatgacggggagacgttaagtgcatccccactaccgattaaaaccgctgaatggctcgtggaaaggctctcaccctacaaccaagcggccattattggcatagatgttcaggacgtaggaagcatcgcctccgttaccgttcgggtgcgccatgattccccatggataaatttcgtaatgcctaaattcatcgcgatgaccgttgccaccaatgaggacaacggatatgtgtga

SEQ ID NO: 143594 - DNA, 222 bp, Enterobacter cloacae
atgcccagcaaactgaaacagcggcgcctgcgccgccttaaggccgacctggcctggtggcgagaagaggcagaggattgccgctcccgcctgctggagctggcaggggaaatcgatagagtacgagcacagatcgtcagagtaccaatgccggtggttgtcccctcggctttaatcgcagaattagcaatggagaaagcagttgaacgacttaatgattga

SEQ ID NO: 143595 - DNA, 522 bp, Enterobacter cloacae; identical to SEQ ID NO: 35452

SEQ ID NO: 143596 - DNA, 360 bp, Enterobacter cloacae; identical to SEQ ID NO: 35453

SEQ ID NO: 143597 - DNA, 1341 bp, Enterobacter cloacae
atgccccctcttttactgacgtcaggttattcgatgaaacgtgtttctcaactgaccgcgctggccctgctctgcggcctcgcgtccttttcctctctggcggctgatatgcccaacgcgatgacgctctcccagcttcaggcgcagcacggcacgcctgtcgacacccgccccagcgcgttctataacggctggccgcaaaccctcagcggcccttccgggcacgaacccgccgccctcaaccttgctgccgcctggctgggcgcaatgagcgacgagcagattgcgagctgggcaaaacagcatcagcttacgcccgcgacggccatcgccctctacggcgacgagaacgataacctggcggtgaaatcccgcctggagaaagccggataccgccacgtctcgctgctcagcgacgctctgcagacgcccgaccgccttcagcgcctgcctcactttgaacagctggtttacccgcagtggatccaccgcctccagcagggtaaacccgtgaccgccgcgccggcgggtgactggaaagtgattgaagccgcctggggcgcaccgaagttttacctgctgaaccacattcccggcgcgggctacatcgacaccaacgaggtggagagcgagccgctgtggaataaagtctccgacgacgcgctgaaagcgatgctggcaaggcacgggatccgtcacgacaccaccgtcattttgtatggccgtgacgtttacgccgccgcgcgcgtggcgcagatcatgctgtatgccggcgtgaaggatgtgcgtattctcgacggcggctggaaggcgtggtcggatgctggcctgccggttgagcgcggcacgcccgcgaaagtgacgccagcccccgatttcggcgcgccgatccccggccagccgcagctgatggttgatatggaacaggcgcgcgggatgctgcaccgtcaggatgcctccctggtcagcattcgttcgtggccggagttcatcggcgaaaccagcggctacagctacatcaagccaaaaggtgaaattgccggtgcccgctggggtcatgcgggcagcgacgcgacccatatggaagatttccataacccggatggcaccatgcgcagcgcggacgatatcgccgcccagtggaagcgctggaatattctgccggaacagcacgtcgcgttttactgcggcaccgggtggcgggcgtcagaaacctttatgtacgcccgggcgatgggctggaagaatgtcgccgtctatgacggcggctggtacgaatggagcagtcatccgcagaacccggtcaccaccggagagcgcgggccagagagcactctctaa

SEQ ID NO: 143598 - DNA, 1359 bp, Enterobacter cloacae
atgcaaacagcagagatgtttcgtattttcctggacaatttgaaaatacctaatgaacgaatgacggcaattgcaacacattataaaaatgccacaaggaggcttaacataaggtttcgggaaactgaaaacggtttcaataatcgactgaaggttggttcagcaggtcgtcgtacggcggtcagcaaaacgtcagatttagatatgctgtacattatgccttcagggttgtgggaggcttatcaagtaggtttgaatcctcaacgacgtttacttcgtgatgtaaaagatgctttaaaacaaaccttttcgcagcaagaagtcaaggttgatcgattagtagtgcagattgtttttgactctttccatatagaggtgcaaccagtctttgctgacggagatcattttaaataccctgatacgaaagctgacaatggtaatggtgggtggcgggtaactaaacctcgtatggaaattaccgaaatgaggaatttccgaaataacaaaagtcgtaatctccataatctttgtcgcatgttgcgagcttggaaaaacagaaatacagtagacatgggaggacttcttattgacacgttagcatggaggttccttaaacaaaccgatgattatgatgaaactggaatggttagttatggtttcatgtgccgtgacttttttgattttttgcaaaaagaagacgttcatgaacactatgctgcaataggcagtggacaaagggttaaggtctacaaaaatttccagcgacaatcaaaacgtgccttcaaactatgcacgcaagcgattgacgcgtacgagaatggctatacaaagaaatgtcatgaactttggcgggaagttttcggacttacttttcctaaagcagcaacggaaatgcaagactctctggggctggggtcagataatttcgttaatgaatcatattttgcccgcacatggcgtaatacggaagaatttacggatgaaaaatttgatgatgtcgatattagatatccacttgaagtaaactgtattgtcaaagaaagtgggtatagggaacgctcgattagagcttacctttcggatatagctcgaccttggttacctcctaataagactttatcattctcgatcaatcaagcaagtttagatctgattcctgaaccttatgacatatactggaaagtattgaatagaggtaaagaggctgaagaacgtgatgaaattcgaggtcaaataattttaggtcaaactacccatactgaacatacaaagttcagaggtagtcataaggtgtggtgttatatcgttaagaatcatatagtaattgcccaggctactatcgacattccaattgagtga

SEQ ID NO: 143599 - DNA, 588 bp, Enterobacter cloacae
atgctaaaaaatgacttgctgaatcatattgcttctgctggatacaacgttgggttcggagcaaagaaaacctttgcaacatttgacattgtaagtaagcttcctggctggattggcataatatcactcgcagtatctgttcttggtctttatatggatgaaatgagttctaagaatatttctgcaatttttattattctgagcattggtagcctatacattaatttctatgatggtgataaaagtaaatatgaagaggcggggaaaaggcaaactgacatcttcagaaagattgaacgactgtattacgatgcaaaatcagagagccagccagattcagctaagtatattcaggaacttgaagttctgatgcaagattttgataatagcacaattactaaacaaatttgtggtagtaattggtatgctcactataaattttacagtgaattggagaagcgatggattgaggaacagttatccttaactttttggaaagataaatttccaaatacattaaaaatatttttgattataattttaggtatggttgtttttttgatctgccacaggttgaattggatttga

SEQ ID NO: 143600 - DNA, 150 bp, Enterobacter cloacae
atggaaggctgcgatatgttatcgaaagaaacaatgaacgaaattcgtaatacggtgaagtccccaacagacaatatgaaaatacaccgcaatggcaatcatgttaccaaaatagaattcatggaagaacgaaatgaaatcaccctatga

SEQ ID NO: 143601 - DNA, 207 bp, Enterobacter cloacae
atgaaaaagaatatcgccgttggcaaacgggatgatttcggtatctcccgcacgtttatgtcccgcaccggtttcaaaatgaccgtgccatcgctcctgggtatgctcataaacgtgcagaatgacctcgacaagtcctctttgcggacaattaaggcgcaggaaggtagaagagaaattcaggggcagcgcatggaagggaattaa

SEQ ID NO: 143602 - DNA, 1536 bp, Enterobacter cloacae
atgaggcgtaacagtcccgttacacaaaacgagtatttacttaacgatggttcgacgttaatgtcgaccaccgataccaaaagccatattacctatgctaattccgcttttattgaagccagcggatataaagaagaacatcttctgggtgagccgcataacctcatccgccatcccgacatgcctgccgaagcgtttggcgacatgtggtataccctgcagcagggtgagacctggacggggctggtgaagaaccgtcgtcataatggcgaccactactgggtgcgggcaaacgtaacgcctgtctggcagggtggatccctgacggggtatatttccgtgcgaaatatacccgcacgggaagagattgcggccagtgaaaaactgtatgcaaaagtgcgtaataacgaattaaaacattaccgcttttataaagggttactggttcggcgcggtttattttcgtttatgtcgctctttaaatgtctcagcaccagtaaacgtatccatctgggtattgcgacgacggcgttactctcctgcctggcggtgtatttattccctgataaacttgtgcagtcgggaagtctggcgctgctgtttattgccctgacctattatcttcatgcgcagatcgcccgtccggtaaaatctattgtgcaacagatgcagcgcgtggtttcaggacgtaaaacggactattaccattttgacaggatcgacgacatcgggctgatgatgcgcctggtgaatcaatccggtttgaatctgaattcgctggttgacgatgtcggggcgcaaatcagcgggattggcaccatcagccagcaggtcgcgaaagaaggtgcggcgctgcagacgcgttcagaagagaccgcagacttcctgcagcaaaccgcgtccgcggtagaagagatcgccagcgcggtggagcagacggcagaaacagcaaaagaagccacggagatggcggatcgcacccgcgacagcgcccaccgcggtgaagcgatgatgaaagagaccatcggtatgatgcaatccgtgtcgcaggataacagccagatcgtcgatattatcagcgttatcgatcgtattgccttccagaccaacattcttgcgctgaatgctgccgtggaagcggcgcgcgcaggtgaagccgggcgcggttttgccgtggtggcggctgaggtgcgcaaccttgcgcagcactccgcgacggcggcgaaagagatcaaagcgctgattgagaaaaacgtcgccagcgtcaacgctggcgtggagaaggtagaacaaaccgaaacgcagcttacggtcatgatcgataacgtgctgcgggtctcctccctgattaaggagatcggccacgccacgcaggagcaaacccaggcgctgacgctcatcaacgcctccatctcccgtatcggcgcaatgacccacaacaatacggggatggtggataacgtcactcacgcggcgaatcacctgacgcagcgcaccacgcgcctgcagcaggcgattgccgtttttggcggttag

SEQ ID NO: 143603 - DNA, 180 bp, Enterobacter cloacae
atgaaaccactttacatagtgaaaatggccgtactgtctgtttcgttattcaacgtgttacaggcaaccgccgccatgccaacctgcgaagaggaaataaaggaagccaacgcctttttatcttctcagggtatggtgcccgtcaatcttctcagggtatggtgcccgtcaataacgtga

SEQ ID NO: 143604 - DNA, 273 bp, Enterobacter cloacae
atgctggcaattaaaaaacaacaaaaaataagtttgaagattttatttttaagtgtggtttatcttgtcgtttgttgttttatttttttctcgatagctagtgttgttatagacttgattttcgatggtaaggtgaatttaacgcgagaagttattatagatattatagttgtaagcattattacggggactgctggagggctggggtcttggatcttcgcgaaaatagatgagcgtaaagcccgtaaatcttcgcgttctgatactgaataa

SEQ ID NO: 143605 - DNA, 219 bp, Enterobacter cloacae
atgagcgatggaataaaaattggcggagtgcgactgttaacgctcggtgaaattaaccttgccaaaacactttatggtttaagtattcgttataatgaagtgtggattcatcggggaagttatttgcccttcaatatgcagaatttcagaaccgcaatgacgccaaacggtgagatttactttatggaaggtacgtatgaaaacgactttacggtatga

SEQ ID NO: 143606 - DNA, 246 bp, Enterobacter cloacae
atgatggtacgccgtcgtggagcattctcctgggctgtcgactattcctaccatttagataaacatcacttgcttgattacggtctcgagcaacaagcctctatcgtcagtgatttctggctgctcaatacctatggatttgatccccgcagcaacctgcataaactcattgattatgacccatcggaaccaaaacaggatcttctcaggcggtatgaagttattttaggagactttccacagtga

SEQ ID NO: 143607 - DNA, 345 bp, Enterobacter cloacae
gtgaaactaaaaattctattcattccgattatctcaatgttgaccggttgtccgggtgaaaacctgaatattcctgagcagcgaacgatcatgataaatggcaatcatttttgttttagtgttgacgaaaaagatattttgaatggatatacaatttcgtctatgcaacacggtgaatataaagagtttgcggccaaatttcaaaggcgttcatatccagatagttgtatcgagattgccttgccagctggctatgcctatgaaatctcttataccttgaatgagcgaaattattactatccatttttcaaggataatgacggcagagtcataaattatcattag

SEQ ID NO: 143608 - DNA, 264 bp, Enterobacter cloacae
atgtcattacccgcatacatgtttctttatgatgaaaatggaaacccgatcaaaggcagctgcaatgtttcgggcagagaaggtgcgattgagatccttaacagcaattaccacatccatcaggtttgcagcgccagcacgggcaatcttatgggtgccagagaacatggggcattcactatccataagcagatcgacaaaacgtcgccttacttagggaaggtgcgaataagcaggtcatttcttcccaagctgactcgctga

SEQ ID NO: 143609 - DNA, 441 bp, Enterobacter cloacae
atggcagataatcttttggaaatgatcgtctttggccgaccagccacggttaacaggaaaggccctaaatctttgaaggcaatctggcaatcgaaagtttttaattctgcaagcgcagaatatactggcatgcaggttaagtataagacaacttttaaaatattttatttcccacataacaactcttattcagacgtagacaatggacttaaatttaccattgatgccctggctccggtagtcatggagaatgacaggcaaataacgcgcattattgctgagcgattcgtgaaggagcctgggaaatcccttgtcgttccattatccctagctccctcaattgctaaaatattagaaataagagaaaacaactcacctgcagaatatatgaccttaattaaacttgaaaaatataaatgcaatggaggtaagctatggtaa

SEQ ID NO: 143610 - DNA, 753 bp, Enterobacter cloacae
atggtaaactactatgattattaccattaccaggttgaattaattaaaacagaatatactttaaaagagtatattgtttatgaagacttaccaagaacaccttcatataaaaattttctatttgatttagttgcaattagcaaagacaaaaaagaaattataatcatagaaatagtaaataagcgtcacggtgaccattaccataagcgtataagaatgatggaagaattaaccacccatccttttttacatcactattttaatgttgataaagatgctcaaatattggttgactttagatatatagataatcgagagagtgagcaatcggaaataaatgctaagatccaagagaaattttctgaggataatatagctattattctttccgaaagaataccaccactttatcttaataatgaaagcactgcaaccaattcatttattagagactggatttatatagcaagaatgattcgttccatgatctcttttcacagaacacaaaacaatcatcatcgaaacaagaattcaacccttgattatcttaacctgatactttacgaatttgaaatacatcctctggaacaaattaatgcagaagtgagagacctttacacactatattcaattgtgctaagtgttatcgaaggaaataaagtatcagaacttgaagccagagaaatgagatggcatctaaaatacctacagcagcaactcaaaataaaaattacatcagaaaaaaataaataa

SEQ ID NO: 143611 - DNA, 390 bp, Enterobacter cloacae
atgggcttcccttctccggcagcggactacgttgagcgccacatatcgctagatgagaaatttattgagcatccatcagctacatacttcatgagagcagggcagacatactggagagaaggcatcatgaatggtgccttgttagtggtagatagctccctgataccttgcgatggctctctgctcatctgtaggttagatggtgagctaaagataaagcgcttccgcttgcacccaagacctcacctggtgaacctggagaacggtaagcgcgaagagataccagactcaacgggtgactacaatgtgacttcgccagtatttggggtgatcacttacatcatcaatgatgcacgatcgggagagtttgatagctgccctgtcatctaa

SEQ ID NO: 143612 - DNA, 240 bp, Enterobacter cloacae
atgtttgttgagctggtttatgacaagagaaacgttgccggcttgccaggtgcaagtagcatcattctggcagaactgacaaagcgggtgcaccggatttttcccgatgctgaggtgagggtgaagccaatgcaggctaacgccttaaacagcgactgcaccaaaactgagaaagaacggctgaaccgcatgctggaagaaatgtttgaagaatctgatatgtggctggtttcagaataa

SEQ ID NO: 143613 - DNA, 213 bp, Enterobacter cloacae
atgtccttatcttcccgcttgtggaggatctttgaggggctatttgaccggtggtattccggagccattcacaaaaaaagcccccgggcagggggcaacgtcaactatggctatgttctcgttgttggctttcctggtgctagcgttaaagcgttatcggtaaatatctgcactggcgtgcatgttgccgttgctgccgggctcacgggttaa

SEQ ID NO: 143614 - DNA, 546 bp, Enterobacter cloacae
atgggcaagtttaaatttccctccgcttacaccattctctttttcctgattgccgttgtggcggcgctgagctgggtcgtccccgccggtcagtaccagatggcgatgaacgaaaccctcggtaaagaagtcccgattgccggaacgtacgcgcacgtggcggcacatccgcaggggctggtttccgtcctgatggcgcccatcgccgggctgtacgatccggtctccggccaggccggggcaatcgacgtcgcgctgtttatcctgatcatcggcggttttctcgggatcgtcaccaaaaccggggcgattgacgccgggatcgaacgcgtcactacgcggctgcgcgggcgcgaggagtggatgatcccgatcctgatggcgctgtttgccgcaggcggcacgatttacggcatggccgaagagtcgctgccgttctacaccctgctggtaccggtgatgctggccgcccggttcgatccggttgtcgccgcgtccaccgtgctgctcggggcgggagatcggcacgctcggctctaccattaa

SEQ ID NO: 143615 - DNA, 1221 bp, Enterobacter cloacae
atggaaaagcattacgtcggttctgaaattggtcaattgcgtagcgttatgctgcatcgtcctaatttaagtctgaaacgtttaacgccatcaaactgtcaggagctgcttttcgatgacgtgctctcggttgagcgggcgggtgaggagcatgacatcttcgcaaacacgctgcgcgagcagggtgtggaagtcctgctgttgaccgaccttctgacacaaacccttgatattgcagaagcgaaagcctggctgctggatacccaaatctctgactatcgcctcggcccaacctttgccggcgacgtgcgcggctggctggcggatatgccgcaccgcgaactggcgcgcagattaagcggcggattaacctacggcgaaattccggcggccattaaaaatatggtggtggatacccacacggcgaatgattttattatgaagccgctgccgaaccatttatttacccgcgatacctcgtgctggatttataacggcgtctctattaaccccatggcgaaaccggcccgtcagcgtgaaacgaataacctgcgggcaatatatcgctggcatccggcgtttgccgacggcgattttattaagtatttcggcgacgagaatattaattacgaccacgccacgctagaaggcggcgacgtactggtgattggccgcggggcggtattaatcggcatgtccgagcgcacgacgccgcagggcgtggagttcctcgccaacagcctgttcaaacatcgtcaggccgagcgcgtgatcgccgttgagctgccaaaacaccgctcctgcatgcacctcgacaccgtcatgacccacatcgacgtggacaccttctccgtctacccggaagtggtgcgcaaggacgcccagtgctggacgctcaccccggacggacgcggcggcctgctgcgcacccaggaaaccgacctgctgcacgccatcgagaaagcgctcggcattaaccaggtgcgcctgatcaccaccggcggcgacgcctttgaagccgaacgcgagcagtggaacgacgccaacaacgtgctgaccattcgcccgggcgtggtgatcggctacgagcgcaacgtctggaccaacgagaagtacgacaaagcgggcatcaccgtgctgcctatcccgggcgatgagctcggacgcggccgcggcggcgcgcgatgcatgagctgcccgctggaacgcgacggaatttaa

SEQ ID NO: 143616 - DNA, 867 bp, Enterobacter cloacae
atgcctataaatatagagtcattttcagatcaagatttaagaaagtatattgactccatcataaacattattacaaatggtattaatgatacaaaaaaagttatctttatttgtggaaaagataaatctgacaaagaaagttttcgctttaaaatatctcaactactagaacaaaaaactaattatcagctggcatatcccgaagatctttttgaagatctattagaggggcaagcaagtaacagcttattatctttagagcaacaattagctgaagcagtagacttaataatcctaatcccagaaagccctggttctttcgcagagcttggtgctttttcaacgcaaaaagaactagcagaaaaaatgctcgtattgcggcctaaaaaatataaaagcgataagagcttcattaatcatggcccgatcagacttgtcagatcttataaaggaaaaatattagacatacaaagtaaatttgataatcaaaaaatagagcatacatcttcgatattgaagactgtaaaaaaaatgatcccatcaggaagaaaatccaaatcaataaataacatcctgttgtatcaaaaccatatattattattaatctatcttttcgatagcttatctatgaatgctatccataaattaatggcattaatacttaccaaaagaaaactaaccaatcaagaggttattggatgtaaagcggccatacattcacttacaagatctttatttatcgagaagattggcgatgaattctcaattactagccgtggttttttggacatacaaaataaatattatgcattaaatgaaataagtagcttaagagttaccataatgaataaacaattgtctccttag

SEQ ID NO: 143617 - DNA, 771 bp, Enterobacter cloacae
atgtcacgcattttcatctccggttcgtccacaggcctgggtctgatggcagccgaactgctggttcaacaaggacatcaggttgtgttgcacgcgcgtaatgcgaaccgtgcagaagatgcccaacgcgccttaccgcaggctgaagccgtcgttgtcggtgacctggagacaatggaaggtgccaggcaaacggcattacgtgtcaacgccctgggacgcttcgatgccgtcatccacaatgctgccgttggctacaatgaagcttatcgcctgacccgcgacgggctgccgcatgttttcgcgatcaacacgctctcggcttacatcctcaccgcgttgattgaacgtccacagcgcctcgtctatctgagttcgggtatgcatcatcatgcccgggcaaacctggatgatattctctggcgcaaacgtcgctggaatggctcagacgcctatgcggagagcaaattgcacgacgctatgctggcttttgctctggcgcgtcgctggcgtgatgtgcgtagtaacagcctcgagcctggctgggtgccgacaaatatgggggggccgcatgccccggacgatatggaccaggcgcacctgacccaggcctggcttgccgccagccgtgattctgcggctgacgtaacggggaaatatttctaccacatgaagcgcatgaaggctaatccgcaggtgcacgacgttgtattgcaggatcgtctcatcgatatttgtaccgagatttcagggatagcgctgccggagtaa

SEQ ID NO: 143618 - DNA, 156 bp, Enterobacter cloacae
atggaaaaagtgaaggagttcggtggcgacaccccgctgggacgtccgggccagcccgttgagattgccccgctgtacgtcacgctggcctcggatgaatgttcatttacgtccggccaggtgtggtgctccgatggcggtgacggcgtgatctaa

SEQ ID NO: 143619 - DNA, 201 bp, Enterobacter cloacae
atgaaaaacagcttactggtgctgacgctggggatcatgccagccctggctaatgccggacagataaccctgattctcagtgatgaacaggagacagacaacgcgaagatttgcgtttattccaacgccaactttacggagacagtgatgctcagaccgtccgaacagtgcaactacaccaagactttcaaagatgattga

SEQ ID NO: 143620 - DNA, 573 bp, Enterobacter cloacae
atggcgtggtggaaagaccttagcaaagacagcatatcgggtgttatcgttacacttgtcactggcggtagtgggattgccgttattgtttggctatggaactacattaaaaagttcttccattggctggtagatatttttgtttaccctgtaacattgcctgtttgggctttacttctcatttctatttccctattagttttattgccaactgttggattcgtattgcggcgtaaagtcacatcagaagcgaataatcatttaaagagttttttggactacaaaaccgataccatttttgggattttagtttcttggcgctgggtaagaagattagggagtcagaattattcgttagactctctcacaatgaggtgtccagtttgttcgggaatgctggttcagcatgcaaatgatctttataatttaaatccgtacccgcttataaaatgtcaaatacatggttgtgattggaaaatatcgcgtgattttgaacgtttaacttatggagatatgcgtattaaattagagcaagaaattgatcgacgttgttttcaacggtttggtgactaa

SEQ ID NO: 143621 - DNA, 867 bp, Enterobacter cloacae
atgaaattcatccctgcccgaactgccgccgatgtgctggagataatgaaatcataccgtgacgatctacgtgaaaagacattgtatgaaccatcctggtctgtgctggaaaggctcatttcacgtgatacagagatgaatccggtatggcatgacattgcgcgacatgcgctcaccggtgagcagtgctggaatttgctggcacagatattcctggccggtgtatacggaactgctgagcaccacaggcgcctgaaggctgatcactcaagactggctttcctgaatgaggggattgcaactaaggccgcagaactcggcagaatgctgacggaacgggaagatatacttaaccgcaatgctttttacatagaacatacagcccatatcgtcgatctgattgacgcagcttctggccagaacggacattactcctcttttttgcgtgaaaaacttgatggccttcgcagccaatttgatggcaaatactggccgtcgctgcagcaactcctggaggtggtggcgaaagaaaatcccgtggcagagttcatggaccggagcgatgaagctgtcgtgcatgcaaggggagtggctgttccggatttcctgcgtcggctgttcagtaattttcatgatatccgggtaatgaaaggggatctgcgcactgcacacatttatttgccggcagatttccggctgactgactcaagtctggcgacactggccaccgtttcactcgatctcgcagagcctgtctccgtggacagtgtcaagatgctgcgtaacagactgtatgatgcgggttatccgggggcctgggcgactcctgctacgatttccccggggaagactggcagcagcgtgtga

SEQ ID NO: 143622 - DNA, 186 bp, Enterobacter cloacae
atgaagagaacccgtcaggaagttgtggcacgctggctggccagccgtgcaccggaacagcgcaccggtaatgaggcgctgatcttctcggatgaatgctgggcaggcggtttgcgtctggccgccagcccggttgttcactacgaacttgttatggccgccattcgcaggacgctgattgactga

SEQ ID NO: 143623 - DNA, 1275 bp, Enterobacter cloacae
atgaacgcaaaatcatcacctgaacgcggcaggataaatcgcgaaactgcccagaacagtgggttcactgaaattaaactgatcgcgcgctcagatcaggaccgcctggagattgagaaaatgaaatatgaccagttagtacgattcatccatcaacagccggcgaatgccgagcttgcaccaccggtacgcaaagctgtactggaggctctggggttaaagggttcccccctgtatgccaccactcatggtgccatgagccatatcattaccaccatgatggactatggcatgacggcccaggtggtaccggccgtccagatctacagcgcctgtttcccgaccagcctcaactacgtactgaaatccttcccgggtaaggtgcataactacctgtgccggcatggcgatgcctcttcggtggtgacctggactgagcggaacccggactggggcgatcgcatcattgccagcgtccttgacggtacattcgatgccgttctttaccagatgcgcaccgccgtcggggccatgacgcttaatcagccagtcctgaccatgcttcgccgtctgaaggaagatgccagcgggattaatgccggcgcgcaggaacaggcacagcagatcctcgacaaggccccggagacgcttatccagtcaccccgccagtgggataccgactgcaatgccctgcgcgcgtttatcctgtatttcctgctcgttgatcttgaaaaacgctacggcgatatggcgtgtggtgaacgcacctttgagatcccgttctacgagtggcaacgtgaagtcgctgaaatgccggcgaccggtgttgtgtcgtttaaggaagactccgaactggctgaagagtatgactacgggctgtgcattggctggcgttacgataagtgggagcagtttttctaccaggccgcactcggggccgtttatctactgaacccccgcgtcgcccccaggggtacgctgaaaacctcggctcttgagccgggtatggccatccgttacgcagaggacatgctggaaaaatacctgccgtataccggacgtgctttagtggacagtccggtcgggacgggcaatatgtttgatcgtgcctgccgtgctgcacgcaagcttccggatagtcttctgcgccagatccgcgaagagtttggcagcttcggtaccatcacagatccggtgcggtttgcagacatgacatctgacttcctcactccggatgaggcccgcctgctcagcagtgattttcttcacgactaa

SEQ ID NO: 143624 - DNA, 1341 bp, Enterobacter cloacae; identical to SEQ ID NO: 84378

SEQ ID NO: 143625 - DNA, 333 bp, Enterobacter cloacae; identical to SEQ ID NO: 84379

SEQ ID NO: 143626 - DNA, 1179 bp, Enterobacter cloacae
atggctatcagcgacacaaaactgcgtaccattcatggtaaaccatattcgggcccacaagaagtggctgatgctgatggcctcagcgtgcgcatttctccaaagggggtcatccagttccagtaccggtatcgctggcatggtaaacctcatcgtcttggcattggccgctacccgtcggtatcgctaaaggatgccaggcagatcacgtctgatttacgaaacctttatttctccggcacagatccgcgcgcctactttgaagagaaaacgcagaactccctgacggtcgctcagtgcctagactattggttcgaaaattacgtatctacaacactccgagaaaagacccaggcactataccgctcaacggtcatgaagaggatgcatgacgctttcccgaatcggccggcatcctctataactgtgaagcagtgggtagacctgcttaccgaagaggaaagggataatccgcgccgcgcgcgccaggtgctcagccagcttagatcggcaataagctggtgcatgcggcgtcaggtgatagatagctgtgcaattatgagcatccagccaagagactttggctcccgtgcagctgtgggtgaccgcgttctttcatataacgaactggctcagatttggatggctatagaaagaagccgggcgtctacctcaaacaagcttcttcaccagatgctgatgctgtggggggcgaggctttcagagctgaggctggcaaccaagtccgaatttgacctgctggacaatgtctggactgtaccaaaagagcacagcaaaatgggcaacgtcatccgccgccccatcttcgaacagattatgcctttcctcgaaaaggccatgacaacttacaatgaggtgcttttccccggggaggatataaacgaaccgattagcattgcggccgccaaccggttcgtaaatcgaataaggggagggatggaccttggatactggcgaacccacgacttcaggaggacgctggtaacaaggctgtctgaaatggatgtcgagccacatgttactgagaggatgctcggacatgaacttggcggggtaatggccgtgtacaataaacacgactggatagaggctcagcgtaaagcgtatgagcttcacgctgataagctgttctggcacatcaggaacatttctggttga

SEQ ID NO: 143627 - DNA, 192 bp, Enterobacter cloacae
atgaccgacaccagcctgattcccgaaaaagaagtgatgaacaaacttggggtttcatcacgccagacaatctggaactacactaaccggcacgggtttcccaagccagtcaggacccacccgaaagcgtacctgcgggaagctgttgatggatggatcctcaatggcggcgtcaaccagaaatgttcctga

SEQ ID NO: 143628 - DNA, 201 bp, Enterobacter cloacae
atggctgcttttaatgtgggcgcattagtccagaagaagaccggcggtatacatggcgtggtggatagcctgcaggatccggacggcgaccatccgcagttctgggtgcggtgggacgaccgaaattactcagtgcatccggaaaacgaattacgcgcggccacaatcaatgggccacgcctgtataaagaaatggcgtaa

SEQ ID NO: 143629 - DNA, 357 bp, Enterobacter cloacae
atgaaatataccatgaaggtttataaaaactctgatgaccatgcagcttatctgaaagcgcgatccgacggcgccagaaatggccagtcatttgaatgggcgggtcaccgctgggcgtacgaagtcaccagctttgacgatgccggcgattacgacctgctttaccggtttgatgacaagccatatccagaagaagtttcagtcaatacagatgacatgacgatccgtgactactttgcagctaaggctatgcagggaatcatcagcagcgaatgcaactatggagcgtttagtgatttagcaagcgatgcatacagcattgccgacgcgatgctcctcgctcgggaggcatcatga

SEQ ID NO: 143630 - DNA, 330 bp, Enterobacter cloacae
atgaagattggtgaatgcgataacagttacttcggggaagatgacacattcaatacacaaatatcacctaaggcgcttgcggcccttattcggcaatacaagcactgctgtaggctctcgaaggtaactagccaaactgctgcttaccgcttatgccctcacaagctggctgaagctaagcagtaccagattcgccgcgatcatctggagttatttttgagggtgttgtccgattcaactgctgattatgacgtggaggaaatcgacacttactttggcggagctactgatgattggtcgctaatcctcaaggaaagaatttctgactga

SEQ ID NO: 143631 - DNA, 240 bp, Enterobacter cloacae
atgtacgacaaatatcaccttagccgatgcgatgccatggaatggcttgctgagcactatcctgtatttcctgcgtcaatgcctgatgttccgatgcgtatcgaatggtgcagcgaaaacctgtttaaggggtggagttttgttatcttgctcgatggttcactggtctttgctgactgcctgtcacctcccatccgggcagaagacatggctggcttcaaactgcctgagttgacatag

SEQ ID NO: 143632 - DNA, 690 bp, Enterobacter cloacae
atgaacagtcagcaactggaatacgtacgtcagcagctcattgtggcgaccgcagatctgagcggggcgacgaaagggcagctgatagctttcgccgagaacgcacaattcaccgcgacggcgcgcagccggggccggaagaaaatcaccgacccggtcaccggccgtaaagttaaccctgacggccctgcgatgagcggcagccagtcacgcgccaaaggctcatccattgcgctggtggggccggtagagttcgtgactgcatcatggcgccgcgctgttctgtcacttgaagaacatcagaaggcatggctgctgtggaactacagcgagaatatccgcttcgagtaccaggtggcgataactcagtgggcgtgggcagagttccgggaacagcttggcacgaagaaagtggccggcaagacgatggagcgcctgaaaaagcttatctggctggcggcgcaggacgtcaaaatggagctggcgggtcgtgagacttacgaatatcagaagatggcggaactggtcggtgtaacgccaaagaactggtccgagacgtttacggagcgctggattgatatgcgccgcatctttctgcgactggatagcggggctttattgcaggtaacgcgatcacgttcacaacaaaaggcgacaaatttagactcaagtcttgcaaaactggattga

SEQ ID NO: 143633 - DNA, 318 bp, Enterobacter cloacae
atggctaaacgtatgcaagataaagaaagcattgccggagtgtcatggctgattgtccttgctctgtcatgctggggcggcctggtccgataccttattgacgttaagcagaacaaagccacctggagctggatcaacgcgctggcacaaattgcagtgtccggatttaccggtctcattggtggcctgatcagtgttgaaagtggtctgagcctatacatgatcctggttacgtctggcattagcggtgcaatgggctccgtagcactgacgtacttctgggaacgcctgacggggatgaagaatgcaaaccagtga

SEQ ID NO: 143634 - DNA, 441 bp, Enterobacter cloacae
atgcaaaccagtgagaaaggcattgccgtgatcaagcagttcgaaggctgcaaactcaccgcgtaccaggacagcgttggcgtatggacgatcggctatggctggactcagcctgtcgacggcaaaccaatccgcgccgggatgacgattaagcaggaaacagcagaacgtctgctgaagaccggactggtcagctacgaaagcgacgtgtcccgcctggttaaagtcggcgtgactcaggggcaattcgatgccctggtgtcgttcacgtacaacctcggatcccgttcactgtcgacatcgactcttctgcgaaaacttaacgccggtgattatgctggcgctgccgatgagttcctgcgctggaataaagctggtgggaaggtgctgaatgggctgacacgtcggcgggaggcagagcgggctctgttcctatcatga

SEQ ID NO: 143635 - DNA, 528 bp, Enterobacter cloacae
atgacatacccaacagttgcagtaaacggcgtatccgttcgagtagatgacgatggccgttataacctcaacgacctgcatgcagcagcggtctccaatggggaggccactgaatcacagcgtccaagtaacttcatcaaaagcgcacagatcagacgctttgctgacgaactgaccgaagctacgaaaatagcttcgactcgggtagttaagggcggcactgaatcaggcgtttggggcctcgagttgctcgcgattcgatatgcggcctggcttagtcctaaatttgaaatccgggtatacaacaccttccgggaagcggtactcagcggcatcaccaatatgtctcgcctcaatcggcttgaccttctgatcgccaatgagaccaaagaggtcagcgcctgcgcccgggcgatgaataagtggggagtaggcggtcgcaagaaattgctcaattgcgctcgtgagcggatcgtcagccagatggatcctgacatggtcacgctgatggaagcgaaagcaggttag

SEQ ID NO: 143636 - DNA, 384 bp, Enterobacter cloacae
atggctgtagtgcagataacggcggcgcaggttaaacagcagttgtctgcgctcggctataccaccgtccctgacttcatgatcgacgcctacctctgcaagctggcgaagattgagccctgcctgattgccgccggttacgacgattgcgatctgatgctcatccaagtgtacgcggtcaccttgatggctctgacggcgtacacgcagcggattaagtcgcagggcgctccgtccggtgcctctcgctcgtttgactacggcgagagcgtgctcaacatgcgtgacactctgctggcgctggatacgtctggctgtacatcaggattacccattgatgtcggtcagaaagtagggttgtttctcgttgttggtgggtgttag

SEQ ID NO: 143637 - DNA, 549 bp, Enterobacter cloacae
atggatatctgcacagaaaaaaatcttcctgtggaatacctgcgaaagctgctcgattacgatgcgctcactggcgttgttaaatggaagccccgcgatttagagcacttcaaaagcgagcgagactctaagatttggaatactcgctatgctggaactgttgtaggtgttctgaatcgcagggggtacctggtattcaagcttaataagcgatgctacaggcttcatcgtgttgtttgggcgcttcactacaacgagcacccagaaatctttattgaccacattaacggtgataagcgggataacaggatatccaatctgcgtctcgtcgatgctgagggtaatgccagaaatcgtaaaacgccttcgtcaaattcatctgggattatcggtgtgaggtggcgtgagcgatacggcacttgggagagctccatcggtcagaatggcatggatgtctccttgggtgcatttgacaacctcctcgatgccgcagctgcaagaagatctgctgagattgaatttggttatcaccgaaaccatggcagataa

SEQ ID NO: 143638 - DNA, 390 bp, Enterobacter cloacae
atgacgccaatgatgcacgagcgggttctaaacctgtttgttaacgctgggctgacgtctggatttactgtccagcaactgatgtacgacgacccagggaaatcatccgaagcggtcatggtattcaggccaaacggcggaacaaacatccgcaacgcacttggctctgaatatcatgtgatcgtcgatgttattggcgctaaaggcgtcggggccaaagacaaagccttaaacgccgttcagcgcatcgtcgattacgtccaggccaaccccatggctgacgagtgtgtcggatacatccagaacatgggcgcaattcccgcgccggtgctcacagaagaagggcgaatagtcttccgattgcaatttgcatgcacgtttggcgactag

SEQ ID NO: 143639 - DNA, 381 bp, Enterobacter cloacae
atgaagaaatttatgttggcggtaatgcttgcagctactgcagcaggctgcgcatcttctggtaaccagcaactgaaaaacgaaactgagacaagcgttcagagcaaaattcaggaaggaaagacgaccaaggctgaagtgaagggcttatttggttctccggatgcggtttcctataccgatggcggaaatgagatctggaagtattccttcgccaaagtgaaagtgaacggcacaacattcataccgttctatgggctcttccataacggaacaaacggcaccaagaaagaactgaccatcctcttcaaagatgacaaggtacagaaatacaccatggccgaatctgctcttaatacgaaatcaggttgggctgattga

SEQ ID NO: 143640 - DNA, 732 bp, Enterobacter cloacae
atgacttctaagaatgtagcaaatcgcagttctgttgtcaccatgatgtcccatcatgaaattgctaagctgacaggaaaacaagcagctcatgtggttcgcgatattgaggcaatgcttaacgcgcttaaccttcattatccagaaatggatgattatgattcaaaagagttttctgttaggagaaaggtgtataacgggcgcgtagttattgacgagataaagattgaccacgatctcaccatgaccctgatgactggctacagtgtaccgcttcgtcataaagtggcaaaacgttggcgtcagttggaatctggcgaggcaaagcccattaaatcaacatctcaccttccagaatatcgcagagccagagccattaagatggaagttgaggcaatgagcattgcattgtcgtttatgccgagacttagcgacatcgcgaaacaaacagctatggcccgtgctgttaacgatgctgcaggaatggatctacttcctttgcctaaggtggaagaacatctccacacggccggagatatcgctgaaatgctgggagtgtctccgcaaaagatcggtcgccttgccaacaagtacgatctcaaaactgagcagtatgggatgtttgtgtgggataaagcaaaacactctgaaaagcaggttgaggcgttccgatacaacaaagcaggagttgaggcacttagacaccttattaacgactcaaaggcagcttga

SEQ ID NO: 143641 - DNA, 390 bp, Enterobacter cloacae
atgggttttccgtcgccagcagcagactatgttgaagaacgcatatcactcgacaagcgtcttatcgctcacccttccgcaacgtacatgatgatagccggcacgatatacctgcgtgcggggatcatgaagggcgccatgcttatcgtcgactcatcactgacaccgaaagacggttctctgcttgtctgtgctgttgatggtgagttcaggatcatgcgttacaggacgctaccgcatccttgtctggagaaccctgaggatggaaggagggagccgttaccatcgaaggatgaggtttcggatacttcgcggccagtgtttggggtgatcacctacagcatcaacgatgcacgctcgggcgagttcgacgactgcccggtgatgtga

SEQ ID NO: 143642 - DNA, 258 bp, Enterobacter cloacae
atgaagcgattacctcttatggtagctgtactgggcgtcatactgctttcaggctgccatgaccgtcgggcaggtgtgaaaacgctgttaggggacggcgtggagcagtatggacagaagctgccttacgatcactggcactttaattttttctatcccgtcaacctgccggcactggtgagtatttatgcttgtcaaagcaaccgattccaggctttcggtatgttacgttgccttagaccggccaaagccatgtaa

SEQ ID NO: 143643 - DNA, 687 bp, Enterobacter cloacae
atgaagcgattacctcttatggtagctgtactgggcgtcatactgctttcaggctgccatgaccgtcgggcaggtgtgaaaacgctgttaggggacggcgtggagcagtatggacagaagctgccttacgatcactggcactttaattttttctatccagccaacctgccggcactggtgaccatggtgtatctggaggacgggaatatccgtgaaactatctaccggcgacttgatccgaccgaacccagccagggcagcgtgggaacatggagccagcgtgtaggcggttttccagccaattttaatattggcaaggcgctgcctgtcaggatgacggtgtgctgggactcggttatcgacaaaaaggcatatgagacagagttctggttcagccgggagacctggcagcagatgctcacagcctatcctgatacctatcgtcccggtaatacgtattaccgaaacaaaatgataataggtctggccccggaaggaaaagtcagagtatggcttaaagataaccgtaatcctgttgtgctccagcatcccgccaggcagttcacgctgacaggaaatgaaatgcttatatgcaaaggagtcacgaaacatcctgacgggtatgtttattacggaaagacacccgaattcattaaggggaaaaactatccgtatggtaactggtag

SEQ ID NO: 143644 - DNA, 1689 bp, Enterobacter cloacae
atgagtacaaacgagaaggctgcgtcggaagactccagctattaccgatatgaaattatcggggataatacccttcgaaccagcgctgtcgggactgtaaaaaccgttcagtgccggcgggtgccagtcagggggatcacgctgaccgtaggtgtgttctttgacggcactgggaataaccgggcgaattcagacgatctacggatggcatatgcccattgcgccaatctggtaggtgaggatcgtgccagggcgtgcgagaagtatgaaaagcatgccagagcagggttagggaacgccagctggcaaggtggccccactaatatttcgcggcttttcgatctttaccagcagcacaatgaacttaaaaacggcgaagtagaggcgcaggtcaaagcctacgtatgtggtatcggcacggcggatggggaaagcgactcgacgatgggtaaagcgctgggcagcagtcttatccggcagtttgagggggtggtgacaaagaccgatgaggcgctggataaaattatcacggcgctcagggaattcattgatgttaacagcacagaggtagcaatagcgaaggtgcagtttgacgtgttcggtttcagccgcggggcagcggcagcgcggcacttcgccaaacgggtgatgaaccaggacgcggagatagcggtggcgatagacaaaggattagacctgacagggcaccatggaaaagcggcgggagaggtacgctttctgggactgtttgacacggtggcggccatcgggagtctgctgaacttctacggcatcaacgggcgcagcaaccccggagtcaacctagaactgcgtccctcggtggcgcagaaggtgtttcagataagcgcaatgcacgagtgcagatataacttcagcctgaacagcatagcggggatgtggccggagctggcgctgccgggtgcgcactcggatatcggcggaggctacaacgcgggagaggatgaaatatccctgctgacgatgccggactttgaagttatgccggaaagctcggatgaaatgcagacggcagtataccgtaaggcggagaagatgcgtcagacgctatattcgctgccggcgctgaagtacctgatgccgcatggtgaggtagagacgaaaatgatttcgtggccactggttaaccgggataaggcacgggcgtttatttttgagaagaaatccggcgcggcggtatttatgactcgccgggcggtgccgaacgactgggaaaaggtgagtatgcgcgtgatgctcgatgcggcacaggatgccggggttattttcggggatattgacccgcaaaacccagatacaacacttcctgctgagctggttctcctgtgtgagaaagcgatagcacaggggcgggcagttcggctgggcgtagagtctgagggctttacggcagaggatatgcggaccatcgggcgttacctgcactgttcggcgaactggaacatcgactctgacctgagcctgtgggtgagtccgtcctcgggagaggtttttctgagaaaccactatgcgccgacggatgaacgctccttcgtgtggccgatggctccgggcaaagggtgggtgcggacggtatggcggatggacgatcagcagcaatgggaagacagggcgcgggcgaatgcggacgcgctggacgtatttttctga

SEQ ID NO: 143645 - DNA, 150 bp, Enterobacter cloacae
atgtatcgcattcatcctgacgctgtcgccaattattctcttaaaccgttaatcaaaaaggagtatttaaaggttccgggggtgactattaagggggtgaaggcagatgaccttgatttgacgcaaaaaaatcaggggctttgctgttag

SEQ ID NO: 143646 - DNA, 246 bp, Enterobacter cloacae
atgcctgaacagctcgtaatgaggctgtatgtttcggtaagcctgtcctggatacagagagcgttgtacaaaatcgctgatccactgctgaccatcgtatatgcaaacgtggccgctatcgtggcccacaatattctggataacggctacgtcaccagcatgagggtgattgtataccaggcggaatccagcattgaccaatatccgccccatatcttttgccagacgcgtattggagatttttaa

SEQ ID NO: 143647 - DNA, 684 bp, Enterobacter cloacae
atgccaccgacagagcgtcgctacgacagactggcggtcaggctgtcgttgattatcagccgcctcgtagcgggtgaaacgctggatatgcaaaagctcgcgaccgagtttgacgtgtcagtccgcaccctctacagagactttcgtgaacggctgatttatctggatctcgaatgccatcagggctgctatcgcctacggacaggggccgggccgcagggcgagctggatgtcctgacgtttgcccaccgtaccggcatcgccggcctctttccggggctggaccgtcggctggtgagcctgctgctgaactgcgagggtgccccctgcctgaccggagatgcggtttctgtgggctcacctgcgacccagctgtccttttaccggctggtacaggctattaccacctgccagcgcgtcacgttgctgactgacggaaatcgttgcgaaagactggccccttacaggctgcttgcccagcagagccactggtacttggttgcggagcatcacgaccgtccggtggtgttttcgctcagtgatattcaccttgtgcagcccctcactgagagttttaaacgcaacgagcgcttttaccgactgacagaagatttaagttttatccgagcactgccgcattttcagtttattcaacaggcaatcaccaacataactacaacctaa

SEQ ID NO: 143648 - DNA, 459 bp, Enterobacter cloacae
atgacaacacagacgcagtacgacctcgcacccgctaaccaacccgaatttgaactgaccgtcacgccggtccccgatgaacagcgtatcgatttctggccacagtactttggcgctatcccgcagtggctactcctggagccgcatatcttcgcctggatggaccgcttctgtgagggctacagcggtggtatctggtcgttctacaccctcagcaatggcggcgcatttatgtcccccgagcctgacaacgatgagacatggcgtctgtttaactgcctgaacggtaacgatgcccaaatgagtgcagaagcagcaggtattgctgtctgcctgattgcgtatagccaccatgcctgccgtacagaatgtgacgcgatgaccgcacactattaccgcctgcgggactacaccctgcaacaccccgagtcacaggccattctgcgcattattgattaa

SEQ ID NO: 143649 - DNA, 480 bp, Enterobacter cloacae
atggaaaaactactttccacacagactccggcatttccgctgactgcacaacgcacgataaaacgcgctttaacgctgcttgatcaccacctgcgcgaaactggcgtggcattcacgtccgcccaggctgcccgtgactggctgaaattgagaatggcgggactggagcgcgaagagttcatggtgatgtacctgaaccagcagaaccagttgattgcccacgaaaccctgttcaccggttcaattagcagcaccgaggtacatcctcgggaggtggtcaaacgcgccctatatttcaatgcagcagcagtgatactggcgcataaccacccctccagggacaccacacccagtcaggctgacaaagccattacgcagcgtctggtgcaggcacttgcgctggtggacatacgtgttccggaccaccttatcgtcggtggtaaccagatactgtcgttcgctgaacacggtctgttgtga

SEQ ID NO: 143650 - DNA, 318 bp, Enterobacter cloacae
gtgaatgaaatgacctggggcctgcagcgtgacgtcacaccacgcttcggtgtccggctggtgcaggagagcaaccgactgcactatctgtctgaccgggccagtatcaccggtaagttcagtgacgttgaatgtctaaggctggatgaagcattcccgcactttgtccgtcagatggaattgatgctgaccactggcgatctgaatcctcgccatacacactgcgtcaccctgtaccacaacggttttacctgtgaagccgacacccttggcagttgcggctacgtatacatcgccatttaccccactcagcgttaa

SEQ ID NO: 143651 - DNA, 486 bp, Enterobacter cloacae
atgaataagcaacgtggatttaccctgctggaaattatcgtggcgctggtgatattcgccctgagcgccatgatagtggtcaccaccattccatcacgcagcggcgcagatacatttggtcagcagctaaaatccctcgttgaatatggttctgaccgtgcggtaatggacggaaatattgtcgggctggtgatgacctcgtcagaatttgaactggtgacgcaggttgtaaataacggcgagcgccactgggcaccgttaaagtcggggcggatcgccacccgcggcgagtttcctgaggagatgcatgtctctctctcatcgcgaacgctggcggccacgctggacgatgaaccgcaaatcatttttttgccggacggcgagcttagccgcttcacgctcagcctcgaaagcctggataaaaagcagcgctttcacgtgacgtcacagggctctgttcccgtggtggtggaaaacgatgactaa

SEQ ID NO: 143652 - DNA, 672 bp, Enterobacter cloacae
atgttcccttatatctctcatctgctcgcagcgatgctgctgggcgcaattattggcgcggaaagacagtggcgccagcgtatggccggacttcgtactaatgcactggttgccacgggtgcggcagtgttcattttaagttcggtatcgacttctcctgatagcccggggcgtatcgcagcgcagatcgtctccggaatcggctttcttggcgctggcgtcattatgcgtgaaggaatgaatattcgtggtttgaacaccgccgcaacgctgtggtgctcggccggaattggcgtactgtgcggattaggccagttctggaatgccgccatggccagcctaattattctctgcgctaacatattgcttcgcgaagccgcgcagcgaattaatcaactgcccgtgctccatgaaggcgaaaaatgctatgtacttaaaatcacctgcaatgatgagcatgaagatgcggtgcggcagagcgtcgtaaatatggcgaaagagttgacgttaagtctgaaagcgatttattccgctacggcgcaagcagaaggtaaaactgaaattcgggcggaagtgatgacccgggaggaataccgaaaattactcgatctgattatggggaatatgggcgggaataaaattatcgcgtccgtcagctgtcacgcaatatga

SEQ ID NO: 143653 - DNA, 633 bp, Enterobacter cloacae
gtgcacgggggcccgggtcgcgcgggcggcggcgaagagctgggcggcctgcgcgcggtgaagcactacctgcagcgcaccgcgattcagggcagcccgacgatgctggccgccattggcaaacagtgggtgcgtggcgcagcggtgcaggaagaccgcgtgcatccgttccgcaaatactttgaggagctacagccgggcgacagcctgctgacgccgcgccgcaccctcacggaagcggacatcgtgaactttgcctgcctgagcggggaccacttctacgcccatatggataagatcggtgcggcggagtcgatcttcggcgagcgcgtggtgcacggctacttcctgatctccgccgcggcgggactgtttgttgatgcgggcgtcgggccggttattgccaactacggcatggaaaacctgcgttttatcgagccggttaagcctggcgataccattcaggtgcgcctgacctgcaagcgtaaaacgctgaagaaacagcgtaccgccgaggaaaaaccgaccggcgtggtggagtgggcggttgagatcttcaaccagcaccagcaggccgtggcgctctactccatcctgacgctggtggcgcgccagcagggcgatttcagctaa

SEQ ID NO: 143654 - DNA, 249 bp, Enterobacter cloacae
atgaacgaacttccaacgcgttacgaaatttctagcgtaattaataagttgaaagtgggtgtggtagacagaacctacgttgctcaatgggctttttcaattattgatgcggatgatattagaatcaccgatcaagttgcctggaaagtgattcaaagcttaggtgctgtcgatcttccttcctcagatcgagattacttgtatggtattgatgattttaatgattggttgcgattattggaatcatga

SEQ ID NO: 143655 - DNA, 1464 bp, Enterobacter cloacae
atgacccacacaatttctctcagaaatgaggcgtgcgatgaacataaatttgtcatctccgcctgcggttttacgttccagggatatcgtctgatccttaaccagtacggaatacaggcttcgcatattcactttgacggggatgaggtatcccaacaggatcttgaaaatatccttataaatcagaatgctcatattgtggtgtttctcggaaaaggtatcgtcagtctcctggagagcctgaagagactggcgtccgtactcaatgcacttcccgttattcgacgcgtcaccctgtatggcgacctgccggatggctggctatatcgcaccctgggcacgcttttaaataatagctatcaattatcattgattcgactggcccgcgtttcagatgtcataacctgtattcatacacaccatcatgtttttaaagatcgttcgtacgtattacgcgatcgctacaaggataattcttcgcaagaaaccgtaaagtggctaacaaaaagagaaattgacgttttattaaatttctaccgcggcatgtccgtaaaagaaatgtgcgacgaaatggggctttctaataaaacggtttatacccaccgtaaggaaggcgtgctgaaattacgcttaattaagcggtggctaaacgattcgcacaatttcagcgcggaaagacgtatcaagcggcggaaccaaaatacggattttacggatgaagaatcagaaatttttaatgcattatataaaaaagagatcttccccgcttatcagatcattaccgatcgtgacaaaaagggcgtaggctttgagatactgatccgctggaataaaaacggtaaaattgtcaagccggccagttttctcacggatatttcaaatcatgaaatatggttgaaaataacggcgttagtcatccatgccgccgtgtcagggattaataagtataatggaaaatactatttttctgtgaatattccgcctcgtctggcttccggaaatgcattgcctgatatggcaaagaaagctatcgacatgctgctcaagccgcagtgggccgaaaagctggtatttgaatttgctgaagatattgacgtgacgaaggacaaaaggatccctgaaaccatgcggcacttgcgtaatacggggtgtcgattgtttctggatgactgcttctctaaccatcaaaccatgttcccggtgcggcaggtgcattttgatggactcaagctggatcgcgacatcgttgagcattttgtggcaaacgacaatgactataacctgattaaagcgatacagatttatagcgacatgaccggaacggactgtattgccgagggggttgatagtgaagaaaagtttgaaaaattagtcgcgctgggcgtcaaaaactttcaggggtattatttatcgcgtgccgtgaaagaggaggagttagaccgcatggtcagaatgtttagctaa

SEQ ID NO: 143656 - DNA, 594 bp, Enterobacter cloacae
atgagctccggtaattaccaggtagagttatactccccacttgctggcccggtcaggttttttgctcgtaatatcaacacatctactggcggcagcgcctgggcagaatactattctactgcgaacaccactaaggccagcgatggaacactaaaagcagcctcgccggttgcacggatcgttaaatctcaagaggaaaaccagcgaagcgatattgctgatgatggttttttatggtgcggttgcggtacagctaacgccgaggctgaagggatcagcatttcccgaactgatgtcggcgtatatatcctcgctggttctgaaggcctggcatctgaaggctggcagctcctgccgcccatggaccccggcggtatgggagaacttggcattgttgaagctgagcaaaccgataacggcgagctgacaatccacctgtttaagcgcaaatacgtgctgggcgatgaaggtgagattgtaaaaacaaaaggggagccaatcgacgtaccggccaacagctggatcgacgttcgcctcgatatgcctgatgattctgcctttaatcagaggatgagtcagggacttgagccatag

SEQ ID NO: 143657 - DNA, 1167 bp, Enterobacter cloacae
atgattacgggcatgaccattgatgccggtaccagccttgcaccggcatttatgctgacgctgaacagtcaggacattaccagcaattttagtgaccggctgatttctctcaccatgaccgacaacaggggctttgaggctgaccagctcgacattgagctcgacgacaccgacggcaaagtcgagttgcccctgcgcggggctgtgctgacgctgtggcttggctggcagggttcggcgctactgaataagggcgatttcactgtcgatgagattgagcatcggggcgcgcctgataccctgaccattcgggcgcgtagtgcagattttcgcggaacgctcaattcacggcgtgaggagtcatggcacgacaccaccctcggtgagctggtcagcaccattgcaaagcgcaataaactgacggccagtgtcgcggattcactgaaaaaaataccggtgccgcatatcgaccagtcgcaggagtccgacgccgtatttctgacccggctggctgaccgcaacggggcggcggtgtcagtgaaagcggggaaactcctgtttctgaaagccggtagtgcgatgacggccagcggtaaacccgtcccacaaatgacgctgacccgcagcgatggcgaccgtcaccagtttgccattgccgaccgtggggcttataccggcgtaacggcaaaatggttgcacaccaaagacccgaagccgcaaaagcagaaagtaacactgaaacgtaagccaaaagagaagcacctgcgtgcactggagcacccgaaagcaaagccggttagcaaaaagacaaaggccaaaaaagagccggaggcgcgcgagggtgagtatatggccggtgaggcagataacgtgctggcgctgacgactgtctacgcttctaaggcgcaggcgatgcgcgccgctcaggctaagtgggataagctgcagcgaggcgttgcggagttttcaattacgctggctctcggtcgagctgacttgttccctgagacgccggtgcgcgtatccggctttaagcgcgtcatagacgagcaatcttggttaatcagtaaggtaactcacaatctgagtaatagcggcttcacgacgggtttagagcttgaggttaagctttctgacgtggaatacagctcggaggaaagcgagtag

SEQ ID NO: 143658 - DNA, 483 bp, Enterobacter cloacae
atgcttgctcttggcatgtttgtatttgaacgtcgcaccctgccttatcagtcgatgcaacactctaaagattaccgctgggcgtctaatgacagagtgggtaaaccgcctgcgtatcagtttctcggtgagggggaaaacgcgatccagcttgccggtacgctttaccctgctattaccggcggtcgtatatccctgcttgctgttgagctgatggccgacgagggcagagcatggccgcttattgagggaaccggcaatatcttcgggatgtatatcgtcgataaggtgtcgaccacgcataccgagtttttcagcgacggcgcggccagaaagattgatttcaccctttcgctgaaacgggtcgatgaatcactgacggcaatgtttggcgacctgaataagcaggccagcgagcttctcggctctgccggtaatctgactgataagctgcagggtgcgctcggagggctgaccgcatga

SEQ ID NO: 143659 - DNA, 2442 bp, Enterobacter cloacae
atgagtaataacctgaggcttgaggtattgctgaaagcggtcgaccaggcgacccgaccgcttaaatccatccagaccgcgagtaaaaccctctcgggtgatattcgcgacacacaaaaagggctgcgtgacctgaacggtcaggcatcgaaaatcgacggctttcgcaaggcaagcgcgcaactggccgtgaccagtcaggcgcttgacaaggcgaagcgcgaagccggtgagctggctgtgcagtttaaaaacaccaccagtccgactcgcgcgcaggcgcaggcactcgaagcggcaaagcgtgccgcctctgagctgcagacgaaatacaacagcctgagaacgtcagtacagcgccagcgctccgaactgatgcaggcaggtattaacacccgcaccctgtctgccgatgagcgtcggctcaaaacctccatcagcgaaacgacggcgcagcttaaccgccagcgtgaggcactggcgcgcgtcagtgcacagcaggcgaaattaggccgggtgaaagagcgatataaatcaggcaaggagcttgccggtaatgcggcggcggctggtgctgccggggtcggtatcgcgacagcgggaacgatggccggagttaagctgatgacaccgggttacgacttctctttaaaaaactctgagttgcaagcggtgctcggcgtggcgaaagactccgcagaaatgatggctttaaagaaacaagccagacagcttggtgacaataccgctgcatcttccgacgatgcggcaggcgctcagattatcatcgcgaaagcgggcggtgatgctgccgcaatccaagcagctacccccgtaacgttaaatatggcgctagccaaccgtcagacgatggaagaaaacgcaaagctgcttctcggtaccaaaaacgcctttcagctttcaaatgataaagttgctcacattggcgatgtactgtcggcgacaatgaataaatcagcagctgattttcaggggttaagtgacgccctgacttatttagcgcccgtagccaaaacggcgggggtgagccttgaggaagcggcggcagttactggagtattacacgataacaccattactgggtcaatggctggcacaggtggctccgctgtggtgagcagattacaagcccctacaggtaaggcatggacagcgcttaaagaattaggtgtaaaaacatctgatagcaaaggaaatatgcgcccactatttaccattttaaaagaaattcagaagagttttgataagcataaactcggaactagccagaaaggcgaatacctgaaaactatatttggggaggaagcacttaaatcctcaagcgtactcttagaagcggcggcgagtggaaaattagacaaattggcggagacccttaaagcctcagacggtaaaactgaggaactggtaaagattatgcaagataacctcgggggcgattttaaagaattccagtccgcttatgaggcggtaggaaccgacctatacgaccagcaggatagctcactacgcaagctcactcaaaccgccacacagtatgtgttaaaactcgataactggatcaaggataacaaggaattagcggaaactatcggcatcatcgccggtggcgcactggctctgattggtatcatcggcggcatcggcctcgttgcgtggccggttgtcatggggattaacgccattatcgccgctgctggcgtgctgggtacggtctttagtgtcgttggcagtgcaattgtgaccgcgctcggcgcgattacctggccgattgttgcaatcggtgtggcgattgtggccggggcgctactcattcgtaaatattgggagccaatcagcgcgtttttttctggtgttgtcgaggggctgaaaagtgcatttgcacctgtcactgagctatttgcaccgttaaagcctgtttttgactggcttggcgataagctaaaagcagcgtggcaatggttcaaagacctcattgaacctgtgcactcaacgaaagaaacccttgatagctgcaaaaatgcaggtgtcgcatttggacaggcgctggtagatgctttcatggcgccagtaaaagcatttaacacgctgcgtagtggggtcgactggcttctcgaaaagctcggcgttatcaacaaagaatcggacaacctcgaccagactgccgccaaaactaacgccgctacaaaaggtaatccctacatcccggcaaccagcacatatggcggctatcaggcttaccagccagttaccgcaccggctggccgtacctatgttgaccagagcagcccaacctatcaaatcaacctgccgggcaatggggctccgggcggtcagctagggaatcagttgcaggatgcattagaaaaatatgaacgtgaaaagcgagcgaaagcccgcgccagcatgatgcacgattaa

SEQ ID NO: 143660 - DNA, 336 bp, Enterobacter cloacae
atggcaaaagcaccacgtaaacccgctgaatttgttgatacggctggcaatgaaattgacaccgtaaacccgaacgtcgtgaccctcgacaagccgattaagcgcgccggtcagacgattgataaagtcaccctgattgagccgaacgccggaaccctgcgcggcgtcagtctggcggcggtggcgcagtctgaggttgatgcgctgattaaagtcctgccccgcatgacctatcccgcgctcaccacgcaggaactgaccgcgatgaatctgcccgatatgctgtcgctggccgctaaggtgattggttttttgtcaccggcttcggcggagtag

SEQ ID NO: 143661 - DNA, 519 bp, Enterobacter cloacae
atggcactaccccgcaaactcaaatatctgaacatgttcaacgacggcctcagctacatgggcgttgttgaatccgtgaccctgccgaagctgacccgcaagctcgaaaactatcgcggcggcggtatgaatggtgcggcggcgattgacctcggcctcgacgacgatgcgctcaccgtcgaatggtctgtcggtggcctgcctgatgtggcgctgtgggcgcagtatgccgcgccgggtgctgacgccgtgccgctgcgttttgctggttcttaccagcgtgacgacaccggcgaaatcgtggccgttgaggtggtcatgcgtggccgtcataaagaaatcgacggcggcgaaaataagcagggtgaaaacacctcgaccaaactgtcgaccgtctgcacctactaccgtctcacgattgatggtagcgacgtcatcgaaatcgacaccgtcaacatggtcgagaaggtgaacggcgtcgaccgtctggagcagcaccgccgcgcaatcgggctgtaa

SEQ ID NO: 143662 - DNA, 1179 bp, Enterobacter cloacae
atgagtgattttcaccacggcgtgcaggtgcttgagattaacgacggcacccgcgtcatttccactgtcgcaaccgcaatcgtcggcatggtctgcacggccagcgatgcagatgccgcgacatttcccctcaacgagccggtactgattaccaatgtgcagagcgccattgcgaaagccggtaaaaaaggcacgctgtctgcttccctgcaggctatcgccgaccagtcaaaacccgtcaccgtagtcgtgcgcgttgccgaaggtacgggagaagacgccgaagcgcagaccatttctaacatcatcggcggcacggatgagaacggtaaatacaccggtatcaaggcgctgttgactgccgaagcggtcaccggcgttaagccgcgtattatcggcgtgccgggtctcgacacgcaggaagtcgcaaccgcactcgcgtcggtctgtatcagcctgcgcgcctttggctatgtcagcgcatggggctgtaagaccatctccgaggcgatggcctatcgcgagaatttcagccagcgcgaactaatggtcatctggcctgacttcctcgcatgggataccaccaccaacgccaccgcaacagcctacgccaccgctcgcgcgctcggcctgcgcgcctacatcgaccagactgtcggctggcataaaaccctctctaacgtcggcgtgcagggtgtcacgggcatcagtgcctcagtcttttgggatttgcaggcatccggcaccgatgctgacctgctcaacgaggccggggtcacgacgctggtgcgcaaggatggtttccgcttctggggtaaccgcacctgctctgatgacccgcttttcctgtttgagaactacacccgcaccgcgcaggtgctggccgacacgatggccgaggcgcacatgtgggcggtcgacaagcccatcaccgcatcgctcatccgcgacattgtcgatggcatcaacgccaaattccgcgagctgaaatctaacggctacatcgtggacggtgaatgctggttcgacgaggagtcgaacgataaggaaaccctcaaagccgggaaactgtatatcgactacgactatacgccggttccaccactggaaagcctgaccctgcgccagcgtatcaccgacaaatatctggtgaatctggccgaatcggtcaacagctaa

SEQ ID NO: 143663 - DNA, 597 bp, Enterobacter cloacae
atggcaaaagcgacactgaacaaaaacggtattgccacaaaagcgggtgatatgaccgtttataactacgatggtgaaacccgcgaatatctggcttcctctgtcgagtttctggctgtgggggtggggatacctgctaattcctgcaccgatgctccagtcgatgcaaaagaaagtttcgcggtgtgccgcgcagccagccttgacgggtgggagtatgttgcagaccaccgtggcgagatagtttatgacactgaaaccggacaaccggtaaaaattaccgcgcccggtgactatcctcacggtgtgactacaatggcgccatcaaccccttatgaccgctggaacggtagcgcatgggtcacggatgagggcgcactgaaaagcggtcaggttaaggaggcagaacagaaaaaatccgcgctactgtcagaggcgcaaagcgctatcagcctgtggcaaaccgagctgcagctcggcatcatcagcgatggtgacagggccagcctgattacatggatgaaatacattcagtcgctgaacgcggtcgacaccttcacggcaccggatatcgagtggccggttaaaccggagtaa

SEQ ID NO: 143664 - DNA, 1023 bp, Enterobacter cloacae
atgaccgcaaaatattttgccattctgaccaatcagggcgcggcgcgactggcgaacgcggcggcactcggtaccaaactcaacctgacgcagatggcggtcggtgatgcgaatggtacgctgccgacccctgacccggcgcagacgaagctcattaaccagaagcgcatcgcgccgctgaacctgctgaccgttgacccggccaataccagccagattatcgcggaacagattattcccgagaatgagggcggtttctggatccgtgagattggtctctatgatgatgccggtgtgcttattgccgtggcgaactgcccggaaacctacaagccgcaactgcaggagggaagcggtcgcacgcagaccattcgcatgattcttatcgtgtcgagtacgtcggccatcaccctgaaaattgacccgtcggtcgtgctggcaacgcgccagtatgttgatgataaggttatcgaagtaaaagcctatgccgatagcctgctggccgcacatattgccgcagctgacccacacgcccagtacctcaaaacggctgatattgataaatatattccggtcgggtttccgctgccgtggccgcaggctacaccgccggagggatggttaaaatgcaacggcgcagcttttgacaaaacgaaatatccaaagctggccgttgcttatccatccggtagcctgcccgatttgcgtggcgagtttctgcgcgggtgggatgacggccgcggtgcggattccgggcgcggcctgttgtcggcgcaatcagacgcgattcgtaatatcacaggtaaatttggtaatacccagctattcccgagtatctatcgtgagggggtatttggcggaactgtagagaatgtctctcaaacaaatggcctggtattgtcgtcgccaggtcaggggaacggggtggttaactttagctttgacgcctcgaaagttgtgcctgtagcctctgaaaaccgaccgcgcaacatcgcatttaactacatagtgagggcggcataa

SEQ ID NO: 143665 - DNA, 909 bp, Enterobacter cloacae
atggcaaccgttgacctgagtcagttacccgttcccgacgtggttgaggaactggactatgaaaccatccttgcggaacgcattgcgacgctgatttcgctctatcccgaagaccagcaggaggccattgcccggacgctggcactcgaatcggagccgattgttaagctgctgcaggaaaacgcctaccgtgaagttatctggcgtcagcgggtgaacgaagccgcgcaggcggtgacgctggcctactccgccggtaacgacctcgacgtcgtggccgggaacaacaatactgaacgcctgaccatcaccccggcggatgacaccaccatcccgccgacacctgccgttatggaatctgatactgacctgcgactgcgcacgcaacaggcgtttgagggattgagcgtggcgggtccggtcggcgcatatgagtatcacggtcgcagcgccgacgggcgggtcgctgacgtctcagtcgcaagtccgtcgccagcctgcgtgacgattaccgtgctatcgcgcgagggtgacggcactgccagtcctgaactactggcgattgttgataaagcgctgaacgccgaagatgtgcgcccggtggccgaccgggttaccgtccagtcagccgagattgtgccgtaccagattgacgcgacgctctacgtttaccccggtcccgaatctgaacccatcaggcaggcatcagagcagaagctgcagagctatatcagcgcgcagcaccgcctcgggcgtgatatccgtctgtcggccatttacgcggcgctgcatgttgagggggtgcagcgcgtcgagctggcatcaccgcaggccgacattgtgctgagtaagtcgcaggcgtcgaactgcaccgagtaccagataactatcgggggctcggatgagtga

SEQ ID NO: 143666 - DNA, 348 bp, Enterobacter cloacae
atgacggcgcgctatcagggtatgaaccgaaataccggcctcggcatcagcgacactgagcacatcagccagagcatgcgcgatattctgctgacgccggtcggctcgcgggtgatgcgtcgtgaatatggctcgctcctgtcggcgctgattgatatgccgcaaaacccggcgctcaggctgcaaattatggtggcgtgctattcggctatccagaagtgggagccgcgcatcaggcttacctctgtcagctttgagaccggcgacgctggcgagatgtatgtcgatattaccgggatgcgtaccgataccggtgcgtcagtttcaaccactgtttcactgagttaa

SEQ ID NO: 143667 - DNA, 636 bp, Enterobacter cloacae
atgaatacgttatccacgatacaggagctcgcgcgcgcgattcgcaacctcatccgctcaggtgtggtgactgaggttgataccgtgcaggggctgtgccgcgtacaaagcggcgggatccagactacatggctgaactggctgaccacccgcgccggtcgttcgcggacatggtgggctccctcggtcggtgagcaggttctgctgctggcaatcggtggcgagcttgataccgctttcgtgctgccgggtattttctccgacgataaccccgccccgtcagcctcggcggatgcgtggcatgtggcttttcctgatggtgcggtcattgagtacgagcccgaaaccggcgcgctgacggtcagcggcataaaaacggccgacgtgacggcatcggagtccatcaccgcaaccgtgccgctggtactggtgaaagcctcgaccagtatcaccctcgacaccccggaggtgatttgcaccaataagctgacgacggcgacgcttgaggtgcaaaaaggcggcaagatgagcggcaatatcgaacataccggtgggtcactgtcgtctaatggcaaggtactccacacccataaacacccgggcgacagcggcgggcaaacgggagcaccgttatga

SEQ ID NO: 143668 - DNA, 450 bp, Enterobacter cloacae
atgagtgagttaaccgcgctgcaggagcgtcttgcaggtctgattgccagcctgtcaccggcggcgcgtcggcaaatggcggttgagattgcgaaaaagctgcgtaccagtcagcaacagcgcatcaagcgccagcaggcacccgacggcaccccgtatgcggcgcgaaagcgccagtctgtgcggagcaagaaaggccgaattaagcgcgaaatgttcgccaaactgcgcaccagtcgctttatgaaagccaaaggcagcgacagtgcggcggcggtggagtttaccggcaaggtgcagcgcatggcgcaggtgcatcagtacgggctcaaagaccggccaaaccgcaacagccgggatgtgcagtacgaggcgcgcccgctgctcggtttcacccgcgacgatgagcagatgattgaagacgtcattatcaggcacatcggcaaataa

SEQ ID NO: 143669 - DNA, 468 bp, Enterobacter cloacae
atgcagaagcacaaaagcctgcgcaaagcgctgattaacgccgtgccgcagctccgaaacaaccccgatatgctgcgcctgtttgccgacaacggccataccgattcccgactggcgagctcgctgtcgtttgaaaaggtgtatgtgcttaacgtggtggtgaccgacttcaccggcgacctcgatttgatattcgtgccggtgcaggcgtggctgcgtgagcatcagccggacattatgaccactgatgatgggcgggaaaaaggattcacctggattattgatatcaataacgatgattcgctcgatatcagtatcagtctgaggctgaccgagcgtacgctcgtcaaagaggtcgacggcgcgctgcatgttagttatgcccctgagccgccgctgcctgagccggtgacgcgcccggtcgagctgtacgttaacggcgaactggtgagtaagtgggatgagtga

SEQ ID NO: 143670 - DNA, 159 bp, Enterobacter cloacae
atgccgggaagtgacccgaaaaccaatggcgacctgagcgcggatatccgccgccttgagggcgcgctgaccgcctgcgcgctgcaggttaaaaccgtcaaacactgtcaggatgaactcgatgcagaagcacaaaagcctgcgcaaagcgctgattaa

SEQ ID NO: 143671 - DNA, 429 bp, Enterobacter cloacae
gtgtccagagtcattgtgatgtttctggcctctgcgctggtgctggctgtgcttgggctgctgtggttgcgccatgagaacggcaatttatcccgctcctttgagacagcaaaccgcgtcgcgagcgaacaaaagacgacgattggcatgctgaaaaatcagctcagtgttgccggccagcttgccaggcgtaatgaatccgcgcaggtggcactgcgcgaacagctcgcaaaggccagcgaggaagccagccgccgcgagcagacgataacgaggttacttaatgaaaatgaagcctttcgccgctggtataacgctgctctgcctgacgttgtgcgtcggctgcacacccgcaccgcctgcgccagcgccggtgattgtggtcaacggatgcccgagggtgagcctttgcccgatgccgggaagtga

SEQ ID NO: 143672 - DNA, 432 bp, Enterobacter cloacae
atgaaaaaatatttacgttccctgatgttcgatgccctgctggcactgttgctgctttgggggctggcatcgccgcaaagcgccgccgtcaactttgttgccgcgtgggcgctgtttggcagtttcatctgcattacggcgagcgtcgccggtgtggtcgcttatgagcactggctgcgaaatacaggcaaaaatattcccgtcaatccagacctgatgaaagtatttcgcgccgtcttttgccgtaagccctctcaggggcgtcgggcatggtctctcattattttctctgttaccacgggctgtctgcttggggctggctggatccttacggctctgatttacctgatttccatgctgacctttaaggccgttcgcgagacctaccgccagcgaattgagggggctggcctgtgtccagagtcattgtga

SEQ ID NO: 143673 - DNA, 513 bp, Enterobacter cloacae
gtgagctcaatcgttaaacgttgcagtgtggccgcagtgctggcgctggcggcactgatgcctgattttcgtctgctgaatacctcgcctgacggtctggcgctgattgccgacctcgaagggtgtcgcctgacaccttaccagtgcagcgcgggcgtgtggacgtcaggcatcggccacactgccggggtggtaccgaaacgcgatatcaccgagcgcgacgcggcggcaaatctggtcgccgacgtgttgagcaccgagcggcgtctcgcggtctgcgtgccggtcaccatgccgcagccggtttacgacgcgctggtcagcttctcttttaacgtcggcaccggcgcggcctgtcgctcgacgctggtctcttacatcaagcgtcatcagtggtggcaggcatgcgaccagcttacccgctgggtgtacgtcaatggcactaaaaacaaagggctggaaaaccgccgtgcgcgggaactggcgtattgcatgaaaggagtaacccaatga

SEQ ID NO: 143674 - DNA, 222 bp, Enterobacter cloacae
atgggactgagtatggaaaaaatcaccacgtttatcgcctactggctggccgtgggtctggcgtatttcggggcaatgtcgcccgaaaagctggctctgtatgtgggtagtctgtgcgccatttttacggcggcggtgaatttctggtaccggcgcaaaacctttcgttacctgaccgaaatgggaatcgacaaaggggtgacccgtgagctcaatcgttaa

SEQ ID NO: 143675 - DNA, 204 bp, Enterobacter cloacae
atgaaagtctacgcgatgcagggcgacaccctcgacgcgctttgcgcccggtattacgggcgcactgagaacgtggtcgagacggtgctgctggctaatcccggtctgtctgagctgggcgtcattctgccgcatggcacggcgattgacctacccgacgttgaaacctcacctacggcggagaccctgaatctatgggactga

SEQ ID NO: 143676 - DNA, 510 bp, Enterobacter cloacae
atgacgacagtaatactgaatcagcccgacgaaccgcaggacgtaccgggcgtggtgattcccgcaccggagacgggcgacgcagtgattaaaaacacgttctttttccctgatgtggatccgaagcgggtgcgcgagctgatgcgccttgagcagacggtttccgatgcgcgcctgcgcaacgccatcaagaccggcatggcggaaaccaatgcggagctttacgactaccggctgcgccagattgccgcagggtttaagacactggccgacgtacctgacgccgaggaaatcgacggcgagaatgtgcgcgttttccactacctcagcgccgtgacggcgatggcgaccgccaccctgtatgagcgttatcgaggggttgaggccaccggcaagggtgacaaaaaagccgacagcgttgaaaccaccattgatgacctgtggcgggatatgcgctggtcggtctcgcgcctgcaggataagccgcgctgcatcgtgggtcagctctga

SEQ ID NO: 143677 - DNA, 750 bp, Enterobacter cloacae
atgacgagccccgcacagcgtcacatgatgcgggtctcggcctctcaagccgtgcagcgggaaaaagccccgctgcgccacgcaaccgcctatgagcagatgctggtaaagctggccgatgaccgccgcacgttgaaaaccatccgttcaaacgaactgaaagccgcgaaaaagcgcgagctgctgccgttctatgcgccgtgggtcgccggtgtgctggctgatggccgtggcgcgcaggatgacatcctgatgaccgtcatgctgtggcgtctcgatgccggtgacgtcgctggcgcgctggagattgcgccttacgcgctgaaatacggcctcacatcagaccatcgtcgcactacgccttacatgctggttgaggaggtggcgcttgcctcgctgcgcctgcgcgatgccggtgagcctgtcgacctcgcattactgctgaccaccctcagcctgaccgacggcgctgacgtccccgatatggtgcgcgcccgtctgcataaggtgaccggtctgaccctgcgcgatgccggtaagagcgccgaagcgctggcgcagtttcagcgcgcgatgcagctcgaccgcaatgccggtgtgcgcaaagagattgagcgactggagcgggcattgaagcctaagcccgaggccgcgccccgtaaaacgactaaaccgcgcacgcgcaaacctgccaccaaaccggcggcaaagcgcgggcgtccaccaaaggcggtaaaaaccgccggttaa

SEQ ID NO: 143678 - DNA, 1068 bp, Enterobacter cloacae
atgcgtcaggaaacccgttttaagttcaatgcctatctgacccagctcgccaaactgaacggcatcagcgttgatgacgtcagcaaaaaattcaccgtcgagccgtccgtcacgcaaacgctgatgaacaccgtgcaggcgtcatccgcgtttctgcagacgattaacattctgccggtcgcagaaatgaagggcgagaaaatcggcgtcggtgtgaccggcaccatcgccagcacgaccgatacctcgggcgacaaagagcgccagaccgcagatttcaccgcgcttgagtccaacaagtacgagtgcaatcagattaactttgacttccacctgacctataaacgccttgacctgtgggcgcgttttcaggacttccagcgccgcatccgcgacgccattgtccagcgtcaggcactggatttcatcatggccgggttcaacggtaccacccgcgctgatacctcagaccgcagcaaaaacccgatgctgcaggatgtggccgtcggctggctgcagaagtaccgcaacgaagccccggcgcgcgtgatgagcaaaatcaccgctgaggacggtaccgttatttctgacgtgattcgcgttggcaaaaaaggcgactatgagaacctcgacgcgctggtgatggacggtaccaacaccctgattgacgagatttatcaggatgacccgaaactcgttgccatcgttggccgtaagctgctggccgacaaatatttcccgctggtcaacaaacagcaggaaaacaccgagtcgctagcggcggatatcatcatcagccagaagcgcatcggcaacctgccagccgttcgcgtgccgtacttcccggcgaatgcggtgttcgtgaccacgctggaaaacctctctatctacttcatggatgagagccaccgccgcagcattgatgagaatccgaagaaagaccgcgtggaaaactacgagtcgatgaacatcgactatgtggtcgaggcgtatgccgccgggtgtctgctggaaaacatcaccctgggcgatttcaccgcacctgcagcaccggaaagcggagagtaa

SEQ ID NO: 143679 - DNA, 855 bp, Enterobacter cloacae
atggcaaaaaaagtctcaaagttctttcgcatcggcgtcgagggtgatacctgcgacgggcgcattatcagcgccagcgatattcaggaaatggccgaaacctacgacccgcgcgtctacggttgccgtatcaaccttgaacacctgcgcggcctgctgcccgatggcgtattcaagcgttatggcgatgtggtcgaactgaaagccgagaagattgacgacgattctgcgcttaacggcaaatgggcgttgttcgctaaaatcaccccgaccgatgaccttatcgcgatgaataaagccgcgcagaaggtctacacctcaatggaaattcagccgaattttgccaataccggcaaatgctacctcgtcggccttgcggtcaccgatgacccggcgagcctcggcactgaatacctcgaattctgccgcaacgcgaagcacaacccgctacagcgctttaaggccaaccctgaaaacgtcttttccgctgccacgctggccgagctggaatttgaagatgttcccgatacggtgctcaacagcctggccgataaggtgaaggccattttcagccgtaagcaggtcagcgacgatgcgcgcctgaatgatgtgcatgaagcggtgaccgccgtcagcgaacatgtgcagaccaacctgacaaaacaggacgagcgcctttccgctatggaaaccgcgtttgccactttcaaacaggaactgaccggcaaggttgaagaaaccagccaggaattttcagccctgaaaaccaccctcgacaaaaccgaaagtttcagccagccgcgacgcacaaaagccagcggcggtggcggcgatgagctgctgaccgactgctga

SEQ ID NO: 143680 - DNA, 1770 bp, Enterobacter cloacae
atgaccatttccaccgatacaaccttgttgcatgacccgcgacggcaggcatcgctgctttactggcagggtttttccgtgccacagattgccgaaatgctgcaggtcaagcgcccgaccgtgcagagctggaagcagcgcgacggctgggacggcatcgcaccgatttcccgcgtcgaaagcagccttgaggcgcgcctgattcagctcatcgccaagccgcaaaagtcaggcggcgacttcaaagagattgacctgctcgggcggcagattgagcgactggcgcgcgttaaccgctacagtcagaccggcaacgaggtcgaccttaaccccaatgtcgccaaccgcaacaagggcgagcgtaagaagccgaaaaagaactttttcagcgacgaggctatcgagaaactggaggagctatttttcgaccagtctttcgagtaccagttgcagtggtaccgcgcagggctggcgcaccgtattcgcgatattctcaaatcccgccagattggcgcgacgttctatttctcccgcgaggcgctgctgcgcgcactcaagaccggccacaaccagatatttctgtcggccagtaaaactcaggcttacgtgttccgcgagtacatcatccagtttgcgcggctggtcgacgtcgacctgaccggcgacccgattgtcatcggcaacaacggcgcaaagctgatttttctcggtaccaattccaacaccgcgcaaagccataacggcgacctgtatgtcgatgaaatattctggatcccgaattttcagaagctgcgcaaagtcgcgtcgggcatggcctcgcagaagcacctgcgctcaacctacttttcgacaccttccacgctggcgcacggcgcttaccccttctggtctggcgagctgttcaacaaggggcggagccggattgccgaccgcatcgaaatcgacatcagtcacagcgcgctcgccggtggccagctctgcgatgatggccagtggcggcagattgtcactattgaggacgcccttgccggtggctgcaccctgttcgacctcgaccagctcaaacgcgaaaacagtgatgaggactttaagaacctgtttatgtgcgagtttgtcgacgataaagcgtcggtattcccgttcgaggagctgcagcgctgcatggtcgacgtgatggaagaatgggaggactttgccccgtttgccgaccatccgttcggctcgcgacctgtctggattggctacgacccgtcgcacaccggcgacagcgctgggtgcgtcgtgctcgcgccaccggtggtctcgggtggcaaattccgcatgctggagcgccaccagtggaaaggcatggactttgccgcgcaggcagagggcatccgcaaactgacagagaaatacaacgtcgaatacatcggcattgatgcaaccggcctcggtctcggcgtgttccagttggtgcgctcattctacccggcggcacgcggcatccgttacacgcctgaaatgaaaaccgcaatggtgctcaaggcaaaagacaccattcgccgtggctgtctggagtacgacgccggggcgaccgacgtcacgcagtcgtttatgtccatccgcaaaaccatgaccagcagcgggcgcagcgccacctacgaggccagtcgcaccgaggaagccagtcacgccgatatcgcatgggcgaccatgcacgccctgttaaacgaaccgctttccgccggtagcggcatgcagcctaaatcaattctggagttcaactaa

SEQ ID NO: 143681 - DNA, 1047 bp, Enterobacter cloacae
atgggtaagcaaaaatcccgtaaagccgctgcgcagaaggccagcaagccacaacaactgaccgccagcgcaccgccaaaaacgacagcgttcaccttcggcgagccggtgccggtactcgataagcgcgatattctggattacgtcgagtgcatcagtaacggcaaatggtacgagccgccggtcagcttctccgggctggcaaagagcctgcgctctgctgtacatcacagttcaccgatttacgttaaacgcaacgtactcgcgagcacctacattccgcacccgttgttatcccgtcaggatttcagccgctttgctctcgactatctggtttttggtaacgcctttcttgagcagcgccacagcgtcaccggccagctaatcaaactactggcctcacctgccaaatacacccggcgcggggtcgacgattcgattttctggtttgtggaaaacttcactctcccgcatgagttcgcgcctgatactgtgtttcacctgctggagcccgacattaatcaggaaatttacggcctgcccgaatatctcagcgcgcttaattccgcctggctgaatgaatccgcgacgctgttccgccgcaagtattatcagaatggcgcgcacgcgggttacatcatgtatgtgactgacccggcgcagagcgcgaccgacgtcgaatcgctgcgtgaggcgatgcgcaactcgaaagggctcggaaactttaagaacctgtttttctacgctcccggaggaaaagcggacggcattaaaatcgtgccactgagcgaggtcgcaacaaaggatgactttttcaacatcaagaaagccagtgccgctgacctgatggacgcacaccgcgtaccgttccagctcatgggcggcaaacccgagaatatcggctcactcggtgacgttgagaaagtggcaaaggtattcgtgcgtaacgagctgtcacccctgcaggacaggttcagggaagtaaacgactggctcggcatggaggtcatcaggttcaaagagtacaccctcgacaacccggaataa

SEQ ID NO: 143682 - DNA, 432 bp, Enterobacter cloacae
atgtccaaaaacctcgaattatttaaccagcagacggcggaagtttttgcggtgctatgggataacttcccggtgccacaggtcattacctacgaaaaatttaacgccgcgctagctgatgactactttgaccaacttaactcaccagaaatgaaagcactgaatcagttgcgtagtgtggttgagggtacattcacttttttaagtgaaaatggctacatccagtatgaaacagaccatcagacctattttcgggatgtgcgcctgaccgaaaaagcactcgccgtgcttaacaaaaagcccgaggcgctcggcggtaatgaaacgatgggcgataagataataagtgcggttaaagacgggacgcccggagttattgccggtgcggtgacgaacctgctttcgctcggtgtcaatctggtaaccagctaa

SEQ ID NO: 143683 - DNA, 282 bp, Enterobacter cloacae
atgagcattcgtatcgaaataggtgataaatgggttattaccagcgaccaatatcaattcattctgaatgaaaagaaacttgctaagtccgggaaaaaagctggtgaggaatggctcgatacaatcggctattacccgaagattaaccagctcatttccggcctattacaccatcatatccatagctcggatattgcatccattgaagctatggtggcagaaatcgagcgtgtaggccaactatgcattgtagcctttgagggggctgacgctaatgcatag

SEQ ID NO: 143684 - DNA, 345 bp, Enterobacter cloacae
atgacaatcaaaaatttgaccgaggaaagccgtttcactaaagagcagttaatagagcatatcactcgccagctcgaccagtttcatcgactgataaaggcgcagccattaggtgacaacacctacaaccagaaaaccattgcagcgatggaaatcgcactggtagcactaacgaatgaacaccaattaaacacggccaatttgattaacaaattttatgagcgttacccgctcgtaacgttcagtttcgacatcgaaagagccgaggcgttgggatatttcatggctggcgcggaaatacagtgttttgggaaattcatcgaatacgagggtggtgcggaatga

SEQ ID NO: 143685 - DNA, 372 bp, Enterobacter cloacae
atgtcagatgcaaaatcaatctcgacgcacgactcgcaaaactcacaaaatcaaactgtgctgttagaccccactcagtttgacgccatcgttacagcaatgctgccagccctgcagacaatgattcgctctgcaatgtccgacaccatgacagtaaaagactttgccgccactcgcggcgttagcgagcgtctggtctggcaatggcttgatgagggcatccttcttaaagctccgaccaaagacttttcgaacaaagaggaagccggtaaacgaagccgcaccctcgtaaacgtaaaagcttggcgtgacaaactgactcaacaagcgattgattgtcgctacatcgaccagcgcaccgctcttaactga

SEQ ID NO: 143686 - DNA, 843 bp, Enterobacter cloacae
atgaatgatgaagatttgaatacgcaagatgtgattgagcggataagttcggcgtatggtgtcagcacgcaaaaggctttggcggaagtgcttggcgtcccgtcaaacagcgtcagcacttgggttcaacgaaatagctttcccggtaaagctatcattcagtgctcattagatactggggccgatttaaactggctgctgactggtcaaattgccaatttgaatttgcaagattcttcgccactgaaaggcaaggcactttatgacgagattttagcgagtggtggaaaacctgttttaaggcgcatccttgatgcatatggttttacaatgcaaaaggagcttggggatttgttggatatatcctcaggcactattagtacctgggtcagacgagattttttccccggtgacgtggttgttacttgtgcgcttgataccggcgtatcgctggaatggttagcgaccggaaagggaaagatgcgagaaagtaaggaggctagtttttcggacatttcaacgataaaaaaatctcgccttgaatctggtgagcttaaggacgctggcgcatggcatccagacccttcgatgataccttctgattccgaggagttgatttttgtcgaaggtgttggtgcctcttggctggtcgaccgttctgcttcgaatttaagtaatggtcgctggttaattgatattgacggcgctcttgatgtttttgatgtaattcgtcttcccggaggaaaagtcaggttgtctaataagtctgctgagtttgaatgcaacatttcagacatcaagcctgccgggtctgtagttctcacattggaaaaacacgtttaa

SEQ ID NO: 143687 - DNA, 660 bp, Enterobacter cloacae
atgggcgtcgcaaagcaaagcccctgttataacgttgcctcgcgcaagcgtcgccggttcctcaatcggtggattaagtcgctggcgaccgaagccgggcgtatcaaaatcaaaaacgaacttcggcgccgcatccggcacaacaagtattgggtcaatgaagcgaacaagttcgggcttgaggctctttgcgagctgatgttggccatccttgacgatctggatttaagggactggcaaaccatacataaccttgaaacgctggccgaacgtgccggacttgcgacgcgcagtgatgcgggtcacaagtctatttcacgtgccagccggggatgtgatcgcctctcctggctcaatgccattatctcagaaaaagcccccttcaatccttatgatgcccgttgcgcctgcaagcacatcgaggttacagaggatttctttgccattctcggcgttccgctgaaacaggtctaccgggaacgcgccaggctacttaaggccgacccgaatgaaatcatatcctccggggatgtgcggttaatcgcaatcagggttgaaaactggacgcgcaaggccgcagccgggttagccaggatgaaagcgaggcgtgacgcagctcgccagcgcaaacaggaatactactccccaacctttgcctga

SEQ ID NO: 143688 - DNA, 456 bp, Enterobacter cloacae
atgtatgaatggtacgttttatactgcaacaatcaggatgttgaacgcatcacccgaagagtcgagggactggatgtcgaggtgttttgcccccgctatatcaaagtaacgccacgtaaggattgccgggcggtacgtcaggaagagaaggtgctgtttcctaattatcttttcctctgctttgacgtcaacataacgcatacatcgactatcacatcaattccgggcgcgcatggttttgtcagcttcggttcaacaccctgcaccgtccccaaatcagtgataacagcgattgaatgcgcccgtctgatggcgctcaatcctgatgaagatgctatcgagtgtcgaaatattgccccggatttgctggcaaaaattcaagaactctctctgataaggtctccgctccaacgccaggtagccttttcgaaactactccagaaccaataccactaa

SEQ ID NO: 143689 - DNA, 216 bp, Enterobacter cloacae; identical to SEQ ID NO: 91849

SEQ ID NO: 143690 - DNA, 219 bp, Enterobacter cloacae; identical to SEQ ID NO: 91850

SEQ ID NO: 143691 - DNA, 711 bp, Enterobacter cloacae
atgctttccaccactgcttttctggcggtggctatgcagtgtgccgccaccgttcacccttctacatccctcgatgtggcaagagtggagtccggttacaacccctatgccatcgctgagatcgtgcctaagcccgaacgaaaacccggcgataaaggctttattactcacatgccaaaaagtaaggaggatgcagtcagcatcaccaatcagattgaggcgaaaggtcgccgctactctgttggcctgatgcagataaccagcaccaattttaagcgttacggcgtcaccgctactgaccttttcaatccctgcatcaatctttccgtctacgaaaaaatcatcaccgactgctaccagcggggcggcaccctgaaaagggcgttgagctgctactactccggcaatttcagtaccggacaacagcaggaacccgctttttcaaagacgagctatgtacagcggattggctactccccggcggatacccgctatgccgttcccggcacccgcgatgatatcgcaaccccagcggccaccctgaaagctacgcctgtggatgcgccgacgcgcccgcgcgtggtgtggccgggggcgatcgttcgcggcgttccggctcaactccgccagaaaaaggcggccaccgtctattaccccgcgcaggttgtgcgcggaaatcgcgatgtaacaacgaaagaggaagaaaaatga

SEQ ID NO: 143692 - DNA, 306 bp, Enterobacter cloacae
atgaaacttttcagtaaggtaaaggaattaatcagccgtgcatctgcttatgttctggctccggccatgagcgtttttgctgccagtccggcgttcgctgatggttttagccgggcaaataccatcatggagaaggtatccagcgggctgcatggtctggctgctatcacgatcaccgtggccgtgatctggattggctataagaccctgtggaaaggtgaaagcctgtcgcagtgcggctacatcatcattggcggcattttaattggcggaggcagtgaaatcggcgctctgctgatgagctaa

SEQ ID NO: 143693 - DNA, 225 bp, Enterobacter cloacae
atgaaaaaaatcatattgtttacaatcatatcaagtatcgtttctctggctgggtgcaaagaagaagccaaaaccacaaagtggtatcgtgaccatccagatgaattaaaaattgtttatgacaaatgtcagaaaacagggagtgcatcagaaaattgtaaaaacgctaatgaagcccactggcaaatacagcaactaaatgctccagaaatagattttaattag

SEQ ID NO: 143694 - DNA, 1071 bp, Enterobacter cloacae
atggctggtattttttcgtcagtagagaaaaatttaattggtggaataaccaacgctaccagcggtctaatgatgtcttattcttctatgatgatgggactggcgacagcgtcagtcaccatctacatcatgtggcgaggatatcagacgctggctggtaagctctctacgcctatggaagacacgatgtgggacatcatgcggatggcaatcatcctgtcttttgtggctaacgtcagtggttatctcgatggagttatagacgcaatcaacggattaaaggagggattttccggcggagaaaacatatggcaaatgttagataatttatggaaaagtgcaagagtattaggaaaaactctacatgacatggataattctacttatgttaaagatgagggttggacagctcaattctatgtctggcttggcatgtttattttaatgcttattacagctttcgtttcgatgatagctgaagtaatgattctattgctgagtattacagcccctattttcatattttgcctgatgtatggttttttgcgcccgatgttcaacaactggctacaaaatatttttgcagcgatattaacaatactattttcagctttatctcttcgtattgttatcaattttttaacgtcgagaatggcagaagccaccgcacaagcgggtaaagcaaatatcgtagaattaggagcacaagtctgtcttgctggtttctgcgccgcaatactggtgtatatctccgctaaagtagccgcagcactggccggggcaagtgctaccgtatccatgcaggggctggccgctgtaggtatcggtgctgccgcttttggtgccgggaagctgggcgggggagcagttaaagaaaccaaacgttccgcccaggacaacattcagggctggaaggatgcgaatgcaggtaagcccggcaagcccggaggtgagttaggctataacgcttctaaagcgcgtaaatacgcgattgagcagatgatagcccggaacgaagcgcggaggctggcacagtcgagagattccgcggttaagaagttcaacagctag

SEQ ID NO: 143695 - DNA, 306 bp, Enterobacter cloacae
atgaaaaaaaccgttatcgcggcggctgtattatgcctgaccgcaggaacgccgatttattcctttgccgctgacccgtgcgaagttgttctttgcatgtacggaaaagctacaggtaatagtggtgggagtgaatgcagttcagcagaacgcgcattttttaaaataaacgcatttaaaaaacaccatcgttttaatccgggtaaaacattcgatatgcgaaaagaatttttaggggagtgcaaagccgcagaccctgaatcaataagcaaaatcctttcaaaatttggcagagtgaaaagataa

SEQ ID NO: 143696 - DNA, 306 bp, Enterobacter cloacae
atgataaacgaagatttattcattaagaatatacactcaaaaaatcaggacagaatatctgtagccctggtatatgacacgttatcaaaagaagcccaccgaggttgtgggctgtattacgaaatatatgaaagttgttttatcggtcttttgcgcgatcatctttcagaacttaatgaagctgacgcaaataaattaagacgctatgccgagagtaaaggtacgaaaattgatgatgcgtcctacagtgaagcactggaagctgaaagggagtgcagggctgaaatataccgcgagcaaatgtaa

SEQ ID NO: 143697 - DNA, 756 bp, Enterobacter cloacae
atgcttattcataacgttgcagaaaggaaagaagccgcaaacagaaaaatgcttgcattgctgacattccttaaagaagaaacatactccgattttaaaacgctgaaaaaagttgttgggttcaagggtaaaagtcaccgcccaacgtatgcgctactgaataaagcggttgcattggggtttctgataaaacatgaatacccggtaatagccggaaaaaaatcactatgggggatcaccatgcaagggctggcgatggtggttaagcctgatgataaagtattccccggttattttgagccggggaaactcaaatactggacgctggaacaccggctcctgaatcatcgggtcagaattgcactggaagagaaaggcgggcaaggctggcttaatggtgatcggggggagtttattgcgcgttatcctggcgttcgccatcgtcctgacgggattatcacgttagatagcggcgcaatcgtcgccgtcgaaactgagcgctcaatgaaaacccgcgcacgctatatcaacatcattaacagccatctggcggccagcgatgccggacgctggcactacgcgatgtatgtcatgccggatgacaaaaccaaaacatcgttaatccggctgtttgactccatcaaaacggtaatgaggaacaacgttccggtgccgttcgacgcgaaaaaccgcgaaatgtttcttttccgcaccattgatgaactggagcaagcagccgccagcggcggccagtga

SEQ ID NO: 143698 - DNA, 474 bp, Enterobacter cloacae
atgaaatgccgatctcgtttgcttgtgtttctgcccctgcttttccccgccctttgcctggctgatttttctggccgtgttgttcgagtcgtcgatggtgatactgtccaggtactcgccgatggcaaaatgatgaaagttcgccttaacggtatcgatgccccggaatcggggcaaccgttcggccagcgctcgaagcagaacctgttaaagctggccgtccagaaacaaactgaggtcatagccaacaatacagatcgctatggtcgctggcttggaacattgatgattgacggtatcaatatcaacgcagagcaggttaaagcgggtatggcgtgggcttaccgctatcatggccgtgccagtgacgaaacaatgctacgccttgaagaagaagccagacgccatagaatcgggctgtggtcgtcacctgatccagtggagccgtggaagtggcgcaaacagaataaatag

SEQ ID NO: 143699 - DNA, 342 bp, Enterobacter cloacae; identical to SEQ ID NO: 86488

SEQ ID NO: 143700 - DNA, 234 bp, Enterobacter cloacae
atggcgaacgtcccagcaaaaccgcgcaataccaaaggtgagccgccaagtcaggcggatacggaacacggctttaatcctacccggaaaagtgctgatggccgtaaggcacagcttaacttatacattgatatggagctgaaacgtgagttccgctccattgctgcggccaacgatatgaaacatggggagctgttcgaggcgtaccaggaattctggaaaaaacatcattaa

SEQ ID NO: 143701 - DNA, 648 bp, Enterobacter cloacae
atgaccgctgttatcgcgctggctaacgggaaaggtggggtgaaaaagtcctcgatgtcacgggctatcgccaccgagtatacaaaggcaggatggggggttcttgggctggatatggatattgatcaggggtctttcctggactgggggcaacgtaggttgcggaatggttttgaacctccggtgacaattcagggatgcgggacggtttcacaggcgaagaaacagattgaatccgggcaatgggatttgattgtcatcgacagtgcggcgtatgccactaaatcgttactcagcctgattgatattgtcgatttgctggtactgccgacagggtttagcgtggacgatctacgaacgaccgttacgaccgtaaacgcgctgcgtaacaaaggacattcgacagataaaatggcggtggtgtttgcgggggtaagtgaaagtgagagtgaatatcgtgcggcgctggaatacctgcaaccctgcggcgttcccgtcattccgggcgctattccttttctgacatcgttcagccaggcgcaggataaagggcttgctcttacggagtcgcctttccctggcccacggcagaaagctgatgatgttgtgcagggtgtgatcgaccgactgacaacgcttacgcagtag

SEQ ID NO: 143702 - DNA, 681 bp, Enterobacter cloacae
atgtcagtcaggaaagaatttttaaaaaatagcctttttaatcaggttgatgatagcgtttcagcccctatatcgatccgtcttccaacagttttaaacaatgagttagacgaactatctttaagtcttgatcgctccaagagttcacttatcagcgagtttataaaagccggaatagctgctgcaaatgagctgctaaaagagcactcgctgattagcgatgaaatgaaagagcagtttgtagatcagcgtgaggacaacgctgcgagtttcatggatagaaaaaccttcatgctaaacacgaactacaacaacgatgaagaaacacatttcgatatgctgaaaaaccaagaggccgcagccttttgcaaaggctggaaggagtacatcagccagctttctaaaggcgatacggtttatctgtatcagagcggtgttggcatcattgcttctggggttgtggatggtgagctggtgaaaagcgaacattatggcgttgctgatgataagtatgccaagtcacttaaagactttaagactggctttaaagctatctctgctcgtcgttttaaagagttaaccggggggggagctaatttccgtagaactatggttgagcttaattcgatgcagtcttatgcaatagctcaagagatcgagagacttacttctgcaccctaa

SEQ ID NO: 143703 - DNA, 624 bp, Enterobacter cloacae; identical to SEQ ID NO: 86487

SEQ ID NO: 143704 - DNA, 150 bp, Enterobacter cloacae
atgctaaacttgcttattaaactgtttagtttttttatgagtttgtgggacgggctcagcgatcaacaaaaagaaaagataatagatgtgattgtcgagagctttacctcactcttcagagaatatttccaacaacgtaaggatgcataa

SEQ ID NO: 143705 - DNA, 321 bp, Enterobacter cloacae
atggttaagttaaaagatgtagtagcgaaagcaggcagtacaggaactggaattgcttcacttacaagcactatctctaaatccaccgcacttgtcaccaaaatcgccacagggataacgctcagcggtgcgttcaacaataggagcaacaaggatattgttaagttttctgagcaagccgaaaagatcgttactcaagattctttccttgatgaacttgattctaaaattgggcctactcgccaaaacgaaactgaggatgaatttgtagctcgtgcaaaaaaagaaatgcgtgagctattaaggtcaaagcttaagtga

SEQ ID NO: 143706 - DNA, 462 bp, Enterobacter cloacae
atgaaccgattaacagccatcatttgcgctgtcgttatctgcctgctgggttccattgcctgggcggttaaccactaccgtggcaacgccatcatctacaaagaccagcgcgataaagccacggagaagctcatcctggcgaacgcaaccatcaaagacatgcagacccgccagcgtgacgcagcggcactggatgctaaatacacaaaggaattagccgatgcgaaatctcagcttgatgatctgcagcgttgcgttagcactggtaagtgtgggctgcacgtcaacgccagatgtcccgcgaacggaacggccggcaccagcggcatgggcgatgcttccggcccccgacttactgactccgctgaacgggattatttcaccctcagagaaagaatcgtcacagtgacgaagcagatcggttatcttcaagaatatataaaaaatcagtgtcttaagtaa

SEQ ID NO: 143707 - DNA, 834 bp, Enterobacter cloacae
atgcaaaatcagaactgtgtaaaacatccagcaattcgctaccacggcggtaagttccgtctggcttcatggattatcccacagatgcctcagcacgtttgctacgtagaacctttcggcggcgcagccggcgtgctgctgcaaaaacctcgaagctatgcagaagtctataacgatctggatggcgaggtagtcaacctgtttcgcgtgctgcgcgacgtcgagctgaaccaacgtctgcaggaagcgtgcatgctaacaccttattctcgggacgaattttgcgcagcccgtgatgcaacagacgagccgattgaacgggccaggcgcatgattgtacgcgccagtatgggcttcggttcagcagccggaatcggtggtaattccggcttccgtagtgacagcaaaaggaaatatgcgacggctgcacatctttgggtccgttatccagaaaatttggcagcagtaggtcagcgcctgcagggggtcattatcgagaataaagatgctctggaagttatgcatgctcatgacgctgaaaccacactgcactacatcgatccaccttatgtacttgaaacccgtgtacaaggtaaccgctattacagacatgaaatgactgctgaggagcacgtgcagttgctctcagcggcaagagcgatgattggaatggtgatgatcagtggctacgacactgatctatataacgacatgttaaacggttgggcaaagcttacaaaaggagcacgcatcagcgctgggcgtggcacaaaagttcgtactgaatgcttatggattaatccacaggcgcaacaagcggagcgtgcagtatga

SEQ ID NO: 143708 - DNA, 1740 bp, Enterobacter cloacae
atgaatcaaaatctacgtaacttaatggaacaactagataattctcaaaataagattagtgagcattcaatttattccagagttaaagaagcttctggtgaagaagaaagcctggattccgtcgcggaaagaatcgcctttggattcattgaagattataacgatagcgcaagtggttgggggacatattttggaccaatgatggtttggactgatgatgagacgacatatgaaagcccaagcataaagttggtcactcaagagattcttgactattggacagccagggcaacagaatccaaccatccgattttaaaatctcgatattatggccttgtatgggatttcactaaaaaagtaaccaatcaaaagcccgatcactcaatcgcgactgaatatgtcaattcactaattgatgtaactaataaagacttatgcgaacactcaacagaaagcattaaaaaaatcacaagagcatacaaggttgcatgcagcatcaataacaatgatttaatacatgcctgcatcgaaagcgccatcaatcttgaagatcggatagcagaagatgacaaagccgggctttggggtttttgctttgatttattcataacaaataaaagcaaaagcctatcacaggctcaagagaataaattaattaatgacctcgaattacgattaactagagtctcgagaaataaatccccatggggaacagaatcagcaggaattcctttagctaagtattatagaactaaggggatggaggaagatacacgaagagtaattgaagttgtagggaaaagttttgaggactcatgcgagggattagcaccaattcagaaatcctcaatacttcaacacacatatgatatatatttaagttataatatgaaggttgatgcagagcgagtagctaaaaaaataacggaggtagggcctgacgttgtagatagcatgcaggagttttcccattcgactagcatccctaaagaaaaacttgaggcatacttagattcaataacgagtggaggattagacgctgcccttaacaaaatagcttatcatttcataccacgcaaagagcaattagaacagcaggttcttgagctagcaaaaaaacacccattctcttactttttctcgaaaaccttacaagatcataaaggaagacccgttgccaccattggaaatattgaaaatgacttagaagggaacatcatccatcaattatcacaaaacatgtcaattcattcatttttcttaaaccactcattcaaccggttaactgagacttataatctagacgctaactcgcttaccaattttatatttgaatcacctatctttgaagaatcaaaaagagaattaattcatgcgggattactttcttatcttgataaaaaatacatttcagccattcatattttaacacctcaaactgaagctgccatacgcaacttagtggaattaacgggaggcgcaacactgaaaaagaacagacaacaaggattacaattaaggactcttgatgacctgctgcgagataaaattgttgaagtatgcatgggtaccgacacaactttttacttcagagcattactaaccgaccaacgaggctggaacatacgaaatgatgtatgccatggaataagcccatcaagtaggtttaatcactcaactgcggatagaataattcacactttactttgtctgtcgcaggttagagagaacgaaaaatag

SEQ ID NO: 143709 - DNA, 297 bp, Enterobacter cloacae
atgcttgagctggccgcgaagcggactcagtgcgttgaccttacgattccgcccctggtgcggcagctggcgctgatggactggtacatagcctatgaactgcaggtcacgctgagacctgatacgtcgctagccgtcgcgcgaaatgagctcttcactcacattcaggatgtgttcaacgaattcaatgtccagatcatgtcgccaaactttgtcatgcagcctgaagaaagcgtaatggtggcgaaagaaaactggtatgccgcccccgcagcctcgccgaagcgggatgaataa

SEQ ID NO: 143710 - DNA, 918 bp, Enterobacter cloacae
atggaagcgcagcgcatctcgcttcgcgaccaatatgatacgcagtggcttgcgctttccgctgcgaagaccacggccggtttcctggcatggttgatgctgagttatgttgcgttgcgttcctggaaatgggtgagaggatattatcgccgcagggtagccgagaaacgaagctggatacctcaaaactggcggcgatttacaggcgtcattgaagcccgtctttatggcttgctgatgtgttttgtggtgattttagctttttatggttggcttagctgggcctttagcctgttcccctggacgcgcgtctgggcaacatcattaggtgactggtcgtggcatgtcatacgacagattgccttagcgatggcgtccgcattaccaggattgtcgattgttcttatcattttcttcattaccgcattaatccttaaacttctaaaagtgatcctcaatcaggttgaggccgggcgtctacagttaccgggccttcatccggaaaccgtcggcgcgacgcgaaaacttatttccgtgatggtgtggttgttcgcgctctctgcggcctatccctttttaccgggtgcaaactcgctggcctttaaaggcataagcgtattttttggtctgatgctgaccctgggatcggcaggcgtgatgaatcatgccatgagtggtctggtgctgatttactcgcgcgcgctgcgcaaaggcgatgtgatacgaatcgcggataacgaaggtaaggtgagtgaaattggtatgctcgccaccaaaattattacgcgagaaaactatatcgttaccgtacccaatgccgtcgtggtgagtggcaagataacgaacctcagcgcgcaaaataacgatggcagcatcaacctaaccgtaagcgtcaccatcgggtacgacacaccctga

SEQ ID NO: 143711 - DNA, 981 bp, Enterobacter cloacae
atgactatgacaaaagacgctttacagtttggcattgagcctgttcgtatcaccgacaccgacaacctccagattaacgaaggcttgccgactaatgctgacccgcaggtctatgcccttgagctggctaagctggtgaaaacgatgctgaatggtgtgcttaaagacgctcaggagaacatccctttccctgttgagctgctgccgacccgtaacagcttaccgaccccaatcattgctcacactctggctgaccgctccgtggtcgttccggtacgtggcggtaagactcccgctgtagtcaccgctgccgctggtagcgagattaccgttgaaccaatcgaaaaggctattctcgtcagccatcaggcgaagctgtgggattccaagtcctctacgggtttcactgttggtacacttcagcaagacgccctgaacatctgcgagaatgtggtccgtacaatcaacgctaaaatggtcgatgtattactaacctctaagctgctgaagacggtagattacccgaagctgaccgggagtctcctaccacgagcagaggctatcgtagacgcgctgtttgagagtaccgagtccgcttatggctctgaggtgtccagctatggcattcttgctcatgagtcccatatgtccgctctctcccgtctggctatgaagaacggctttggtggtgaggatgcagtaaaggacatgctggggaccgacatcgcctactacaatggggctgaccttggcctattcatgctggctaaacactttacctgtctgtcctttggctgtctgcgtcatgatggtgaacatatcaccgtgattctttcgcgtgatggcaactcccagtcccacgaccttgagattctcggtaaggtcttcgtggtcgctgaggcttctacgactgtgaagatgaagacgggtagtgctgctgcggtgttaccagtggtcaagtgcctgagctttagcaagtaa

SEQ ID NO: 143712 - DNA, 492 bp, Enterobacter cloacae
atgttattcgaccaaaacgactggaagctccaagtcaccgacatcgacctttacgcaaatacttgcaagctggacggtcagtcttacccgttagcactagccatcaagaccctgattccgggttacctgtctgggctgtctcctaccagttctgcgtctatggagctgctggaggccctcgctgaagcaggtgtgacgattagcaacttcttcagtaacgccctcattacatcctaccagcgtcgtcaggttaacaagcagcgggaagcagagcgcattgagcgtgagcagcgtgtccttgctgagcgtatggcagagatgcacatgaccgaagaggagcgcattaaggctaaccagaagcgtgaccagcagaaagctgaacgtcaggcctatggtgactctatccgcagtgccgtgtcttctgctggtcgctcacgagcgtcgaagctggtggagattgacggcatggacaactggatggatagcctctaa

SEQ ID NO: 143713 - DNA, 714 bp, Enterobacter cloacae
atgtctcaacaagtagtcatctttaacaatgaattctctatgtcttcctatgagttcctgacgactgttatcaatcctgctcgttcagaagctggcgaggctccggtccgtaatgaccaattcttagcccgtgtccgcgatgagctggacgattgcaaaacttttgcgaccgctctgattacacctacaggtggtggtcgtcagatggaatcaatcacgctgaccggagaccaattgttactggtcggtatgcgcgagtctaaagctgtgcgtcgcaaagtccttgactacatccgacgaattgagaaggacaagcaattactggaagaccagaagacgcgagcagccactcagtccgctaaccgtcgaggcgtgacttggggcgactactgcaaaacctatggtctacccgctcagaagttaatggccgcacttctccagcaccgtggcctctttcgtaagaacccaattagtaacgagtggtctgtaaatccaaagtattccgactgcttccgtatcattaagccgtcagaccagaagttctcagcaggtggttataacttccggtttaatgctaaggggcttgaggtcttcggtaagcctgcgatagtcgataaactgcgaggcatccttattgccttcaccgggaccgaccagcagaagcaagagcacctcctgaagcaggcccaatccggcaagctggaggaactctaa

SEQ ID NO: 143714 - DNA, 129 bp, Enterobacter cloacae
atgagtttatcttgttatggattgtgttatcacaattccaataaagagaactttaagtccagcctccagtcctgtcagcccgaagtaaactatggtcgctatgatgtggtctccatgcttcgggtctaa

SEQ ID NO: 143715 - DNA, 1599 bp, Enterobacter cloacae
atgctcaactcaagaacctacctttatcagcgtaacggtgtcttttatatccgtcttaggatgaagaccactggtcgcctgaccgcttcgcttccttctcacaaccgttataaactagcgtcagtatcactacggactaaggatagacgcaccgctatggctcactcacggcacatcaagtcagcacttagagcaatacacgcagacaaccctaacgcctcttatgaggagctacgggagcacctgaagactattgtcgagtgggaacttagtgtcagccgtgatgacctgaacgaccctgagtcctaccagctctacgttgaccagtacgatgacatcaagtccaaccttcgggaagctgtagcgactgagcatctgactgtagaccagcatcgctatatcaatgacgttatcggtgtgcttaaagcgtgtcaggatagactcaaaggcgatacctctggcctgttgtcttaccttgagcctgagactggcagtctaagaccgtccgtctccctatctgtattggcagagcctgaagtccccgagcctaaagcactgaccctcgcgtctctcattgagcagtacgagcaggagaacgcccagaactggaagccagcgaccctaagcgagaaccgagcgtcgcactccacgctaatcgagatattcgactatctggatattcagggtgtcggcaatgcgacccgttcagatatgctcagggtccgtgaagtcctccagcagataccgaagaaccgcaagcaacgctttaagtctatgccgctgtctgacctgctgaaccgggagtctaagactgactgtttggatgtcgttaccatcaacaataaatatcttatcaagatggctgctgtgtttaagtgggcggtacgcaacgacttgatagctaagaacctgaccgaaggtcttgagctgaaagtcccgcagcgtaaagcctccgacgctcgtgatgcgttcagtcctgagcaggtagggcaactactggtcgccgctaaagcgtactctcagaagaccgcaggtaagccataccattattacgtcaccgctctggctgcaatcactggagcaagacttaacgaggtggcacaacttcaggtcaaagacgtcaggaccactgaggctgggaccgtgtttatccatatcaacgaagacgatagcagcctgccgggtaagagtatcaagaacgcccacagtgaccgctgtgtcccgctggtcgatggcgcttatggttttgtattggctgactttatgtcgcttgtggaagaccgtagaaaggctaagggtgataatgctatggtattcgatggcctcaagctgatgaagaacggctacggtgagcaggttagtaaatggtttaaccggacgttgatacctaaagtccttgctgaccgtagcggcttagcgtttcattcgtttaggcatacagttgcgacccagttaaaacaacatggggtcgagttagcgtatgctcaggcgattatgggtcatagctcagggtctataacttacgaccgttacgcgaaagaggtcgaggtggaaacgctgaaagaaaaattagcagagtcattgtcagtaaaaaaatag

SEQ ID NO: 143716 - DNA, 186 bp, Enterobacter cloacae
gtgacaccacaggagatagcagcactgacagccgccaagctggagcatgaaggccaccagcttaccccggtagaggttcgggagatggagcgcgtgattcaggccgatacagtccggcgcgacaggttccgcgaaatgatgcgagcacctgcctaccagtggaagaagccagcgccgcgcaggtag

SEQ ID NO: 143717 - DNA, 312 bp, Enterobacter cloacae
atggtaaacgacaggaaagccgaggaactggaagcaaaggggctgtatcgcagggcagctacacgctggcaggaagtcatgatgatttgtgctgaggacgatgatagggaatgggtaaagcagcgccgtgatatgtgtatggataacgtgaagcgaccgcccgtgaaggttgaggactttggcgacctgcataaagctgtcaccgaaacgcaacaccgcatggggatagcgcaaccaaacggcaatgccttccgattaaatggtggtaagaagcaacgacaggccaccagcgggggcgacagttcgcagtaa

SEQ ID NO: 143718 - DNA, 588 bp, Enterobacter cloacae
atgactatcgaaaaaagccgattcaattcggaggccgccccacaatccaacgcctgccagaaggatattcttgccgttactgaaagcgatatttccgttatccggtttgagggtaagaaagtccgcattgtgaattgtgacggtaatccgtggtttattgccaaagacgtttgcgaggcgctggagctatctaatcacagcatggcaattgccgcgcttgatgacgatgaaaagggggtaagtttaacttatacccccggaggtaatcagaacatgcggacagtttcagagtctggcttctacaaactgatcgcccgcagccgcaaggccaccactgccggaacgttcgcacatcgtttcactaactgggtattccgcgaggttatcccgtctattcgtaaaactggctcctatggtgtgccgttcgccttcctgaacgaccacagcaaacgcaaagcagcttacgacaagaaggccagcaagcgcggtaaagacctgcaagcctgcaaaggtgagaagtcccgcctgatcgccgaagaagctgagttatggcgcaaatatcagcctcaattgccggaggttcactaa

SEQ ID NO: 143719 - DNA, 459 bp, Enterobacter cloacae
atggctggatggggacaaccggtaaaagatcattggtctgcaccacattttgactcttacggctttaggcgctctgagttaaaacaatttgcagataagcttggattagatctctcaattcctcttgaggacgttaagccgacacaactgagcgatgttgagagtaagccacttagtgaagcagacgttgaaatcctgaaaatggaaattgacacacttaaaaaacaagttagaaaattagaaagtgaacgacctattttaatcaataagttccgggtagatgaccccctctaccttgcgattaaaattcgtaatcaagaatggaaaaactatgaccccgataacgacaggcaaaccagaggaaaccaaacggcaatcgtgaaagaattggaggataagggtttctctaatgtccaagcgaaatcaattgaaatggtagcttgccctattaagcgttga

SEQ ID NO: 143720 - DNA, 318 bp, Enterobacter cloacae
atgcttgatattgctgaggttctcaaggctcgtaagagtgagttcattagtttaagggaattgataacgaggatcaggttacagcagccacatgtcagtgaaagtgatatagctaactttctctacattgaaaatgctaacagaaatctacctgaatgggttaaacagggcatcgcatctactatagagcctactgatggtgggtacgaagatactcagcttgaaacgcttctcaaggtaattcatgaagagaaattcatgccggaagtcacaccaccacccgaaccaccaatggatttcgacgacattcctttctaa

SEQ ID NO: 143721 - DNA, 1215 bp, Enterobacter cloacae
atgcccctcacagaccttgaaatcaggcgctctaagccgcgtgagaagtcctatacactcaacgatggcaatggcctctctctgctcatcgagccgaacggatcgagagggtggcgtttccgttaccgtttcgacggtaagcctaaaatgatttcgctgggcacttatcccgatgtaaccctgaatgatgccaggctcaaacgcgatgatgcccgtaagcaggttgctggtggcattaatcccagcgatgtccgcaaagaagataagctggcgaagcagggacgcaacgaaaacactttcgaggctatcgcccgtgagtggtacgccaagcgtattgaccgctggtctgagtcctatggcgaagagatgatgaaaaccttcgaagccgacgttttcccgattatcgggcgaagaccgatcgccgatatcaaaccgatggagctcatggccgttctgtctaagttggatgagcggggcgcaaccgagaaactcaggaaggtgagacagcgttgcggtgaggtgtggcggtacgcaattgttactggccgggctgattacaaccctgcgccggatctggccagtgcctttgcgcctcataagaaagagcattacgcttttctcgccaccgatgaactccccgagttcttccgcacgctgaatacgtatagtggcagttccgttgtgaagctggcgatgcgcctgcaggttcttaccggattacgtccgggcgaactgcgccagggcgagtgggctgaaattgattttgaaaagcgcttatgggaagtaccgccttccagaatgaaaaagcgtcgtcctcactgcgtcccgttatccgatcaggctattgccattctggaacagctaaagccaatcaccgggcactatcagtttattttccctggaaggattcatcacagtaagccgatgagcgaaatggctatgaacgtcctgattcgtcgtattgggtatgccgggcgtgtaaccggccacggtttccgccacaccatgagtaccattctccacgaacagggctataacaccgcatggattgaaactcagctcgcccacgtcgataaaaactctattcgaggcacatacaaccacgctcaatatctcgatggccgccgggaaatgcttcaatggtatgccgactatatggatgcgctggaacaccgtgaaaacgtggttcacgggcgttttggtaaatcctcatga

SEQ ID NO: 143722 - DNA, 378 bp, Enterobacter cloacae
atgcaatttggaacatttcaaactatgaacgggaataacgcattctcccgttataaagtagtggcgcatgcaagtaatgccctgctacaggataaactggtcaaactaacagacggtattgcatccgatctgattgtaggcgacctcgtgacagcaacaggggcaaaagccgccgcagcagccgatattgcatttgtcatggtagagccagcatttgcaggtgatacggctatcgtagtagcaaaccctgtacacgttattatttcgaaactcgggattgagtttaatagtatgaatgaaactgctgttatcgaaaaactcgaggatctgggattcactttcactgactactctaccgtagccctacgcacaacctaa

SEQ ID NO: 143723 - DNA, 1179 bp, Enterobacter cloacae
atgactcttaaatgggaaaaggttcgtttaggagatgtcgcagaattacaacgtggttttgatctacccagtactaagcgtattgaaggggagattcctattgtttcatcaagtggaataacaggcttccatgttgaagcgaaggcaaaggctccaggagttgtcactgggcgatatggttcgattggtgatgttttttatttagaacaggatttttggccattaaatacatccttatgggttaaagattttcatggaaatgacgaaaaatttatctactttctgttgagtaactttgactttaaaaaatttagtgacaaaacaggtgtgcccggtgttaaccgtaatgatttgcatgcagtgaatgtattactgccgcctttcctcgaacaaaagaaaatcgcccaaatcctgtcaacctgggataaggcgatttcggtgacggaaaagctgctcgccaacagtcagcagcagaaaaaagtcctgatgcagcaattacttaccgggaagaaacgcttgcaagatgataatggggtgaggttcagtgggaagtggaattcatgccttgtaaacgattattttgatgttggctcaagtaagcgtgtactacaagaaaattggcaaacagaaggagttccattctataggaccagagagttagtctcactaagtagaaatgaaccgttccgaagtgaaatatttatatcagacgagttattttttgaaatttctcagaaatatcaaactcctaaggtaggggattttttagtcagtggtgttggtactttaggtatacattatcaagttaagagtggcgataaattctactttaaagatggaaatgtgctttggtttaaactcaaagatggtatcgattcagactattttaagtattgtttccagtctgattttatacaagaccaaattaaagcccaagcatctataaccactgtcgggacttataccattcagaatgcaaagaagaccaagtttttatgtccaccaacgtttgaagaacagcaaaaaatcgccacagtcatgtccgttgctgatgccgagatctccacgctggagaaaaaactcgcctgcttgaaagacgagaaaaaagccctgatgcaacaattactgaccggaaaacgtcgtgtcaaagtagaagctgcagaagccgtgagcgcttaa

SEQ ID NO: 143724 - DNA, 345 bp, Enterobacter cloacae
atgagtaagtttattatttccatgctgaatacgttactgtgcgtttttgtgattgcactgtgcctcattttcgtgggtgtcactgataactggaaagaatgtactctagatatagtcattattttaggaggcacgcaccttacttgtgttttactgaatcgtgtattgcctcataagttatctatcttagaaggaatactggaagtattgggaggaccactattagttataggcacaattgtgtgctttgatgtattcgaaccctggccgctaaaaatcattgggatgtttgtgtgggttgttttgattttctttgtaccttcaataataagtcccaggcgttaa

SEQ ID NO: 143725 - DNA, 297 bp, Enterobacter cloacae
atgagcgatttcactgaactgccggtcactggctttgttaagaccaaaacagcggtctacacgcgtaaacagaacccctcggtattctcgcccgtggcgcgtgaactccctgcgggaagccagctgacggtgcaggctgcggtgatgggggatgctgtggaaggcaacgcgcactggtatcgcattgatgaggatacatacatctgggcgggggcatgcacacggctcgatccttacccggcgtttccgccaggcacgcgaacgaactggatggcggtggtgttcgaggtacgctag

SEQ ID NO: 143726 - DNA, 1092 bp, Enterobacter cloacae
atgacctgcttattcgcaccttccttaggtaatattcttggcagtatgatcgtcagcatgatacttatggctatcgccgcagctattcctgtcattggctggatattgttacttctgtggatcttctacaatattgcgaaagcctttgagacgataaaaacattacttcccgatgcgctctttagcgctgttctttatggatgtttgctctttcccgttatccaggaaatggcaatggacggggagagcaacatggctgccactatcgcttgtggtgtcgtgtacgtgataactgcagggctttattgttccaggttaacgcagctggcaaccaacactaagcaaagtattttctatttttcaattatgtggctttcggtcccacttatcgcacttctgatcgtctcgattgtggcatccttgcgcgcggcattcagaaccgtgctgaccccggtgcagaccgtggtcaaaaccccgcaaaacgtatcagcgcatatgcgaggcgggagccatgtcaacgcttacacccgaactgtgaccaccattcaacatagcgtgacctcccagacgcttccggggatgggagctgttggtgcctctatggttggttccgtatcggaggcaacgataacaacaccacaacagccacagcaaaccttgccagcgctggaacacaaaccagccgggggtgaattaacacagtatgcgacgaacaaagaccacaacttttaccgctacgacaatctcaacgcgaaaaaaataagcaatttcgtccaggcggccagtcatcgtcaattgctgcctcctctcacggaagatgcgatcctgttctactacgacgaaacggttttcggccaaggggatcatggtgtggtattaaccgatgacggtgtttattgcgtgttgggaaaattgtatgaaactttctacgcccgcttcaacgaagtcagtagcgtagtcataaaaggatcctttaataaaaaaattgtcctgcatatgaagaatggccagaaacataatattgaactgactcaatcaaatgccggggcaaaaaaaatctacgaacttatcagcatcgcagcccagaattaa

SEQ ID NO: 143727 - DNA, 195 bp, Enterobacter cloacae
atgaatccccacccgctcggtcagggcgggaatactcctgccacaggccatgacgacgcgctctgcatcccgtttctcccgaaaggacaggacgacagcttacacgccaacttctcgttcaaagctgatttttttctgctgatgtgcgctttgcactgtgtgttgaatagcttaatgagatcgtccggcgtttag

SEQ ID NO: 143728 - DNA, 492 bp, Enterobacter cloacae
atggttaaagagtttaaagtccgtaaagaaaataagccgtcatatgaatgtatgattactgctgaaacctgtttggggttagcaggtctggcgaccgaggagtgggagcgtgagcaccattatcgtacaggtatcatattcactgcctttgctattgaggctatgttcatcttctatagaaaacaggttgaccccggttacgataagacgaaaccagagtgcagaaagacaatgcacaagaaaacgttaaaattgtgcggctttactaattatatggggacaaaaccttatcaaattatcaaagagtgtcttgaggtaagagatgcaattgctcacggcgattcgtacacttccagctttaatttctcagcggatcatttggataaccaagatgatattgtaagaagtgtcttggcggtaaactctgaacagtttcggggattaactgttgagtgccttgcaaaatacattgagatggcaaagcatatttga

SEQ ID NO: 143729 - DNA, 456 bp, Enterobacter cloacae
atgaaacaattattctctcgccttccggaggaattcctccatactcacctcggtaaattcagatttggatcctttgacgacatcccaaaagacgatgaaccgtttgtctaccctaagttcagcgacattcgtttcattctacctcctgtgtttgctcaagagggtggatgcatcatttttgccgatgggttaaaaattctggaaagcatgggggatgaggcatttaacatcgacccaattcgctggcacaaagttaaaagctacattgccaacggtattgtcgagtatccggagatgacctcgccattccgaattatggatggtcggcacagaaccctcgctcttattcaactttatcctggtataaaaattcctgttatcgtccctcacagccttcacagtgaagttattgaaacaggaattttcaataaagcgatcgttgaaccaatgctttaa

SEQ ID NO: 143730 - DNA, 2058 bp, Enterobacter cloacae
atggcaacactccgtgaattgatcataaaaatttctgccaattcctcctccttccagacagagatttcccgcgcatctcgcatgggaacggattactaccgcactatggagcagggcgggaaaaaagctgcagcggccacgcgtgaaacccagcgttctttggctgacctgaattctcaacttgcaaccgtgcgatcttctgctgccgggcttgccggtgcgtgggctggtgcatttgccacgcatcagctgatcgcgtttgccgacacatggaaccaactgaatggacgccttcgcctagcttcttcttccagcgatgattacgtggaatcacagcgcgtgctcatggagatcagccaacgcactggaacatccctcgaagcgaacagcaacctttacagccgaattgcacagtccctgcgtgatgctggttacgcttctgctgacgtcgcaaaagtgacggaaaccgttgcaacctcgctgaagctgtctggcgccagtacggaggaggcgagttctgttatcacacagctgagtcaggcgctgggctccggcgttctgcgaggagaagaattcaactccattatggagaacggcggccgcctggcgaaactgctggctgatgggctgggcaccactgttggcggtttgcgtaatatggccaacaatggcgagctgactacagataagatcgttccgttgctgaccaacgtcgagattctgcgcaaagagttcgacactctcccggcatcaatcagcggatctgcacagaaagtacaaaacgcctttctcgcctgggtcggcggtgcgaacgatgctgttggtgcatcctccgcgctttccggtgtgctggatgggctggccaataacatcgatgatgtggctaacaccgcaggcattctggttggtgttgggctggcccgttattttgggaatatggtcggcagtgttggagagtccacacgggctgtcctcgctaatacagctgccgaagtcgcactggcgcaggcgcaggttcgcggtgcacaggttagcgttgctgctggtcgccaggctgtttaccgcgctcaacaggcacgcgcagcggcgacgagtattgaggctcagattgtcgctgagcgtaatcttgccgcagctcaggcatcactgaatacggcgcttgctggcagggcctctgcagttaacaacctcaccaatacagcctcggtcatgtcacggctgggtagtggggtgctgggtattctcggtggatggcctggagtaattatcggtgccggtgcggcgatgtatggtttgtatcagcacacccagcaggtacacaaggaggcggttggctttgccaataatctggatgaaataaacggtaagctgcagcagatgtcggtgctggggctacgctctacggcagccgatgcccgtacatcattacaggcacaaaagcaggacctggccgatcttgactcacaaattgcgaaggttaaggaaagccaggcaggactggcattaattcaggaaaaatataataaatccccacgtttaacctacctgaataccttcatggatcaggctgatataaccgaaaaaaatatttctttaactgatcggttgtctcaacttgaatttgaaagagagaaggtcgccgcaagaatagcgtccactcaaaagctcgtaaatgaggcgagcgatctcgctactcagagggctatacagcaggctggtgcaatttccattttaaatggtgcatacagactcctgaatcaaacaatggcagtgatcccaacggttgagcctaagtttgtcagccccatcgtgcctgtttctaatgctacgccacaacagcaaacggcccttgaacgagcacgccgtgataacgagatggccagcctcagtggcttagaaaaactccatcagcagcacgtctatgaagcagaagatctgaagctgacgggggctctttacacccagtacatctacaacaaggatcaggcagccaaaaaggatgcagcagctgcggaggcaaaaaaaaacctccaccgctgcctcaagtgcgcagagtaa

SEQ ID NO: 143731 - DNA, 1260 bp, Enterobacter cloacae
atgcagcagctgcggaggcaaaaaaaaacctccaccgctgcctcaagtgcgcagagtaaagccgagcgcgaagcggccagcaccgctgagcagtattcgcggaaaatggccgatctgagcgtggctatcgacgtgcagcgcgtgcgggcaacggagggagaaaaagcctccgacctttatgctgcttcacaccaggctggcactaaatggacggatgagcagcgcagggctattcaggcatcgtctacagaactggcgaagtggactcaaaaagctgatgagaacgtgcgcaagcagcgcgaacaggctgatgccctgaaggatttaactgaagcggccaggaagttcagagacgaggcaacgctgacaactgaaaccagaggaatgagcgatcgccagcgcagccggttcgatgaaacgcagcagattgaccgtgttttcgccaaaactgacggcggtaccgaagcaatcgcacagcgtgcggcggctctcgatgcgctggacaaaaaatataaagcaatcgctgcttctgaggctgactggactgcaggcgccgagaagggatttaaaaactggtttgataccgcttctgattattcctcgcagacagcagaccttgttaacaactcaatgacaggtcttatcggaaatatttccgatgctttatcaggcaataaagttgactgggaggattggtcgaaatcggtactggcttctatgcaaaaaattatcctcaacgcaatgttggtcaattcgttgaagtctgcaggaggtgggggactgttcggctctcttggcggtctttttggtgggggggatgcaacctctgcaggaagtacaccatcaggcgcatattccggcgcggccagcggactgaagtttgccaaaggcggcgtatttgattccccaaatcttagccatttcagtaattcgatcatttccagcccgacgatgttcaaatttgccaaaggcgatggattgatgggtgaagctggccccgaggctgtgatgccactaaccaggacaccgaatggcactcttggcgtcaggatggtcggcactacagctgctggtggtggaggtggtgaaatccatatcacccagcatatcaatgtttctggtaacggtgacgccgcgcttaatcgtgccatgcaggaggctgcgcgtcagggagctgccgatggtgctaaaaaagcgcgtcaggacatgctgagtgattttcagaccaacggtcaggccaggaggatgcttggcgtttaa

SEQ ID NO: 143732 - DNA, 1104 bp, Enterobacter cloacae
atgtcagatgtaaaaatgattccagtagataagttggaactcgacgaagcaaacccgcgtcttccaaatggcgtagcgcgcacgcaagaagcgatgattaactatattgcgacatcaacctcattagaagatttaatgagcgcaatatcccaaaacggcttttttagcggtgaaccgctcattgcgattccgggtgacaacggaaaatataaggttgtcgaaggaaacagacgattaacttctgttaaacttattcttgatccatatctatgtgaaaaaccaagttcaaggcttctcaacattcataaagaaaacgtcagtgtatttgacgaactaccggttattgttaaaccacggcgagaagatgtattaccctatcttggctttcgacatatcactggaatcaagcaatgggaccctcttgccaaagcaagatatattgagcaaattttcgtaggtactgatccaactaaatcgccttcggatcgctattatgaagtcgcaaaaataataggcagcagaagagaccacatcaaaagaaacttagatgctcttgctgtttacagaaaaattgaatctgaagatttttacgaaatcgatgatttaaatgagcaaagtataaaattctctatactttcaacagcattggctgatgagagaattggacatttcgttggtgttgacataaaaaaagatggagaggtaatcccatcagatcctattattaacccttcatcactaaaaaatgactcaattaaagagttgacgcaatggctttatctaagggacaaggacggcaatacaaaagttggtgaatcccgaaatctaagacatcttgctgcaattgttaacaatccaagggcgttacagcaatttagggacggagcgccattaaacgttgcatatcagcttacatccgatatcagtgaagactttttagagattctttaccaaattgaaacattaatgattgaagcagcgggcatggttgcaaatgttgaattcaatagcagtgcatacgatgtagccaaacgcatcaacaaaaatattaaaatgattggtaaagagttagcagagaaggaaaaggacgatgacgacttttga

SEQ ID NO: 143733 - DNA, 993 bp, Enterobacter cloacae
atgacgacttttgatgtaggagacatgcatccaaatacgcctcatcttctagctgacttagtagaattgttatgcattatcaactataccggtagagatacgtttcaccagacagatctagcaagtttgttgaatgtttcaaacacaagtgttgatgaagtggatcaggaaaggcgtgaagtaaggagaataagttctgatgctgttttaggcgacagaactgaagcccagctcgaaaacgtatggattcagctaagttataggtttgcgagcctgaacgatatgtaccctttcattgttgaaggggatgaaattcgtatgcgagaagaacaaacgaataagcatagagtatatatatttacactatgctgttcacgccttcgctctttcattcgcattcggggtgcggcgcaacgctgggcaagagggtttgctgttctatgtaaatatgcaacacaagcacttttaccagctcatggggatgtcaaaatttttgacgctaactcagaggatcgccgttcgtattacggtacagatttacgccgagctttacgcgttatgggtagtgatttaggtgtaaaacgagttgatgaagaagaatgtgaccgggctggcagctctggtgacgcaggattcgacattattgcgactgttaagtttgaagataatctaaattgcaattttggcattttgggtcaatgcggtgcgcaagaagaaggttggccaaagaaaactcttgaggcgcactcaataaacttaagtccttatttccatacaactttcgcttatccttctgtaatgtttactccagttttttatagagactcgaacggtcagtgggtgacttctcgccctacttcaggcgttattttgctggatagattacgaactttatttttgctcgacaaagcaaaccactgggacctactaatagattttccgtggtttgctgaatttgaatcggagttccgaagcgtggtacctgaaccttaa

SEQ ID NO: 143734 - DNA, 945 bp, Enterobacter cloacae
atgccaactgttgtttcgctgttttcagggtgtggtggttcagatgcaggcgtgttaaacgccggctttaacgtacttatggctaatgacattctgccgtatgcccgagatgtgtacttggctaaccacccggaaaccgattacgttttaggggatgtttctacgatcgaatcgttcccatcagccgatctgcttgtcggttgttacccttgtcagggatttagtcaaggtggggttcgaaaagctgacaggaaaatcaacaccctgtacttagagtttgctagggcccttagaactgttaagccaagggcattcatagtagaaaacgtttcaggtatggtgcggagcaactttgaacatttgctaaaagatcagttcaaagtctttgaggatgcgggatatcgcgttaagtctcagattctaaatgcttcacattatggggttgcacaggatcgcaagcgtatttttattgttggtattcgtagcgattttggtatcgattatgagttcccagcagcaactcatggtgataatttacaaccatataccacaattagagatgctatcggacatatgcctgaatggcctgaaggcgagttttatgattcagatttccattggtattatttgtcaagaaatcgtaggcaagactgggaacagatatctaaaacgattgtggcaaatcctagacatatgccgttgcatccgataagcccaacgctagtaaaactcggcccagacaagtggcaatttacatctgatgcgcgtgcccgtcgttttagcttccgtgaagctgcccatcttcaaggatttggcgatttagttttcccggaaacagaaagagcctcgatgaatatgaagtatacagtggtaggaaatgcagtaccgcctccacttttcgaggcggttgcaaaagcattaccgcaagagctgtggcctgattaa

SEQ ID NO: 143735 - DNA, 201 bp, Enterobacter cloacae
atgccattttgcggcaactgctgggataatgcggtggccgaatcgttcttcagttcgctgaaaaaagaacggttcaggaaacacatatatataacatgtgatatggcccgggagtatatcttcgattacattgaaatgttctacaactgggcccgacgccacagtcatctcggcggcgtcagtcctgaggccttcgaatag

SEQ ID NO: 143736 - DNA, 3534 bp, Enterobacter cloacae
atgccaacaacccctgatgctatcattgctgctataacggacgcggcgacggtcggctttcgcggcaggctaattgcacgaggtcaggcacgtgcaatgatctggcgtgacggtgttcttcctcctggtgcgccggatttctcggctcaactcagcttcgatcttcacagttacgcgtatggtttgcttggactaggtctgcgccttttagagtcagatggcgacccgaatcaagcacggatcgcattcgaacaggcggcgacagcgcttgagtcggtcatggccaacggcaatcgcgaagaagctgatcgcgatttccattttctccttgcagctgccagttatcacctcgcgcacctttctgcccgggcctattccctcctcgcaattgtggccgatgaagcaaatttctcgccgatcgagcatgcgctaactctgttgatacgccgagatatcaattcgctgcgtacacgcgtatatacctttcgtctcgatggtcgtggatctgatgcgaccattacgacattcttacagcagcatctcaccgagtccatcgttgccgatgcggcggaacgagatggaaaggactttcttttcgaaggcctgaatctcgcactgacagatgttttcttcggtgccttttcgatgttcctgctcgccctagatcgcggtgaatatactcttctcgaaaaagcgatcgcccagcttcgtgaaaacctcgatatctgcggggagctgaaccttataccgcaatggtgggtgcaccggattgctatccatctgcttaaagatttctggtcgaacaccttccacgaaaaagttccgctgcttcccgctggcggcgttgccccttcgtggcctgtccttcgtgaactctttattggcttgctcgctcgacgcccaagggcagaggtcgacttgtggccgtcgcagattgaagcggcatcgcgagctgtcaaccagaccgacaacctcgttgtttcgttgccgaccagcgcaggtaagacccgcatcgctgaattgtctattctgagatgtttagccggtgggaggcgtgccattgtcgtgaccccgcttcgcgctctatctgcgcaaaccgaagccacacttcagcgtaccttcgggccactcggcaagaccatttctgccctttatggcagtatcggagtgtccggcttcgacgaagatgccatccgcgggcgtgatattgttgtcgcaaccccagagaagctcgatttcgccttgaggaacgatccgtcactgctcgacgatgtgggcttgctcgttttcgatgagggccatatgattggttcaggtgagcgcgaagttcgttacgaggttcagattcagcgcctcttacgtcgtaaggacgcagatcaacgccgcatagtctgtctatcggcaattcttccggacggagatcaaatggaagacttctcggcgtggctacggcgcgatcaaccgggaggtcccattaagaacgattggcgtccgacgcgtttgcggttcggcgaggtcacttggaattcgccgacagcgcgcctaaatcttcgcgttggtgaggaaaggccatttgtgcccagatttctgactggtgcggcaccgccgctgttcgtaccaccgaagaagcgtcgcaaccgactctttccggacaatcagcaggagttgagccttgcaaccgcatggcgtctagtcagagatggtcagacagtgttgatctattgcccagagcgtcgcagcgtcgaaccatttgccaaggtcatcgttgacttgcactcgcgcggtgcactcgagtctttgctaacagtcgaattgaccactttgcagatcgctatagcactcggtgaggaatggcttgggacagacagctatattctgaaatgccttcggcttggtgtggctcttcaccatggtgccttgccgacagcttatcgcaaggaaatcgagcgccttctgcgagaaggtatactcaaggtcacgatctcatcgccgactctggcgcagggactcaatctctcggcgacagcggtcgtcatgcactcgctctaccggcacggtgaaatgatcaaggtttcggaattcaagaatgtcatcggccgagcaggccgtgcttatattgatgtagaaggccttgttctctatcccatctttgaagatgtgaataacaggaagcacaacaaatgggtcaatctgatagaagaccacggtgctcgtgagatggaaagcgggctcatccagctcatcttctcgctgctgagccgcatgcactctcacattggcggtgatctcgaccatttgatcgactatgttgtcaataatgctgctgcgtgggtcttcccagaggttgccggtgaaaaggttgatgagcgagagcaggcgctgaaagagtgggatcgccatatggcgacactagataccgccattctcagtctcattggtgaggccgatgtacccgatgaccagatcgagaccgctctcgacagtattctccaatcttcactctggcaacgccgcctgctgcgtgttaacgacgaatcacgggctgcctatcgcaccgcgctgtttactcggagccgttatatctgggcgaattcgactgccgtcacacggcgtggttattttctggctgggcttggccttgaagctggacgtgcgctggatgcaattgcaccggagacgaacaatctgctcatgcaagctaatgcagccttggttgtatcagatcatgaggctgcaatcactgcgatcacagatatcgccgaacgcgtgttcaccttttatccgtttgaaccagacacgctcccggcgaattggcgtgaaatcctcagaggttggctgcttgggcatccgttggcaatgatgatcgccggagaggaggtagacgcattgcaatttattgagggcggtctgggctatcgtcttccttgggctatggaggcgttgcgggtacgtgccgccgccaacggtgataccgttggcatgccagcactagcgttggaagattatgaactcggccttgctgttccagctgtcgaaacggggacgatgaaccgctcagcctcaatactgatccaggcgggttttaattcacgacaggcggccatcaaagccgtcaccgatacggctgctaacttcacgaacggggcggaattgcgcgattggttgcgttcacctggtctcgctgtctattcggcacaaccaaactggccaacggccgaagctcggactatatggctcgaattcatccaggaatttgctccgtcagacaacctttcttgggcgcggcgagattatcttggaaacgtcaattggttcgatgttccggcgccttccggaactccagtcggtctctttcattggaacggacaaccgctagtgcttgcaccagatgggcacgcgattggtctgctacaacaccctcttaaccttaatcggcgaggacttgtgcgagcgacggtcgctatgaataacggccagatcaatctgaactatctcggccctgatgatttgtgggtagttgcgaagccacattaa

SEQ ID NO: 143737 - DNA, 780 bp, Enterobacter cloacae
atggtcccgttctatgattggtgcgactcggctgacatgccattaggtaatcaccatgttcgagtcatgacgggccggccaggagatattgcgactggcattcagatgacagctagggctatccccgcccactacactacagaggagcggattgccgccgcgcttgcgaagttaggtaagacagcagctgctcaaatgctcaacgatctccttccgcaaactgcgcatattaggtcgggtgaccttggcgagatctatgcaacagaatggattgatgcgtacagcggttatcgagcgcctatcaaaagactgcgctggaaggatcatcgaaatatggcaatgcgcggcgatgatgtcatcggtatgcttctcgacgctgaaacacagcgactcagcttcctgaaaacagaagctaaaagccgtattaacctgcgcgctcaaacgcttgaggaggctcggagcggcttagataaggatagcggccttccctcgtcgcatgcgttatcttttatctcggccagacttatggagataggcaccgatgcaccgctcgtagacgcaatcgacgaggcactctaccggcacggtatcccgcccgagagcgttaaacatctactcttcacgttttcaggtaacccaccacagacgctcctaacacaggcgctacaggcctatcctggcccgattggacaatggggtgtcggtttgcatatcgacaaccatgctgcttttgtcggagccgtctacgatcgagtaattgccgatgccaacaacccctga

SEQ ID NO: 143738 - DNA, 651 bp, Enterobacter cloacae; identical to SEQ ID NO: 102213

SEQ ID NO: 143739 - DNA, 1098 bp, Enterobacter cloacae
gtgatcgcccttgccgatgccgccaccgagcatctcgcgcgccagcgcagtttccagctcgctgcggatcaggcgcttgagttcacgcgcaccgaactcgggcttgtagccttcttccgcgaaatggtcgatcagcgtctgatcgaaagtgagcgtcacgccctggctggcggcgctgcgcgccacgcgatcgagctgcaggccgacgatgtggcggatctcctccttgcccagcgcatggaagacgatgatctcgtcgatgcggttgaggaactcgggccggaagtggccgcgcagcacgtccatgacctcggccttggtcttttcgtactcctcgtcggccgccccacgcgccttcagccgtcgctggatgatgtccgaacccaggttggacgtggcgatgatgatggtgttggtgaaatccaccacccggcccttgccgtcggtgaggcgaccgtcgtcgaacacttgcagcaggatgttgtagacgtcagggtgtgccttctcgatctcgtcgagcagcagcacgctgtagggcttgcgccgcaccttctcggtgagctgaccgccttcgtcgtaaccgacatagcccggaggcgcgcccaccagccgcgccacggtatggcgttcgccatattccgacatgtcgatgcgcaacagggcgtgctcatcgccgtagatcgattcggccaatgccttggcgagctcggtcttgcccaccccggtcgggcccagaaacaggaaggtagccaccggtttgctgccttcgcgcaggccggcgcgggacagccgcacggcatcggccacggcacggaccgcctcgtcttgtcccaccaggcgctcgtgcagccgttgttccaagtgcagcagcttttcgcgctcttccaccgtcaactcgttgaccgggatgccggtcaggcgcgagacaacctgcgccacgtgttccgccttgacctcggcactgccggaggcccgctcccgctcccagtcctcgacgagcttcttgagctcggcctccttggcttcgatgcgcttgccgagctcggccgcctggtcgtactgcttgcgcgcggccacgtaatcctgttcacgccgtag

SEQ ID NO: 143740 - DNA, 1044 bp, Enterobacter cloacae
gtgcacctcgtcgatgaacaaaatcagctcgccctggtgctcggtcacctccttcagcaccttctgcacgcgctcctcgaactcgccgcgatatttggcgccggccaccatggcgttgatgttgagttccaccaggcgcttgtcgcgcaaggtctcgggcacttcacccgccaccatgcgctgcgccagcccttcgacgatggcggtcttgcccacacccggctcgccgatcagcaccgggttgttcttcttgcgccgggccagcacctcgatggtggtttcgatctcctgcgcgcggccgatcaccgggtcgagcttgccgtcgcgcgccatcttggtcaggtcgcgcgagtacttgtcgagttctggcgtgttggtcggcgtctctgcgcgtccatcctcggcgcccttgccgaccaccttgctgacctgttggcgcagcgcctgcggcgtcaggccgtagcggcgcagcaggttggcggccagcccttcgccttcctcggccagaccgatcaggaaatgctctggaccgacataagaatggccgagttcattggaggccacgaaggcgcggctgagcgcatccttcacgcgcggcgacacgccgatctcgccctcgaagggcttgtccccgcgcttggcctcagactcgatctgccgcttgaggtcatcgaccttgatcttgaactgacccaggatggtcttgaccacgtcgctgtcggccagcgccagcagcagatgttcggtatccacctcggagcggccaaattcggcagcgtgtttggcggcctcctgcaacaaggcttccgactgttcgctgatgcggctggccagcccactgccgcgacggcgcggtgcacccgaacctgcggcggcgggctcgccaaacgaggcatcgaccacgtcatcggtatcggcggcaactggcgtcgcgtcgtcgccgatgcggaagaagtcactgccgaggaagtcctcgaacaggccgctgcgcgaaccgaacaaggcttccagcggcgaaacggtgcgcttttgctggcgcactaa

SEQ ID NO: 143741 - DNA, 552 bp, Enterobacter cloacae
atgaacgttattaaaacaaagttggaaggtgtactggttattgagcctcgagttttcggcgatgaacgtgggttcttttatgagacatttcatgcaaaacgctacaaagacgcgggtattaaggtggaatttgttcaggataaccgctctcgttcaacaggaggcgtattacgaggactccatttccagaaaacgaaaccccaaggaaaattggtaacagtcactcagggcgaagttttcgatgtcgcggttgatctccgatttggttctgcgacatttggccagtatgaatctattgtgttaaccggagagaataaaattcagttttacattcccccggggtttgctcatggcttttgtgtgttaagtgatagtgctgattttcaatataaatgcacagatttctacgatccatctgatgaaggcggattaatctggagcgactcaattgtgaatattgattggccaattaaagatccagttctatctgagaaagacaaaattcttccttcattagaacaaataactaaaaatattaaggagggatggtaa

SEQ ID NO: 143742 - DNA, 831 bp, Enterobacter cloacae
atggcccagtatacagtaattggaggacggggattcattggtaacgagatcgtcgaacagttaaaagaactgaaacacgatgtttgggttccacaacgagacgagcaaaccctctttacaaaagacttgggcaccgtcatttattgtgccggcaatggtgattgtcaaaacacaccatttaatgtcttccaggctaactgcgcacttctgtctgaagttttgcagcgttcgaaatttaatcgcttggtgtttatgtcttctactcgtgtttacatgaatggcagtgatacacgagaaaatgccgatttggttgttagtgaggatgatgctcgtcggttatttaatctgacaaaacttgtatcagaagagctatgccttaaaagcggaaaagatattgttattgtcagaccaagtaatgtttatggggtagctttgaatagcccgctatttttaccatcaattacacgtaatgcaattaataatggtcatatcgacatgttcattgatcgacattatgaaaaagattatgtgtcggtcgaggatgtggcggaagcttgcatcaacttatcacagaataagaatacatctgggaatatttataatatagctgctggatataatatttctgcagagcagattgctgatgtactgattcaaacaacaaattgtacagtaacctggcacgagcgtaacttcccaagagaagtattccccgttaacgacatcagtattcttaaatctgttatgccagaatataatccaagaaacgtacttgatgatatcgaaaatatggtgactcgtttccgagctgagatggtaaactaccaatga

SEQ ID NO: 143743 - DNA, 969 bp, Enterobacter cloacae
atggattttaacttgaagacggaaacagaagagcaaacgctgatcgatagcgtgcgcaatacgttgacggagcaaggtgatgccctccgccatctggcagaagtgattgatgcaaacgagtacagcaccgccttatcgctgatgctgaactgtaaaggtcacgttattgtctccggtatgggtaaatccgggcatgtcgggcgtaaaatgtccgccacgctcgcctcgaccggtacccccagcttctttattcacccggcggaagctttccacggcgacctcggcatgatcaccccttatgacgtgctgatcctcatctccgccagcggggaaaccgacgaagtactgaaactcgtcccctctttaaagaacttcggcaacaaaatcatcgctattactaataatgctaactccacgctggcaaaacatgctgacgccacgctggaactgcatatggcgaacgaaacctgcccgaataacctggcgccgacgacctcaacaacgctgactatggcgattggcgatgcgctggcgattgcgttaattcacaaacgccatttcaaacctgatgactttgcccgctaccatccgggcggttcactgggccgccgtctgctgacgcgcgttgccgacgtaatgcaggttcacgtgcccaatgtcgatattaacgctactttccggcagattattcaggaattgaccagcggctgtcagggtatggtcgtagtaaaagagaacggcaaactggccgggatcattaccgatggcgacctgcgccgctatatggaaaaatgcgaagacttcgttaacggcaccgctcagtcgatgatgacccgcaatccgatcaccatgccgcttgatagcatgatcatcgatgcggaagagaagatgactaagcaccgcatttccacgctgttgatcactgatagcacccaggatgtcattggtttagttcgtattttcgactag

SEQ ID NO: 143744 - DNA, 1152 bp, Enterobacter cloacae
atgtctacacacaaagtaaagttgctggcttcctcgctacgtgcgcgtacggccaaatttaatcttgcctggatccagcaacaccttgcatggattgtaattgccgctccgatggcgctgctgatcgtctacctggtgatcttcagccagccgcgttatatgagcgaatccaaagtcgccgtaaagcgccccagcgatattgaaggcgccagcctcaacgtcgggctgctgcttggcgcgtcaaaccccagctccgcggaagattcgctgtatctgaaagagtacattaactccgcagacatgctgcgcgtacttgataaacagcttaatttccacgacgcgtggagcaaaagcgggctggactttatctatcatctccctaaaaacaccacctcggaacagttcctcaactattaccgcgaccgtgtttccgtggtgtttgatgataaaaccggcctgctgactattcagactcaggggtttaacccgcagtttgcccagcgcttcaaccaggcggtattaaaagagtccgagcggtttattaacgaactgtcgcatagcattgcccgcgaccagctgaactttgccgaagacgaactgcgccaggcgcgcgcgcgtctggataagagcaaagcggagctgctggcttatcagaacaaaaataacattctcgacccggaggccagcgccactgcggcgacctcgctggtgatgaccctgcaaggcaagaaagtggagctggaagccgaactgcgcaacctgctcacttatttgcgtgaagacgcgccgcaggtcatcagcacccgcaacgccgttaaagcgctgcaggcgcaaattgacgccgagcagagcaaaatcaccgcgccggacggcaaacagctgaacagcatggcggcggattttgacgaaattaaagcgcgggtaactttcgatactgaaatttactctatggccattaaggcaattgagaagacccgccttgagacggcccgcaaattaaaagtgttgtcggttatcagttcgccacagctccctgaagagtccagcttcccgaacagcggttacctgctggcaagctggctgctggtttgctgcctgctgtttggcaccattaaactgctgctggccgtaattgaagatcacaaagactaa

SEQ ID NO: 143745 - DNA, 1677 bp, Enterobacter cloacae
atgaaattactgaaatcggtactgctccttctggtctgccaggcggcatatgcggcaagcccgaccgacatcacggccgatcccaatctgacaggggcggccccgctgccctcgcttatttccggcaaaacggaagaaacccagaccgcatccggctttgacgacacgccgccgccggtggccgccgcgcagccaagccgtatgttcggcgcgcagctgtttacctctatcagcgccgcttccggcgcgggcctgggctttaaccccggctatgtcatcggccttggcgacaccattcaggtgcgtctgtggggcgctttccagtatgacggcgcgctgaccgttgacccgaaaggcaatattttcctgcctaacattggcccgctgaaagtcgccggcatgaccaacgcacagctgaacaacacggtgaccaataagatcaaggaggtttacacctctaacgtcaacgtttatgcctcgctgctgcaggcgcagccggtgaaagtgttcgttaccggctacgtgcgcagccccggcctgtatggcggtgtggcgtctgattcgctgctctcctacctgagcaaagcaggcggcgtggacagcgagcgcggcagctatgttgatatcaccgtcaaacgcggcaagtcggtgcgctcaagggtgaacctgtatgatttcctgcttaacggtaagctggggctgtcacagtttgtcgacggcgacaccatcgtggttggcccgcgtcagcacacctttagcgtggaaggcgacgtcttcaacagctacgattttgaattctccaacagcaccattccggtaacggaagcgctgagctgggcgcgtcctaagccgggcgcgacccacatgacgattatccgccagcagggtgcgatgaagcgcagcgaatactacccgctgagctccgcgccgggccgctcgttgcaggatggcgacaagctgatcatcagcactgaccgcttcgcaggcactattcaggtgcgcgttgacggcgcccattccggcgaacatgccgtggtactgccgtacggcgcaaccatgcgccaggtgctggcgcaaatccgcccgaacagcatgtctcagctcagcgcgattcagctttaccgcaaatcggttgctacccgccagaaagagatgctggacctgtcactgcaaaaactggaagaggcttcgctgtcggcgcaatcctccacccaggaagaggcgcgtctgcgtatgcaggaagcgcagctggtgagccgcttcgtagcgaaagcgcgtaccgtggtgccaaaaggggaagtggtgctcaatgagagcaacatcgactccgtgctgctggaagatggcgatgtcatcatgatcccggagaaaacgtctctggtgatggtgcatggcgaagtgctgttcccgaacgccgtaagctggcagaaagggatggatgctgacgactacatcaaaaaatgcggcggcctgacgcagaaatcaggtaatgcgaaaatcattgtcatccgccagaatggcgaatcgatagatgccgacgacgccgacgatctgcgtcccggtgatgaaatcatggtcctgccgaagtacgaatcgaaaaatatcgaagttacccgtggcatttcgaccattctttaccagcttgccgttgccgccaaagtggtgctgacgctgtaa

SEQ ID NO: 143746 - DNA, 2034 bp, Enterobacter cloacae
atgaacagcgtactgggcgtttattctggcggcatctggcgtattccctatctggacagtttcctgcccggcgagcgtgtccgactctcgccttttaaagccatcccggccaatgtcaacgctatcgccgtctggggctatcgcccgagcgcgcaaaaaccggctgcgctggcgcaggctgcgggcctgcccgttattcgcctggaagatgggtttattcgttctttagggcttggcgtacaggactgccctcccctgtcgatagtgatcgacagactgggtatctattacgatgcctctacccccagcacgctggaaacactggtacaggaccgcgagggaaatcgcccgctggcagatgaagcccacgggttaatgcgcgctatcgtggatagcgacctgtcgaaatacaaccaggcgctgccgtttattcctcccgccgtgatgccggacgcggtgctggtcgtcgaccagacttttggcgatatgtccgttgcgaaaggcaacgccagcgccgacagctttcgcctgatgctggagaccgcgaaagcggaaaaccccaatgctgaggtgtgggtgaaagtgcatccggacgtattgtgcggcaaaaaagcaggctactttaccggcctgcaaaacgatccgcgggtaaaactgtttgccgaagacgttagcccgcagtcgctgctgcgccacatgcagaaggtctacgtagtgacctcgcagtacggctttgaagcgctgatggcgggtaaaccggttatctgctttggtcagccgtggtacgcaggctgggggctgacggatgaccgtcatccccaggctgcgatgcttgccaaacgccgccagcccgctacgcttatcgagttatttaccgccgcctacctgcgctattgtcactaccggcacccggtcagcggcgagccgacaggccttgccgaggttgtcgactggctggcgttacagcgcaaccacacgctggcgcgccagggcacgctgtgggcgccggggctgagtctgtggaagacggccatccttaagccgttcctgaaaaccgcaggcaaccgggtgcgttttgccgctaaatgcccacaggccagcgcgcttatcgcctggggaacgcggggtgaagcccgatggcaggcacaggccgcccggcaagagatcccactctggcgcatggaagatggctttattcgctcatccgggttagggtctgacctgctggcgccgctttcgctggtgctggataagagcgggatttattacgacgccaccaggccaagcgatctggagaacctgctgaacgccagcaacctgagcgaacgccagcgcgcccgtgcgcaggcgctgcgtttgctgctggtacagagcaaggtcagcaagtacaatcttggccaggactggcatttgccggctggagccgcgggtaaaaaagtgttgctggtgcccggccaggtggaagacgacgcctctattgccaccggcgcgctatctattcgcaccaaccgcgacctgttgcgtaccgtgcgcgagcgtaacccggaggcgtttatcgtttttaagccgcacccggatgtgctggtcggtaatcgtaaagggatggttgacgtcgaggatgtcgcccgctgggctgactgccaggcgctggacgcggacatcattcagtgtattcagcacgctgatgagctgcataccatgacgtcgctttcgggttttgaagcgttgctgcacggcaaacgcgtattttgttacggcatgccgttttatgccggttggggcctgacgcacgatgagcattctattgcccggcgttcacgctcgcttagccttgatgatttagtctggcagacattaattgcctacccgacctatatccacccgcagcgccttgagccgatgctggcggaagaggcggcattatggctgagcgccgcaccgcgcggtgaaatgaaaatatcaaaaaagaatattggccgtttagccagacagtaccgtaagttattgatgttttataaagttagatttggttag

SEQ ID NO: 143747 - DNA, 1248 bp, Enterobacter cloacae
atgatgcaaaacataaccgttaagacattactcgcagggaaaaaatatctgctgctgcaaggacctatggggcctttctttaatgatgtcgctaactggctggaaacgctggagcgcgaagcggtaaacgttgtctttaacggcggcgatcgcttttactgccgcaatcgtccttatctgaccttcacccagacgccaaaagagttccccggttggctgaaagagacgtggaaggattaccctttcgataccattctctgctttggtgactgccgtcctttgcatcaggcggcgcgggcctgggcaaaagcgaagggcattcgtttcctggcattcgaagagggctacctgcgcccgcattttattacggtggaagaaggcggcgttaatgcctactctccccttccccgcgatcccgatttttatcgtcatctgcccgatatgccccccgcagaggttcagccgttaaagccgtctgctggtcgccgttatattcacgcgacctggtattacctggtgggctggcgctatcgtcacgagttcccccgctatcgtcaccacaagtctttttcaccctggtacgaggcacagtgctgggtacgcgcctggtggcgcaagcagtggtacggttttaagcagcgtaacgtgctggagacgctgcaaacgacgctcgatcagcgttactatctggcaatcctgcaggtttataacgacagccagattcgtaaccacagcccgtatgccgacgtgcgcgattatattaacgatgtgattttctcgttttcccacaaagcgtcgctgagccatgtgctggtgatcaagcaccatcctatggatcgtggccatcgcctgtacggaccgttgattaagcagttgagtaagaagtatggcgtgacaagccgggtggtttacgttcacgacctgcccatgccggagctgctgacccatgcgaaggcggtggtaacgattaatagtacggcggggatttcagcgctggtgcataacaagccgctgaaagtgatgggcagagccctgtacgacatcaaaggcctgacgtaccaggggcatctgcaccagttctggaccgcggacttcaagccagatatgaagctgttcaagaagttccgcgcgtatttgctggagaatacacagattaatgctgtgtattatggggataaatctcataccttgcaaaaaaattgggaaagtcaagtggatcttcagcaaaattcgggctttgttgaataa

SEQ ID NO: 143748 - DNA, 207 bp, Enterobacter cloacae
atgaaaacgcctattaacatgcttgaaaccatcgcagctgaattagtggaaaatacgtcacttctggagtttatttttcagaattcacctgacaatggagaaattgataaccatctgtgttgcttgattcgttcaatgcagaaaaccagcgataaagcttatgagtatataaatcagtatgactttaagggcgaggtaaataaatga

SEQ ID NO: 143749 - DNA, 225 bp, Enterobacter cloacae
atgaagaagtggttaagtctcctgattcctcgttgggaaacagacactgtagttttacaggtcagtggggaggagcttcacattgtctgtagctacgaggatatcgatcccggcgaaatgtttgacggcatgtgcgagcttaagactttcacctggctgaactggtcctttccgtttggggaaccaatcaacgttcgctcgtttgagccaaaggtagcagcatga

SEQ ID NO: 143750 - DNA, 630 bp, Enterobacter cloacae
atgaaccaaatactatttcaaaaggcggctgccattagcgccgggctcgctttgcgctggtttcagcatatcgatgctgcaatgaaggaattcggcatcacggcgccgctcgatcaggccatgttcatcgcacagatggggcatgagtccacgggatttacccggctggtggaaaacctgaattacgcggctgaaaacttagtgcctacattcggcagacaccgcattactccccagcaggccgccgcgctcggcagaacggcaactcaaccggcaaatcagaaagcgatagccaatctggtttatggcggtgagtggggcaaaaagaacctgggcaaccaggttgctggtgatggctggaaatatcgcggccgaggccttaagcaaatcaccgggctcagcaattaccgcaactgtggccacgcgctgaagctggaccttgtaacccagcctgaattgctggaacaggatgaatatgctgctcgctcagctgcatggttctatgtctctcacggctgcctgctccactccggtgatgttgagcgcgttacgctgctaatcaacggcggccgaaacgggctggataaacgccgcgcgctgtttaacctggctaaatcggagctcgtatga

SEQ ID NO: 143751 - DNA, 570 bp, Enterobacter cloacae
atgaacaatctacccgatgattattttctggatgctgatgacgaactggttacttttcttgagaagcagggtgaagactgtattcgagaaatccaccagtccaatgcactgaataaagaaaacggtcaaaagttattaagtatattaattgctgggattggctcgtcttttttgctattaacgcaacgcactgatctggattacctcacggccgggatttcaatgtttttagtctactgggcgttgtgtgctatctatcttgttcggtgtgtcctcgctgtacgattgcgggcccttgcttcatcaacgccctatgctttatatcacgacgattacaaagggtttagtgacgatgattatgcagtttttgaatcaaatgggtttactgctaagcgttcgacgttgaatatccttaggcgctatcgacttgcagatttaacaagaatggctgagatgggcaagcttgaaaactccagaataagccgagaacttgaaagggtgaggattgcgacaatccttacccctgcttgtgcacttgtaatttcagtgcttatttaccttttcttctga

SEQ ID NO: 143752 - DNA, 918 bp, Enterobacter cloacae
atgccagaatttcatgacgttcatttggaactgcttgttgaagcctattcacttcctcaggcagagcgactggcgtacatcgatttgtgtatacgctacctcggcagcatatccagggccgaaattatggctgagttcaaagttgcacaggctgcagcctcaaaagatcttgctttatatcgggaactcaagccaggtaactgtagtattgatacggcaaccaaaaggacgattatttctcatgctacctatactccattggtgcagattagtgttcatacggcgctgaatctgatccagtatggtttctctcgttcggagctgatgcaaaaacgtccgatgctgccgattgatgagatagacccgctttatctacccgagcgtttgaaagaagaacaggtctatgttgtcaccagggcaataaaaggccgctatgcgatcaaatgcacatatggctcagaaagtggcgagcatggtaaacggatactgtttccatcagcattatttgtagatcggaaaaactggtacttcagagcttatgatcgaaacgattcggatccaaaactgagtgggtttaaaaactttaagttatcgagaatttttgatgttgagcaagaggaatcgatactgccgacggttgcagagttgacggacagagaatggaatgaggaggttacctttatcattgcattcaaaaaggatcttcgacctgagattgtagataaaatctctcgtgagttttcgatcagcggtaatgtacattctgttacatgtcgcgctgctttggcctggtacgtaaagaccaactggaaaatagatctgactggaaataacaataatggttggttgtactttgatgtcctgaataaagaagctttacaagaagttaaatgcttggagaagttgtttgaagagtaa

SEQ ID NO: 143753 - DNA, 516 bp, Enterobacter cloacae
atgcaaaaagtaaccgaccagtattcacccgaaattgcgcggcacaagctcaatgcttatttttcaggcaatttcatcatgcttgacgtgataaagcgtttgcaaaaatcaagcctgtgcgtatttgcagccttatgtgatggaaaaacgatcacaactgcagggtatgaaattaatgccgattttagcgttaaacgagcatctgcggtcattcactccttgaagctgaagaatctccctatctcaacaaattccgtttcaacgggctctgatgttggtggaatcaccaatcaggcggtttttttcatcagaaaagaggatcttcattctctgaaatccgaaccggaggagattatgaggaaatgtgcaaggttacacgcgcaacataaacgttcacatgcacaaagggacattgctcgtctatgcaaggagtttggcaaggaagcgatacttaaattagtcaaccaagctgcagccaaccctaagatgcctcctgatgggatgagtgcatgttaa

SEQ ID NO: 143754 - DNA, 972 bp, Enterobacter cloacae
atggctaccctcgttttttcctattctcatgcagatgaagccttgcgtaacgagctcgaaacgcatctctcaccgttaaaacgcatgggaacaatcagcgcgtggcatgaccgacgtattgctcctgggcaagaatttgagcatgaaatagatcgctatttcgccgaagccaatattattctgctgttagttagtagcgacttcattgcatcggattattgctggaatattgaaattaagaatgcaatggcgcggcatgaacgaggggaagcgatagtcatcccggtgattttgcgcaattgtgcctggcacaatcttccttttggtaagctactggccgcaaccaaagatgggaaaccgattactcagtttcccagtcatgatgacgggtttgtgcaggttgttgatgcagtatcaaaggctgctgcccgtattgataccaacaattcaacccaagtgccccacgcttcaacttcatcaaatgctcaactatcaccgtcggtaaatacagttttacagccccgatccggcaacctctcgcttccaaaaacattcagcgatctcgataaagatcgggctagccgtgaaggttttgagtatgttgcacgctatttcgaaaactctctcttcgagctaaaacaacgcaacccaggtatagaagtggaatttcaaccggttgattccagcgcgttcacctgcgcgatttatttacacggtacccggactgggcagtgtggagtctggcgtggtgacagactccatggggtaggctcagtctgtttcagtcatgacggcatggttcgaaacagctacaacgaaagtctaagtttggcggataacggtcagtctctgggttttcgcacgatgatggggttcaccggaaacagtcataacacattactgactaatgaaggtatggctgaacatttgtgggatatgttcttcaaatccgtaaaacaacgtatgtcctga

SEQ ID NO: 143755 - DNA, 183 bp, Enterobacter cloacae
atggtacagctcaatctggtaaaagtactgcttttgtgcccgacttttggccagcaatcaaggcaaccctgtatcacctatgaccagtgtttaagattgccgttgctgtcgctgcagtacgcacaatatttatcactggcactttgtgcatcggttgaatacatcgccattccacaggcctga

SEQ ID NO: 143756 - DNA, 978 bp, Enterobacter cloacae
atgaataatggaattgtgttgaaccatcactctttgccatttgccagcaaagaggatgcagatgaaggactattggctttctttactgttcttaaggtttgccgaactgctgggctgaaaattttgctagtcgatgaagatcaagacaagtcgctaatggggctggagctggctaacggatactttgtgcgcaattggcttgcctctgcaagcaaagtagcagaacttgcggattggtgccgatttctaaagtctcttgaaacgaaacagcctctctttgaaaccgtagatattgaaagttttggtgatgtattagaagttggcttgccaggggaatattcaggtaaaccggtgctattagcagcattttattttgaaacttttcttgccagttttacggctttggctgcttggacaaatagccattttaaagtatgggttttcgagcttgatgcaataccagatcaaagggatgaaacgattttaaatctgagtgattctgcgagcttgagtgtgcatggtgatgaactcaaacaacgtcgtaatgcgttgttaagttccgctaaggatatctggctgaaaagagcagatttgtttcctcatatcactttattgtcaaatcaaattggtacaagtctacaaggttggtctgctaggcaagatgtcttgttcaaggcgcgagatgcgctaaatgtgctggagtcgtttagtgagaaatggctttcaggtgagtatgtagagtaccgtcatgagtatttaagggatttgggtttggcagctgaagttagcggtgaatcggacagtgtaaataatgctcccaaaaagaagaaagagcgcatattttggttagatgatggacggcaggtctattgcgagaatcatgtaaaactacctgacggttaccgcctacatttttatgctgacgcagtaaatcagcggatatatgtggcgtatttggggccgcatttaactttgtga

SEQ ID NO: 143757 - DNA, 1110 bp, Enterobacter cloacae
atgattgagtttattaatatccaaaactttaaaaccttgttaaatgctagttttccactgggtaatctgaatcttttctcaggccttaatggcatgggaaaatcaacgcttgtgcaaagcttattgcttttaaggcagtcttatgaacgcaatacccttaaaactaagggtttgctgttaaatggtgattatgtcaatatcggtacgggtaaagacgcgctctctagttttagtgaacaagaagagattatttttaccattaaatggctcgagaaagaacagccaacacggtttgagtttgattatcaacatgactcagatctgctgccgctgcgtaaatcgggtattgagggtgatccagaatcgctaagcttatttaactctaattttcagtatttatgtgccgataggttaggtccgcaaagtcatcaccagttgtctgagtttcatattcgtgatttaaaatcgcttggccatcatggtgaatttgcggttcattttatcgcggttaatggctctaaagacttggaaatagaagcgttacgccatcaaaaggctgtttcaggcactttgctttctaatattgaagcatggatgtcggatattacgcccgggttaaaaatcaaagcagtggcgcagcctcagtttaattcggtgagccttagttactcttttaaccaagggaaagacacaaccgaagactttaaaccacagaatgtggggtttggattaagttatgtgctacctgtcgtaaccagtatactaagtgcggcaaaaggtgatttgctgattattgaaaacccagaatcacacttgcaccccgctgggcaatccttgatgggtaaattgtgttctattgctgccaataatggcgtgcaattaatcgttgaatctcattctgatcattttctcaacggtatacgggttgcggtgaagcagaaagtggttgcagctgacgatgtcaaagtctttttcttgcagcgagatgttcataactccattcacgcctcagaagtcatgtaccccaatattgatgatgagggacgaatagactgctggccggaaggcttctttgaccaatgggataaggagttggatcatctattatga

SEQ ID NO: 143758 - DNA, 1128 bp, Enterobacter cloacae
atggtagattatcaagaaaccgagcttgatgaagaattggttgcgccaggtacggaagatgaagagccggaactgcttgatgaggtgatgcacccgttcaacccgaccgatattgatatcgtcgttgaaccgaagtcgctggatgccttgattaagcgaattcagcacaatgagatcgacatgaataccgattttcagcgtcatgcggagttatgggataaccgcaagatgagccggttaatcgaatccattttgattcgcttcccgttaccggctttctactttgatgcgtccgatgaaaataattggctaattgtggatggtttacagcggttatcaacgattcgcaagtttgtgttagataaaaagcttcgtctcaatgggctggaattcttaacagacctcaatggtaaaaccttcgataaattgcatcgtcaatatcagcgccgtattgaagaatgccctgttactgtgtacatgattaagccgggtacgcctgaggatgttaagtattcggtgtttcgccgcatcaatacaggcggcttaactctaaataatcaagagatccgtaatgcgctcgctaagccacgagacagagaattgctcgaagagttagccaattcagcatgctcgaaagccatgctaggtgacctttccaaacgtatgaaggatcaggaactggtattacgattctgggcattccatcgctttgattatttagaccctaaaaacaaaaaggaaatttcctcgtttttagataaagccatggaagacatcaaaaaaggcgatgatgtctaccgtgcagagtttaaagctaggtattcaactgcaatagagcgttgttaccagctgttaggagaaaaggggtttgaaaaaaatcctgcatcaagaagacggtcaaaaaatgcaacactatttgaagtctggatggttatgttggtgaaattaactgaaaacgagtttagccgcttggtttataaccaacccaagtttcaagagaaggtacagacgttattggaagatgccgagtttattaatgttattagctattccactcagcgaaaagagcatgtggaaatacgctatgaaaaagtcaacgcgttgattaaagagatgcttaatgattga

SEQ ID NO: 143759 - DNA, 174 bp, Enterobacter cloacae
atgaacatgtcgatgacagaaaaaataaaagcaggcaagctatttaccgatatgtgcgaaggcttacctgaaaaaagacttcgtgggaaaacattaatgtatgagttcaatcactcgcatccatcagaagttgaaggtaatgataccaacgtgttgatttcgtattttcactga

SEQ ID NO: 143760 - DNA, 1857 bp, Enterobacter cloacae
atgttagagctgaatgtaagtaagatctcaaacgtagttacgtttacggtggataaagcgagtatggcagaagctaaaaaagctgctgctgacttacaaaaacacttcgctaagattcaagaccctaagatcagatttaagacatttaaacagaatcagcgaagagcggaagccctttccgatgatgctaaactaaaaaacgctgttaaatcgtcagaatctaaacaacaacgtattgcagataaagctgctaaaactcaggcaagggaacaagccaaaatagctaaacgtaatgaaacagcagacattaaatttaaatctgctggcttacagcttcgcggaattgctggaaaatacggcgtagaccctgcaaaacaatacgaggctttaaagttcattcaggaacaaactgaacaattccgtaaaggggttatctcttctcagagaatgaattttaccattcgtgaacgtatcaccgatttacgccgtgttgctgcattacaagcccgtatcactgccagcacacaacaacaagcgattgcacagcgtcaagcgaagagaatggattataaaggggcggcggctaacattaaagaaagaggtataaacggcatcatcggcggtggggtattaggaagccttgcgttaacggctggctccctcggagtggggcagcgaattgttgacaaagggaatgagaatctcgacctggtgcgacagtcggctcttgttaagacaaatcctaatgcaatcaagactatggtagcatgggggcagcaacacggcgtagactccgctaacacgtctaaggccgtcgataacatgaaagatgtacgtgagcgccttgctatgactgttacaaatggacagttcaaagatggaaaatggacaggcggcgacggcgggatcacaactatcatgaataagtttggctggaacattgaggacgttaagaaatttcaaaatagacctctggacttcatccaggcaactgtgaatgaagggcagcgtagaggctttagccaggcccagattggtaatttgatcgaatcattaggtgatgacctgatgcactacacggatctattcctgaataatggtgcagagtttaacaagacgctaaaaagcctcgttgatagtggtcagacgctgaatgacgaaatgatcaagcaggtttatgagtatggcgatctgtctgtggctatgggtaatctgatgaatggcgttgataacagcctctttactggctttatgaaaggcttcgccgatggtggtgatgacctcgtgaagaacaccaaagtgatcaccgaatcggctggaatgcttggagagggattaggagatctggctaaacaggtgacgggctttgttggtgagatttccggcgtagtgtctgatctaaatgcagggcttcgttctcgtttccctcagtggttcaatgatagcgataagccagcggcccaggcgctctacgatggtgctgtgggtggttctgcgaatgctacagcggattggattaaatctaagacgggcgtggacactcgcgattttggccctgcaatcatggattggttgggcgttggtggtggtaatgctggaacagcggcaaatcaatacagcctaaatggtgattctcttcgtggttctgcaatgtcactaaccagcggtaacgcgccagcgtacaaccttgcaccagtgtttaatctgacagtagcgccacaagtaccgctaacaattcagagtgacgcttcgcgccttgctgattatgtcgatttccaggcgagagcttcacaagccagcttcatgcaatcgctcacgttgtcagcattaagcggtcaatcatcaacgggtggctaa

SEQ ID NO: 143761 - DNA, 459 bp, Enterobacter cloacae
ttgaactttgatgatttgtcttccgaagaacttgaccagcatgttatggagcgccttgtatttgcagaagaggaattatctccgattttgaaggggcatctatttattgaaaaagttcttgagacattaatttcaaggaaccttgttgagcctaaggcatttttcagatctacccgttcttatgatttaaaagtagatttggcttttgctatgggcttgctcaataataaatactactctgcattcaaagcgataaacaaggtgagaaataattatgcgcataaacatgattacaaagtcactcttgaagaattgaatgctttcaaatttgattgggtagaaattcagaataaagcattcgctgtagcatgtgagaaaagtattggcgagggcgcaagtattgccacaatgtttttatgttggaaagcaatacacctcctcgacaaacaagaagattaa

SEQ ID NO: 143762 - DNA, 897 bp, Enterobacter cloacae
atgctggatgtgtatctgttacaaaatgccgatgttaagaagattggcacactgtcaaaagataaacgagccgttactgtgtttctgtcttatctaaaacgctccgacattcagctaagtgacattacccgtactaccgtaagcggatggtgtgactacatgaaagagaatggtagagccatacaaacacaggctaatttcctctcttcaatggctggaatcctcgatcttgccgctgcccgttatcacgatgccccgccgcttgaaaaaaaccctttcagagggcataagctcaacacagcaaagagcagagaaagttatgaagcattcaccgatcaggatgtgatcgcccttctgagaggcttacaggaagccggagagggggaattattcgatgtggcaagcattgccgcttacagtgggatgaggcttaatgagatttgctctatgaacggtcacagcatagtgcagatcgataatgtatggtgtttcaaaatttatgaaggtaagacttcaaatgcctgtagggttattcctatacattctaaaatcctgcctatggctttatctcgaagagataacccctacaacggctttttgttctatcgtgccagtatcaccaatcgtgaggacggcaagcgctctacgtggcacacacagcgatttacacgcattaaacgggctattctgcccgacgatgaaaacaaagtgtttcactcgtaccgccacacctggatcagcaagctaaacgccgctggagtaccggagagccgtgtggcaattttggcgggtcacgcaccaggacaaacggagagtttcaagacgtattctaagagtgttcctgatcgtattgtgaaagaattgcagagttatgttgagctaataagctacaaatga

SEQ ID NO: 143763 - DNA, 1479 bp, Enterobacter cloacae
atgttgctgtcctcgacgcgtaaggactggctgggtaacgtccgtggtgacgttctggccggtattgttgtcgcgctcgcactcattccagaagcgatcgccttttccattatcgccggtgtcgatccccaggtgggcctctactcggcgttctgtattcctctcgttatggccttctttggcgggcgtccggcgatgatttcttcatccaccggtgcaatggcgctgctgatggtgacgctggtgaaagatcatggcttacagtatttactggccgcttccatactgaccggggtattccagctgatagccggttatctgaagctcggtggattgatgcgttttgtttcacgctcagtggtcacggggttcgttaatgcgctggcaatactgatttttatggcgcagttgcctgaactgaccaacgtgacctggcatgtttatgccatgactgcggcagggctggggatcatttatctcttcccttatatcaacaaaaccattccttcaccgcttgtgtgcatcgtggtgctgaccggcattgccatgtggctgcatctggatgtgcgaaccgtcggcgatatggggaaacttcccgacagcctgccggtcttcctgctcccggacgtgcctttaaatctccagacgctgctcatcatactgccatattctgcggggcttgccgtggtggggctgcttgagtcgatgatgaccgccactattgtggatgacatgaccgatacgccaagcgacaaaaacagggagtgcaaagctcagggcatcgcgaacatctgcacatcctttatcggaggaatggcaggttgcgcgatgattgggcaatccgttatcaacgtaaaatccggtggccgcggacgactttcaaccctcacggcgggcgtggtgctgctttgcctgattgtgtttctgcgcgactgggtatcccaaatcccgatggcagcgctggtcgcggtgatgattatggtttccatcgggacattctcctggcgctccattgccaacctgcggacacaccccctttcaaccagcgtggtcatgcttgccactgtcgcggttgtagtggcaacacataatctggccttcggcgtgctgaccggcgtactgattgcttcgctcaactttgccactaaagtatcccggttcatgcgcgtaacgtcagttctggagggaacgagccggacgtataccgtcaccggccaggtattctttgcatcagcagaccgctttacgagccactttgatttccgtgaagcgattgagaatgtggtgatagacgtttcacatgcccatttctgggacatcacgtccgtcagcgccctggataaggtggtcattaagttccgcagagagggcgccggggttgagatacgtgggatgaatgaagccacccgcaccatcgttgaccggtttggtgttcacgataaacctgaagaagtcgaaaaactgatgggcggtcattaa

SEQ ID NO: 143764 - DNA, 828 bp, Enterobacter cloacae
atgaataatactgttacagcctgtgtggacggttcactttcaacgcggtcagtgtgtgaatatgcggcgtgggcagcccgcactttgcaatcacagctcgcactgttgcacgttatcgaaaaagacagcaccccggtagtgtcagacctgaccggcactctcggcctagacagtcagcaattgctgaccgatgagctggtagaaattgaagggcaacgtaatcgcctgctgatggcccaggggaaagcaatactggaaagttgttctgaactgcttcaaaaacagggaagcccggatgtgcttttgatgcaaaaacacggtacaccggatgaagttctggcagagctgagcgaccttcgtctcatggtgctggggcgtcggggtagccaacatccggtaggctctcatctggaaagcgttattcgtctgcaaaagaaacccctgctggttgttccggagaactactcagcaccttccagagccatgtttgcttatgatggcagtgaagaaagcaggagaaacctggaacgtctgacgatgagtcccttactcagggggctggagtgccaccttgtcatggtaaacggtaagaaggaagagctgctggccgcacaacaaattttacgtgacgcgggtatagaaaacagcacaacacatcttaccgggcaatctgtcggggatgcgcttattcgttacgccgaggaaaatgctgtcgatctgatagtgatgggggcctacggtcattccaggttgcggcagttctttatcggtagtcatacctctgaaatgctgcaaaagacgcaacaaccgcttctgatcctccgttag

SEQ ID NO: 143765 - DNA, 1347 bp, Enterobacter cloacae
atgacctgcttattcgcaccttccctaattgatggtgatagaggtaagaactatccaaagcaatctgacttttttgatagaagtgattgcctctttttatctgcaaagaatgtcactaaaaatggttttgagttcacagattgctcttttatttcaatggaaaaagatcatcaactgcgagctggaaaattagaacggaatgatattgttcttactactagaggaacgataggaaacttggctctctatgatgagtctgtcagcataagtaatgtccgaattaattctggcatgattattttgcgcccaaacacaacgatgtggaatccaaggtttctctattttttattgaattcagatttagttatacagcaaattttggctctaacttctggatctgccgttcctcagttaccagcgagagatcttaagaaatttgtattacctgtcgtccctttaagtaaacaaaataggatcgtggaaataataggggcgattgttgataaggttcagataaaccgcgtaatcaaccaaaccctcgaacaaatggcacaagccctgttcaaaagctggtttgtcgattttgaaccggtaaaagccaaaatggcagtgctggaatcgggcggttcgcaggcagacgcgacgcttgcggccatgtcagcgatttccgggaaagatactgatgcgctggaggtttttgagcgtgaacaccctgagcaatatgccgagctaaaagccacggcagaactttttccgtctgcaatgcaggacagtgagttgggagatattcctgaagggtggtatttacaacgattttctaatattgcgacacttcattatggaaaagcacttaaaaaaacagaacgtatagaaggaccttattcggtttatggttcaggtggcatcactggctcacacaacagttatctcgttgaaggtccaggtattatagttggcagaaaaggttctatcggcactctgtattgggaggatggaaagttccatccaattgataccgtttattatgtcgaaaataaagaaggtgttccactaacctatctctattatttaatggggacattaaatctttcaagtatgaacactgatgctgctgttcctggattaaatcgggataacgtttatcggttggaaaccataaatccagaaatagctattttgaatgaattcaataatcatgtgtctgcgttgagaaatatgattcagagaaataagagttcaacagaaactctaacccaactccgcgacaccctgctcccaaaactcctctcgggcgaaatcaccctgccggacgccgagcaggcggtaagcgaggtggcaaatgtataa

SEQ ID NO: 143766 - DNA, 1188 bp, Enterobacter cloacae
atgtataaagtcgataagccgaccaatagcttgcactctttgcaagaggtgtcgtttagcagcctcggttataccgagcgctatcacctgcaggagtggctggcaaaaaacccccaagcactgacccgcgataatgacgacgaactgctaattattcagaaagaattcgccggttttgacgacaccaaagagcggctcgacctgctggctatcgataaacagcgcaacctggtgatcatcgaaaacaagctcgatgactccgggcgcgatgtggtatggcaggcgctgaaatatgcaggttactgcgccaatctgcgtaaagagcagatcctcgacatcttccagctctatctcgataaatacgaaccggaagagacccgaccggcggcggacgtgatggcggagtttctggagtgtgaaagcctggatgaagtgcaaattaaccagagccgcacccagagggtgatgatggtggcggcgagcttccgcaaagaggtcaccaataccgcgctatggttgatgcagtttggcctgcgtgtgcagtgctttaaggtgaaaccatacaaattcaatgacgatgtgttcgttgatatccggcaggtgatcccgacgccggaagcggaatctttcatgatcggcatggcgcagaaggaagccgaagagcagtccaccagcggcgagctgaaaacccgccatctgctgcgcaaagctttctggactaaaatgctggagcgtctgaaagccagttcctgcacgctgtacaagaatatcagcccgtcaacagaccactggcttagcgccggttcgggtatcagcgcactttcttacaatatgatttttagtaagaaagaaacccgcgttgagttctggattgccaaatcctcagcggagagcaacacctttgcctttaactggctgtatgagcgtaaagcggcgattgaagagacatttggtcatgcgctgaagtgggaaccgctgccaggcaaaaaatcctgccgaatctcctttgccacacctgctaccagcctcgatgaaagcaactggccagcgatgatcgactggctgctggtcaacctgacggcgtttgaaaaagcgctcgatccttttatcgccccactgaatatggcactgaaagagatttcaaacgcgccggaagaagtggaagagcctgcgacagaggaagcctga

SEQ ID NO: 143767 - DNA, 3132 bp, Enterobacter cloacae
atgctgagcgaagacgatttagaacagcagtgcctgcaatggtttgctgaacaggggtgggaagtgctgcatgggccagatatagcgccggatggcgacaacccgctgcgtgcctcctttcatgatgtgtttctgcgcccggtgatgctggagcagctgcaaaccatcaacccccatctccctgttgtcgtgctggaagaggtgatactgcgtatcgtccatgctcaaagcccggacttggtcgtcagcaacaaagccttccatcatctgctgctcgacggtgtgcccgttgagtacaagcaggaagacaaggttatccacgataaagcgctgctgatggattttaaccgcaccgccaataaccgctttatggtggtcaatcaggtggcgattcagggcataaaacaggtacgtcgcccggatgtgattggctatatcaacggcctgccggtggcggtgcttgagctgaaaagcccgattgatgccagtgccgatatctgggcggcgtttaaccaattgcagacctataaaaacgaactgagcgacctgtttatctgcaatgaagcgctggtggtgagcgacgggcaaaatgcgcgtatcggctctctgaccgctgatgaagagcgttttctgccgtggaaaacggtggcgaacgaagatgataaaccgcagtttcactggcagcttaaaacggtagtgcagggcttctttaatagcgaactgctgctcgattacattcgtttctttgtgctgtttgaaaacgatggcaaacggcttatcaaaaagattgccgcttaccatcagttccacgcggtgcgtgaagcggttgcggcaacgattgtggcctctaccggtaaacatcttccgctgcgcagcaacattacccccggcagtaaaaaagcgggcgtggtgtggcatacccagggctccggcaaaagtatctccatgtgctgttacgccggaaagctgctgcaacaaacagagatgaataatccgaccatcgtcgtggtgaccgaccgtaacgatcttgacgggcagctctacgccacgttttgccaggcgcatgatttactcaagcaaacgccgttacaggccaacgaccgcgacgaactgcgcgagctgctcaacgcccgtgaatccggcggcattatctttaccaccgtgcagaagtttgcgccgctggacagtgaacagagccatccggcacttaacgtccgcagcaacatcgtggtgatttccgatgaagcgcaccgcagccaatatggcctgagcgccacgctggaccggcaaaccggggcctataaatacggctacgccaagcatatgcgcgatgcgctaccgaatgcgtcgtttatgggctttaccggtacaccgattgcgtctgaagataaagatacccgtgccgtgttcggtgattatgtctcgatctacgatattcaggatgcggtggatgacggcgcgacggtgccgatttactacgaatcccgcttggcaaagctcgacctgaaccatgaggagctggaaacgctctccgatcaggtggatgagctggtggaagatgaagagaccggccagcaggagaaaaccaaaggtgactggagccgtctggaaaagctggtaggttctgagccacgcatcaaacaggtcgcggccgatctggttcagcactttgaaacacgcaatgcggcgatgaatggcaaggcgatgatagtcgccatgagccgtgatatctgtgtgaagctctacaatgccatcaccgagatccgcccagactggcacagcacggatgtcgaacaaggggctattaaagtcattatgaccggctcggcatcggataaagaccatctccagccacacatctacaacaagcagactaaaaagcgccttgaaactcggtttaaagatttaaacgatccgctcaaattggttatagtccgtgatatgtggctgaccgggtttgacgcgccgtgctgccacaccatgtatatcgacaagccgatgcgtggccacaacctgatgcaggccattgcgcgtgttaaccgcgtgttccgcgataagcccggcgggctggtggtcgattacatcggcattgccaacgagctgaagcaggcgctgaaaacctataccgactcaaaaggcaaagggcagaccaccgttgatgcccgggaagccttcgctatcctgctggaaaaaatcgatatcattcatggcatgtttgcgccctcggcaggaaaacccggcttcagttatgcgggcttttcttgcgacccgttagcgttcttgcgcgatgcggtgaactacattctggggctggatgacggtaaaaaacgttacctcgatgtctctctggcgatgagtaaagcctggtcactgtgcaatacgctggatgaggcgaaacccttacaggaggaattcgcgtttatttcggcggtcagggtggggcttatcaaactcgatccgaaggcaaagtttagccagtccgaaaaaaactcgctgctgagcaagatcctcgataacgcggttgtcgcgaccggggttgaggatgtcttcgcactcgccgggctggataaaccgaacataggtttgctgtccgatgagtttttggaagaagtgcgggaaatgccgcagcgtaatctggcagtggaactgctggaaaaactgctcaatgacggcattcatgcccgttcgggcaataacgtggtgcagcagaagaaatactccgaccgactgaaagcggtgctactcaaatacaataaccgcgccattgagaccgcgcaggtgattgaagagctgatccagatggcgaaagcgttccaggaggcgatggcgcgtgatgatgcgttagggctgaccccggatgaaatcgccttctatgatgcgctggctgaaaatgaaagtgcagtgcgtgaactgggcgatgatacgctgagaaagctggccatcgaagtgacattgaaattgcggcagtccaccaccgtggactggcaggtgcgtgaaagcgtgcgtgcccgattgcgtattctggtgcgccagacgctgcgtaagtataagtatccgccggacaaaacgccgggcgccgtggaactgattttgaagcaggcagaagtggtgtcgaacagctggacagtctaa

SEQ ID NO: 143768 - DNA, 471 bp, Enterobacter cloacae
atggccatgaccgatagtttgactggtatacccaatcgtcgcggcttttataataaaggtgaaaagcgctatagagcactcactcaaaccaatacaaaattcagtcttattttttttgatctcgataaattcaaacctatcaatgatctctggggacatgcagaaggtgatgaggtattaaaagtgtttgccgctatgctgatccagcatcttgagcccggagatatcggaggacgtctcggaggagatgaattttctgtgcttattgcagagcagaaccgcacagatacctttctgcaaggattacgtaagtgtgtagatgattacaatgcaagttccggtaaaccatataatattaattactctttcggaatgttgcataatgacccgatcaagtacccgtcgctgggggaaatgcttaaagaaagtgatgaggtgatgtactctgcaaaacgccggaagcatacatag

SEQ ID NO: 143769 - DNA, 234 bp, Enterobacter cloacae
atgtataaaagccaagaagataagctctctgaaaccgtcatcggagtggcggtgttgttgttactcaaagagaaaaagacaattagtgtagatgctgtctatgaaacacttcagaatcatttggttgctgagtcggatgagttaagaaggtcagcaataatcattgccctttgggacttgcattcgctcaggggaaacccacaacataataaagaagcagcaataaggcactga

SEQ ID NO: 143770 - DNA, 195 bp, Enterobacter cloacae
atggtcgtattagccgctattcaaacatcgaacgaaaagaaaacagctcaagatagctggcaggaagtgggtaaagtaatccttgggcgtggcacgtctgtttctaaagatagtgttacctttaaagaaggtatgcgtcctgaagaaattattgctatggccaattccagagcctcatcttcaaggaaggtgtga

SEQ ID NO: 143771 - DNA, 2577 bp, Enterobacter cloacae
atggcaaaaccggactggggcgagcttcagcaacggttcctgtccgaacatgccgcaaccggcgtatcaccaaaggaatggtgtgaagcgcagggactgaactacgctaccgcccgtcgatatatcaaaaaaccttatatgcaaactgcgcaaaaacctacgcagaaaaaaatgcgcactgcgcagaaagataaaagcgcaaatgagctggtggaagatgatggacttaccgctcagcagcgtttatttgtcgcggagtacctgaaggacaataacgccaccgctgccgctgcacgtgctggttatagcgacccaaactacggtcgtcagctcatagcgaatcctaacgttgcgcaggctattgcgcagcagcaaaaagcgtccattgtgcgcacgcttggcagtgccgacgaagtcctcgcgcagatgtggcagctcgccactttcgatgctaaccagctttcgcaatatcgccgtggcgcgtgtcgttactgctggggattcggtcaccactaccagtggcgtgacgctgtcgagttcgaagaagaaacagcaaaggttgaggaaaaggaaggggcccggcaaccagaagacactggtggctatggctatgaccacaacagggagcctaacccagaatgcccgcgctgcaatggtgacggcattgggcagccttacttccctgacactcgcaaactcgcggcagcttctcggctcgcttactccggcgtgaaggttggcaaaaacggcgtcgaaatcacagctatcagccgcgagcggatgttcgaagcggtcatgaaacgcctgggcctggccgatagcgagttcgcccagcgactgcagcagattgaaatcgaacgccggctgctggaggtcgagaaacttcgcaaggagctggcgggtgatggtgatgacgatgacacaatggctgagcgcggagagcaggcttatgactcgctgacaccgtttggtcgcctgtggctggatatcaaagactgggcatctgaggccatgcagaatatcggtcagtgggtagcagagctggcatcaaacacactgaaggaattcaacgcaatttattacagcgtagcgatcgttttccagaagctgaaccagatcatttcttcctctatcgcggctgcgattaatctcattcctgactgggcgaaaacggatactttgcagggatggcaggactataacgaacaaatggccagcgcttatggcgacagcgtctctcagctgaaaaaagactgggatgcctctgatatcagtgcaggtaaatacctcgatacgaccagaaagataagtactgcaaccacccagaaggatcgggaagaggttgctgcttttggcaaaaagacgaaaaccggaaagcagggcactttatcggctggcgatcgcagcacggatgctgcccaggccgagctactggcgcttcaggcacagttacgcgcgctgcagcagcataaagggctgaacgacactatcagccaacagcgcaaagacctttggactacggaagcgaaatttcaggtgctggaggaggcctcccgaactcgctctctgataaagcaggaacaatccctgctggcgagtaaagaccaagtgcttcagttggcacggcagaaagccctgttaggtgatcagattaccgcacaggaacagctgaacaagcgaatggatacctcgcagaaatacgtcacgcagatggctgagaaacaggccgcattactgggtggcgcggggatgagtgaccgccaggcgcagcgagagctggcaaaaagtcagctcgccgccggctggaaaaatactggtggttcgctggatgaagagggatatcagaaacagcttaaggcagctaatgattattacgatgccgaggaccagctgcgcggtgactggctgacaggtgcgaaaaagggctggacggagtttgaagacagcgcgacaaatgtatactcccaggtgcagacggttaccagcaacgcgttcaccggcatggccagcaccctgactgatttcttcaccacaggtaaatctaacttctcagatttcctttctactttcctcaagggcatcgcccagatgctgacccaactggctctggttaatggaatgaagtcagcgtttggtgggacgggtatcggtgcgttctttggtttttcaggcggtggtgtggttcccggttttgatggcggcggctacaccggtgatggcgggaaataccaaccgaaaggcgttgtacatggcggtgagtttgtgtttacgaaggaagcgacccgtgcactgggtgtcggcaatctctatgcgcttatgcgtggagctcaggggtatgcaaacggcggttatgttggcacagccccaatgtatgggctgcaaccgaatgcagctggtggcgtaaccgttcaaacttccgtggtcgttcaaaaccagaacacacaccagcagacttccggcaataacgatgctatttctcgggcttacaaacagaccatcgatcagtcggttcgtgcagggattgccaaacagcttcagcctggaggtttgatttggaatgcaacaaaaccgcgttga

SEQ ID NO: 143772 - DNA, 531 bp, Enterobacter cloacae
atgtcggtttttcatgactggctgctcaggatagctggtgaaaattactttctctatatcaaacgattatctgctaatgatactggtgcaactggtggacatcaggtaggtctatatatatcttccgacatcgctgaaaaactgctcccgtccatcaacaatacacaagaacagaacccgtctgtttatctaaccgcgcatgtttcatcgcatgaatatccggaaagtaaggcccgcgctatctattacaataatcgtttttttggcgggacccggaatgagagaaggatcactcgctggggaagagggagtccccttcaggatcctgaaaacacaggagccctaacggttctggcatttaagccagatgaacatggcggtgatagttcagagttggacatatgggtctgtgtcaaccctgatgaagaggatattattgagtccgtaataggtgaaatcatcccagggacacttctatttgggccgtccagtgaaatcctggggggctgtcactacaacatgcatcagtga

SEQ ID NO: 143773 - DNA, 336 bp, Enterobacter cloacae
atgtttcgtgttgatacaataaataagacactaataaaattaaagccaacaaatttttccgaacttgggttgagagaacgtttcgatattcaggagtggatcgaaaaaagccctgctattttgggtaatgatctacttgtcattggtaaagaggttgttcttgcatcaggcaagcgcctcgatttactttgcgtaaataaatcggctgcacttgttatagttgagttaaaacgggatgattctggctcgtctgttgaatggcaggcaataaagtatgcatcgtattgctcaaaactcttccccgatgagtttttaaactttacgcagcctatttaa

SEQ ID NO: 143774 - DNA, 561 bp, Enterobacter cloacae
atggcgaccacgaagataatcacccaagcagaggcgtttaagctgataagctggcttgagagtcataacaaacagctattcgcagacgtagcggtaacaatggcctctttatgcttacgtgtcggggatacggtgaatttgaagttcagccagttcaaggagggaaatacgctggaagtgctggagagtaagacgggcaagaagaaagaaatcatcgtccctgccaaggtgtgggagattgtagaacgtcgccgccaggccttcccgaaagacgaatacgttttcacgtcacacagcaaccgtgcatcaggaaaatcgcctgtcagccgtgaacaggtgaaccgtgagatcaaacaggctgcggagagtgtcgggattaaaggaacgataggctgtcacagctttagaaaatttgcatctacacaaatttttgagcaatccaatggcaaccttgccttagcaatgaaagcgctgaaccattcagatcctaaagtgaccatgaactatttgaagattgacgttaaaagcgtgggcgctgcccttgcaaacatttgggagtga

SEQ ID NO: 143775 - DNA, 168 bp, Enterobacter cloacae
atgatcgagaagaaaaccaaactaccgccgtccacatcgttaatgatcccggatgagacatttcagattttattcaaagaagcgaagcgccgaaaaatgagcgtaagcgcactccttcttgaagaatgccaaagtctggcggtcaaatactcgaaagctggcgcgtaa

SEQ ID NO: 143776 - DNA, 834 bp, Enterobacter cloacae
atggcaaagaacaactttatcgacggggaagtatacaaatacgcctcaatcgaagaagcattattatcagcaactcgaattacaaatctcaaaacaggcgagtcagtaaagctaatcggtaacgataaattatcatacatgatcctccgaaagagatttcatttattcaccgaccaatcaacagacaataagtattatacaactggtaagcactacgacaccattgaaagtatcgctgaggcaatcggtgtttctgacgttggtacagtgagcagtgcaattggcagaatggaagccgccggactgctaaccaaaaagagatttggaaaaacttacgaatggacagttgtcgatctcactccagaattatttcttctcgaacgtaacaccgggacggcaaaaaagcctgtctgggtggattgtctgaaacatcccgtgtttggtaacgccaaagaatccgcgccagccgttcagccggaggagcaaagcgacgatccgatgtgtgaccttgacgaagcaccggaagaggaagcgccagcgccggaaaaagtgaagccagcacccaagccaaagcccacgaagaaaccagcggcaaggaaagcaccctccaaacagcaaaccgtctccccgttcgagtttaaaacgccacgagatgaaaaccgggattggtggtatttggaacgctacaacgatgcagatcagtttactggatttaatgactttgatttgccttatctggcaatgtttgagagtcaggggaagttaataaatcaacattcaatccagtatcttaaaaccaaacgcggagcatacgaacgatcacaacaaacttag

SEQ ID NO: 143777 - DNA, 282 bp, Enterobacter cloacae
ttgaataaactatacctattgaacgaagccacacatcatcaaatagaatgtaacactgtctgccaacgtctttattatcaccttgcatctcttaaacgtgaaagcggagcaataaaagccaccgtgaaacacattgctgatggtgtgggtataagcgaaagcggggcgcgttattggatgttattaatgcacgatgcagccgttattacaatggaacgccacggcaagtattacgacattaccgtaaacgaagcggtgagcttcattactacaaccaactaa

SEQ ID NO: 143778 - DNA, 384 bp, Enterobacter cloacae
atgggacgaaaagaaagaaatacgctctcccgccttgagcgagagaataaaagcagaatcaaaaaaaacacccgtctttatgtaaaatctctggaagaaattccagaggaattaattgaaacaatgacagaagtacattcaacaccgccctctgtggaagagtgggccgcgttaaatgatcttctcgaaagttcgagcggattgtattacaaaccacgtagacgcaaagtttatagttgggatgattcaaatttgaagaaatggcaatgcctgggcttctcatcccttgagcattacatcacttataaccagataaataacaccgtagccggattgagagaacttgacggcttatttttaacggagaatgacaactatgattga

SEQ ID NO: 143779 - DNA, 210 bp, Enterobacter cloacae
atgattgaagaaatcacacaacacccacattttaaagaacgtgttgaatacgtagaatacctattcggacaagccctctctctcgaaaaagaaaataaaatagaagagatctcacttatcgttgatgtactggctacagaggccgcgccattcctggcagggattcaggctatcaaagctattaaggagcgtatgcaagatgcagaataa

SEQ ID NO: 143780 - DNA, 231 bp, Enterobacter cloacae
atgaagatttatcattacactgacctgaacggcctgaagggcatcatcgaatcaggctcactgtgggcgacgcacttttcctttctcaatgacagtaatgagctgactcacggcatgaactgccttgtgaagtggtttactgaatttggccacctgaacagaggtgatatgctcacctcagaacaacacaggtgtcataatgaaaaaaagaaatttcagcgcagagtttaa

SEQ ID NO: 143781 - DNA, 621 bp, Enterobacter cloacae
atgagacaggaaagagtattacgtataaaggcatttcgacgggcactggagcttggtggcggtgaacgggctgacgggtgtcgtcattttccccgctggaaaacggaactgaggaatttctcgcacggcagctgcgatttagccagcaatactctggcgtactacctcaaggaacgagagagatgccatccgtgcatcatttttatggaagggaacgctggctttcatgaagcggaaaactcaacagtccacgggcatttcatcgtattgctggacggagagtacatcgatttgacgctggatcaattcgacgaatatccggactacattccttacgaacctgtcgaatctgacgggcagattggtaagctgttgcgtaatatcatgaagcatgaggacccggtaaaaacccgccagattgatctcgatggtggcgaagagctgtatgcctggttacgcgataccgccgacgaagtgctggcagcagatccggaatggcaggcccgggaacggtcgatagaagaagcaagggaagccgctattacggtgttcccgtttctgtctgacgtgcaaaaaactgagtgcgaacagggcccggacagtcaggaggctgccagatga

SEQ ID NO: 143782 - DNA, 612 bp, Enterobacter cloacae
atgaccaccctctccccggccaccgtccgccgcattgaagacgccgcagccgccctgatcgccgccggcaccccgaacccgaccaacgagcaggtccgtcagcacctcggcggcggctccctgtcccacatctccccggtgatgcgcgcgttccgcgcccgccagcgcgagcaggccgctgagcaggccacgcccctgccgccggagctcgcgcagctgctgaccggccagctggagctgctgtggcaggcggcagtgaaacaggctgaagccggggccctggcggcgcgcgagcaggccgacgatgacattgcccgggccgacaaggagcgggatgaggcgctggcgaacgtggccgcgctggaaagcgagctggcggtgctgcgcgaggtggtggccgaacgtgaccgcctgctgcaggaggtacgcgaactgcgcgcggaggcgctgccgctgcgcgagcaggtggcccgcctgaccgccaccggcgaacacctggcggcgcagctgcaggacacgaaagcggagctgaaggaagcccgggaggacggccgccagcttcagaccgaactgctggctctggcccgccaggacgggaaggtgaagaaatga

SEQ ID NO: 143783 - DNA, 312 bp, Enterobacter cloacae
atgggtaaaccaacatttagatcatttaacgatgtggtccgggagcttgaggatgtatatggccaccaggagctgtggctttactctggccttaatgaggactgccccgtcgagacagcccggcggcgtcaggaatggcgatctcccaaaattctcaaacgaaacggcagaatggtggcagaacaatcaggccagcctgagttctgggtgctcaccggagactaccatctgtcgcagtctgaacacagcggtccgccgtggaaagcctgcctcatcgataaggtctttaaactgtattgttcactgttctga

SEQ ID NO: 143784 - DNA, 1017 bp, Enterobacter cloacae
atgaccgacttcgtgacccggactgttatggacaaaacaatgtggctcgtgacattgccgaagatcattacaaataacagtacccgccaggaggaaaatctggtcgtcattctgagcagggagcaatcgtggggggcaacttctgaccattttcccgacggattgtaccgggtctcctgcataatgacactgtacctggccgataccgaacagacgaagactcagactttcactgcaatctactggcctcaacagaagtccctgcatctgtttacagatgagttcagactggaacgccgcctgcagggacacggcctgggtagctggatcacgcagcagtttgtgctctgggccagaggccttccgccagaaaccagggttttgccgattgaaatttcccaggttgatgaaaaaaacgaagaaaacaagatccggagggacagactgtggcacgcaatgggtttccggttcccggccggggaaaccagctcaatgccgctgcgggcagacgaactacagttgccgcggggcaggtattcaacgctccgggtggagcccctggtatccgcggtacgccggctggaagactgttatcgcgggctgcaggaaaaaatcgtgcagctcgaaggcaaaaaacggtcgcaaaaacagttaattacttcacttaagaatcgtccattttatcatctgttgcacaggaaagggggccagctcccggacgagaaatgtgacgccctgccactgcgggcagaaaaactgtctctgccgcagagcggggattcagacctggaggtggcgcaacgggcaaccggggtcatccggctggctaccctgtgtgctcagtcgcagaaaagaatcctggagctggaaagggagcttgcctcgcaaagtgaggagctcgttgacctgcaggcacatcccttttttaacctgcgggataaataccgcggccagatcctgttctggggatgggggatgggttttctgtgctttatctactggatgttggtgtcatga

SEQ ID NO: 143785 - DNA, 780 bp, Enterobacter cloacae
atgaataacctggttccagttggatctccggcatctcccggaacattgctcccggtggccatcgattaccctgccgccctcgccctgcgccagatggcgctcgtgcaggatgaactgccgaaatacctgctggcgccggaagtcagcgccctgctccattacgtgccggatcttcaccgcaagatgctgctggcgacgctgtggaacaccggcgcgcgcattaatgaagcgctcgcgctgacccggggggatttttcgctggcgccgccgtatccgttcgtgcagctggccacgctcaagcagcgtaccgagaaagcgaccaggacggcaggtcgtgcccccgcaggcagtcagatccatcgtctggttcccctttccgatcaccactatgtcagccagctgcagatgatggtggccaccctgaaaattccgctggaaagacgaaacaagcgcaccggcagaatggagaaggcacgtatctgggagatcacagaccgtaccgtgcgcacctggcttagcgaagcggtggaggccgcagcggccgacggggtgacgttctcagtaccggttaccccccatacgttccgtcactcctacgcgatgcatatgctgtacgccagcataccactgaaggttttgcagagcctgatgggccacaaatcgatcagttccacggaggtctatacgaaggtgtttgcgctcgatgtcgcggcacggcaccgggtgcagtttcagatgcccgaagcggatgcggtagccatgctgaaagggaatatttaa

SEQ ID NO: 143786 - DNA, 258 bp, Enterobacter cloacae
atgaaacttcaagatatacagatagataataccgtaaggagtggccttaattctttcactggtggggtgattattcgtgatacaaaggtattgatcacgctcaatctcccggatggacagaaaaccactattgagggggaatggcggcatatgtcagacgccaacagattgtcagaacgtattacgatgcttcagcatgcgatctatgagcagtatgaggaatacagagcagatattcccgtcagctggtccagataa

SEQ ID NO: 143787 - DNA, 1176 bp, Enterobacter cloacae
atgccactggcgctacttgccctgacgatcagtgccttcgcaattggcacgaccgaatttgttatcgtgggtctggttcccactattgctaaccagcttgcgatctcgttgccttccgccggattgctggtgtctatctacgccctgggcgtcgccgtcggtgcgccagtgctgacggccctgaccggacgttttccgcgtaagcagctgttagtcgcgctgatggtgctgttcaccgctggcaacattctggcctggcaggcgccggactacaccacgctggtgattgcgcgtctgttaaccggccttgcacacggcgtgttcttctcgattggttccaccattgcaaccagcctggtgcccaaagagaaagcggcttcagcgattgcgatcatgtttggtggactgaccgttgcactcgttacgggcgtaccgctgggaacgtttatcggacaacacttcggctggcgtgaaacgttccttgccgtctccttactgggtgccatcgccctggtgaccagcctgctgctggtaccgtcgaatatcccaggccgggcgagcgccagcctgcgcgatcagctgaaggtgctcacgcatccgcgtttgctgattatctacgcggtaactgcattgggctatggcggcgtattcacggctttcaccttcctggcgccgatgatgcaggacctggcaggcttttcacccaatgccgtgagctggattttgctgggatacggtatttccgttgccattggcaatatctggggcggcaagcttgcagataagcatggtgcggtaccggcgctgaaattcatcttcgccgccctggtggttctgctgatgattttccagttcactgcttcggtacactacgccgcgctggtcactgtgctggtcatggggatctttgcctttggtaatgtccccgggcttcaggtttacgttgtccagaaagccgagctctatacgccaaatgccgtggatgtggcgtccggtctgaacattgccgcatttaatatcggcattgcgctgggctccatcattggcggacaaaccgtagcgcatattggattagcccagaccccgtggattggcgcggtgattgtcctggtcgccttcctgctgattggcctgagtggacgtctcgataagccagcccgggtcgcgctggggtaa

SEQ ID NO: 143788 - DNA, 927 bp, Enterobacter cloacae; identical to SEQ ID NO: 128534

SEQ ID NO: 143789 - DNA, 2427 bp, Enterobacter cloacae
atgaagcagaggtcaatctgcccgggaagattaagcacggctattgcggttgcgctgtgctgctttccgccattttccagcggacaggaaaacccgggaacgatctatcaatttaacgatggttttatcgtcggcagtcgcgaaaaggtcgacctgtcgcgcttctcgaccagcgctatcagcgagggcgtctactcccttgatgtctataccaacggcgaatggaaagggcgctacgacctgaaaatcaccgccggtaaagacggcaaaatgggcgtctgctataccaaagcgatgctgatgcagtatgggatttcgccggataaattaaatccgcagctcagcgaaaaagagggcttctgcggacgcctgcaggagtggcgtcacgaagataacgtcaaagacacgctgattcagtcctccctgagactggatattgccgtaccgcaaatctacgaagatcagcgcctgaaaaactttgtcagcccgcaattctgggataaaggcgttgcggcgctgaatttaggctggatggccaacgcctggaacagccatatctcctcggccaacggttccgataacagcagcgcgtatcttggcgttaacgcgggcctgtcgtgggacggctggctgctcaagcatatcggtaatctgaactggcagcagcagcaggggaaagcgcactggaacagcaaccagacctatctgcagcggccgattccgcagattaactcgatagtcagcggcgggcagatttttaccaacggcgagttctttgacaccatcggcctgcgcggggttaacctggcgaccgatgacaatatgtttcccgacggcatgcgctcctacgcccctgaaattcgcggcgtggcgcaaagcaacgccctggtgacggtgcgccagggcagcaatattatctatcagaccacggtgccgccggggccgtttaccctgcaggatgtctatccttccggctacggtagcgaccttgaagtgtcggttaaagagggcgatggttcggtcgaggtattcagcgtaccttacgcctcggtagcgcagctgctgcgtccggggatgacccgctacgcgctctccgccggtaaagtcgacgatagttcgctgcgtaataaaccgatgctctaccagggaacctggcagcatggtttaaataacctgtttaccggctataccggcgtcaccggatttgatgactatcaggcgttcctgctggggaccgggatgaacaccggcatcggcgcgctctccttcgacgtgactcactcgcggctgaagagcgatacccttgacgagcacggtcaaagctatcgcgccacctttaaccgcatgtttaccgaaacccagaccagcatcgtgctggcggcgtatcgctactccaccaatggctactacaacctgaacgacgccctctacgccgtcgatcaggagaagaactacaacagcaactacaccgtgtggcgccagaaaaacgggatgacctttaccgtcaaccagaacctgccggacggctggggcggtttttatctgagcggtcgggtggcggattactggaaccgttcggggacggaaaagcagtatcagtttagttacaacaacatgtacggtcggctctcgtggtcggtcagcgcccagcgcgtctataccccggatagttccggccaccgccgcgacgatcgcgtgtctctcaactttagctacccgctgtggttcggtgaaaaccgcaccgctaacctgacatcgaataccgcgtttaacaattcgcgtttcgccagctcgcagattggcgtcaacggttcgctggatagcgaaaacaaccttaactacggcgtgtcgacgaccaccgccactggcggccagcacgatgtggcgctgaacggcagttaccgtaccccgtggacgacgctgaacggcagctatagccagggcgaaggctatcgccagagcggcgtgggcgccagcgggacgctaatcgcgcatcagcacggcgtcgtattctcgccggaaaccggcactactatggcgctgatcgaagcgaaagatgccgcgggcgcgatgttgcccggttcgccgggtacccgcatcgacagcaacggctacgccattctgccgtatctgcggccttaccggataaattccgttgaaattgacccgaaaggcagcaatgacgatgtcgccttcggcagtaccgtggcgcaggtggtgccgtgggaagggagcgtggtcaaggtctccttcgataccacgctgcagaacaacatcactctgcgggcgcgccaggctaatggcctgccgttaccgtttgccgccacgatattcggtccgtccgggaaagagatcggcgtggtggggcagggcagcatgatgtttatcagcgacgccagcgcgccgaaggccacggggctttgttga

SEQ ID NO: 143790 - DNA, 1275 bp, Enterobacter cloacae
atggtagatgaatatcctgaactgaacggtcaccatcaaatggctgaatataataatcgtaaacagcagggcaaattaactaatgccgatatcaattttgagaaactttgcaaggtggcagggattgaccctgccgagctgacggcaaacagaaataattcagatgttcgaaatcagcttgtaaacagagcgggagctgtcgttacgacagaaatccgaaggctatggcaggataaacctcttaaaatccgttttaatgttgacagtgattattttgatacatatgtttcggattcaaataatgcctacgatgttgaggtgaacctggacgaaagaagccggggatttaagtggttcttctcattctatataacattttttgctgataccaagggcggctcagcagaaaatgctattattttactggatgagccagggctttacttgcatgctaaatctcaagctgatcttcttaatcaccttaccaatgattttgataaccagattatctataccactcactctccattccttgtaccaattaaaaacatatccgatataaaaactgtgtcaattgcagaggataagggtacgacggtgaccaacgatcccagcggggattccacaactttattcccgttgcaggccgcgctgggttatgacatcgcacagtcgttatttattggttcccataatttgattgttgagggcgttactgatttctggtacctcagtacaatttcagatgtgctgacgtctgtcggcagaaaaggcttgaacagcaaaatcaccataacccctgcaggcggggcacagcgcgtatcctacatggtttctcttctgtcctctcagaatcttaatgttgttgtgcttctggatgatgagaagcaaagccgggagacttcaactgagcttcagcagcagggcatgcttactagaaagaacgtaatatttgtttctgatgcgttggagtctaagcgtgacgagtgcgatatcgaagatctcttcaatcgtgagactttccttcagatggttgatgaaagctatgatctgaaaccagctactcttaaactgaatgataaaataccgcggattgtcaaacagattgaaagcgccttctcggcagacaagaaacattttgtgaaagccaaacccgcccgcgcattcatgaatcgtatgaaagatggcgataatcagatattgtccaaagaagaactggaccgttttgaaaagctgtttgatctgataaacaaaagaatgaatgcccgcaattaa

SEQ ID NO: 143791 - DNA, 891 bp, Enterobacter cloacae
gtggcagataatataattattgatgagaaagagttagttaccttagttgaagtaccacttgatattattgatcctaatcatcggagtattactccagaaatgcgtagaaaaattttagcgcaacgattcagaaaccagctatatgctgatggcatcgaaactggacatcttgaggaggtaaatggaaaagttactttcaggtctaagttaacactaccatcctttgctggttttgtctttgaagcttacttggtaagtaaactcaatgataataaaaaaatggggcaagccgcatttacatggtgtacacaaaggtcaaggttggctttatcgagtgtatacgatcaatacaaagccatagggactggatttattagcactcatcaactgcatccccatttatatgcgcctcacagtagttctgatatccgttttgttagaaaaaacccccaaagtggggtaatagaaacagcattaatacatggcacacacaacattgctggaattcaggttaaggctataaaaggaaacttaaaaagccaaattattgatcctttattacgtgggcaatattctcacgtcataacacttctgagggattactatggaacacctacacgaacagtttgtttgcgctggattaattttggcgtgcgagatggaagtatcacttcactacaacgtgagtttcttgaagatcggataaaaggccctgagtttttaggtatagatcagcgcgatattgatgactactatgactatatcgaagattaccataacgggtactgtttacctgataaatcaatttccgatgcaactttctctgagattaagcggtacaaagaccataatgggttgttagttcctgatgacgtaggaacagaaatttaa

SEQ ID NO: 143792 - DNA, 174 bp, Enterobacter cloacae
atgatggattttgtatatgcccataacactgcaattggctttttgctgttgtttgtcagcttagtctcgctagtcactgttgttgctggggagcatgaaactaagcctgccatcggtctatattgcgcttttttcgtctttttagtggctggcattcttctggttgggcgttaa

SEQ ID NO: 143793 - DNA, 228 bp, Enterobacter cloacae
atgaaaattatcagtaaacgccgggcaatgacgatataccgccagcatcctgagtcccggatctttcgctacagcagcggaaaatatcagtggcacggcagcgtctgtcattacaccggcagggacgttccggatatcaccggagtcctcgcggtatacgccgaacgccgccaggaccgcaacgggccttatgcctgcctgatgagtattaccctgaacttacaataa

SEQ ID NO: 143794 - DNA, 318 bp, Enterobacter cloacae
atgacccacatcatctggggcctgcagcgggctatcacgccgcgcctgggagcccgtctggtacaggagggcaaccggctgcactacctggctgaccgggccagcatcaccggtatgttcagtgacgccgaatgccggaagctggatgacacattcccacactttacccgccagatggaatcgatgctgaccaccggtgaactcagcccccaacatgcccactgcgtcaccctgtaccacaacggttttacctgcgaagccgacacccttggcagttgcggctacgtatacatcgccatttatcccactcagcgttaa

SEQ ID NO: 143795 - DNA, 432 bp, Enterobacter cloacae
atggaagcatggcaatacaacgaagattggagtgagaaggaattaacaaacggtagttatgtaggattcgtgtatttgttccaatttgaagataacacaagctacataggtagcaaacagatgtacaagagagttaaggacattactaaactaaaagataattcaatagagaacggatggcgtgagtacagttcaagttcaaagatagttaattacaagattgaagaaggggtgaattatactcgaaccattttgtgggctttcccttcgatgaaagaaacactttttgtagaaacagcattaatcataaacgaaggactaaaaacgggtaatctaaaccttgctgtaatgcataaggcaagattaccaagtgggaaagatgctgtacgtattcgcggaatccttcaatcattatatgaaatactcaattaa

SEQ ID NO: 143796 - DNA, 609 bp, Enterobacter cloacae
atggcttggagaaacagcaatagccctagtgatatgaagcgattcataaacaagaatagcccaaagataggacaagaatttaagaaagaattaagtagccgtatgcgtattgttacacagcacattcaaagaaagattaataatgatgttgcgggtggtggtgtcgcgtttactggaaagagtatgtactttaactttagaaagataagtgagttcaatacagtgaaccaaatcattctattacctaatcaaacatcatatctaaagtacattcttgatccagcatataaacgtgttaatgaagataagattataccgtaccagaatgctaagttaactaagcaaggtaacattacacagctacgttcaagaaccaagagtgataaatacaaaaaggtgaagagtaggaacggtaacatgtacttaatcgacactaccaagaaatcctctaaacgtaatcctaaactggcacgtgaacaaagggtgattggttattatggttccgttggtagaaaaccattgtttgatttctatgatgaaaccgagaagcaagtaatagaacaattaagaacattacgcggtacgtttgattaccgttggaggaagtaa

SEQ ID NO: 143797 - DNA, 525 bp, Enterobacter cloacae
atgctgtggagtaaaggactgggtgacctgattgaagccaaaaaaatactgagtaataaaaatattcactttacgctgaatgttgccggtattttagttgagaatgataaagacgcaattccgctggcgacgatacagaagtggcaaagcgaaggcgtgattaactggctcggtcattgctctaatgtatttgatttaattgaagaatcaaatatcgttgctttgccgtcggtctacgccgaaggcgtaccgcgtatcttgctggaagcttcctctgtcgggcgcgcttgtatcgcttatgatgttggtggctgtgatagcttaattatcaataacgataatgggttgattgtaaaaagtaaatctgtcgaggaattagcggagaaactcggtttcctgttggataacccagaaacgcgcgtcgcaatgggtatcaatggcagaaaacgcattcaagataaattctcgagtgtgatgatcattaataaaacattaaaaacatatcgtgatgttgttgaagagtaa

SEQ ID NO: 143798 - DNA, 1161 bp, Enterobacter cloacae; identical to SEQ ID NO: 31911

SEQ ID NO: 143799 - DNA, 924 bp, Enterobacter cloacae
atggttaatcagataaaactcgtatcaccccgccagggaaacctccagttatttcctgtaaaagaggttgaagtagaaggtgtggcaatgggagttcttaacgatggaacgccatatcttaccggccgaggactggctgaaatgtgtggtgtgcatcatagtgtaattcaggatatctcttctgattgggctagcgaacgacttaaacctcgtggaaaaaaaattgacaccatactccttgatcagggtatagatgttgactcactttacataccatcttcagaaactaaacgggaccattatccataccctgactatgtttgcatggcaattcttgagtattatgcgttcgatgcaagccaagcaaacaacgccacagctctaagaaactatcggcttttagcaagacaaacacttcgtgagtttattttcagaagtgttggaatagacccaagaaatccagtcagcggcgcttggaagtgcttccaagaacgcattatccttaacgataaaataccggccggatttttcagcgtattccgcgagatggtggatatcaccgtgccgttgattaatgctgggtttgaattgggacctaaaactgttcctgatattagcgtcggaactaggtggtcaaatcactggaaacgtaacaaactgagcgaaaagtacggggatgtgcagaaacatcctcacgtatatccagattggttcccgcagagcaaggccggtaatctccctgccaacatttatccagaagaggctctgggtgaatttcggcgctggctcagggaagagtatgtgccaaaaggatttaaagagtaccttgctgataaagttcagcaaaaggttatagaaaatacgaaagcaatcgaggttttagaaaacctacaaagacccgagcttgaacataaaaaacactga

SEQ ID NO: 143800 - DNA, 600 bp, Enterobacter cloacae
atgactatattcgataactataaacatgaaaataacattaagatacatccatcatcaaaaatatccccagatgttacagttagtattacaggaagtggccataccattgaaattggtgaaaatactgttttacgcaacttaaaaattaatattagcggaaaaaataattttttagttatcaaagataattgtagcatcagagggacactgcaccttcgtcaaactggctctaaaataaccataaattcttttactacaacggtatcatcccatatttttagcatggaaggttctgatatttcaatcggaactaattgcatgctctcaagtggtgtatttataaggaactccgatgagcacccaatatatgatatcgaaaccaatgaaagaatgaacaacgcacaagcagttattgttggcaataatgtatggataggagaaggtgctaccgtaaacaaaggaagcgctattcctgatggctgcataataggcgcaaagtcttttgtatcgaaaaaattaaagcgtaaaaatgctgtctatgttggcgtgcctgttcaattaattagagaaagcgttaaatgggagagaacgtttcgctaa

SEQ ID NO: 143801 - DNA, 1431 bp, Enterobacter cloacae
gtgccagccggtacatacttagttaatgaaagcttaaaaggtaaattttgggggccgggaaaattaatttttacgaagcaatcagttccggttagcttatgtaacccagcgcaagattttaaaaatattttcttcggttttgattctggcacaattttcgactcaaattcatcagaaggacaaatagttagtattgggcccggtacctgccgaaatgttatgacaggaaataatattgttgctatcggtagcggtgttttatccggtgatactttacaagataaattaacttcaaatttaccgtgcaatggaaacgaacttgttggaataggggttaatgcgttaaaaaaaggtatagacataagtaactgtattggtataggaagagatgctcttaatgaaaacaagcatggaaaatataatatagggattggttcttctgcattacagcaactccatactggaaatggtaatgttgcactgggtagggctgctggaatgagagcaggtatacaagcaaataataatggaaatagagaaacatataaaaagattaatgggttaacgcttattggcaccaatgcaggacgtgaaattacccaaggaagttataatacttatataggatatggcaccggaagaggcgtaacatcgaagctaaactctttcactggcacatctacaggaaataataatacagccttgggggcttctgctttagcgagcattgaaaatgctaataataacttaatgcttggtggaggagctgggagggatttaaaaagtggaagtggcaatgttttcttagggtttcgtgcaggagcttctttatcagattgcaataataaacttatcataacaaatgatgagagcttcgaatttatttctggagcgatgaatggtgccttggacaaagaaaatattataactattgatgccaatatcgtaccagttaaggactctgttagaaatttaggctcagcgcagcggagatggtcacaggcgtatttatcaacatccagtatcagtctctcggatcagaatgctaaaactgatattgaagatattaatggaaaagaaagattggttgctattaagcttaagggactgattaaaaaatacaaattcaaacaagctgttgcggaaaaaagcgataaagcccgttggcacttcgggatagtagcacaggaggttgcggcagccttcaaagaatatggtttgaatccacatgattatggcatgttttgttatgatagctgggatgatgtctacgaaccagttttcagtgagcgggaggtcacggacgaaaatgatggtacatctaaaaaagaaagatatcaaacagatgagagggagatttctgtaccagctggagaggtatatggtattcgatacgatgaacttctttgtttcattattgcggccttataa

SEQ ID NO: 143802 - DNA, 1320 bp, Enterobacter cloacae
atgctgcaaacaaccattaatcgtcttaatggtattgcatgtgaaaacccgattgtgatttgtaacgagcatcaccgttttattgttgctgagcagttgcgtcagcttgataaactaactcagaatatcattcttgaaccaacaggaagaaatactgctcctgctatagcattagctgctctaaccatcttacgtactacgcagtctgaggattctcttattcttgttcttgctgcagatcatgtcatcaagaatgaagatgcttttcgtcaagctgttagtagtgcaatacctcttgcagagatgggaaagttagtcacatttggtattgttcctaatcaacctgaaacggggtacggttatattcgtcgtggtacatgcgtatctgaaaataactttaaatttgcctttgatgtagctcaatttgttgaaaaaccagatttggttacggctaaggaatatattgccagtggtgattattactggaatagtggcatgtttttgttcagcgcatcacgttatttggaagagttggcgaaattccgacctgatatattggccgcttgcgaagaggcaatcgctggcgttgaccctgatctggattttgtcagggtagacgaacaggcatttctggcctgtcctgacgagtcaattgattatgccgttatggaaaaaactgctgatgcggtggtcgtgccaatgaatgcaggctggagcgatgttggctcctggtcttcattatgggatatcagtgataaagatctcagcggcaatgttcatcatggcgatgtcatcagctatgcaacggaaaatagctacgtctacgctgagtctggcctggtgactacggttggggtgaaagatctggtggttgtccagaccaaagacgctgtgctgattgccgatcgtaacgccgtgcaggacgttaaaaaagtggtggagaagatcaaggcggatggccgccacgagcaccacattcaccgcgaagtataccgtccgtggggcaagtatgactcgatcgatacgggtaatgggtatcaagtgaaaagactgactgtgaagccaggtgaaggattgtctttacagatgcatcatcaccgagctgagcattggattgtggtttcaggtactgcccaagtaactttgggtgaggaagtgaaattgctccgagaaaatgagtctatctatatccctcagggagttcgtcactgcctcgaaaatccaggaataatacctcttaatatcattgaagtgcgttccggaacgtatcttggagaagatgatatcgttcgttttaaagatcgctacgggcgaatctga

SEQ ID NO: 143803 - DNA, 666 bp, Enterobacter cloacae
atgaataatatcaatttaattagaagtgaaacaaccaaaggtattcatgtaattaaaggtaaggcactcattgatgatattttgagttattctattttgcatttgtcgcgccacattcaattttgtcacgaattctttttgaagaaacatagccttgtcttcataaatacccctaacttctggactgaattgccatcgttagaagaaaagattaaaagaagagaatatgaagttgttattattttagtggatagtgattatattgatttttatcgctcattaataaatcacccatacgtcattgcaattccgatgagtgaatctctggaaaacataaagagtatgatttccagagaaataaataaatacaccccacaaagagcaaataaaaaagaaaagctaacaccaagggaaaaaaatattttgtatttaacctctcttggctggagcaacaaagaaatagctctcatcttagacgtttccaataaaacgatattctctcataagagaaaaataatggataaagttaatttaaaaagacccaatcaaatgaataaggtcttatcggaattaatgcctgctcagcatagaaaaaacataaccactaacatctgcgatattgagggagtggatgggggcaaactagctccccacccactagtttga

SEQ ID NO: 143804 - DNA, 492 bp, Enterobacter cloacae
gtgtgcctggaatttgatgatgaagagctacttgcctcgctggaattaactcattatcaggtgtttaaaaaccgtgtgctctataccaaagaggattccacggttgaagcccggaacgaaatcctcgccttctttcatcagccacaggttcaggaggcaataaatgcagatgtaatgcatgagatgattcaggcaaccagactggcacacagcctgccgccttttttcaagaatgacggtttcaaagaggagcaggagttcaggatggtaatccttccggacagcccttttgagggtgtcaattttcgtgtcaatgacagcggtctgataccatatctgatcattaaagcaaaagataagctgccactgacaaacgtcagaattggtccccgcagtaacagagcaatgatgatggacgggatttcattcctgttgcagagcagggggtataccagtacacggatttcgtttactgagacgccgttccggtaa

SEQ ID NO: 143805 - DNA, 741 bp, Enterobacter cloacae
atgttgaataaagtttcacaaattaatttggccaaaatactggctgaaaaatttaacgaaggtgactggcaggagctgtttgctgttacagattgtgaagacgttccggaaggactaaatcaattctaccggcatgttcactgggacaaccctgagctgaaaggggtggccatctcagccatagaaagcactctggccagggacgctgataatctttctaagatctgggcgctggataatgttcaacgctttatcagcattgccaatactgagttattcaatgaaataaagaacattgtgaatcagaacgggcaaagaaatgtttcggcagcaccagtgaaaaatgtaaatgaaaacatttaccaggccttagaagatgcggaagtgttgcttaaaaataatgggccacaccgggcatatgatcgtgttcatacagctcttcatgcttcattaagacaaatgtgtgccaaccatggaattgcgaccaatagtacaaatgataatgttccaggcttgctttccctgataactgcacatctcaaagacctgcctgatgatggaagaaatgaagatgtttttaaaatgttgagatcatctgccgcaatacttcatgggatcaataacctgcgtaacaattacagcatggcccatcctactgaaactttgcttaatgaagccgatgcgcgttttgccataaatctggttcgttccattatgacttatattgatgaattgctttaa

SEQ ID NO: 143806 - DNA, 381 bp, Enterobacter cloacae
atgggaagtttatctaaagcattactcatatcgcttatatacacggcgatagtgattattcttgatgcagttgccatctactatttcaagctgagcgccccgatcattgtcgtagtgacgacgtttttgatgtgctgcatattagcgtttgaatacgtggatgcgacaaagcgctcagaacggaactttgctgagcgccgtaagaatcaggcgcagggggcggcattttcgatgatgtgggataccctggattcagacgctaaacaacgtttttaccaaaaagtcgatgaggggcgagaatccagcgagtttaagtccagataccagctattacagaacgaaattcgatattgggacaaagagatagaacggctacggtaa

SEQ ID NO: 143807 - DNA, 684 bp, Enterobacter cloacae
atgcatacttggcagaaaaatcgagcgattaggaatagcgatctcatcctttgtgtctctcaaaataccgccaatgatttaatgagattttgtcctgtatctgaaaataaaatccgtattgtccataatggtgtttcggaaaaatattatccaatagataacactattaaaactaacgaagtgttgtttgttggtgccagaggtggttataaaaacttctccatggctgtcgatgctctcgcgctttctccttcacttgtattgagtattgttggtggcggacagctaacaagtgacgaaatagcgcttctcgaaagtaaaatccctggacgctaccgacatcttgggcgtgtcactgatgaagaactcaatggaatttataaccgtgtgttctgtttactttatccttcgttatatgaaggttttggcatacctgtaattgaagcgatgcgcagcgggtgtgtcgtaatcgctgttaatgtttcctctattccagaagttgctggaaatgctgctgttttactggaacagcctaacccagccacaatttctcaagctcttaacgatatacaaaatactgcgctctaccatcaattacgtaatgaaggctttattcaagcgaaaaagttttcctgggaaaaatgttataatgataccttatctgcttataaggagctcttgtaa

SEQ ID NO: 143808 - DNA, 603 bp, Enterobacter cloacae
atgtcttttttacgtcggtacggtatattcggtcttttacgtttatttatagataaattattaacttttctaatttgtcgtgatgctcgcattatccggcatccttttgatatccgcggtaaagataagatcataataggtagcggttttacaaccggacgttactgccgtcttgaagcgcatggtgaaaagcaaacacctgctttgattattggtactgattgccaaatcaatgattcagtacatattgttgcaggggaatgtgtcagtcttggagaaaacgtattgattgcaagtagggtatttattacagacttaaatcatggtcaatatgccggcaacaatcattcgcatcccgatacaatctgtagagaaagagagttacataccgatccagtatatattgaatcaaatgtatggctaggtgaaggggttgtagttttacctggggtacgtattggtaagtcttcaatcataggggccaattcggtagttactaaaagtattcccgaatattcaattgctgttggtaaccctgttaaaattataaagcaatttgattttgataaaaacgaatgggttaagtatgatggcaaaaattaa

SEQ ID NO: 143809 - DNA, 243 bp, Enterobacter cloacae
atgctcggagcgcttttcgacgccggtgtagccggcatcggcgcagacgacgttctcgtcgccgtgcagcagcttgtcgacctgggtgacatccgccacggtggctgccgtgcccaccacgctgtgtaccagccccgattcatcatcaacgccgatgtgcgccttcatgccaaagtaatactggttccccttcttggtctggtgcatttccgggtcgcgcttgccgtcctggttcttggatga

SEQ ID NO: 143810 - DNA, 762 bp, Enterobacter cloacae
atgacaattcttattaaaacgttaaaaatcatggcgtcaggtgttgttttcgtttcaggtttaaccaccgcctccagtaccgtgtatttcttgccagaggcaaaatcaatgggtgtcgccagcagcgacaaaaacgcactgatgtttctcgggatggacagggatgtaaatctgaagggaatatgcttcgcgatgacaaagcaatcatcatcaatcgttccgctggtagatatcactgctacaactgataacggcagattcacgatgcacgggttacgccctaatgtcagtgattctaaagaagtcgcttgttccttcgggtccgaagctggtgatttcttgactgccatttcgaagtcaacaaccgttaacgtgaagctggacttcaatggcgagatccgcaattacagtttcgacactacagagttcggaaaggtattgactgcgaatgggcaagccgtgggggaaaaagcagctaaagactacgctcagggagtacgtgcacccgttttctatagcagcggtagcgaagctcccaaaaacaatgcagtaacctcaaacgtcgatacacacagttataaagcaagcgatgagaaacttaattcggtctggaaaagccttagccctgaaacccgaaaacgattgcttccttctcaaagagaatggataaagcacaaatccggctgcaataatgaacagaaatgtcttaccgacatgacgaacaatcgcattcgtgaactggagtctgaatatggaaaataa

SEQ ID NO: 143811 - DNA, 981 bp, Enterobacter cloacae
atgagccatcaactcaccttcgccgatagtgaattcagcactaagcgccgtcagacccgaaaagagattttcctctcccgcatggagcagattctgccatggcagaatatgaccgctgtcatcgagccgttttatcccaaggcgggcaatggccgacggccctatccgctggagaccatgctgcgtattcactgcatgcagcattggtacaacctgagcgacggtgccatggaagatgccctgtacgaaatcgcctccatgcgcctgtttgcccgattatccctggatagcgccctgccggatcgcaccaccatcatgaatttccgccacctgctcgagcagcatcaactggcccgtcaattgttcaagaccatcaatcgctggctggccgaagcaggcgtcatgatgacccaaggcactttggtggatgccaccatcattgaggcacccagctctaccaagaacaaagagcagcaacgcgatccggagatgcatcagaccaagaaaggcaatcagtggcactttggcatgaaggcccacattggtgtcgatgccaagagtggcctgacccacagcctggtcaccaccgcggccaacgagcatgacctcaatcagctgggtaatctgcttcatggagaggagcaatttgtctcagccgatgccggctaccaaggagcgccacagcgcgaggagctggccgaggtggatgtggactggctgatcgccgagcgtcccggcagggtaaaaaccttgaagcagcatccgcgcaagaacaaaacggccatcaacatcgaatacatgaaagccagcatccgtgccagggtggagcacccgtttcgcatcatcaagcggcagttcggcttcgtgaaagccagatacagggggctgctgaaaaacgataaccaactggcgatgttattcaccctggccaacctgtttcgggtggaccaaatgatacgtcagtgggagagatctcagtaa

SEQ ID NO: 143812 - DNA, 381 bp, Enterobacter cloacae; identical to SEQ ID NO: 130342

SEQ ID NO: 143813 - DNA, 171 bp, Enterobacter cloacae
atggcgggcgaggctgccgtgtccgactccatcagcctggcatgggcagcctccctggcatcgatcgcggtggcggtcgtctacaagcgtgatccgcggtcggccacgccgtgggggctgctcatcagcagcggcactgccctcccgctcgctggccatccgtttgcgtga

SEQ ID NO: 143814 - DNA, 531 bp, Enterobacter cloacae
  misc_feature (502)..(511): n is a, c, g, or t
atggaaaaaaagaatcaatggaataccggctactggatcgttgccctcctgctgttgctgctgttgctgagtttgcagagctactggcagacggcgaaaaccgtcgagccggtgccctacagcgagttcgagaaggcgctggacgaggggcgcgtggccgaagtgctggtgtcggatcgtacggtgaccgggcgcctgaagtcgccggacagccggggcaagacgacgatcgtggcaacgagggtcgaacccgatcttgccgatcgcctgtcgaagtacgacgtaccctatgcccgcgtgttggagagcacctggctgagcgatgtgctgtcgtggatcctgccagcggtatccttctttggcgtctggttcttcctgttccgccgcttcgccgagaagcagggcatgggcgggtttctcaacatcggtaagagccgcgccaaggtgttcgtggaaaagaacaccggtgtgacgttcgccgatgtggcgggggggggggtgnnnnnnnnnnggggggggggggggggatga

SEQ ID NO: 143815 - DNA, 918 bp, Enterobacter cloacae; identical to SEQ ID NO: 38633

SEQ ID NO: 143816 - DNA, 543 bp, Enterobacter cloacae; identical to SEQ ID NO: 118929

SEQ ID NO: 143817 - DNA, 618 bp, Enterobacter cloacae
atgattcttgcagtggtattagcctacgtaatttcagcaaaacatcttttaccagcatttatcattttttgtttgtttgcgatccttgtttatatatttatcgaaagtgatttttttgtctattatcgagaacggttggatttatccagtgatactaataatttatctgcacttgttctcatgcagggatgggataatgcgtttttgaccttgcaccagagtccaatcggtgcaggttttcagcaatatggtatatccactatatacgggaatatatctaataaaattttcgaaatgcttaatatttatattaatcagttcgatggcggtgcaactgcgccaaagattattggtgaatttgggttttttggtattctcatcgtaatgctatatcttgtgggatgggtcagagtttttatagcagtgagacgagaacgctttaatatagataaaaagacattgcttttttccagtttttatttagcaagcttccttgaattctttattcgaggggctggctattttacacctgggatgttctttttaattgtttcggttttatatttcataactaataaagttgtgcgaaaagagatttcttatgaaactagtcattga

SEQ ID NO: 143818 - DNA, 303 bp, Enterobacter cloacae
atgccgctcacgctgatgcaaaaagaggtggcgtccgagatttgtgcgctctttgaacgctacggcgttgcgcctcagtccgtcgtgattgagattaccgaagagcaggccttctcaaattcaggcagcagcatccacaatattcagcaactgcgggattacggtttccggattgccatagatgattttggtaccggctacgccaactacgagcgcctcagacgcctgcaggcagacatcattaaaattgacggctgtagattcaatctgtcaacgcaacacccctttcaattatctctttag

SEQ ID NO: 143819 - DNA, 219 bp, Enterobacter cloacae
atggatgatatcaacaatagagcaacaacctgtgatagaaacattatttccaatttttatatggtcttttgctacgatatgcacatactgttcgatattaacattatcaccgatatcaataacaactcccttgccactattcaaaacctcaattctggcaccattgcgaataagaacatttcgacctatcgcaacacgcgaagtattcaccataagtaa

SEQ ID NO: 143820 - DNA, 1209 bp, Enterobacter cloacae
atgactagtaatcattggctggaccaaatgacagagtggctcaacgaagcccgacagatgcaccaagatcgcaacaaaaaagatgctgttgagtttaatgtctttcggtatatcactgctgacgaaaatggtctttcacgcatcctggctgacttgctcgacgtgcgcggtgttcatgggcagcaagctctctttctcagcacttttctggatttaattgggaaaagtttatgggatgcaacatcttgtcggtttgttgagtgtgaacagcagactgatgccctgggtactaaacgtcgaattgatatcgtcgtccaaggggagcgatggatacttggtatagagaacaaacccagtgccgccgatcaacccaatcaggttttggactatctccacgagctaaggaagcggcgcagcgcactaaacgaaacgctgctgatttacctgactcctgaagggagcaagccaactccgtttagtattgatgaacaccaatgtgacgccgcacttcagtctggcgagcttgtcctcctgtcatatcaaagcctcgtcgtttggcttgaagggctgtgcaaaaatgatgatataccttaccgtttgcgagtctttctattcgatttgcagcgttttatttcggtgaatgtgctgaattgcagggaggggaaggttgtggatgttttgctagacaagatctttactgacgaatcaacgctggataccacgttaagtctattgagcctgcaaaatagcatttatcaaacgctggctaaaaaagcgacttcggctttgataccaccagcaggctgggaggtatgtcgaaaattatatccagattacgggattggattgcgcccaccagaggccattggctggcactactgtatcgaacctgccaaaggaagttatcaggattggatttatggtattaagttggatgatgcttcgaatattaccgaatcagctttactggctgcacaacagctcaaaatagatttccctacaggggcgaaagcgagcgcctggtggccatggtggcgtagctttaatggatatttgtcgcatgaccttgaccccattgaatacagggattggctttcgagtaatcgtgcatggcttgaaatgaacaatggtgagttctccaggcgctgtgtcgatttgtttattcggttacatgagtcggttagcagtagaagtggttctaacgaataa

SEQ ID NO: 143821 - DNA, 2442 bp, Enterobacter cloacae
atggctggcgtaaacaaggctcatttgactgaaacggacatcattaccaaattcatcctgccagcggttaaagatgcaggctgggacatgatgtcgcaagtccgtcaggaagtgaaactccgcgatggtaagattgtggttcgtggcaaactggcctcgcgtatcaaagttaagtctgctgacattgtgctctaccacaagccgaatttgccgctagcggtgatagaagccaaagccaatcagcacgccatcagcaaaggaatgcagcagggtctggattacgccagcctgcttgatgttccctttgtgtttgcgaccaatggcgacggttttgttttccacgataaaaccaacccgcaacagcttgaatcagaaatcaccctcagtgattttccaacccctgaacaactctggcagaaatactgtgtctggaaagggtttactcaggaacagctgcccgtcataagccaggactactacgatgacgccagcggaaaatcccctcgttattatcagatacaggcgatcaaccgaacggtagatgctgtatcagcgggtaagaaccgcattctactggtgatggctaccgggacggggaaaacctacaccgcattccagataatctggcggctgtggaaagcgaaaaacaaaaaacgcattctgttccttgcagatcgaaatattcttgtcgatcagaccaagcgcaatgacttcaagccatttggctcagcgatgaccaaagttaccggacgtaccgttgatcccgcttatgaagtgcatctggcgctgtaccaggcgatcaccgggccggaagaacaccaaaaagcctataagcaggttgcaccggatttctttgacctgattgtcatcgacgaatgtcatcgtggcagtgcctctgaagattctgcctggcgggagatcctggaatattttggcagcgccacccagataggcctgacggcaacgccgaaagaaaccgaagaagtctctagtaccgattactttggtgatccggtttatacctattccctgaaagaaggcattgaagatggcttcttagccccgtacaaagtggtgcgcgtcgatatcgacgttgatgtacagggctggcgaccggttaagggtcagttagataaatacggcgaagagattgaagaccgaatctacaacctgaaagattttgaccgcacgatggtgattgatgaacgtaccatgctggtagcgcagaccattaccgactatttgaaacgtaccaacccgatggataaaaccatcgtcttctgcaacgacatcgaccacgcagcccgtatgcgccaggccctggtggtactcaacccggaacaggtgctgaagaacgaaaagtacgtgatgaaaatcaccggtgatgacgatattggcaaggcgcagctggataacttcattgaccccaaaaaagcctacccggttatcgcgactacctctgaactgatgagcactggcgtcgatgcgcaaacctgtaagctggtggtgttagaccagaacattcagtcgatgactaaattcaaacaaatcatcgggcgcggcacgcgtattaacgaaaaacacggcaagctgtggttcaccattctcgacttcaaaaaagcgactgagctgtttgccgacccacgttttgacggcttgccagaaaaagtgctggtggtaaaacctgacgacatttcggaccctgcatctgattttaatgaccaactcgatgcggaagataacgtggacggcgatgataacgtcgtcaatgaagcgcgggaagagagagccgaatacaaagtgaaccgcgacaagttcactggaaacggtgaattccacgacgatgacgaaaacaaagtccgcaaattctatgtgaacggcgtggacgtaaaagtgctggctaagcgcgttcaatactacgatgccgacggcaaactggtgaccgaatccttccaggattacacctgcaaaacgatgctcaaagacagcgaatacgcctctctggatagcttcgtgcgcaaatggcaggaagctccccgcaaacaggtgatcattgaagagctggaacaactcggtatcttgtgggatgtgctggccgaagaggtgggaaaagatctcgatccgtttgatctgctctgccacgtagtgtacggtcagccgccgttgacgcggcatgagcgtgccgccaacgtgcgaaagcgtaattatttcaccaaatatgcagaacccgcacagcaggtgctgaacacgttgctggataaatacgctgatgaaggtgtgcgggaaatcgaagacgtgcaggtgttgaagctgaaaccctttgattcgatagggcgtccgattgaaatcatcaaaacccgctttggtgataaacaagcctatgagcaggcagtgaatgaactggaaaacgaaatctaccagttaccgccgcgcttcgcctga

SEQ ID NO: 143822 - DNA, 201 bp, Enterobacter cloacae
atgattacacaaatctatcctctctcaggacacgctcgcccacgagctaccgctgactttttaaaagttagcaccgtcaccctctggcgctgggaaacaagcaaacctgatttcccgaaatcaattcgtctctctgaacgcgtcactgtttacgatgcagcagagatccgcgcctggctggaagcgaagaaacacaactaa

SEQ ID NO: 143823 - DNA, 870 bp, Enterobacter cloacae
atggatagcaacgtttggaaagaaaatagaattgcgcctttagaatactgctcattcgaaagagctgctaagttgctcaattgcgaatgtgaagacctaattcattggaataaaataggtgctatatcgatagcatttaagccagaaaatatggcaggttctttttctgttcaattacgtgaacagatagatagcactgaaatagaaaaatacaataaatctcaatatatcatgcacgatcttggagtttatggttctcaatttctacgaaatttgggcgatgcaaatgacaagggctatattgcatcaattaatgaatttcgatttcatggaaacattagtgacttatggattataaccaatgggtcagtggatgaaaaaaacagcataaccataacaaaatcattcagcaccggatataaaacactaagccctgcaaacattccaaatgacataacctccgcgttgtttttttaccaaggaacgaaagatatcacccttgagttaaaagacctcctaattacgagaagcgatatcgaaaaaatatggacatcggctatctcaggtaaaccaatggagagttatttcacaagcaagacgcgtgaaattaaggttattcctgtcagctcagtttcaatagcacaaactgacagacacgaacacaaccggcaagaagttgaacaggttgccatgaaagttcgtgaacattatccggatgaatgcactaaaaatgggaaattactactcaataaatgggtaaaagccaccctagcgcgtaaaaatgattatggcggtttgaaacttagatccgagagaaaaatttccacaatacttagcggaatcatcaaagcagaaaaagctactgagtaa

SEQ ID NO: 143824 - DNA, 318 bp, Enterobacter cloacae
atgagcaaatttacggcattaccagtagaacgcgaccaatacggctactggactcaccccgtctatgagcaattttgcgatggtcgtgaatttatctcacctgatgagttcaacgcctggcttgataaaaacggcctcgaatggacggtagtttaccgggatgaagaagacatcgatcctgaagttgatggttacgatatttcagcctggcagccagaatcgccagccggtgaaggttggtttgtcggttcaattcacaacaccgaagatggcgcggtatgcatctggttacgtaacgttgaaggcggtgcagcatga

SEQ ID NO: 143825 - DNA, 255 bp, Enterobacter cloacae
atgaccgtatttgaatatctccagggccacccgaacgccaccagcggtgaaatcgcaagggcgatgggtaaaaagacgccagccgtagccagcgcactatctcagctttatgcaacagggagaattgttaagtctggcgcacgcggtgggataccgacataccgcgtcaatgatctgccgtttggatgcagcaataacttaacgctgatatttaaccagcttctgcgaaacgtccgcaaaggagcagcccaatga

SEQ ID NO: 143826 - DNA, 177 bp, Enterobacter cloacae
atgcgccgcatgaaggtaaaagaactcgtggcggaggcgtttgcctccgtggctgaattgccaccaaagcatgcatcgcttatgcgcgaagtcgctaccaggcttgaagctacgttcgcagcattaaccgaatcattggcgcaactggaacaggaacgtaaaggtaaaacgcaatga

SEQ ID NO: 143827 - DNA, 540 bp, Enterobacter cloacae
atgagctacattcagacattatccggcaaacactttaattacctcgatatccaacaggacgatatcgtcatcgaggatattgctactgcgctgtctcatatctgccgttttgctgggcatcttcctgagttttacagcgtcggccagcatagcgttttaaccagccatctcgttccgcaggagtttgccttagaagcactgcttcatgatgccgccgaagcctacctgcaagatattccctcaccgcttaagcgcctgttaccggattaccaggtgatcgaagctcgcgtagacgctgctattcgccagaaatttggcctaccgacggagcaacacccaacagtgaaatatgccgatctggtgatgctcgccagcgaacgccgcgattttgagattgacgaaggttccgtgtggccatgcctcgatggcgttgtcccgacggacctattcatcatcaatccagttcgtccaggccagtcatacggcatgttcataaatcgctttaatgagttgatggagcagcgtcaatgcgccgcatga

SEQ ID NO: 143828 - DNA, 828 bp, Enterobacter cloacae
atgtctcagttagacagcggcaccttcaagcaggtcaaagacctggtcctttccggttatcacctgaatgatattcatggcctggcttgcccgaccgcattactgccagagggtactggcgttgaaagccttgagcgcttttctctggaacgtttccgctttcgtggcgcaatgaccacaaccagtattgacgacttcgcacgttattctaaaggttatgccagcgccagcgagccagctcgttgcttcattgacgctgacaacatgaccgcccgttcagtgttcaacatcggcaccctggataaccccggtcacgccgataacgttgcttcaatcactctgaagaaaaccgccccgtttcgcgcgctactacagatcgatggtcagcgtctgaaacaaaagcaaatcgctgaatggctggaagactggagtgattacctgctggcgtttgacgctgatggtaagacgatggagatttctcaggcggctcaggccgtgcgtcgtatcactatccaacaagcaacccagcaggatcatgaaactggtgatttcgctggtaaaaaatcactcatgcaaagcgtcgaagcaagcagcaaagacgtaatgccggtagcgttcgaattcaaatgtgtgccgtatgaaggtctgggcgaacgccgctttagcttgcgtaacagcctgctgaccagcgatgaaccctgctttgttctgcgcatcgtccaacttgaagcccaggaagaagcaatcgccaacgaattccgcgatttactgatcagcaagttcgacggtgaatcagtggaaactttcatcggtaactttaaagcctaa

SEQ ID NO: 143829 - DNA, 1053 bp, Enterobacter cloacae
atgaaaaatactgtaaatataaacagtgttgagcttgtcaacgctgactgcctgcaatacctcgcaaccctcccagataacaccatcgaccttattgttacggatccgccttattttaaggtgaagccgaacggctgggataatcagtggaacggtgacgccgactatcttcgctggcttgatatgtgtcttgcccagttctggcgagtgcttaagcctgccggcagcctgtatttgttttcaggtcaccgacttgcatccgatattgagatcatgatgcgtgaacgcttcaacgtcatgaaccacattatctgggcgaagccatcagggcgctggaacgggtgtaataaagaaagcctgcgctcttacttccccgcgacggaacgcatccttttcgctgagcattatcaggggccatataagccgaaaagcgacgggtttgctgagaaaagcaacgaggttaaagagcacgtcatggctccgttaatcacctactttcgggatgcacgagctgaactgggggtcacgtccaggcaaatagctgacgccaccggaaagaaaaatatggcgtctcactggttcggtgccagtcagtggcaactaccgaacgagcaggattacgaaaagctgcaggaattgttcactcagatcgccattgaaaagcaccgcgcccctgaactcaaagcaccgcatcaccagctggtggccacatggcattcgttgaaccggaaataccttgatctgctggaagagtacaaatctcttcggcggcatttctctgtgacagtagccgtgccctatacagacgtctggacacataagcccgtccagttctatccaggcaaacacccgtgcgaaaagcccgctgatatgttgcggcaaatcatcaacgccagcagcaggcccggcgatatggtagctgatttctttatgggctcgggatcaactgttaaagcagccattgaactgggccgccaggctatcggcgtagaactggaagaggatcgtttcaaccagacggtaagtgaggtaaggcagctggcaggggaataa

SEQ ID NO: 143830 - DNA, 339 bp, Enterobacter cloacae
atggcgacaaattattatcaggacggtaccaccatggactggagcaacagcacgggtaaggacgtgaaatccggcgatccggtggcggtcgggcagtttatgggcgtggcacacggggatatcccgaatggcggggaaggcgttctgcataccacgggggtctttgtactgcctaaagtggcggacgaaacctggccgcgtggcacaaaactgtatctgaacgacaccggactgctgacggcggtgaaacctgctgacgatgcgctggtagtggcgggcacggcgtggatcaccaacaacccgggcgaaaccgaaacccgcgtgcgcctggggttctga

SEQ ID NO: 143831 - DNA, 1641 bp, Enterobacter cloacae
atggctgagaaatattacagtattctgaccaacagaggtaaagagctggaggcgcagtcttctgcgaccgggaaacccgtcattattaaagactttgtggtgggtgacggtaacggccagcccgtaacgcctgatccggcattaaccgccctgatacatgaggtgtatcgttcgggaatttcagcgttgcaggtctcgccggaccaggcgaatcagtttattgcgcagctggtactgcctcccgatgttgggggctttgttgtgcgtgaggtcgggctgttaaccgatgccggcgaactgtatgccgtggcgaactgtgcagcaattgagaagccagtaagtggcatcagtgtgacgctccagtttcgccttgccgtgtcagaaacggcggatatcgaactgaaggtggcaaccggggacggcctgttccttcgccaggatgcaaacctgcgcgatgtgaaggatgccagtgaatcccggaaaaatattgggctgaaaggtgccgctgtactggatgttggtacaacggcgaatacagtcgccgccggggatgaccatcgtatcgttaatgccctgcagaaagaaaataatctttctgatgttcaggataaggcgttagccagagaacatttagaactcagggcggcggctgtcagggatgttgctgacaatgcagcgggtgcacttgtgccggttggttacaaaggaaactttagttccgactcgaatcatggtgcgattgattttgcgacttacccctttgtcgtcggtgaatcactgtttatagatacccgtggatgtaccaacaccccgccattcctgacgcaggatttttactatatcgatgtcgtatgtgctaccggccccgctcaggggggaagggtaaaccggccgttagtccagttcgtgagttacacgaattcgaagttgaccctcgccattcgtgaggatgatggcaacaatatcggctggcggtatttcagggcggtgcaatacgatgctgataataatacagttaccatcccgggggcgcttaaggctgccaatggcggtgcagagctattgcaaaatgcgattaatatccggggggctggtaacaaacacctctggtttttcaatgctgccggtgcagaaatggggcttgtttacgcctccgacgataaagttcttcatctacgtgcaggagcagggccgtcagtcgatgttcagtcaaatgggaatgtaatagccccaaattatcttgaggctaaggatgatattcactcagggaggaatatcagcagcgtggggttaatccaggccggagcaggtttgtatgacactcccggcgtgcggacttactctcctaacaatgagcctccttacccggtcaccagtgttaatggtatgcaaggggcggtcagcattgatttaagcccttatgctccgtctgcatgggttgctgccaatttcttgcaaggagggatccggctggcttcaccaggaacagcaaataatggtaataacgataataactttgcttatgcgccaaatggtgcagtcgtcactgctgtgcagcaacaatcaaattatacagcggttcaatatcgttatcttcaatacaacatcaacggcaattggtatacagcgcaggtggtttaa

SEQ ID NO: 143832 - DNA, 603 bp, Enterobacter cloacae
atgacaaagcaatcaggtatatttaaaaaatacgaccctttggtagagtttgaaagatatacggcagatgagattgccgaactgccacaagctgaaatggaacggtactttttagcaaaatgtccggggtttaatattgtattcctaaaggatgataacggtaatgattggtataactggttaaaaaatctttctgacaaaaatctcaaggtctcatataatccagatacaaaggaaataattcatttttcatacgatgcgagtgcaatttttcctatcaatcaggtcgttcaggagattgcacctgaagacgtgccgattgaatttttagaagcaggtgaaaatgcattaggtggggccttcattctagaatgcggtaaaatcacgcctgtacaagttgatattttcgaagtagcacttcacaaaaaaatggaattgttatcgcaggcaaacaatgtgatctctttgcttcaggatgcgatagaactagagatggctacagaagaagaagtctctagttttgatgagtggagaaaatacagagttctattaaatagggttaacccaaacgaacctgactggccgttaaaaccaacccaatga

SEQ ID NO: 143833 - DNA, 960 bp, Enterobacter cloacae
atggataagattaagttaagcgttatagtaccatgttataattcacgtgatttcattgctgaatgcctacagtcgattcttccttttttgtcgaatgcggttgaactaattgttgttaatgatggttctactgacgacagcgctgatatcattgagtgcactatacaaacatataaagataaactcatcacagttattcatcaagataatgcaggtatttccgccgcaaggaacgtagggatagaaattgcgaaaggtgaatatatagctttgttagattccgatgatttttttcactctgatttctggtctgaagtgttgcctttgataaatgactccaccatcgatatagtagagttcaatgcagaacaattcgaaggtgaaataaccaatatagttgaacatattgattgttcagttttcacaggaagagttgatatcgcctctgtgacagaattatctccagcattcaaaagatccaaatggtacccttgggcaagggtttataaagctgcattattccatgagtttgatattcaatttcccacaggccgactctatgaagatatgagcacagtcccggccatttatttgcatagcaaagttatttatggccttaacaaatccttaatctggtatcgctatcataaaaaaagcataacccaaactttcagacaaaaagatatagttgatttagtttacgcagttgaattactttcgttgcaggcaaaagataatgtagagataaaacgagtccttttcccaaccgtacaaagaatatacaatctccttaaatacatgttggtgaaaaacaaaggcgcaaaacttcctttcgcagaacagaaagctctgcgccgtgctttgctaagttttattggaaactttaaggtatctcgtaaagttcaaatattaatattgccgttgtacctaaatacgattgttcgctttaggaaaaaataa

SEQ ID NO: 143834 - DNA, 267 bp, Enterobacter cloacae
atgactggttcttctaatatggacaatattatcatcgcaggggcgcgcatatacttcccgcctgacaaccgattgccgaatgcctcaagtgatatgctcacctttgctgttgtccgtgatcctgacaccatcccggattatttgcttttcgttcataaagacggtcaatgggaacttgcctcgccccgttttttcaaagaagcagcccatgccatatccactgcaaccaaaattgcaagcagtcgtttcccgaacgttacctgctga

SEQ ID NO: 143835 - DNA, 246 bp, Enterobacter cloacae
atgcgtgtcgaaatcagtattgcaaaagagaagttctcgaagcttcccagcaaagctcccgctgcgctgcaggctgaaatggaaaggcgcttaagcaaggaataccaggatgttgaagttatcgttaaatcagccggaagcgatggcctgtcggttcttcggacggtcgataaggactccgccaagaagaaggttgaaaatgtactgaaagaaacatgggagactgctgatgactggttcttctaa

SEQ ID NO: 143836 - DNA, 441 bp, Enterobacter cloacae
atgtacgccggactaaaccagcagcttacgcagcatcaggacgatccgaatcgtgggttgagcacctctttcagcatgagccttgcggatcagagtaccaactacatgcaccaggtttacgccgcctcgctgcgctaccgcgggctgtttgacgcgcgaccggaagactggattggctttggcttgacctggattgatatgagtagccagtacgcccgcaatcagcgctatatgaacagcctgagcggcgtgtcggactataacgatccggcgtatcgtccggtgccgggccactccctgaacggcgagttttactaccgttttcgtccagtgccgtggcttgaactgcagccgggcattcagtactggcaccatcccggcggggtcagtcgcacccaggatgcctgggttaccgagctgaaaacggtggtgagcttctga

SEQ ID NO: 143837 - DNA, 2181 bp, Enterobacter cloacae
atgtcgtcttctaaatcagacaaatatagtgctgcgacaccgcagaataatgaaatcgatcttcttcagttgtttgctgagatgtttgataaccgggtgacgatcgcgtgtgtcacgctcctgttcacggtatgcgcggggatctacgcgttcagcgccacgccggtttatcaggctgatgccctggtgcaggtagaagcgaagcagagtaactcactgctcaagaacctgactccgttcgggtccgaactctcgccagatgtcgcgccggaacttttactccttaaatcacggatgattctgggagagaccgttgatcaattagggctgacgtacaacgccaggcgacgcgtttttcctgtcatcgggtctttgtgggaacacgtgcggggacgtaaatccgatgaaataacgatcggtgcgctgactattccccttctggaaggtaagccacaaacgcttttactcaccgtacaggaaaaagggcggtatcgtcttgagggaaaaacgcttcaagcagaaggcaccgtggggaaagcgctggttaaagacggaatgtcgcttctggtgacatccctcagcgcggtaccaggcacccagtttaccctcgaaaccgtcacaaggcttgacgcgatcaatgccattcagaacaggtttacggttgttgagtcggcgaaacagagcggtatgatcgcattaacgttaatgggtgaagaccccaccaggatcgccacggtacttaataccattgctgaaaattttctcagccagaatattgcgcgccaggaagcgaaagattcccgtagcctcacgttcttacaggagcaattacctaagatcagccgcgagctggatgaagctgaagcgcgtctgaatgcctacagagagcaacgcgattctgtcgacttatctctggaagcaaagtcagtcctagatcaggttgttaacgtggaaaaccagcttaacgagctgacgttccgcgaagcagaggtttcacaacttttcaaaaaggaccatcccacctaccgtgccttgcgggagaaaaaacaaacgcttgaacgcgagcgtgcgcgcctgaataatcgcgtctcaaccatgccttccacgcagcaggaaatcttacggctgagtcgtgacgttgaatccgggcgtaccatatacctgcagttgctgacgcgtcagcaagagctgagtatttcgcgttccagcactatcgggaacgtgcggattattgacccggccgtggtgcagccagagccgatcaaaccgcgcaaagcgctcattatcgtactgggtatgctgatggggttgatgctctctgccggcatggttttagtgcgctcagcctttaatcggggcattacctcgtctgaacaactggaagtgcaggggataccgcttctggcgacgcttccgcgctcggtatggctctggaaaaaaacgcacctgcgcaggagaaccctgtttgcttcccactggaagcacaagacgtcgaacgtcccttttctgcccgttgaccgcccggcagatatgtttgtcgaggcggtacgcgggctttgcaccagtctgcattttaccatgatggatgccacaaaccggattgtcatggtgtctggacccacgcaggactgcggaaagacgctggtcagtacttcactggcgtcgattgccgctcaggccggacagcgagtgctgtttattgatgcagatatgcgcaagggatatgtccacaatgttttcaaactgagcaatcatcggggattatcctgcgtgctcggaggagccgtgcagtggcaggaagcggttcaacgcgttgagaaaggcggttttgatgtattgacctgcggaccccaacctttacatcccgttgagctgctcatgaatgaacgcttccaggccgtgatgtcgcagatagacaaactgtacgacatcgtgattgtcgataccccgcctgtgcttgccgtaacggatgccttgctgatagcccgagcagcggcgaccacgctgctggtcgcccgctttggtaaaaccagcgtcaaggagatcgagaactgcctgaagcgtctgcagcaaatgggtgtgcaggtgaatggcgcgatcctcaatgatatcgtgaaatctgccgtgctttattacaactcgggatatagccattacgactacggttatacccaggagtaa

SEQ ID NO: 143838 - DNA, 1011 bp, Enterobacter cloacae
atgagagttactaaaattactgtttttgcgcttagcgttattttctctggttcaatgaatgtagctaatgcagctaatgtagacataaatcttaatgataatgtcaacaatccaggtacttctattcagattcagggcactgataacaccgcttataatctggataacattaatggggataacgtaaggcaagatgggcagatctataacttgcaaggtgatcgcgatcgtttgcaagacgagattgacgtaagcaaaggtaatatcagtactaacaccgctaatatttcctctcttcaaactacggtttctaacgtcgatcaggacgctaagttagctggtgcccttgctgataccgctaataaaaaaggtgttgcggcgttacagggcgtgctgactaacgtaactgcaattactaatattgaaactgttaacgctgtgcaagatagtcgccttgcaactgttgaagcgactaacggtatgcaagatggccgcctgttagctcttgagaatgcaccaaaaccaactaacggcgtagatggaaaagatggtgcgaaaggtgataaaggcgataccggcgcgacaggtgcacagggcgttgccggaattaacggacgtgacggagcgaatggtaaagacggcaaagatggaaaaaatggcatgacgaccaccgtgacacgaacgcaggtagacacggcaacacaggctaaagtcgctactaatagccaggctcttatggccgaggctcaggagctgcaggcaaccaaacagacattacaggcactgaataacaacactaaccagcaatttaaatcgctgcatgaggaagtcgataataataagaaggaagcaaacgcaggtatcagcggcgcgatggcgatggccggtttacctcaggtgcaaacgaatcagcgcgtaatgttctcggctggcggggcgacttacaacggtgaaagcgctttagcggttgggcctctgttaactttaacaaacatatggttgctaaagtga

SEQ ID NO: 143839 - DNA, 945 bp, Enterobacter cloacae
atgaaagttttagtgacagggggaactggttttctcggttctgctttagtcaaaacgctgaggtcggcaggtcatcaggtaattttcacttcccgtcgagacgaaaatatcgacaatgggatgtacaaccttggcgatatctctgcacaaacaaactggacaacccttctccaggattgtgatactgtcattcacacagcaggcagagcacatattcttaatgataaagccgaagatacgctgacagaatttcgtcgtgtgaatcacgatgccacgatgaaattagctcatgatgcaataagttgtaatgtgaaacatttcatcttcgtcagttcaataggtgttaatggtaattccacttcggggataccttttagtgaaacgacacctgccagacccacttcagattatgctatttcaaagctggaagccgaggaaagtcttcttaaagcatttactggtagcaatatggggataaccatagtgcgtccggcattgatttgtggtccaaatgcaccgggtaacattcaacgattgttaaaactagtgtcgcgaaatctgccactgccttttaaatcggttaaaaataagcgtgctcttgcttcactggacaatgttgtgagctttatctgcgaatgtgtaacgaatgagaagtcaaagaatgaactctatcttttggctgacgaagtgcatccttcaactgaagaaatgataacggcattttctaccgggatgggtatgaaagcgcgacttgtctatttccccaaaccaatactgaaaattttcctttctatactgggcaagaaaagtatatatgatcaactgtttggcgatctggaagttgattcaagaaaatcaagagagcagcttcaatggacgccacccgtctcgttacaagaaacgatggtaaaaacagcgaagtattttattgaaggtaacaaataa

SEQ ID NO: 143840 - DNA, 1035 bp, Enterobacter cloacae
atgttgtatctgggcattgtcgtttttgcattctttatatcatgcgcgttgacctggggtttaaggttatatgccatcaagaataatgtaattgatcaaccaaaccaaagaagttctcacagtgttcctacacctcgtgggggaggggtggctattgtattaacattgttagcttcattagtatggctggtccttacaaatcatataactcaggcaacatttttaggtttcttcgtgcctggcttattgattgcggttattggtttcctcgacgatcatggccatatcgccgcacgctggcgcttgttaatgcacttcatcgctgcagctatagggcttttttatctaggatcgttcccaagcattaatatgtttggctacgatgtttctttgtcatggtttggaatgatcctcggtagtatctatcttgtatggatgttgaatttatataactttatggatggtattaatggtcttgcaagtgcgcaagctattaccttttcgctttgtagtatcttgataataactatcaataactactctgattcatctgatgcaatgactatgcttgcattagcactcgctggatcggtcgcggggttcatcgtgtggaacttccctgtggcaaggatcttcatgggcgatgctggaagcggttttctgggtatcaccattgggctgatgatcctttattttgcaaagctggactcacgtgttctgatcgcagaactctgtctgatgggtgttttcattgttgatgcaactactaccttactgagaagattactggcgggtaagaaagtctatgaagcacatgcaagtcattgttaccaaattcttgcccgtaaatataagagccatgttcctgttactatggcggctatagctattaacttcatgtggctgctccctattgcttacttaatcatctctgcaaaaattgatggaattgtaggcattaccatcgcctggttaccattgattattcttgtattcagatgtggtgctggagttaaagataaagagaaggcataa

SEQ ID NO: 143841 - DNA, 561 bp, Enterobacter cloacae
atgaatgatctgatcattgttggagctggaggacatggacgtacattgtacgaaactgctacgctattgggatatgaaaaaattgtatttctcgacgataatgaatctcgctccgacaattcaaaggttcgtgttatcgggaaaacctcagatctgaaggtttatgctggtacagctaaacacattgtaattggcataggtaataataagctcagagagtcattccaccaacagctagaattgctaagcatttatccgataacgctaattcatccttttgcatttgtgagcacgtccgctactttgggacatggcagcgtagttttagccggtgcggttgtaggagcaaactcaactcttggtgtaggtacgatagttaattgtcattctacagtcgatcatgattcaactctcggtgattttgcccatttaggtgttggggtgcatcttgcagggggagcgtgtattggtaaatcggcatttctgcaagcgggaacagtgggtggatatagtgctaaagtggaagagcatgtcatatgccctccaggtactattttataa

SEQ ID NO: 143842 - DNA, 1083 bp, Enterobacter cloacae
atgtatgcgaatcatcgttctgtaaagggtcgttatatctcgttctgtctaggttgtattgctgttatcggcatattacacgccctgttttcaaaaattgccgaatgggttccaaccttttcgtctcacttgttccctacgctcaccatttttttactggtgtttgatctgtttattgcctgctttatggcaatgaaatactggtgtgaccgaaaacggttgtatctggtatcgctcgcttttgcctttgccgggtcggcatcgctgatggtcggaacgctgtgcagctttcccgcctggctggacctctatcagttcaacgcggtgaactacaacgatgcgatgatcttctatatgttccgccatctcttaatggcggtgctaataatcgtttcggcaatactctataccacgcgcaattgtcccctttcgcggctggcgcatatcgctattgtgagcggagagtttctctttaccgtctttgcagtaggtttggcctggatgtattccagtcattcttcctttttatccattgatcttgtggataatgaaacccgtgagtttatggttctctggagccacttcattaatattgcattaattgcactctgggtggtgacattagccacgctgatgtttattacgcgcatacgcaacttattctgggtgggcggtaattttctgtgcgtctgctatatcgtcacgctctcaatgctgttagtgggtggacatgttgaagatgtctcctggtatcgcgctcgcttatttgaaaccgtcgccacgctgatgatcatttttgttctgctctacgatgttttcaggctgtatcgcgactcgcacgttaagtatcagcagtcttaccagaactccattcgcgacccgctgacgcgcctgtataaccgcagttatttttatgaaacgttaaagcaggcgctggatatcgccaaacccagccgcccggtttccgtcatcgtcagcgatctcgatcgcttcaagcgtatcaacgacacctacgggcatcttcagggcgacaaggtcctgcagtttgtcgctaatctgctgatggattccgtgcgcccctag

SEQ ID NO: 143843 - DNA, 222 bp, Enterobacter cloacae
atgaaaatcaaatgcatcaaagacaccgaggggtggtggaccgaaggtgaagtgtatcccgcccgtgttgttgccggaggctttgttcaagtaggtgatgatgaagaaccgaacggagaaggctggagcgctgcaccgatggaatatcgggatgatggttcgatcgtttatcaggttggcgggattgagggtgaagttatttttgaggaggccgcgcaatga

SEQ ID NO: 143844 - DNA, 423 bp, Enterobacter cloacae
atggaaagtatgaataccgaaaccaataaagttttcgcatacaggttcaatcaagctcttacggagcatggttggaatctttccgatttagcccgccgcgttggtgttacgccgcaggcggcacagaagtgggcgaaaggaatttctataccgcgcggtctgaagctcaagtccctcgccgaagtaactggaaagcccgaacactggtacttcatgcagccagacacagatgatcctgaggtgatggcgcagcttggtattcccaaaaaactcgatgttaccgaagaggcccttcttgctatctttaatcagctccccgaagctgaaaaattacgccttatcattcatgcaaagggcgtattgaaagaactggaagagctgaaagatgatgttggtgatctgataaaaaacctaaaccgctaa

SEQ ID NO: 143845 - DNA, 231 bp, Enterobacter cloacae
atgaacgagcaactcaagaaaaaagtgaaatcaatcactactcaaactgcccttggtgaggctatgggcctttcatctcaggcggttagtcgatggatgaattctgggaaagtcccaacgtcacgagttcgtgcgctttgtcagttcctgaattggcaaataacacctcatgaaattgatccagaagcatatccaaaccctacagacgggctgccaaaacaggagtcctga

SEQ ID NO: 143846 - DNA, 666 bp, Enterobacter cloacae
atgaactgcgatcgcgaaaatttccgccgcatcgcaaacggtatgcccgaagcgccggcggaacgcccacaggttgagcagacggctgaaatttttaacgcccttttcagcgcattgcgcgccgcgttcccggccagcgtgcacagctttaacgaccaggccgagttcaacgagctgcgtcgccagtgggtgctggcattccgtgaaaatgggatcactaccatggagcaggtgagcgccggtctgcgagtggcacgccgccaggagaaaccatttctaccttccccgggtcagttcgttgcctggtgcaaagaggaagtatgcctgctgggcattacggttgacgaagtgatggccgaatactggaagtggcgccgcctggtgttccggtatccgaccagcgagcaatacccatggccagcgcctgttctctatcacatttgcattgagctgcgccgccagagtaccgatcgccagatgacagaaaaggagctgcaccaggcggccgcaaaatgtctcgcagactgggagaaacgtgtctctgaaggtaagcccattccaccagttcgccgcgcgatcgccgcacccgctaaagcaagcggacctacgccagcagaaatgctgaaggctcaatacgaacaacgcaaaagcgctgggtttatttaa

SEQ ID NO: 143847 - DNA, 342 bp, Enterobacter cloacae; identical to SEQ ID NO: 141547

SEQ ID NO: 143848 - DNA, 186 bp, Enterobacter cloacae
atgctaacgcgactatcgaaagtcttcgtgctgatgtttctgctgggcgtaagcgcctgcaagtcgccgccacctgtgcaaagtcaacgaccggagccagcagcatgggcgatggagaaagcccaagacttacagcagatgctgaactcaattattaccgtctccgaagtggaatcgacaggataa

SEQ ID NO: 143849 - DNA, 519 bp, Enterobacter cloacae
atgaataatccgtcagttattccggccttcgattttcgtgaaatggtcacaaccctcgacaacaaaataatcaccacatcactaaaggtggcggattactttggcaagcgacacaaagacgttttgcgtgccatacgtaacctgaaatgctccgatgacttcacccagcgcaattttgcgcccattgatttcattgataaaaatggcgatgttcagcctatgtataacatcacccgcgacggatgcatgatgctcgtgatggggttcactggcaaaacagccgccgcagtaaaggagtgttacatcaatgcctttaactggatggccgagcagctaaaccgacgcatggcgatgggtgaagaaatgcagcaccgctacgccatcaaagaaacgcgctcaaagctgaaaggcacgatcggaagccgtttgatgaacgagcggaagaaagagaagcgcgtcctggagctcgagcatgagcacatcatgcaggtaacgcagccggaattacttattggctga

SEQ ID NO: 143850 - DNA, 435 bp, Enterobacter cloacae
atgatcaccttccacctgggggtgattgacgtcccgtatgaggacgagaacaccacaaccgggagtgtggcggaggaactggaagcaaggtatcacataatgcagacgttctttgatcgttacggtaatgacatcactgaactgatgagcaaagaccttgccacatcgattgaaaacatgttcgctggcgcaccgccgccaagcgaccctctggcagagtcaatgtcacggatccatgacctgtttgtcgccttcctcgacaacaccgaaatgaacggattacctggtgtgcctacgcgccgcgcgctggacggcatctcccggcgattcaagaacaaaaaggggccaccgcgcccgtcattcatcgataccggaacttatcaggccgctatgcgcgcctgggtgagcggggtgctaaatgccttccctggatga

SEQ ID NO: 143851 - DNA, 1938 bp, Enterobacter cloacae
atggtggctaagtctattgtcgatattgacgtaaatgacgacaagtttgtcgcttttatggagaagtttaaagaatatcagactgcacttgaggaccttcctgaagcatggcgcgggctggcgcatggcgccacggatgccaccaaagagacggcgaaagcgaaaacagagggcgacctactggctaaagccttttctgagggggcaagcgcgattctgtcgataaacagcgggcttgataggctcaccgacagcctggaccgggcgaataaaagtcaggaagacttcaacaagaaaacccgctcatcaaagggttttttgagtgatgccacgaaggacgcgaaatcgctggcagggcacatcagggatgcaaccacaagcctgctgtcatggggtggtatcgtaggcctgttcacaggtgtgctgggcgtaggtggtcttttcggacttaaccgtctggcagccacaaccggctcccagcgtttcacctctctcgggatcggtacgagcatcggcgcgctggactcgacagccattaactaccagaaagcgctcggcaacccgacgggaacgctgggcgctatccgcgacagccagatggatctgtcaaagcgctggacattccaggctatggggattaacaacccagaccaggacccggctaaactcctgccgcagatgattcgcaatgcgcgagacatctttgtcaaaaacggaagcaccctacagggggccaacgcctacggcctgacgaacttcttcagcctggatgacctaaatcgctttaaaaatatgagcgatgaagaaatcgatgcgatggagcgccgggcgcagaaggatgcgaagctactgcagatcaccgatcagcaggcgcggcagtggcaggatttcaacgtccagttggattacagcgggcagagcattcgtaacacgtttgtgcgcggtcttggtccgctcactcctcagctgagtaaactctctgacgcgctggccggtgccattgatacggtgctgcagtcgccagaactcggtaagtggattgacgggctggccagtggcatagaacgcttcggtaattacctggcgtcacctgatttcgccaaagatgttgatgattttatggacggcctgcgcaggctcggtcagtcgataggtagagtaattgacctattcactggcaaaagcagcgtgagtgagtttatggcagcatcatcgccaatgcttaacaaccagactgttcacgacccgaacggcggccctgattatgttcccgggagtgagagcgatcctaacgttcccggctggctgaaaaagttaaaactggcttcaggagtggccccggttcaatacgatgagtatttcgaagaggcggctaaaaagtacaacgttgatccgaagctattaaaggccatggctgcggctgagtcatcatgggaccaaaacgcagtttccaaggctggcgcgcaagggttaatgcaagttatgccagacaacttcaagccgggagaaaagccattcgatcctcacgataacatcatggctggggcaagagttctgcgtgacgggatgaactgggctaacaaaaatgctggtggtgatctggaggaagcattgcggtattacaacggcggagtcaggcgcggtagtgccgagaacatcgcatatccaggaagggttaatgaaaaataccagcagatttacggagttcctgcgctaagcgctaaagagcagtacgcggaaatgcagggttcacgtaaaaaccctgcaatagaaaatggcagcgacaattcagaggttgccaaaaatacgaacaagaccaaccagctgctgcaacagattgttgacagagggcttactgggaacggctctggaatggtcgtttataacaacactggcgggaatgccgttgtttccagttcacaactcggagttcgatga

SEQ ID NO: 143852 - DNA, 1419 bp, Enterobacter cloacae
atgagtgatttgtccgtaagctataacgcatcgggtccggttccgcaaactgctgaagagctgcgtagccagcttgttgcaaaggccactgaattatcaccgggaatcaccaccgatctgcctggctcccttattgaggatatcgtcggcactgatgtgggcgcgctgattatctgtgaccagatccgcgtcgaccttattaactcagtcggcccgctgaaagcaaacatgtacatgctgaacctcctggctcagcaatcaggtgtcagtgcacagaaaacccagggctcaacaaccgttgctataacattctccggaccagctggtttcgtcatccctcaggggtttctggtcagcgatgggacatacacctatcaggtagcagatgcagcggtcattcaggcatcaggaaccagtccgcaagttaccagcgtggctacaaacacggggtcatgggccgttccggcaggaactgtaaaccagattgtcaccagtctgccgtctgatatcaccctgacctgcactaacccggtggcgggaacgccaggcggcgcgccggagactaattacgagtttcgagagcgtgtatggcaggcgcagatgtccaccgttcagggttacccaggctttatccgccagaaactgacagatctggataacgtacaggcccgcctggtttcagtggtccagagcggaacatcctggatcatcatgtgcggcggtggcgatatttatgatattgctggcgtaatttacaaatccgcgggcgacatcagcaggcttaaaggcaccgacctgaacgtcactggcatcacaaatgccaaccccggggtcgtgacgacggatatcacgcacggattttctaccggccaggtaatcaacatcactggcgtgctgggtatgtccggaatcaataacgtcccactgaccattacggttctgactcctcacacgttttccattggtataaacaccacctcgtcaggttcatggactggtggaggattggttaccccaaacctcagaaataacgttgtgtcgataaacgactggcctgacaattatctcatcccgtttgttaccccgcttcagcaactggtaaccatcaagtttgagtgggcgacagaaggtatcaactaccttaatgatgcaacaattggctcgctggtttcagggcccgtaatccagtacgttaacggtatttatgccgggatgccgttgaacattaacagcgttaaggacgtgtttcttaatgcgattaactcgactcttaacatgagcctgatcaccaccctgaatgtcatagtcacggttaacggtgtaataacttcacctgatgccgggacgaatatcatcagcggtgaccagtacagttactggtttatctcatcggatggggttttagtggacggggtatga

SEQ ID NO: 143853 - DNA, 705 bp, Enterobacter cloacae
atgctcgaagaaatcattaaatcttacctgtacactcaatataacgacgatgacgatataagagcctttgtctctgcctataacgctcttgctcaggatgtttatacgtggatgttatccgcgaatcttccaatatttgttggaggttataatgctggcgatcagcttaaatggatcgccgagggcatttacggagttaagcacccgatactggtaagcagcaagcaaacgacctatggaccgtataattcaatcacctttaatcaacttccatttaacggaaggaaaagagtcgtttcctctgatcaggtagttgtttctgacgatctgtttaaaaggataatgacatggaatttttataagggggacggatatcacttttctataccgtggctgaagagaagggtgatgaggtttctaaccggtgttgatggggttgatgttgtcaatgatcagcgatggagcatttcagtattattctcctcaggtggggctagcattaccatcactaaaggatacaggagattaacggattcatctctgtttaatacttttgcttataacacacgagcattaaatcagaaaacaagcacattaattaaaagtgacaattatcaatatgccagtctattcaaacaggcttttgatagtggccttcttcatatgcctttttatcagccggtaagcgttacaattatcggttaa

SEQ ID NO: 143854 - DNA, 1092 bp, Enterobacter cloacae
atggctctttttctcttggctgccaataacgctcaaagcgtactggccgcaggtattagtgcgtcagcgacaaccatcaatcttaatactggaacaggggcattattcccgtcgccaacgccaggtgtgagcttttttaaattgacgctgattgatgctgcaaccggacagttaaatgaaatcgttcacgtaactgcgcgatctggtgatgcgttaacagtagtgcgagcccaggagggtacagcagcacgttcatggtctgttaacgacatcgcagccaatatgctgactgctggtacgcttcagaactacgtccaaaaagtggaaagtacaggcaagaacaggctgatcaatacccgattcgctgtcaatcagcgtggctatgtaagcgggactgcactcgcgcttaacgcttatggtctggatgcatggaaagcctcaacggccagctcgtcaatgactttcgctgccactccgtatggtgctcaggtagtgactattgctggttcattcctgcaggttattgagacacaggatatcccaactggaacctatacgctctcctggaccggtactgctcaggcgagggtatacaacgttggatcaagcgctccgtcctatgcatcatctccgatcactgtagccatcagtggcaacaccaatgtgaatgtggagtttaatactggcaccctgttccagccgcaaattgaaagcggtgatacggcaacacagttcgaatttaagctttaccagacggagcttgcacaatgccaaagacgttgtttcgcaatggtccttaaaagcactgctgggatttatggcgggacatctacccatataactctgtccgtctacgcccctgttgctttacgaacaatcccaaccattactctgggaggaagttcgatgactgttgaacagcccggggtaaacttcgcatcaaccacaacggccgcgcctggttctgggcagtactcaaacaacgttatgtcatttaatattaccggcaactggtctggcagtctttctaacggcgtcccgatcgtggtgacatccgcaccagctttaaccattttcagtgccgatctgtga

SEQ ID NO: 143855 - DNA, 156 bp, Enterobacter cloacae
atgaaataccaattaactgatggcgggattctgcgaaaagaagacctttcatggatccctgaagatgaaagtaatgctgactatcagcaataccttgagtggatagcggaaggcaatgaaccagagccagctccagtgaaagtggaaaagaagtga

SEQ ID NO: 143856 - DNA, 1122 bp, Enterobacter cloacae
atgatgaacaagatgcctttgctgttcgcctttattgtgttcaacgcaaacgccaatactccagcaccgactaaccttgacgatttcaaatcttgctccgctgattcatgcagcatagacgttgtcagcaaatataatactcatccgtctgtattcggtggtgacatggtctatagtgagcctgtttactccacagttaataaactgggtgataatttgttattccagccaaaaggcgtcgtgagtgtatataatccggtatccggcatggcgttgaaaaaagacactgactatacagttgatgggaaattgataactatcaatcccagcagatttgtccaggtcgctcccgaaaactttactgaccctttaatcccagaccctagaattaacttcaggttaaaagaagattataaccagtatcaatatcctgtgacttatgaaaaaaacgaaagcctaccactttatatttccggggatgtaaataatttaaggaagatgatttctgaaagcgacgacctaaaagttactttttttggggacagcatcactttcattgatgaatacataaacaagccaagtgattttactcagccgccttatgcatacctggtgaatgcttatatggcagtaatgaagggagatgggtataaatggtataacccgtcagtaaacggatggaatacaaataatgcagtttctgtaattaacgaaagattccttaaacatgattccgatctgtacatccttgcgtttggaatgaatgatgcggtggatgtaacgcctgaaacgtaccttgctaacattgagactttaatcaatgcagtaaaagccaaacgacctgatgcctatatattaattgaatcttccaccctcccgaaccctgagtggacattgccacatcatgattattttaaaaattatgagaatggcatttcaaatttaacaagcaaatatgacaaggttgttttccttgatttgacctcaacatggcgtgacatttttagcagaaaaaattactggtcaatgaccatgaacgggatcaatcacccaaatgactttgggcatcgagtcattgctgaagcacttcttactacgctgctcggcagtagcttcaaataa

SEQ ID NO: 143857 - DNA, 390 bp, Enterobacter cloacae
atgggattcccgagtccagcgcaagactacgttgaagagcgcatatcactcgacaagcgccttatcgctcacccttccgcaacgtacatgatgattgccggcacgacatatctgcgtgcgggaataatgaagggtgcaatgctaatcgtcgattcatcactgacgccgaaagacggttctctgcttgtgtgtgctattgacggtgagttcaggatcatgcgctacaggacgctgccacatccttgtctcgaaaaccctgaaaatggaaggagggagccattaccctcgaaggatgaggtatcggatacatcgcgtccggtatttggggtgatcacgtatatcatcaacgacgcgcggtctggcgagttcgacgactgcccggtgatgtaa

SEQ ID NO: 143858 - DNA, 351 bp, Enterobacter cloacae
atgaaagatattacagaatgggatggtgagggtttgcctccagctggttttgagtgcgaagcgcgatatcggcacgcggataaagctaagtggtttcacttccgctgtgtaagtgttgatggtggggttgccttcgggtgggctggcggggccgactgtcaggtcgctaccactcttagtggtaagggttacgaattccgccctacccgctcagaagaagataagaagcgcgatgcagcgataagcgccatcgatgcaacttgcttattggtaagggatgccagcaacacagctgcggcaatttacgacgctatagctgcaggtgacatcccgggcgttaagattgaatag

SEQ ID NO: 143859 - DNA, 195 bp, Enterobacter cloacae
gtgaaaatcgtcaccagaatggaggccgctaaggctggcctgaacagattctacaccggcaaagcctgccggaatggtcataaggcggagcgctacgtactgaatggcacctgtgttgagtgcgcacttcagagcgcaaaccgtcaccgcagcgagttctcatccgctctcaaatccgcacggggtgaagcatga

SEQ ID NO: 143860 - DNA, 888 bp, Enterobacter cloacae
atgtcacacctgacgatctgcgaggattcacgcagtgccacttcttcgccggagttggcgtctggtctcattccctgcgactcgccggatggcctgacgataaaccagtctggaccggttcctgtccgtgccagcctttcagcgcggcaggcaaaggagatgggtttgctgacgagcggcacctatggccccacttcttccacctcatcagcgagcgcagacctcagcatgtctttggcgaacaggttgcaagcggtaacgcaaacacatggttcgaccttgtacaagctgacctggaaggaatgggatacgccttcgggcttgtgctgtttgcggcagcgggcatcggtgcgccgaacatcagagagcgggcctactgggtggccaacgcctgtagcgaatacgaatccgcagccggaaacgaaacggggattacagcacgtctccggagcagctcgactgacaggctggcaaacaccggtggccaacgacgcgaacggatcaacccattgctacagcgggaggaatccagacggctcgccgaaagtatgcctgaagcttccaggatcggcattgctgaccggctggccaacgccacaggtcaactacatcaccaatgcaacgacggtacagatgagttcggatgggcgagacactccgaacaaaatcggctgggcagcgagtctgtgcggacccttgaggttaacggtttttggcgagatgcggactggctcttatgtcgagatggcaaatggcgtccagttgaacccggcacattcccgctggttgatggggctgccgcgcgcctgggacgagtcgagtccggggtggccagagtggcaagcagcaaccgcgtcggccgactcaaaggctacggaaacgccataa

SEQ ID NO: 143861 - DNA, 264 bp, Enterobacter cloacae
atggcaagaccaaacacgcaccaagaacgcaagtcagctgtcagaaggattattaccgctgcaaaagagcgtggcaggataaccacccggcaggcagcagagattctcggcctccacctcaacactgtggagaaatacttcagagacgcagagaagagcggagaggtaatacgtcacgggaaatgcggcctgttcagggattacagggccacgattgatttcgacatggagagattttcaaggcaatacgggaaagggaagtag

SEQ ID NO: 143862 - DNA, 498 bp, Enterobacter cloacae
atgaaaccgagttatgaagaattggaagccagatgcgcggcgctggccgcggagaatgcgggattgatgaagttctgcaaagacgctgcattcgatgctgattacgaagctgaattaggcatggagcgcggaggattcactgatgcgcttaacgatattaaaaccccggcaaccgacgctttcctggctgaagttcgggcgcagggtgtgaaatctctatccaatgcagttcagtcagtgatttcagagcgtcaacgccagcaatctgttgagggctggacacccgaacacgacgacgaacacgcagaaggggaaatggcagaggcggcggcgtgttatgcgatgtttgcaaatcaccagggcttttctttgccagctcactggccgtggtcgcgtgagtggtggaaacagtccggccagcgccgcgatcttgttaaagcgggcgcgttaatcctcgcggaaattgaacgcatagaccgtcaggaggccgcccaatga

SEQ ID NO: 143863 - DNA, 450 bp, Enterobacter cloacae
atgagcaacatcgacaaacgtcctttccgcgctgatggcggtgatatcagcactggtcgactcagagagattgctgacaatccttacggcgacgaagagaaatgctggctggctaagcgcgtgctggcgctgcaggctgcgttagatgcgacagcgttttcacaggccgcgattgatttacatgcggagagacagcggcagcagtcagctgagggatggactactgagcatgatgacgaccattcatgtggggaaatggcgcttgctgccagctcctatgcgcaatatgcgcaccgcaaacctattgccccagcaatcccttttaactggccatgggaaccagagtggtttaagcaacaaggcccgcgtcgtgacctggtaaaagcaggcgcacttattctggctgaaatagaacgcatcgaccgagccgcagccggtaaaggagagtga

SEQ ID NO: 143864 - DNA, 453 bp, Enterobacter cloacae
atgggcattattaccacagagcacctgacaaaaattctctcagaaactcaggcggtaattagcgaatgtaactcgcgttgcgttcatggatccgtcgaagtgaatgccaggttgtttgaaaatgtattgatggagttattgcgacaccgcgccgccctgcttcagggtgccgaaaacgccgagacgcacaccaccatgcagaccgcgccagctctggattcttcgcaaataattgccgagtcgcccaccggcaactctccggtgcttccggatgggtgggtggcttgcagtgaacgtatgccagaaaccatggtaagcgtgctcgttactggaacctggtttcatcattctgttgcgttctgggatggtttgtcctggtgcgaccttgattttgagcaacccgtcacccactggatgccactgccagcagcaccgcagcaggaggtgaagtga

SEQ ID NO: 143865 - DNA, 264 bp, Enterobacter cloacae
atggtgagcaaactcaaacagcggcgcttgcgccgactcaaggcagatgtggcctggtggcgcgaggaagcagaatacggaaaccgccgaattctcgaactggccggggaaatcgacaggctcaagaatctggttatccgcgtgcccatgccggtggtgccagtacaggtagccgctttcgtcggtgttgatcttgctggtgtaccagaccaaacggcagtaatcgaaatagaaaacggggaggtgctgaaatggtcacggtaa

SEQ ID NO: 143866 - DNA, 228 bp, Enterobacter cloacae
atggtcacggtaacccaggaatcgctggccgctcgtatagcggagctggaatccggcccgcgctcgctgaaggaagattttgcgctgcaggcgtacaggatgctgcttcctcatgtggcagagcgcgaacgaaagtcatcatgctcacatgactggtggattgagccaggcggagaaggacgatcgacaatctgcctgaaatgcggagagaggaaattccatggctaa

SEQ ID NO: 143867 - DNA, 336 bp, Enterobacter cloacae
atggtatcaaccgcatccccatcgccatcctgcatggctatcgagcaggaaattcaggccaaaggcttaaccgcgccgcgcgttacgcgagacgacatgatcgcaaacattgctcacactgaaatcgttaagcacgtttctgttaccgggcaggttctgcgctgggcgatcattacgacaaagaatggctttgcggtaaccggaaagccatcatgtgcagtctcagctgaaaacgacaatgaggcgatcggtaaacagattgctctgacgaatgcagagaacgagctgtggcctctaatgggttacgctttgaaagagaagttgagccaacagtga

SEQ ID NO: 143868 - DNA, 297 bp, Enterobacter cloacae
atgaaggacttagatgaagaagagctgcgcatccagaacgagcggaagaagcacgatctggaacagcgggagaaggaagacatcaagttcgtaatggatagcgagcagggccgccgcgtcgtgtggagggtgctggagagtgggcgggtattcgccgctatcccgccgatggacgctctggcgatggctttcaacgaagggcagcgaaatttggctttggagttattccagcgcgtcatgacgcactgcccggatcagtatctgaagatggccgcagaggccagtgaacaggagtaa

SEQ ID NO: 143869 - DNA, 540 bp, Enterobacter cloacae
atgtgtagcccagctattgcactggtcgcagtcacggtagcctctgctgctgccagcgcgtacagccagaaccagcaggcaaaatatacttctgctgtagctgagaagaacgcagatattgctgaagctcaggcgcaggactccatcaaccgaggtaatgctcaggctgatgagattcgccgccgtaaccgtcaggcagctggtacccaggccgcaacaatgggggcaacaggcgcagaactttccacgggcaacgctctggatatcttcggagatacggcacaattcggcacccttgatgctcttactaccgtcaataacgcccagcgtgaggcttatggctatcaggtgcaggggagtaattatcagtctcaggccaatgcaacccgcagcgcgaacagtgcagcactaacccagacactgctgacaaccccgttaaaagcatatggcgcgtatcagatgggcggcggcacatggtcgccattcacccagaaagcagcgcctatcagttcggctgtcggcacgccaacaggccgataa

SEQ ID NO: 143870 - DNA, 2694 bp, Enterobacter cloacae
atgccaacagtaccaactgtaaacggccgtcaggtagaaagcaggggattccagtcacctggtcttcaggcattcaacacacctcaaactgctgatgtgcttggtcaggccgcagagcaatacgctggcgcattcgcgcaggccaagcagagggcaaacgtcgctctttcacaggaggccagtttaaagctcagtcaggccgaagaggatttaaagacacagctttatagcctgaagggccaaaacgccatcggtaagggtcaagaatttacgcagcaatatgatgagcagatccaatccctggcctcgtcgctacctgatgacgcatcacgccagatgttcatgcagcaggcgcagcagcagcgcatccagtttcagggaaatgttggccgttatgagcagggtcaggtcagcgagtttgaaggaaatcaatacgatgcaaccagacagttgcagatccagaaagaggctgatgcgtggaataatccccaggaagctattctcgcaaagaatattcgcacagtagcaacagcgagattcggagcctcaagaggttggtcgcaggagcagattctggctgctattgaaaaagataaccttgccgccactgagatgagagctaaaaactatgcagttgataacccgcttgggtggatgaacggtgagttttcagcagatgatactggcggtctggatatgcgatctgtaggtatcgtcgagtcaggtggtaagcatcttaattcagacggatcaattgtcacttcttcagctggtgctcagggccgtttccagttaatgcctgaaacaggaaaagaactggccgcacggcgtgggttgaagtacaacccggcagacgagcagcaacacaccatgctggcctcggattacgcgcaggaactgtcaaaaaagtatggctctgaattactggctggagcagcatataactgggggcagggcaatgttgacaaacttattgagaaggtcggggatccaagaaaaggagagatatcccaagccgatttcataaaacaactaccatctgaaacgcagggttggatttcacgataccgtaaaaataaaaccggtatggatccagttaccgttaatcaaattgataatcttgcaaacgctcagattgagaagcagagaaaactggtacttaatgagcttgaaccgctgcttaacaatacaatggctcaactaaataatggcgaagtccctgatgccgttccttctatcccggcgattatgtttggctacggtgagcaagggaaaaaaatggtatcgaagctcgatatcgctatggacaatgcaaaaactttccaggcaattcagtacctttctcctgaacagcagcagcaggaattactcaaaaagaaaccagaggtaaatgacccggaatatgcgctcaagctcgatgcgtatggcaagctcggcgcgctggtacagaaaagcaatgaagcgatacaggcgcagcgtgatacccgtcgttttaacgaagcgctgtctatgggcgagaaactcgaccctaccaataaatccatgcaaaaagccgccgacgccacgccaacggcgcaaaacttccggattaacgacgccaccacccatgacgggattgtgcagcaggttgcccagaccgggatcattccttcgcaggtaaccacccagttatcggcgatatcccgcgcgcgcagtcctgaggcggtccgtcagggggctgagttatttaatcgcctctatgacacagatcccgcgtctgttggcaacatgccaaaggatatgcagggattttatctcaccgttaaacagcttaccgattctggcatggcgtccgaaaccgctatcgaacaggcgcagaatctgacctacaaccagaccgatgcactcaaagcgcaactgacctcaacccagagcaccaaggagtacaaaaaagaccgcagcgaggcgatgggttccgcagtgagcagtatgtcaggcttctttagctggggaaatccatcagccgacgaccagacaccggaggccgcgcatttccgcaacgattatcagtcgctgtacgacatcaattaccgcaccaccggcggtaatgcggatgcggccaaaaaaatgaccaaccagcagatcgcccgcacatggagtatcagcgaggttaacggcaacgccaaacttatgaaatatgcgccagaggcactctataactacggtccgtcaggctggcaagcggcacagtggaaagaagaaaaagagaaactgatgtatggcgaccataatgacgatatcacaacaagcccgacacagctcgggatcacctccggtaacgcagtgcctgttaccagtaaaacgccggaatcgcgtattggcggcgatctggaaattacacctgatgtgctgacggcccgcaatggcgattacgccattatggtgcgaacaaaagataaggatggcattgaggcggtacagccgttctacgattcttacggcaggcctatgcggtggaaaccctctttggatgaatgggaaccctataaaaaatctatacaggaaagagagcaaaaagatcaggaagaaatcatcaagggtcaggaaattcgcggctttaaagataaacaccgtgcaattgatgaacagtatcgcaggttccacgatgaccgtgttaatcgcttcaaaaactatttctcatggagtaatgaataa

SEQ ID NO: 143871 - DNA, 2892 bp, Enterobacter cloacae
atgcctgtgtattcctcgccagaagaactgagcaacggatttactcctgctggcaatgttctgccagagccgactgggtttgatgtgcctttgcctgaaggaaccaacccggagccgcagcaaccagagccatcggtatggggcgccgctttccgccagaataaccttctggccgagatgttccgcccggccaagcagtttgagtcggtagacgggtataacccttatgctgataaaaccgagctgcacgggtacgaacaatggggatctgcttttgctgattcccgttcaccggaagaaactgcctggcttaaacagcagattgacgacgaaaacgaggaccgtcgggtactttcagaggcgggcggggagggcgttctcgccagtattgccgccggggttgtcgatccagtcaccgtcgcgtcgatgttcattcctggtgctcagggcggaacagtggcccgtatagcgtcacaggctgcgattggcgcagctgcaacagcagcgagcgaggttgcgctgaataaccagcagattacccgcacgtggggggaaagtgcttcccatgtcgcagccggtgcgttgatgagcggcgtatttgcagccgccggtgctgcgctatcaccatcagttcgtacagcggccacgcgtgaggtggctgacgcgctcgataatatgagtatcacgtcagcgacggacacggctgctgcctcgcttcccgaagggggcagcgtcggtgcggcccgaatcaatgaagccacgctcgaggatctcaccccggcatctggcggtcctgtcggcaagctggcacgtaaggcagggagttatctgacaccgtttacccgtctgatggagtcaccgtctaaaacctcccgccgcatcgcgcttgagctggcagagaataactacacactgcaaggcaatgcccgcggtattgagacaccaattgcggcggaaacccgtgttcgcggatggcgtcgtgaagaggctgccgtcgtggtgacgaacaaacaggcctacagccagtacaaagccgccgggggcgacctgagcttttcacagttccgtgaggaggtaggtaacgccatgcgcagcggtgatgtgcatgctaatcccgtggtgcaggaagcggcgcaggcaatgcgcaccgttgttaatcgggtgaaagtggcacagcaaaagtttggcctgttgccacctgacgaggaactgaaagccatcggccaggagagttatttccctcgcgtgtacaaagtcggcaagatcgttaacgagcgtgataaattccgcgacatgctggttgactggtggtcgcgtggtgaaaaaaccatgtcccgcgaagaggcggaaattacggccgatgccacgattaataaaatcgtcggcgcaaaaattccccaggattttgcaaacgtctttatggtgaaagcggcaggaagcacccgggcgcgtacgctcagtgttccagatcgcctgatgaaagattatctggaaagtgacgccaactatgtgttacagcgacacattcgcgaggcatcggcagaggttgagcttacccgtgcattcggtaacaaatccctggaaaagcagctcaaggatattcaggacgaatacgatgcgctgatgcgccagaatcccaaagaccaggcaaaactggcgaaagcccgcgataacgatatccgggatatcacagcgctacgagaccgcctggcgggcacctatggcatgcctgacgatccatcatcatttttcgtgcgcgctggtgcgtttctacgcagtgctaactttgtcaccaagctgggcggtatgaccgtttccgctattcctgatcttgcgcgcggtgtgatggttaacgggtttggcaataccatgcgcggttactcttcgctgatcacccgatcacctgcattcaaggccagccgggccgaacagttaaaaatggccgtcgggctggaaaccatcctccacacccgcgcacgcacaatgggtgaccttgtggacagttccgcccggacaacggcagtggaagcgggtatggagcgtgttaccgatgcgttcggcaagctcacgctgatgggtcacttcgatgacatgaacaaatcggtaaacggtatgatcacgtccgacggtattctttccggcgcattcaccggccgacgcctggctaagctcggcattaacgaaaatatggccgcgcgtatccgcagcgagttcgaaaagcacggtgaggtgatcaacggctggcatatcggcaattttgaaaaatgggacgatcagcacgttgcaggcgttttccagtctgcggtgctcaaagacgttaacaataccgttatcaccccggggatcggcgatacaccgctgtgggccagtacgccgctgggtaaaaccatattccagtttaaatcgttcgcgaccgcttcctacaatcgtgccacgttgggcggactacaggagggaaccggtcagttttattacggcaccgcattccagattgctttgggagcactgacgtacgcgcttaaacagtctgcaaatggcaaagaggtagactggtcaccgcagaaacttgctattgaggggattgaccgatccggtatccttggtcctctgatggaatacaataatatggctgagaaagctactgggggtatggttggccttggggcgctactcggaaccggcacgcagtcgagatatgccagccgtggctttattggctctgcccttgggccaacgttcggtctgctggacactattactgatgtgactgccggggttctgaatggcgacgctggtgaccgggttctgcataacgtgcgtacacttcttcctggcaacaacctgttctggattgcgccactgataaaccaagtggatccagggttaaggtaa

SEQ ID NO: 143872 - DNA, 477 bp, Enterobacter cloacae
atgaaaaaattcttgctagccggtttagtcgtcatgcttgctggttgtgcagcaacaaagaatgttgatgtagttgcaactgaaaaggctcaaggggatcgaattgttgccttaaattctgccaggtcaccatgggtttacgagattgaaaaacggttaaaacagaaaggttttaccgttcttcgaagcgcaagccagcaagtgacggtagaaaaacaatccaatagcactaccggtatttataacgaagctactgcgcgttatgttctgaacttgaatggtttcgctccaaataacgctatgactcgttgctatggtggcgggtataattttgactacattgatgctgagctaatcgacgttaaaaagaaccagacaatgttccactattctaactctggttactctgaaaattgcccaccattgtcaggaacaattttcactgatatcaccaatcttgttgcagactcctggtga

SEQ ID NO: 143873 - DNA, 2214 bp, Enterobacter cloacae
atgacggtatcaaccgtagttgaccataacgattacaccgggaacggcgttacgacatccttcccgtataccttccgaatttttaagaaaacagatctgaccgtatccgttgtcgacctgagcgaaaacatcacggtgctggttctcgataccgactacaccgttacgaatgctggtggctacaatggcggtaacgtggtacttaccgcgccgcttgcttcaggatggcagatctcggtcgcgcgcgaacttgaaccgacacaggagacagacctccgtaaccagggcaagttctttgccgaggtacatgaggacgctttcgataagctgacaatgctgatccagcaggttggcactatgtttagcctcgcgcttcgcaagccatccaccatcgctaactggtacgactcgctgggaaattacattcgcaacctgcgcgacccacgtgacccacaggatgctgcaactaaaaactatgtagacacgcttgccggcagcaacttcagcaagacattgcgggtaccagaaaacattccttctcttcctgatgctgtaaccagggcgaataaaatgatcgctttcgacaactcaggaaacccctttgttgtcgttcccccatctggatctgcttcagatgttctgattgagctggcaaaaccaaccggtgctaaccttgtatggtttaagcagcctggcgttattggtgcgattaactcgcctgtttcatcaaggtttatcagaaaactagacgccgttgcagactttggagccgacccgacaggggcgactgattcttatgcggcccttcaggcatgggctaacgcatgtgttgctgataaatgggttactggtactatcaatggaattttcaaaatcagccaacctctagagtttgctaactctcaggggttaactctggtctgtagtgcgtacgtttatccaacatttaatgatggtgattgcatcatacgctggagaaatggcgcagggatccgtacctacggaagactggaagcatctgggcagcagaagctaggtattgcttgcgcgcataaaatctataccgatggaaatgacgcagatggaactaatggcattagtttcagctatttctacggtctgtgcgccagtgatgcattatgtggcttccagtttggtgatgctgcctatccgagtaatttggtgtcagaaatgtccctcatcggcggttactctgttggttgccctacagctgtaagagcgatcggcacgcagtgttacattaaccttgatagttttgatgccgtgtctggcggacctggtgcacttagtgtggccatgcagtatacaatccacgtcaaaggggcacaggttaaagttcgtggtggagaaatccagcacaacgataacatctacggtgctgctactctgattgagccaattaacgaccctttgtatcacaacacttacggaaacctagaagttcaggcgtgccacattgaatcagcagctcagctatgctttatagcaaacttggatggcgtagcggcgccgatcagcaacagaagtcgggtatcattcagcggaatccatggttaccactcacaagataatggtccaatgattaacgttcacagttccgcatcggactatgctgggtcgatatacacaagagatatgagcctttattgcggcgtggttcgaagccagcctaacatccttggtggcgtaagcactcatgtatactacgatgaagcaggatttggtctcaacttcgtaaaaggtctccaggcagtttctggaggaatccttcattttacagaaagacctgttgcgatacttaaaaacgctaatggacaaactttaaatacatcattaaatacagttatatggactgaaccaacatttaatgatgacacttacaggtggcaatctaacatttcatccggtgtttttacggtccctgcaggtggtttaaaaaacgtaaaagttgattctgttattagaattaactccggcgctactatttcacttgatatttttgttacaccgtcaggtggttcgccaatagttagatcacttacaatgccaaaagctactactgcaaatgtttcaacttttcttggtgatttagcggctggagataaggtgtttgcacaggcaaaaattgatgcaggaacggcgcagaccaatggaggtcaattagagatgatagtaataacagcctcaagataa

SEQ ID NO: 143874 - DNA, 405 bp, Enterobacter cloacae
atgtcaaccgcgctgacaacggagtcactcaatcaggggcttagcctgggtgcgctggcttctgtcgtcgtcggtgtccctccagaggtggcgctaggtgcgctggctggcgcggtaatttttgttacctcggcagtagagtatccgattaagcgtcggttactgctggcgttcctcagctacctatgcggagttctcttctacaaagccacagcgacgttgcttatcggaatagcgagttggatcccgaaaatcacacctgactcattcgagaaggggatagtgttttcagccggggcattcgtgtcatctatcgtcgctgtccgcattggcatctggctgtatcaccgttctgaaaatccgcgcgacctgatcccggggagaaaagacgatgaccagtcctga

SEQ ID NO: 143875 - DNA, 489 bp, Enterobacter cloacae
atgatctgggcattcgtgaaagcgtactggaaacagttgcttatcgtggctatgcttgctgctctgatcatcagcggagtggttgcgtggaatgtccacggtgaccggcagtacgtcgcaggatacgcgcaggcacagtcagaccagaaacaggctgatgataaggccaggtcacaacgtgatcaggagaagacacaaattgaacgtgaagcacaatcccgtatcgatgtggcgcgtgttgatgctgagcatgctaataccgctgctgacggcctgcgcgccgagcttgacaaaaccaagctactcgccgaacactataccggatctttccccactggcacgccagccagcaaggtcattggtgtgctcgccgacatgcttgaagagagcaaccgatcttacatcgcagcagcagaagaggctgagcgatatcggtctgcaggactcacatgcgagcggcagtacgactccctgaaaatggggcactga

SEQ ID NO: 143876 - DNA, 219 bp, Enterobacter cloacae
atgctgatatataacgtttttggacggcatattggcgttcaacgtaagcatgatcggtggctggtatttcgtgctgacctgacggagagaaagttttctcggctctatgacatcgctattcctgacgatatgactgaaggcgagattgccggctggctgagtgacattctccatgaagccgcaaccgatcgtcatccaaatgtgggacgcatcgaataa

SEQ ID NO: 143877 - DNA, 525 bp, Enterobacter cloacae
gtgaccgtcaaacgacccgtttccggaagccttgcctgggctttcttttcgataattgccttatcggtgctgaccagcaccgtcgcgctgctgacgcttgccagcagccagcgtgacgccgaagctattaatatcgcgggttcgctgcgcatgcagagctatcgtctgggctacgagatgcagcgcaacagcccttcccttgccgcgcatcgcgacagctggcaacagacgctgaacgcgcctgccctgcagaagctaaaccgctggtacgtcccggacgatgtaaaagcgcgctaccagcagctccacgtggcctggctggaaatggatgtgcacatcgcccgcggcgacagcgcgtggtatcaaacccacattgaggattttgtcggccgcattgatgcctttgtgctcgcccttcagcactacaccgaacataaaattcagacggtgaccctgctctcgctggcgggtgctctcgggatcctgctgctgacgctgtttaccctgcgacgcatccgtcgctag

SEQ ID NO: 143878 - DNA, 618 bp, Enterobacter cloacae
atgaccgacaagcactggtcaagaatggaatatctccatcagacggtaaccaatccaaatattcatatcaaagggacgcacagctattacagcgactgctgggacaacggatttgaacgtcccgtggtgcgctatttgctcggcgacgacgtcagtcggaactgggaaccactcgggcggctggataaattatttatcggtaatttcgtctgcattggcgccgagagcgttattctgatgggcggaaacagcactcatcgcatggactggttcagcctttatccctttatggagtcgataaaggaagcctacctgtcacgcggcgacacaacgctgggcgatggctgctggctcggcatgcgggcgatgattatgcccggcgttaccattggtgaaggcgctgtggtagcggcgggcgcggtcgtgaccaaagatgtgccaccctatgcggtggtgggcggaaatccggccaccgttattaaataccgtttttcagaagacgatattgcccgactgctcgcgttaaaaatatacgatctgcctgaagaaaaactgctcgcgatacagccaatattatcctcgggaaatatcaccgagctggaaacaattttacgataa

SEQ ID NO: 143879 - DNA, 5034 bp, Enterobacter cloacae
atgaaatcatcaaatgcgcctactatttcgcgcccgaaggttatcgttggctggctgacgataatcactcaggctgcactccctctgagttttgcttatacgcctctggttcaggctgcggcgaaagaagatgaaaccaaatggtatcagtcaggcaaaaataccccgtcgatcttcgaagacaatgcgagttctcttgccgcagccggctcggcgctgtcgcagcgcgattctggaggagcagcagaaggtcttgcgcgctctgccgccaccggtgcgctgaataacagcgttgaggagtggctgagccagtttggtaccgcacgcgtgcagcttaatctcgacgataaatttaacactaacggtagcgaagctgacctgctggttcctctgtacgacaacaaatccactgttttcttcacgcagcttggttttcgtcaccaggacgatcgtaataccggtaacgtcggtttaggagcccgccattttgcgggggactggatgcttggcgtcaacaccttttacgataatgactttaccggcgacaaccgccgtttcggcctcggcgcagaagcctggcgcgattatcttaagctttcggcgaacggctatttccgcctgagcgactggcatcagtcccgcgatttcgccgattacgatgaacgcccggcaaacggttacgatcttcgggctgagggctggctaccggcctatccgcagctgggcgcaaagctgatgtacgaacaataccagggtgatgaagttgccctgtttggcaaagataaccgccagaaagatccgtgggcctttaccggcggcattacctatacccctgttccactgtttaccctcggtgcccagcaccgcgcgggtaaagatgggcaaaatgattcccagctctccctgcagctcaactaccgtctgggcgagtcctggaataaacagctcgatccggatctggtcggagcctcccgcacgctggccggtacccgctacgatctcgttgagcgtaacaacaacatcgttcttgactaccgcaaacaggagaccgtcacgctgaagctgccggagaaaacggtgggcaaaagccgtggaaccgtcgctctgaccttctctgtgaagaccaaaaatacgctacagcgcatcgactgggatgccccagccctgctagccgcaggcggcagtattattcaatcaggtgacaatcgcctgaacgtcaccctgcctgcttaccaggtatcgggaagcaatacgtatcggattgccggtgtggcttacgacgctaaaggcaacagcggtagcgccacggcagatatccaggttgacgtgggtgacgtaagcgtcggctcctcttcgatgacggcatccccgaccacgctgccggctgacggcaagagtacctctacgattaacattaatatcgtggatgccgacggtaacccggtaccgggtatggcaaagtcgctgtcagcctccgtgaaggaaacgcaggccgttgtcacctacgcggcaaatttaccggcgaaagaggcgaccctctctgcggttgaagagacttctccgggcgtgtatcaggctattgttacagccggaacgcgcgcgggtaccgtcaccgtgtcctcatccttcaatgacaccgccttaccggagattactatctcccagcaggcagataacagtaccggacgcatcacgtctgatgccatcatcgtgaccagcgataacagcgtggccaacaacaccgcaatcaataccgtgacggccaccatcacggatgcggcaggtaacaagctggcgaatgtccctgtcaccttctctctcagcggttctgcgaccgtggcggcgggttcagctctgaataccgtaacggatgaaaaaggcgtcgtgtccgtggcattcatcaataaagttgctgaaacggtgaaggttaccgccacgctcgccaacgggaactcaggtaccgtggactcgcactttgttgcggattccacaactgccgcgattagcagcgccggagatattacggttgataagaccaccgtcattgctaacggcagcgatgcggcaacgttcagtgccatagtgaaagatgctaacgggaacccggtgccaaatgtagccgtcacgtggggcagcgataaaggcgttctctccgggacaagcagtacgaccggagccaacggcgtagcgaccatcacgctgaaacacacggtggcagaatcagcacaggtcaccgtacaggtaggcacctccggcgctgttaacgcccccgcagtcaacttcagcgcggataccggcagcgccactctcgacagcggcagcctgagcgtcgataaaaccacccttgtggccaacaatgtcgaattcgccacttataccgccacggtgaaagatgccaatggcaatccggtaccgaatctccctgtagagtggaaaacggatctgggaaccttatccggcagcatcatccagaccgacagcaacggcagcgcgagcgtgacgctaaaaggcacgaaagccggtacggcacaggtgacagcgtcacttaacggtgcagccccggtaaatgccagcagcgttaccttcacagcggacagcaccagtgcaggtattggaagcggtgacgtgagcgttgataaaacgatcctgattgccaacggttccgacatcgcaaccttccgcgccgtggttaaagacgccaacggaaaccctgtctccggcgcaaccgttaactgggccaccgataaagggatattatccgcaggatccagcgtctccggaactgacggtgttgccacgattaccctccacgatacggtaacgggcaacgctcaggttactgctcaaaccggaagttctggcaacatcagcgcacctcaggtggaatttattcccgataacgccagcgccaacattggcagcggcgatgttacggtcgataaaaccactgttgttgcaaataacagcgacgtcgcgactttcagcgcacaggtgaaggacggccagggtaatccggtaccgaactttgtggtgaactggaataccacaaagggaacgctctcaggcagcacgacgatgacgaatgcgagcgggatagccacggtcacgctgaaagataccgtagcgggcgcagcaacggtgacggcacagtcgggtacgtcttctgccatcagcgcacctgccgttgatttcaccccggacagcacaaccgccgcgattggcagcggcgacctgacggtagataaaaccagtatcgtcgccaacaacacagacctggccacctacacgtcagtagtcaaggacgcttatggcaacccggttcaaggtgtgaccgtcacatgggcgacggatctgggcgtcatgtcctcgtcaacatccgtaaccgacagcagcggtcaggccaccgcaacgctgaaaggcactcaggctggtatcgctcaggtgacggcctccgttaacggcagcacgccagttaacgcggcaagcgtaactctgacggctgacagcacctcagcggctgtagcaagcggcgatatctccgtggataaaaccacgcttgttgcgaacgcgactgatacagcgacatacagcgcggtgatcaaagatgccaacggcaacgtggttcctggcgtcaccgtgaactgggccaccgacaaaggcactctctccggcagtaccagcgtgaccgggaccgacggcgtggcgaaaatcaacctgagcagcacggttgcgggtgatgcacaggtcgccgtgaaaattggatcatctgccagcgttaatgctccagtggtcaactttaccgctgattcagcgtcggcaggtatcaacagcagcgacctgacggtagataaaaccacgctggttgccaacaacacggagtttgctacctatacggcaatcgtcaaggacgcaggcggtaacctggtgccaggcgtaagcgtcagctgggccaccagtaacgggacactgtcaggcgcgaacagcaccacgggcacggacggcaaggcaaccatcacgcttaaaagcaccgttgcgggtaatgcgcaggttaccgcgaccgttaacggcacgcctgtcaacgccagtaatgtgaccttcactgccgataccgcgacggccgcgattggctcgggggatttaacggtagataaaaccaacgtggtggctaacgatatcgatattgctacctacactgccctggttaaagatgcgaatggtaatgcagtaccgaacattgcaatcagttgggcgacaaatctgggcactctgtctggagcaaccagcaataccggcgatgatggtaaagcgacgataacgctgaaagggactaaagcgggcgatgccacggttaatgcaacagttaatggtgcatctcagcctgccgcagcggttaccttgattgctgatgtcaccaccgcaacggtaaccaacctgacagcaagtctttcgaagatgacgggaacaggtacagagtcttctgttcttactgtcaccgtgaaagatgctcatggcaatgctatccctgcaggtcagcctgtatcctggagtacgacacttggtacattagttgataccacgactcagacagatattaatggtcagagcagcaccacattatccggcactacggcaagcggcaatacgaatgctattgcgaccgttgaagctcaagcattggcgggtagtctgaccacagatatcaccatccttccggtctatatggttgggggaaaaacatactggacactgaataaagaccataaaactcttgatgaggcgaaggccgaagcgaactgcgcgacttatggtggaggaacggtagcttctcaggctgatttgaaagagttcgcgagtaatggtggtgactttgcagttaaaaatgtcccaggtgaatacttcaatacctggtataacctgtcgggctcatggatgaccacaagtggtaaattccactcctttaactccggtggttcaacgatcccagttggggggactacaagtggtccaggtagcgattacgtttgtgtaaaataa

SEQ ID NO: 143880 - DNA, 3630 bp, Enterobacter cloacae
ttgaattcgcacggcgtaacaatcttgaataaatttctgtcccgagcgctactgtttcttcccctctggatgatcgcgacggttgattatgcaggtgaaccctcagtacaacagctaaagattttcagccgcgagcggcccgtgttgctcagctttaacctggatgacagtgactggcgctggttagggctgaaacgcgaattaaaagtcgccacatgggcaccggataatcctccgtttgatatcgttcctgattccggtctctacgaaggcatctatgctgactatatccggctcattaccagcaaccttggccttcacgtgcgcgtattccgttacccgtcacgggaaaaggccattgaagccctgaagcgtaaggaagtcgataccctcgttgatgatggcggtgggcaaccggtaaatcaggacgggctcgccgagagcagaagctttatggcaaatctcccggtactggtgaccaatgaaagcactgcgtcacatacggtcaaaccggatatggccatgaagcttgccgttacagaaggttatctcagcgatcggcaggtttcggagcgctttcctgcggccagtatcattcgctttccttccaatgaaagtggcctggcctgcgtggttcatggtcagtgcgatttcttctttggcaacatcaccaccacgagcttccttattgaacgcaactacggcaacgccctgacgacaacggacgttttcgatgcggaaggggccggtaaccgctttattttgcgcagcgatgacaaagagcttctcgaatctatcaataccgttctgagcgccatacctgagacgctgcaaaagaacatttctcgccagtgggtgcagcggcctgacatctggcgctttcagaaaccgcttgatttgacggagcaggaaaaacgctggattacgcatcacccgacggtaagggtgctcgttaactcgttttatacccccttcagcatgctggacgatagcggcgcgtttcatggtataagcgccgatctcctgcgtcttattcatcttcgcaccgggatccgcttcgagcctgtcagggttaactctgcgctggaggtgtacgatcggctggagaataatgaaggagacatggtcggcacggccatctttgattcctcccgcgaagatatggcgcttttcagccgtccgtggatctacacccccggcgtgctggtcgtaaaaaaccagccgcgtgcccctgttgcgctgaataacgcaatgacgcttgcggtggttggagacaggactcagacgctggttcaacagctctcgaaagaatggccgggcatcaggtggatctatacggaaaactgcggaaccgctctggagctggtcaactcggggaaagcggatggcgccctgcataaccagctgggcgccagcttcatgatcgaccgatattttcgggacaagttgaagatcgtcgcgcagctgggtgaaaagccggaccaattgggctttgccgtacgtcgggatgagcctgagctgcaggcaatcctcaataaagcgctggcggatattcagccccaggaaatttcgctgattgtgcataaatggcaaaatgccccggatttctcggttaacacctggcggctctataacaaggagttttactgggtactcgggggggcgggcaccacaatcttactgatccttttctgggtatttatccgcaccaaagagattaaacgtcgtcagctggcgcaggaggaacttcaggcccagctggctttccgtgataccttgatcaacggatcgcctacgccggtttatgtacttaaccggcagatgatggtcacgaccagcaatgaagcctacgcacactattttagtcaactgccggttgaacatcttcgctattcattgcttgaccagcgccatccgctggccgggcttcgggagtatttagccgacgtgttagtgcacaatgaagcgatccttccccacgggcaaacgcgcgaattcaacgtaaacaatggctctggtgcgcgcgtcatcgcccactggtcaacgccgttcacggattcaaaaggcaaaattgctggcctgatttgcggctggcaggatattaccgatcataaacagcttctgaatgcgctctcggtagaaaaagaccatgcggaagaggctaacaaggctaagagcgccttcctggcgacaatgagccacgagatccgtacccctatcagcgccatcctgggactccttgagcttgagtcaaagcgtcagcccgagaacgaagcgattcaggtctcttacgcctcagcgcaaacgttgctaagcctgattggcgacgtgctggatatggcgaggatcgaaagtgggcagcttgagatcgtcccggaatggcttcctcttgattcgctcgtgccgccggtcattaaaatcttcgaagagatggcgcgtcagaaaaacctcgaactgcgttataccagccagactgaagacgacctggagatcagggtagacagcggtcgcctgcgccaggtcattgctaactatctgagtaacgcggtgaaatttacgcagcacgggcacgttgagctgcgaatttacagccagagaagcggtgatgatgccctgacgctgcacattgaaattgaggacagcggacccggcatcagcctgtccgatcagaaaaagctgtttaaacccttcgcccagcttgaagctggacgcaaccatacggggaccggtcttggccttgtgatcggcagccagctgctggaaagaatgaacggcagcatgcaaatgcgaagttcacccggcagagggacgcagatcttcatcgagctgaccgtgcccgttcgccagcagcaacataaggccgattccgtcagcgcgttgcgtgcagatacgcagcgggcgttgtcgatcctgattgtggacgatcatcctgtgaaccgcatggtgcttaatcgtcagctttcgttacttggccacaccgtaaccgaggcgacgagcgggcaggaggcactggtctactggcagcaggagcgttttgatttgctgattaccgactgcaccatgcctgggatggacggttttacgctgacgcaaaaaattcgcgatgcgggaagcacaacgcctgtgtttggcctgacggccaatgcccaaccacaaacccgggcgcaggcgatagctgccgggatgaatgaatgtctgtttaaaccgctgcgcttggcgaatttaaaatcagcgttgcagaaggtcgcaaacactgagttacctccgccgctccatgagcaaattcgtcttaatgatttaaaagagatgattcatcatgacgacggcatgcttggccggttgctgtcacggattggcgaagagaatgaggcggatatacatgaatgccgtaaatggctcgcctgcggtgacagagcatcactggccagttgtcttcatcgaattagcggcgcggcgcagataatctgtgcaacagaaattgatgagcttgcggcagaaattgaactgctggcgctgaagacgggtcatgacgacgaaattagggcggggctggacaggctggagactaagctaaaagttttacggctttcgatcggccagtatcttaattcggctacccatgtggaataa

SEQ ID NO: 143881 - DNA, 624 bp, Enterobacter cloacae
atggcaaaagtcatgattgttgacgatcatccaatagcccgaatggctattcagtttctggtcgaaaaggaagggcacagcgttgtggctgaatcaggcgatggcgcggaagcgctttcgctgatcgacgagcatcatccggacattcttgtgatcgacattgatattgccacgctcgatggtatcgaagtcgtcaggacgttacgtgcgaacagctatccggggatcattattgtgatttccggcaaaaaccctgaattttattcgccccgaagtgccctgagcggcgcggatggcttcattagcaaaaaaaataacttacccgagatcatcaccgccatccgtgcggcgcaaaatggctatggctatttccctctcaaacgtttcgaatccccgcaaagccagcaggcgatagacgatcgggaaaggctggggatgctgtcgccccaggagtttcaggttttccagcatattattaaggggctggaaaatatgaaaattgccgccaaaatgaagatcagcaacaaaaccgtcagcacttacaaaagccgcctgatggataaactgggttgtaaaactcaactggatatttttgaattcgcacggcgtaacaatcttgaataa

SEQ ID NO: 143882 - DNA, 633 bp, Enterobacter cloacae
atggtcaataatcccgacaatggttctcatgctatgcatgaaaaagaaaagcgaattatcatcgtcgtccgctgtgtgtttacgttacagggtctgagtgctttatgtcattctgcccactggcgggtacaggcgataacgcctgaggcatttgatgcgtacacggtgctcaacgatcaaagacctgatttactcattattgaatcggagtgttttgatgaacaacgttcacaggcgttgaccgtcatgaacgtgctgccacataaaacgatcgtattgacgaacagttactccggtgggctctgcaaagtcccttctgcgggcggaacgacaatcatggttgataagtcggggtccgtgatggccctaaaatggctgcttcaacgaaccgcaaatgagaggcacagcgtgcaaccagggccctgtcgcgttcgacaccaccgggccagaatggcggaacgtgaagttctccgtcctctgctcaacggtgacagtcccgatgcggttgctgaaagaatgggtatcacctattcggccgttagccgctataaaatgtccgccctgcgccgtgctggcgtcagaacgcttaatgaaattgttatcggaaactacaaaggattgctgacagcttaa

SEQ ID NO: 143883 - DNA, 1017 bp, Enterobacter cloacae
atgaataaaagtccgcttgcattaattatatatatgtccggaactcttttcgtttccacgctaagcgcccccgttttggcaaatgaaaaagtatccacgcctgtcgccgtacaaaaaacatttgatggttctattcaaaacaactcgctggcaataagtcccgatgaaaaattggcggtggtctcttacagcgccagaacggatatcgccgtatacgatcttgaaaagggcgagttacggcaggttatcaacggttttattacgccgcgtaatatcgttttcgcaccggatggcaacagcttttacgtatcagacagcagtaaggggaccgttgaacgtattgacagcgcgtcgttgaacgtcacgcataccttttcaacggggccgggcagttttggtacagccttaagcaaagatggcaaaacgctctggatcaacaatcaggcaggtaacaccgtgacccgtcttaataccgatagcgggctggcagaaacggtcattaccggtttttcgcagccccgacagggcgtgaagctgagtccggatggccgtactctctacgtgacaaacttccttggcgacaagattaccgcagtggatacgtcaaccaataaaattacgggggaaataaaaggattcagcaaaatacgcgctatttctgttagtcaggacggtaaaacactgtatgcggctaacagcgggagcgacaccatcgcggtcgtcgatctgccgaaacagaaaatcatccgcaccgttgaggttggaaaaaatccctatggcgccgcgctctctccggatggaaaattcatttatagcggtaacttaacggggaacagcctgtcggtgatcgatgttgccagcctgaacgtcacgaccaccatcaaagggtttaatgagccaagacaagcacttgtttttacgaaggacggtaactatctctgggtgctgaataaagatctcagcctgtcaaaagtcgaccgaaaagagcaaaaggtcgttgctaccattaaagagtaa

SEQ ID NO: 143884 - DNA, 1176 bp, Enterobacter cloacae
atgaaaaagacaattttttcgttggcgcttggcacatttggcctgggaatggccgaatttggcattatgggcgtgttaaccgagcaggcacatgacaccggtatttcgattccctccgccgggaatatgatctcgttttatgcgttcggcgtggtgattggcgccccgattgtggcgctgttctcaggcaagttttcgttaaagaccacgctgctgtttctggtggcgatgtccgctgtcggaaatgccctgttcacgttttccacatcctatttctggctggcggtggggcggctgatttccggctttccgcacggggctatttttggcgtcggggcgattatcctgtctaaaattgcgccaccgggtagggtgacggtcgcggtggcagggatgatcgccggcatgactgtggccaacctgatgggcgttccgctggggacctggctcgggcaccagttcagctggcgttataccttttttctgattgccgtgttcgatgcgctggtgatcctctcggttctgctctgggtgccggacatccgcgacacgtcagaaatcaaattgaccgatcagttccactttctgaaaaaaccagaaccctggctgatttttgccgccaccatgtttggcaacgccggggtgttcgcatggttcagcttcgtcaagccgtttatggtcatcgtctccggttattcagaagggatgatgacggccatcatgatgctgatggggcttggcatggtgttgggcaatcttctgagcggtaagctctcggggcgttttagcccgctgcgcattgcggccaccaccgacatggtgattgtcgcctcgctgctgctgcttttcgcctttggtgaactgaaaacggcctcgctggtcatgggctttatctgctgcgccgggctgttcgcgctctctgcgccgctacaaattctgcttctgcaaaatgcgaagggtggtgagatgctgggggcggcagggggacagatggcgtttaatctcggcagtgcaattggcgcgtactttggcgggatgatgattgtcctcggctttagctggcgttacgtcacgctgccggcggcaatactttcgttctcggccatgagtgcactgctgatctacggccacctgcgggccagacgggctcaggctaacgctcgcgcgctagcctga

SEQ ID NO: 143885 - DNA, 1536 bp, Enterobacter cloacae
atgatcacagaaaacctcgtcgatcaggctttcctggataaatactgcgtcggctatgacgagaaaaccctgccagccagcgcgcctgctaacggtcactacaaggcgtatattctcgggcagggcagcgacggcgtggcgaaaacgcccgagtgggcgtccaccatcaccggtattccggtggagcgtatcgttcagctggcgcgcgagattggctcggccaaaccggcctacatcagccagggctggggaccgcagcgccatgcgaacggcgaaatcgcgacccgtgccatctccatgctctccattctaaccggcaacgtcggtattcacggcggtaacaccggcgcgcgtgaaggctcgtatgaagtgccgtttgaacgtatgccgacgctggataaccctgttcagaccagcatctccatgtttatgtggaccgatgcgatcgaacgcggcccggaaatgaccgccctgcgcgacggcgtgcgcggcaaggacaagctggacgtgccaatcaagatgatctggaactatgccggtaactgtctcatcaaccagcactccgaaatcaaccgcacccatgaaatcctgcaggatgataagaagtgcgagatgattgtggtgatcgactgccacatgacctcctcggcgaaatacgccgatatcctgctgccggactgcaccgcctctgagcagatggatttcgcgctggacgcctcctgcggcaacatgtcctacgtgatttttacggatcaggccatcaagccgcgcttcgagtgcaaaaccatctatgagatgacctctgaactggcgaaacgtcttggcgttgagcagcagtttaccgaggggcgtacacaggaagggtggatgcgccatctgcatgaactctcccgtaaggcggtccctgatctgcctgatttcgataccttccgcaagcagggtatgtacaaacagcgcgatccggaagggcaccacgtggcgtacaaagcgttccgtgaagatccgcaggcgaacccgctgaccacgccgtcgggcaaaatcgaaatctactccgaagagctggcaaaaatcgcgtcgacctgggagctgccggaaggggacgttatcgatccgctgccgatctacacgccgggttttgagaactacaacgatccgctgacggcgaaattcccgctgcagctgaccggtttccactacaaagcgcgcgtgcactccacctacggcaacgtcgacgtacttaaggccgcctgccgtcaggagatgtggatcaacccgatggatgccaaagcacgcggcatcagcaatggcgatcgcgtgcgtatcttcaacgggcgcggcgaggtgcacattgaagccaaagtgacgccgcgcatgatgccaggcgtggtggcgctgggggaaggggcctggtacagccctgatgccaaccgcatcgaccaggcgggcagtattaacgtgctgaccacgcagcgtccgtcgccgctggcgaagggcaacccatcccacacaaaccttgtccaggttgaaaaggtttaa

SEQ ID NO: 143886 - DNA, 639 bp, Enterobacter cloacae
atggctaatattaatatcaggtcaacgcgaaccgagccagcccctttgctggcgttgatgaaacaacttgatccttttttgcattatcaccctgtcgcggttaacacccgctatgtcatctcagcacagcaacaatcacaatgttatttcgtccgctcgggtgcgatctcaatgtaccgtcagccggatgatattctcattgatctgtttgatgcccctacccttcgcggcgtgatttcgcttccggcagacacactttcaacctatatcattaaaaccatcgtcccgtcagaaattgccatccttgagcgggaaaaactgttcgcccttttgactgagcataatttgtgggaactcttttcccgccaccagcttgctattggcagcatggtaatcgagaagatgtttaagctgattaccccaacaacctataatgttgttcgtcaccaactgtatgagctgatcaatatcccggcggaaattcgtgaaaccatcctggcagagacctatatccgcagtaaaacccgactctcccgcagcggcattatgcgcatcctttcagatctgaaagacggaggatatatcgtcatcgtcaaaggtgtacttaaagaggtgaagcacctgccggaaaactattga

SEQ ID NO: 143887 - DNA, 303 bp, Enterobacter cloacae
atggtatttctcaactttattgttgtacagatgaagaatacagtggggaaaatgaatacattatcaagcaagaacatgcgcttagtcactaaagataataagctggttatcttctattgctttgaggatttcaggaaatggtatttgcaacttcacgactttagcatgttttctgaagcagatattcagactatgatcaacgaggaaaaaccggaatattatccttgctcacccttaattatcgacgcatatcatggtatatattatttaaacacaagtaacatcaaaattaaattattatag

SEQ ID NO: 143888 - DNA, 522 bp, Enterobacter cloacae
atgaacgcgaaaaaaattgcttttgttgcagccatggttgctgcggctttagtgggtaatgcaaatgcagccgatcagggccacggtaaaattacctttaccggttctattattgatgcgccttgctctattagcccggacagtatcgaccagaccgtttctctcggccagatttcaaacgcagccctggctaacagcggaacgtccgttccacgcaactttgaaatcaagctggaaaactgcaccgacgtgactgctaaatctgtcaccaccactttcaccggttctgaaggtgcaactgcgggttcactgggcatcacgggtaccgcaaaaggcgccagcatcatcctgaccaatggtgacggtaagcagatcgaattaggtaaagcttccgacggccacatgctgcaggacggtaacaacacgctgctgttctctgcttatctgcagggcgatgatggtgttgacgcagttccaggtgatttcaccgctattgctgacttcactcttgcttaccagtaa

SEQ ID NO: 143889 - DNA, 561 bp, Enterobacter cloacae
atgagtaaattaacgcgcgccgtacagacgtttttatttaccgcaatggctttcgcggcacaggcctcgcagggaactgcaaatccgtcatctgaatttgatcccgcgctgaccgggcgtatcagtatggatggctcgataatttccagtgcctgcgatattgataccggagatggctatcaggaaatctccatgccgggtgaaacgcgcggacatattaagcgtacaggcgaaggtgagccgcaagatttttccattcagctcactcattgtgctcttgattcttccgcagagcctgcgtcctggcagtatatcaatattatctttgacggccaggatgaagacggtctgtttcgggtaagcggcaacgcttctggcatcgcgctggaattaaaggacagtcagggcaatgttattcacccgggggaacccacgccgtggcaacagtcaacggtaacaaataatcgtctggattaccggtttacactcaaaaataccgtgcgcaacttagttgtgggtgattacagcgcaattatccgctaccgcattgagtatttttga

SEQ ID NO: 143890 - DNA, 762 bp, Enterobacter cloacae
atgaagatgttaaaccgtaaaaataccctttccgttctggctgtagtgctgggtggtctgatggccgcgcagcaggcgaacgctgcaatttcgctggatcgcacccgtgtgatcgtgaacggcggcgagaaatccgtcagcctgaacatcagtaatgagaacaaaaacctgccgtatctggcacagggttggattgaagatgcgcagggcaacaaggtgtcctcaccgatgacggtgctgccgccggtgcagcgcctggaagcaggagccaaaagccaggtgaaggtgcagacgtcaccggccatgagcgcactgccgcaggatcgtgaatcgctgttctacttcaacctgcgcgaaattccgccgcgcagcaacaagccgaacacgctgcaaattgctctgcagacgcgtatcaaacttttttaccgacccgcagccattgcgctggacaagactcaggcagcaaccggggactgggtggagaaagtgacgcttacgcgtaacggggataaatacgtgctgaacaatcccacgccgtacttcctgactatcgtggaaggacgtacgtcagaaaaggggagcccggtgagcttgcagccagtgatggtggcgcctaaagataaggtgaccattgaggcctctgccgcagccctggggacctcaccggtactgacctacgtgaatgattatggcggacgtccaaaagttcagttcacctgtagcggcgctaactgcacggcaaaactactgaaaaaccaataa

SEQ ID NO: 143891 - DNA, 582 bp, Enterobacter cloacae
atgaacggaatgacgaagacggttctggccgttagcctgctgctcgcggtatccggggcagcccgtgcggaagatgagaagccgctggtagataccggcacgttatttgtccatggcgatctgctggaaaacacctgccggatgaccatggactcagcctggcaggatgtggatctcggcagcaccagtcgggccgacgtgaaccaggtcggcaaagcggcagccccggtgaaggtcaatatctatctgcaggactgcccggaactggcgaactggagcaccaacatcacgccgatgacgacgactttcagcacgctgcagccgccttacaaggcaagatttacggcggtacaggacgagagcaacccggcgctgattaaagtgacgggtgcatcgggtatcggcctgcgcctgcgcgacagtcgcggcgaaacggtgatgctctcgcgtaacagcgacagtattttgctgaacccggggcagaaccaggtgacgtttacgctgcaaccggagcggacttccgcaccgtttgtcgccgggccgtatcacgcgctggttaacttcagcatgatttaccaatag

SEQ ID NO: 143892 - DNA, 492 bp, Enterobacter cloacae
atgagcaaaatgaaatggctgggcgtcgtgctagcgctgacggcgtatcagggggcatgggcggctcagaatacggcaatggttacagtgaatgtgaccatcaacacctcgccgtgcgagataaacaacaatcaaattattggcgtggatttcggcgataacgtgattaccaccgacgtagcgaaaggggttgtggaaaaagaggtgaattacacgttcgattgcacaagcgcggaccagagcaaaacgttggcgatgaccattaaaggcgctggggcagattttgatgctgatatcctcaaaaccactatcccggaactggggatccgcatcaaagcggacggtatcgactatccgctgaacacgaaactggcgctggcgagctcgaccagcaaacccgcgctgaaggcgctgctggtacagcagccaggcgcacatctgccgaccggcgcttttaccgctggggcaacaatgacggtgaactaccagtga

SEQ ID NO: 143893 - DNA, 483 bp, Enterobacter cloacae
gtgaaaaagcgaatcatcacgttaagcctggcagggctgctgtctctgggcgctcaggcggctgaaaatatggcgtttcacggcacgctggtggcacccccgtgtagcatcaataacggtcaaaccattgaggtgctttttggcacaaatcttggggtgaataaaatcgatggaatcaactataagcaacctgtgaattacagcgtggactgcgatgcggggtacagcgttaacaatctggcgattgtaatcgataccgccacgcccgcagcctttgatggctctgcggtagtgacgaacaaaaccggcctgggcattcacattctcgtggacggtgtggcggccaccttcgctaagcgtgttgctgtagcagacccggcgtcgccgccgaagatagaggcggttccggtgcaggactcggcggttacgctcaccgaaggggcgtttgaagccacaatgacgctgcgtgcggattacctctga

SEQ ID NO: 143894 - DNA, 528 bp, Enterobacter cloacae
atgaaatttgtactattccttccggctttgctggccggcatgctgacggtgaatgcgtcgcgggctgcggaaaacgtccacttctcgggagccttagtagctgagccctgtacgctgcctgatgccgacacggatattcatgtcgatttcggtacggttgttgttaagtatctttatcagtatcagcgtactaagggccagtcgtttaccctccatctggaagactgcgatccttcgctcatgaatacagtgggcgtcacgtttgaagggcaagcggacaacgaactcaaggatatgctggcacttgacccagcgagcagtgcaaaaggcgtggcgattgggttttcgatgccggatggttcttctctggccgtgaataaaatcagtcctgtcaagcagctgagtcagggcaaaaacaaccttgatttctacgcttacgttcaggctcgacctactgcgattacggcaaaaacgctcgctgttggtgacttcagtgctatcagtacttttgtattaacgtatcaataa

SEQ ID NO: 143895 - DNA, 249 bp, Enterobacter cloacae
gtggccaccacgtcgatgggtgtacagtgctctgtaccggcttcggttacgttcaacctgattacgaaagataaatatgtgtatcttgatgaggggaaatccgaattaaccgttgctgataaaccgctgaacacaaaaatcgatctgccagagggcgattcgctggtgcccgttaaagatcttctgacaggcgtgaccaaagagggtttccatacggggtccagcgttattgtgatgatgccttactaa

SEQ ID NO: 143896 - DNA, 600 bp, Enterobacter cloacae
atgattaaaatactcatcaatattcctgatgttttttttgcctatggactaaaagaaagattaaggattttttttcacaatgccggaatggacgttttatttgaatttggtgagggaggggcgttaaatttttcacctgatctgagcattcatcactttgcacgtggagaaatatttacttgcccaggtgtaataaattgcaatcatgcccatattactatcggtataattgaacaagagtttgttgtgaacgacttgccgaattgtctaaaaaatattatccctgttgattataatttaagcttgcaggggctggataatatattaaagcgtattgttttaccgaaactacaagcgaacttcacaaatatgtatttttctaaagttgggtgttataactgtaggcacgttaagcttactgttcagcaaactaacatattaaaatacgtcacagcagggatatcaatgagggaaatttcaaagcttatggatgttaatataaagactttatattctcataagtatattatttataggaagtatggtttgaaaagcctaactgatattataagtttaatgcgaaaaataaaagttctctga

SEQ ID NO: 143897 - DNA, 1035 bp, Enterobacter cloacae
atgtttctccgcctcagtgataaaggcgtctcccgggtttattcgcagaaaacgggcgacccggatgtgaaagggatttacggatttgacagcgtggtgcggctgaactcaacgtacctggagctggttgatcggaattacagatggcgtgaaggttggacatttgcgggagctttctttttttgtctgttcctgggtttgttttttcagccactaattacactgttacaaactggctttcatagcattggcatatggattgttgccatcattctctggatcgttatgttactgctatcttggggggcaagccggataatggtctctgaagtttttttcagtacctattacccgatccgctttaaccgtaaaaatgggatggtgtatgtctaccagtccggtggagatgttttgtcgataccgtggcaggattttcgctttgttctgaccaatggaaagaatttcaccattacagaatgggccattatagggtgtgttatgggagatgacggggacacgatcacgcgaactttcccccttcctattaatctggcctgggaccccgaagacctgaccatgtactgggaatttatccgctgctatatggaagagggggatgagtatctcccggacctcgcggactccattgcctggtgcccgccggttgaaaagcagaaagagggctggctgttcggactgctctaccttagcaagcagtggctcgggcggctcggcctgctggtgaatgcgctgcagcttcccttctttttcgtcatcagctttccgcgctggctggtcatgctgacctgcaaaataccggaatggcctgcggaggtagctgctgcctgtcagccggacgagaatgaccctgtcaataaaggcgctgagcataatccaccgcaggtctggcgaccaatgctgggcttgcagggcaaggagcgttatgcccgcacgtttgcaaaagagcgcggagcaatggaccgggttgttgcccggctgaaagccaaatatggcgggcagaaccatgcggactga

SEQ ID NO: 143898 - DNA, 1590 bp, Enterobacter cloacae
atgtcttctaatacagcaaagaaaatacctgcctccttatctaccacaaattcttcttcagaagactctattcaaactatcgttaaccggcaatcaaaagaattaattattgcattctgtggtcctatcggatctgggatcaaagccgttcgtacagcgtttgaaaagaacttaaaggacctaggatatatagttcaccatatacatattagcagtttaatggatgtggtaaataaaaaacaattaagatttagtgacgcctacgatagatatattgaaaagcaaaaacaaggcaattttctgcgagaaaagttcggttatcaaataatggccgaagctgcgatcgctagtattgctgagataaaagagaaatcaaaacctaaagacacttctgaaacgcgattcacaggtaagtttgcttatataatagatcagttgaaaaaccctgctgaagttgagttgttacgattagtttatcagcataatttttatttagtaggtgtagttagaaatgaatctgaaagaaagagaaatcttagagatgaaggcatttcacctcaaaatattgatgatttaatacacagagacagaaagagcggtggaaattcagggcagcaagtcgaaaagactattttagatgctgatttctttataagaaataatcaaagtcattctactcagttaaatcgtaaggtagagcgttttctcggtttagtgcatggaaaaaatggcataacgccatcattgcatgaaaaaggcatgtttaatgcttttagcgcgtcgttactgtcagcatgtctttcacgtcaggttggggctgcaatagttgataatatggggaatgttttatccacaggtagaaatgatgttcctagacctggtggagggttatatacatttgaagatgaaaataaagattacaggtgtatccataaaggtggaaaatgttataacgatcttcataaatcaaaaataaaagaaaaaatagtttacctgataacaaaaaaaattgacggaattaggttagaaacagcatcgaaaccatttgttgaaaaatcaattagagaattattgattgagagtgattttattgaatcattatcttcatcaatatatgaaaactctccaattaaatcattgatagaatactcaagagcaatccatgctgaaatggatgctattacaactttggctagaacaggtgatgcctcaacgaaagataaaattatgtttactacaacctatccttgccataattgtgcgcggcatatcgttgcggcaggtattagtagtgtatattatatcgaaccttacgaaaaaagtcttgccttagaccttcatgatgatgctatcaatgatataaacattgaagattgcagaaaggttaattttattcaatttgaaggtgtatcccctcggcgatatactaaatttttcttctcgacatcagatagaaaggatcctgaaggttttgcatacccctttgcgacaaagtatgagaatcatgcggattttcaatttatggacagttatcaagatatggaagataaaataactgaaatttacacaaaaaaaattaatccagaataa

SEQ ID NO: 143899 - DNA, 648 bp, Enterobacter cloacae
atggaaacaatcatcaccgttatcgccgctgttgctgggatcgctttttgggttgggctaatcaatcctaaattggtttttatgcctaatcgaaagcgctcatctgccatctacttcggggtgtgcctcttggcagcaatcataggttcaatggttgcaccaatcgcgccgaaagctgttgctgataataagcctcagccagcagtgacaaccacagatcaaatacaacccgcggctaaacccaaagaacaattaacaaccactatcgacttttcagaagcgaccaatcaacttcccccggcattatctaaggcgctcagagatctgaatctcacagttaaaccagtcatttacaacaaagccttagtggttgcattcaattttgacagcatagaagaactacaggcgaaaagtgccgttcagtccgtatgcatcagctatttcaatcatggagaatctaacagggcttggaaggctggtttattcgatcatatttatgtgactaacgacattttaaccaaaggctacgtttttcagggcagtgaatcttcgtgtgatatctggggcaagaaggccggggatagtggcgatcaatatttaagtgaaaaccttacacgatcaaggtttgtagccataaatatgaaatga

SEQ ID NO: 143900 - DNA, 1119 bp, Enterobacter cloacae
atggacacgacagaaaaccgatattcgccgcgcccggcgttcagtattgaaattgaaggtaatcagcttacggcgctggataaccggctgatctccctttccctgacagataaccggggctttgaagcggacacgctggatctgactctggatgatgcagacgggcaggtagcattaccatcacgcggcgcaaagatatcggtggcgctgggctgggataatgatccattggtttttaagggcgtctatacggttgacgagatcggacacgctggcccgcctgaccagctaacgatcagtgccagaagcgcagatttccgcgataccttcaacgtgaagagggaatatagctggcacgatattaccgtgggggatgtggtcgccagcattgccagccgctacgatctgcgtgcgggtgtcagcgaagaactggcgaagattgagatagaccacgccgatcagacgagtgaatcagatatcagtttcttaacgcgcatggccgaaatgctgggcgcggtggcaaccattaaaaacggtatgcttctgtttatcacaccgggcaagggagtgacgcaaagcggcaagccgttgccggtgatcgagatcgtccggtcaagcggtgataaacatcggtttaacgtagctgaccgcgacgcgtacacgggcgtaactgcatactggcttgatctcaactttggcaaaaaaccatccactaccgtgaagaaaaccacccgcagacgacgaaccagccaggccaaaaagaaagagcctgcatccagtaaaaaagagggtgattatctggccggggccgaaggtaacgtttttgttattcgtaaaaccttcaaaacggaaaaagcggcgaagcgtgccgctgcggctaagtggcgggagttgcagcgtggagcggcgacgttcagcatcaccctggcgcgtggccgcgcggatttgtacccggaacagcccgccagcgtctacggctttaagtctacgatcgacagtggaaactggacgataacgcggtgcgttcacgatgttggcgggggagggtttaccacgtcgctggaactggaagtaaaaatcgacgactggacagcggagagtgacgattcaacgtcttaa

SEQ ID NO: 143901 - DNA, 1194 bp, Enterobacter cloacae
atggccactaactaccatcacggtgtaaccgtcacggaaaccaccgaccttagcacgatgatcaccgacattgattcggcggtgatcggcgttgtctgcaccgctgatgatgcggacgaagacgcgttcccgctggatacccctgtactgatcacccgcgtggctaacatgctgggcaaagcaggcaaaaccggcaccctgtttaccaccctgaaagcgatttcagaccagaccagcccgcaaaccattgtgatccgcgtggccgatgcgtcaaaaattgttccaccagaaggcggcaccgcgcagacacaggatcaactggttattggcggcaccgatgcaaacgggcgctttaccggcatgtacgcgctgctgtctgccgaaatgcgcgtaggcgtgcgcccgcgcgtcctggctgttccgggtcttgatacggaagcggtagccgcacaactcggcgtcattgcggaaaagctgcgtgcatttgcttacgtgtcagcgaacggttgcaacacgattgccgaagcgaaggaataccgcgagcagtttgcccagcgtgaaatgatggttatctggcctaatttcatctgctacgacaccaacgccggggcgaatgccaccgtgcccgtgggtgcccatgcggttgggatgcgcgccaaaatcgacgctacgcagggctggcataaaaccatttccaacgtgcccgttaataacgtgctggggatggatcgggatatctatttcacgttgcagggcaccgataccgacgccgacgaactgaacgcagcaggcgttaccacgctgatcaagcaggacggctaccgaatctggggatcgcgcacctgcgacgcggaaacgtatatcttcgaaagctatacccgaaccgcgcagatcgtcgcggataccgtcgccgaagcccatttcgcctatgttgataaaccgcttaccccgtcgctggtaaaggacattgtggacggcatcaataagaagctgacctcatacgtgacggctggcaagctgctgggcgcccgctgctggtatgacccggaaccgaatacctcggaaaccctgcgcaatggtcaactgaccattaagtacaactacacccctgttccaccgctggaaaatctcagcctggtacaggagttcaccgacgaatatttcgctacgttttccagcgcagtgaataactaa

SEQ ID NO: 143902 - DNA, 516 bp, Enterobacter cloacae
atggcactgcctaagaaactcaaatatttcaatatgttctttgacggggataactacttcggcatggtgccggaaatcacccccgccaaactcacaaaaaaaaccgaagactaccaggcgggcggtatgccgggttcggttgcggtggatcttggcttcgacgctggcgccctggatatggatatcacgcttggcggccttgatgccggattgctgaaaaaatggggcgttaccactgcggacgggatgcaaacacgttttgctggctcctatcaggacgacgcaaccggcgacgctgtaccgtgcgaaatccagacgcgtggccgcttcactgaactggatcccggttcggcaaaagtcggggatgacacttcgcataagtacaccctgaaaaacacctattacaagctgaccatcaacggcgaagagattatcgaagttgatgtgctcaacatgatctacaaagttgccggtgtggatgtgctggaaaaacaccgcgctaacatcggcctataa

SEQ ID NO: 143903 - DNA, 336 bp, Enterobacter cloacae
atgagcaagaccaaagaaaacaccgttattcttaccgcccctattacgcgcggtaagaccaaaatcaccgaagtggcgatcacttccgtgcttaaacaggctggatcactgcgcggcttaaaagcctatgacgttctgacgtctaactatgacgcgctggttattctgctgccccgcgttaccgctccggcattaaccgccgatgagattgcccgaatggatacctgggatttttgccagttagccaacgcggtggttgattttttgcaaccctcttcggatctgaccgcgacggatacgggcaacgaatcatccgatgcccctgcgaacgcatag

SEQ ID NO: 143904 - DNA, 2946 bp, Enterobacter cloacae
atggcagaccgcaatttaaatatcagggtggcattcagcgccctgaataatatgtcccgccctgtcaacgcggcgcgccagagtgccgccgcgttggcgtctcaaatcaaccagaccaaaaccagcattaaagggcttgagcgtcaggcaaccagctttgaccgcctcaccacagccaataaaaaaaccaccgaacaactggcccaggcgaaagaacaggcccggcaaatggcggcggcttatggcccgttacgccagcgcagcgccgaacaggttgccgccctcaatcagcaacgtgcagccattcgccagttaacccagcagcagaaaggcgagcagacgcagcttaaccagttgcgcgccagcttctacagcgaaggcattgcgataagcagcgccagtcgggcgacggaacagatcaaccagcgcaccgcgcaatacaaccgccagcttgccgaacagcagcgacggcttgacgctgtaaaccaggcgcaggcccgttacagccgcgccaaagaaaccggcgaaaagatgatgagcgggggaatgaaaaccgccgccgtgggtgcggcaaccctcgcacctgtcgccgctgcggtgaaatcctacagcagccttgaagacgcgatgaagggcgtagccaaacaggtaaatggcttgcgtgacgacagcggcaaccgcaccccgcagtatgaagaaatgcagcgggcgatcatggatgccagcgaaaagctgccaatggctaacggtgctgttgactatgccgcactggtcgaaggcggcgcgcgaatgggcgtcgcaaacagcgatgatccgtgggaaaaacaaaaagccgatctgctggctttcgccagcatggcggcaaaagcttcggtagcgtttgaactgcccgccgatcagctttctgaaagcctcggtaagattgccgggctgtataaaatccctacccaaaacattgaacagttaggcgacgccataaactacctggacgataacgcgaagtcgaaaggctccgatattatcgacgtgctccaacgcgttggcggacttgccagccaactggattacaagcaagccgccgcgctgggttccacctttctgacgcttggatcacctgccgaagttgccgccagcgcaaccaatgcaatggtgcgcgaactatcgatcgccacagtacaaagcgataaatttttgggtgcgctggatgaaatcggcgtcaatgctgaaaaagtccagaaaagcatgtcagtggacgccatgggcacgatcatttccgtgctggaagcgtccaaaaaacttgcaccagataagcaggtagccaaccttacccagattttcggtaaagagttcggcgatgatgcgcagaaacttgcgaacaacctgcccgaactacgccgccagatagaactgacgcagggcgcagccgctaaaggttccatgaatcgggaatctgatatcaacaaagcttctctttctgctcagtggcaactgaccaaaaccggcgcggttaacgcattcagttcagcaggggaaacgctccgcgaaccgctgatggatatcatgcttaccgttagtaaggtggttggcagcgtccgccgctggattgaggcaaacccggcgctggttggttcaatcatgaaagtcaccgcagccattggcgcgttgctggttgtcgtgggtggcctgatgctgtccatcggcgcagtgcttgggccgatggcacttgttcgcttcagcttcaccacgctggccggggaaggcggaatagcgcggctgactggtggagtaatgcgcctgggtggtgcgttccagtggcttgctggctcgcctatgcaggcattgttaagcaccggtcgcatggtattcggcccgcttatcacgctactggctggcatttctgcacctgtctgggggttgattgctctctttgcggcggcggcagttgccgtcattaaattctggcaaccaatacaagcatttttcagcggcttctttaccggcctgatggctggccttcaacctataacgcaggcatttaacgccgtatttgcaccactggccccgatttttgacagtatcggcaacgcgatcagtggcgtctgggaatggtttaccaaactgctggaaccgatccagttttccagtgaagcgctggcatcctgcaccagtgccggggaaacgttcggcaaggttgtaggagccgcaattagcgcgctgacgctacctattcaagccgttgctaacgggattggatggatacttgagaaactcggcgccatccccgacgcaacaaaagcagcgcagcaagctgcggaaagtatgcacaaagaccctgttgtctgggagtgggatccgcaacaaaagaaaatggttaaaaagggttggaattggtcgccgaaagacgatcagcagaagaaaaccaaccagaagcaacagcaggccattgaccaacagaaaaagcaggaaagcttaattaactcgctcaaaggcccggccaatatcgtgccgaagatgagcaacagcctggacaagatcgccaccaataccacggagaagaaagaagggcccggcgaaatcgtcttcaagaataagcagccctatatcccgatccggggcggatattcggaaccgcttaagcaggcgcagcgccagctaccatcccttacggattgggtaacgcagcaggccggatcgctgatcgcttccgttacgccgtggcaggttgagaagcccgccgcacgggtgcccgtttcggcgtcgccgtctgcggcttccgtcgctgcgctgatgcccgcgccgggtggcgatgtatataaccttagcttcgactttagcggccagaaactggatgaagaaaccattatcaggcgcgtgcgcgaagaacttgcgttagcgaagcagcaggccgaccggcgcaagcgctcccaactgatcgatcacgtctaa

SEQ ID NO: 143905 - DNA, 450 bp, Enterobacter cloacae
atgatgatgattctggggatgttccccttttcactgcaaaccacgccttaccagagtgcgaataaaaccaactcctggcggcacgtcaaaaacgatcgcgtggggaaatccccgcgctatcagttcatcggcgcagatgaagaacctttcgtacttagcggcacgctgtaccccgaaataagcggcggtgatgtgtcgcttgtcatgctggaaacaatggccttttccgggcgcccgtggcccctgatagaaggcacgggcaggatctacggcatgtatgtgattgagcagatcacacaaaaccgaacggagttttttaaggacgggaaggcaaagaaaattgattttacgctcaacctgaaacgggtaagcgaggacatacgggaaaagctggccgaaacgaccaccgacgatctcttctctctggtgaaaaccaacctttcgatataa

SEQ ID NO: 143906 - DNA, 597 bp, Enterobacter cloacae
atggcaaaggcaaaactgaacagcgaactgatcgccacggtggccggtgatattaccgtgtttaactatgatggtgagacgcgcgaatatctctcttcaaccgttgagtatctggctgttggcgttggcctgcctgccaactcctgcaccgatgcgccgggcgaaagcaaacagggctttgctgtttgccggacagccgattttaccgcctgggaatacgtcgccgatcaccgtggtgaaacggtatacagcactgaaacaggggaatcgttgatcgtttctttgcctggcgattacccggagggcactactacgctggcaccttcgacaccttacgatacgtggaacggtagcgagtgggtgacggatacggaagcgcagcacgcagcggacgtggacgcggcggagcaacagaaagctgcgctactgcttgagtcgcaggcaacgatcagcctttggcagacggagttacagttaggcattatcagcgatgaagataaagccagcctgatagcatggatgaactacatcaaagctgtgcaggcggtggatacgtcgaaagcgccggatatcacctggccggataagccggaataa

SEQ ID NO: 143907 - DNA, 615 bp, Enterobacter cloacae
atgagtaatgacctgttaccacccagcgccagccgaatggagcgagtcgccgcgcgcgtctgtgcgtcgttgggtgaagtgcccgtgccgctgcgccagttgtggaacccgtggacgtgtcgggctgatctgttgccctatctggcgtgggccttctccgttgatcgctgggatgaggcatggccgatcagcacgaagcgtaaggcggtggccgatgcgttctacctgcataagtacaagggtacaacgggcgccatgcgccgggttgttgagccgtttggcttcttcatccgggttaacgagtggtggaacattgataccgcaccgggcaccttcacgctggatattggggtggaggaccagggcattagtgaagaaacctatcaggagcttgaacgcctgatcgccgatgtgaagccgtgcagccgtcatatgctgggaatgtctcttcacctgcaaacaaccggtgatttgtatatcggcgctggcagttattccggcgatacgctgaccgtatacccgtatttccctgaaaccatagccgtgggcggtgatgattacaccggggcggcaatccatttaattgacaccgtggagatcgcaagtggcgactaa

SEQ ID NO: 143908 - DNA, 912 bp, Enterobacter cloacae
atgagcggcacgatcgatttatcgcagctaccgccgcccgtggtggttgaaccgctggacttcgaaacgcttttcgcgcagcgcaaggcggcatttattgcgatgtacccggaagacgagcaggaagagatcgcccgcacgcttgagcttgaatcggagccgatcaccatgctgctggaagagaattgctatcgcgaattgctgttgcgccagcgggtgaatgaagcggcccgcgcggtgatgctggcttattccacggatagcgatctggataatctggcggtcaatttcaacgttgaacgtctgaccattcaggaagaagacgacagcgttaccccgccagttgaagccgtgatggagtcagacccggatttacgcacgcgtacccagcaggcttttgaaggtctgagcgtggccgggccaacggcggcgtatgaattttgggggcgttcggctgacgggcgcgtagctgatatttcggcggtcagtcctgcgcctgcctgcgtcaccatttcggtactgtcgcgtgagggtgacggaacggccagcgatgatctgctttccgtggtcgctgctgccctgaacgatgaagaggtgcgcccggtggccgacagagtaacggtgcagtctgcggagatcgtgccgtatcagatcgatgcaacgctttacatctatccggggccggaagccgaacccgtccggcaggcatcggagcaacagttacaggcgtatattgccgcgcagaatcgcttagggcgcgatatccgtctttcagctatctacgccgccctgcacgtcgaaggtgtccagcgcgtggaactggcgcagcctgttgcggatatcgtgctgagtgactaccaggcatcgcactgcaccgaatacaccataacggtgggtggttacgatgagtaa

SEQ ID NO: 143909 - DNA, 363 bp, Enterobacter cloacae
atgagtacagtccgctacagcggcatgaatgccggttcaggccatgctatcaccgacaacgagcatatagcgcagtctatcggcgatattctgttaacgccgatcggttcccgtgtaatgcgccgcgcttacggttcgcagcttttcaacctgatagatcagccggtcgataacgccataacgaagctgcgcgttatgtctgccatctatagcgccctgtatttatgggaaccgcgtatctctctgaccagtatcaccctgagcgcgccgggtgccggtcggctggttgccactatccaggccaaccgcaccgacaatcagacgccatttaacgccgatatcacattgaggggccaggcatga

SEQ ID NO: 143910 - DNA, 630 bp, Enterobacter cloacae
atgaatttaaacgaactctatcgccttatctgcaatctcgcccgcattggcaccgtgctggaagtggatacggaaaagtaccttgcgcgcgtcgaaacaggcgagaacaaaaccgactggatccgctgggcagtgccgcgcgccggtgaagccgtgacgtggtgggcgccgacagtgggcgaacaggtttatattttgtgcccctgcggtgagatggaaacggcattcattgccggaagcctttacagcgaagacgcaccgccgccagatgctggcgctaccacctgcgtgatcttgcacccggatggcgcccgtatctcatatgacccggaggccagcgcgctggttgtcagcggggtgaaaacggcaagcgtcaccgcgtcggaatccattaccgccaccgtgccggtggtaacggtcaaggcagatacgcgcgttaccctggacacgccggaagtggtctgcaccaacaagctgatcaccgccacgctggaagtacaaaacggcggggaaatgaagggcaatattacccattcaggcggatcgctttcctctaatggtgtcgttgtccattcgcacaaacatagcggcgttcagtccggtggtagtaatacaggtggcccggaatga

SEQ ID NO: 143911 - DNA, 645 bp, Enterobacter cloacae
atggcaggacaacaaaccgatcccctcttccagcagttagacaactggttagccagcgctgccgcgcagctttcgccggggcaccgtcgcaagctgacgcgcgacgttgcgatcgggctgcgtaagcgccagcaaaagcgtatcgccagccagaagaaccccagcggtgaaagctatcaggcccgccgccgcaaaatcctgcgaacccagggcgggataaagttcatatggaatgatgaggccagggagttacgcaactggcgaaccacgggcaggggtgagcaccgcgcaatcaccggctatgacgtggatcgcggtgccctgcgcacgttctataagcgcgatatccagcgctatattgaaatcaatctcaaccagtcaaagcaaaaccgcaccagaaaggatccgatgttccgcaagctgcgcaccgcacgctttcttaaggcttacggtacgggcggcatggctgtggttggctttcaggggcataccgccgaaattgccagcgttcaccagtacggtgaagtcgataacgtggtgccgggtgcccgtgcacgctacccggtgcgtgaactcctgggcatgaccgagggggatttagactggctggccgatactgttgtcgccttcatgcaagagatttga

SEQ ID NO: 143912 - DNA, 495 bp, Enterobacter cloacae
atgcttaaacccgatttgctgcgccaaatgataagccagcatgtgccctggctgcgtgagaatcccgataatatggctgtatacctgcgtaaaggcaggatggtcagcaccggccagcggtcagcgtcatttgagtatcgctatacgcttgaagtgctggtgatggattatccagactctgtagatactatcagtgtgccaatacttgcatgggcgcgcttatatcaacctgatctgttatttaacccggacaggcagcagaacggcataacattcgaagccgaaattctgagtaacagcacgatggatattctcttccagattcagactgacgaatctgtgatcgttaccagcgaagatggagaaatcgtcacccgccaccgtgctgaccctgcaccggggccagaaattggcgcgtggtcactggtatttaaagatgaggtcagcggcgaaacatggcaggacaacaaaccgatcccctcttccagcagttag

SEQ ID NO: 143913 - DNA, 531 bp, Enterobacter cloacae
atggggttgtcacgctggaaagtgatcgtttgtcttgtgctggccgctgctgctgtatggggttttagccactggcgttacagcgccggttacggtgatgccgatcagcactggcgtgaagagtgggcgcaacgtgatgcacgcgatgccaccgcgctggcgaaaaggcaggctgaggcaagggtagaagaacaacgccgacaaggtgaaattgatgcgatcagaaaacaagccagccagcagcttgctggcgtgcaggctgatgccgatcgtgcccgtgctgcttctcgtgggctgcacgacagggccgacaaactcgccaggcaactggcagaccgtgaacgcgcctgcggtgccggaactcccggcagaagcgaggcagaaaccagcggcgccgtactgctcgccgacttgttccgccgcgctgacgatcgagcggggcaactggcaaaagatgctgatgaagcaagagccagaggattagcctgtgaggctgcgtatgatgcggttaagtccgggagggataagtaa

SEQ ID NO: 143914 - DNA, 435 bp, Enterobacter cloacae
atgagcaataacggcatcaacatgctgaaaggttttgaagggtgcaggctggccgcttatcaggattctgtaggcgtctggacgatcggttatggatggactcaacccgtcaacggcgtgccggttggcaagggcataaccattacgcaggaaacagccgatagcctgttgcgtagcggtctggtgcagtatgaaaaaggcgttacggggctggttaaagtcaccatcaatcaaaatcaattcgatgcgctggttgattttgcctacaacctgggcgtaaaggcgctggaaggttccacactgctgaaaaagctgaatgctggcgatttcgccggggctgcggctgagtttccgaaatggaataaagcaggcggcaaggtgttgccggggctggttaagcgtcgggaagccgagcgcacgttatttctggcctga

SEQ ID NO: 143915 - DNA, 336 bp, Enterobacter cloacae; identical to SEQ ID NO: 15004

SEQ ID NO: 143916 - DNA, 201 bp, Enterobacter cloacae
atgaacgttcaggcgcagcaaaacgacacgatcgacctgctttgctggcgctattacggcagaacagcaggcgttaccgaggcggtgatcgatgccaataagggcatttccgccgccactgagttgcaggccgggcagattgtctacctgccagaaatccagccgccagtccagcgggaaaccgtgcagttatgggattaa

SEQ ID NO: 143917 - DNA, 489 bp, Enterobacter cloacae
atgagtctggtagccactgagccagtacggccaccatccgaacccgtgcctgatgatggcggcgcgaaagttgaaagcctgccattctggccggtcatttcgctggctgaactacgccgcgcgatgcgtcttgatgggcaggtgacaaccgatcgcctgatgtcgcgaacggtggaagcggtggcccatgttaatgatcagcttttcctgtggcgccaggtgcagattgatgcgggctatgagtcattggcagaaattccggccagtccggtgaatggcacttccgtgaaggtatggcgctataaaaacgccgtgtattcactcactaaggcgctgttgattgaaggctaccgcgatattgacaccaccagtaaaggcgaagaccacgcggcggcattgagcacgcagatcgatacgctgtggcgggatgtgcgctggtcaatccgtgatatccaggacgaaagccggggtctggcggagttggtgtaa

SEQ ID NO: 143918 - DNA, 849 bp, Enterobacter cloacae
atgttgacacctgctcaacaacattttaaccgcgtgatggctgaacgccgccacgccagccgtgagccgtcgcagcttgaaatgacggcatacgaaaccatgcttcaccgcctgcgactggataaagcccgtttgagccgtgtccagtcccagaaggctaaagcggatttaaaacgcgaactgctgccggactatcagccgtggatagaaggcgtacttacggcagattccggccagtctgacgatgtgttaaccaccgtcatgatctggtgttgtgactgcggaaacatcgccgaagccctgcgcattggtcagtacgtattgcgccataagttgccgatgccggatcagtatcgccgcaccaccgccaccgtactggtggaagaaatttgcgatcccgtcctggctgcattcaaagctaacccggctgttgcgccggtcgccgctgacctgctggaagcattacggggcttaaccctgaacgaagatatgccggatgaggtgcgctcaaagctgcttaaggcgctggggtatacgctgcgcctgactgacaacgttgaatcgcttaccgctgcggttgaatacctgcgccaggcggcagtgttgaatccgaaaaaggcaggcgtaacccgtgatattgagcttctgcaacgtgcgcttaagaagaccgggaaacctgctgacgatgacggcgcagacggcaagccagaagcaaacagcaccgaaacccagacggcaacgccgccagcccagacaaaagcgaagcgggaaaccaaaaagcccgccgctaaaagcaagccggcagcgaagaaaagaaccacgacagcccgccagaaggcggtgtcataa

SEQ ID NO: 143919 - DNA, 1047 bp, Enterobacter cloacae
atgcgtaattctacccgtgaattgtttgatgcgtatcttgagcgacaagctgaactgaatcacatcaataagtcccacgtaacaaagtcattcagcattgatccaagcgttgagcagacgcttgaagacaaggtgcagcagtcttccgaaatgttgaagctgattaacatctacggcgttaacgatcagaccggcgaaaaaatcggtctgggtgtgagcggcccgatttccagcaccaacaattccaccaccgatcgccgtcagcctgtttccgtcacggcgctggattcgaacaagtacacctgtaataaggtgaacgcggatactttcgcctcttatgcgcagcttgatgcgtgggctaaattcccggatttccagcagcgtctgagcaatcagatcattcagcgtatcgcgcttgaccgcatcatgatcggctttaacggaaccagctatgcggataagtccgaccgcaacgctaacccgcttttgcaggattgtggtatcggctggctgcaacagtaccgcgcgaacgcgccgcaacgagtcatgaaagatatcaccgtgaccagccgcgacgattccaaccaggtgatcgctaaaggtgattacggtaactacgactcgctggtttatgacgcggttaactcactgatggacgaatggtacaaagattcgcccaatctggtggtgatcactggtcgtaacctgacggttagccgttcgttcccgatcatcaacgccgtcagcaccaataacccgaactccgaagcactggccggtcagttgattgcctcgcgtaagacgatcggcaacctgccttcgttcatcgcgcctttcttccctgatggcagcatgtttatcacttcgtgggaaaacctgtcgatttactggcaggaaggtgcgcaccgtcgccgtatcgtggaagagccggaatataaccgcgtctctacctacagttcgtcaaatgatgcctatgttgttgaagattacggcttcggctgtctgatcgaaggcattaccgccgccgaaccagcaccggcaccataa

SEQ ID NO: 143920 - DNA, 846 bp, Enterobacter cloacae
atgccaatgacaaattttttccgcgccgcagtagagggcgcaacctgtgacggtcgcgtgctggaacgtcagcacatcaccgaaatggccgaacagtacgatccccaggtctatggcgcccgcgtcaatctggagcacattttaggctggtcgccgacaagcgatttccgcgcgtatggtgacgtggttgaagccaaagccgaagagattgccgagggcccgttaaagggcaaactggcgcttctggtgaaggtggacgccacggacgaactggtagaactgaaaggtaaacgccagaaaatctaccatagcattgaggtgcatccgtcctttgccgacaccggcaaagcctaccttatggggctggcctgtaccgataacccggcgagcctgggcaccgaaatgatgaagttttgcacccagaacgccagcgccaacccactggccgcgcgtcactacgcacctgaatgtttcttcactgaaaccctggaatcatccctcgaatttgcgcaggaagagccgccagcgtccgacaccgggaagaatttcttttcccgtatcaaggaaatgctgaccggaacccgccagcacttcgatcgtgaaaatggcgatatccgccaggcggttgaactggtagcggaaagccagggtgatttgctggacaaggtggaaaaactgagcgcagggcagcttaagaacaagcagaccgccgaagcggtggagaagttgcgctctgagttcgacgagatgaaagcgcagctttctacccaggacgccagcaaattccgccgcccggaagcgaccggcgcaactgaaaaatctaacgcccagcttgctgactgctga

SEQ ID NO: 143921 - DNA, 1713 bp, Enterobacter cloacae
atgaatacagccgaagacctcagcacaaaagccaaaagcctctactggcaggcgtttagcatcactcagatttctaaggaaatcggggtgagcattaacacgatctacagttggcgccgccgctatgaatgggataaagccacccccatgcagcgggtgcaggatcgcacgcacgttcgttacctgcgcctggtggaaaaggacgacaaaaccccgaaggacttcaaagaaattgacctgctggcgcgccagcttgaccgctttgaacggcatgagcgacgcgaccaggagaaagagaagaaggcgaagaccccgaaaaaccatttcaccgaagaacagataacccagcttcgcgccctggtctttgattcgctctacgagcatcaaaaacgctggttcaaacagtggaaccggcgtaaccgatttatcctcaaatcgcgccagattggtgccacctggtactttgcccgcgaagcgctgttgcgtgcgctggaaaccggaaataaccagatattcctgtcagccagccgcgcccaggcgttccagttcaagcggttcattcagaagctggcacaggaaatcggtgtagaactcaaaggcggcgatgccatcgtattgagtaacggcgcaacgctgtactttctcggcacctctgccgcgacagcacagagctacaccggcgatctgtacatggatgaagccttctggatcagcaacttcatcaacctgcgtaaagtcgccgcaggcatggcgacccacaaagggctacgccgcacctacttttcgacgccttccagtgaagaacatgaagcctatcccttctggactggcgatcagttcaataagcaccgttcacgggccgatcgggtggatatcgacaccagttataaggcactcaaaaacggcaagctgggcggggataacatctggcgccagatagtcacgctggaagacgccgtgaagctcggcttcgatctggttgatacagatgaaatccgtaacgagaactcccccgatgaatacgccaacctttacggctgcatgttcgttaaagcaggggaacgcgccttcgactacaacgcaattcttggctgcggcgttgatggctacatgccggacgcatggccggactggaacccgtttgcaccccgtccgctgggtaatcgccctgtctgggttagctatgaccccaacggcagcagcggcaaaggcgacagcgccgggctggttgtgctggctccgccagccgtgccgggtggtaagttccgcgcggtagagcgccaccagttacgcggcatggagtacgaagagcaggccaaatttattaaagagatcaccacccgctacaacgtgcagcacattgctatcgacggcacagggatcggcgatgcggtttatcaactggtgatcaagttcttcccgcaggcggttaaatacaactattcaccggttcttaagcggtcgatggtgctcaaaatgttgatggtcattcgtgccgggcgctttgagttcgacgccggaatgatggatctcgcacagtcgtttatgaccgtgcgtaaagtcaccgcaggcggcgttattacctaccagtccgatcgggcccgtggcagcaatcacggcgatctggcatgggcaactatgcagggcatttacaacgaaccgatcggcgcggaagtgaccggcgataacggcagttttgtggaggagttttaa

SEQ ID NO: 143922 - DNA, 1050 bp, Enterobacter cloacae
ttgagcggcaaaaaaaaattcagggcgccaactgctgcgccagccagcacggccagcaacgcagccaccccgctggaaagcgtggaatctttcagctttggcgacccgatcgcagtcaacgatcgcgcgtctcttatggagtgcctcgaatgccataacaatggccgctggtatgaaccaccgatcagcccctacgggctggcgcgcatgttcgacgttgccgcctatcaccagtcaccgctgatatttaaacgcaatgttatcgccagttgctacataccgcacccgctgttgacccggcaggagttcaccgcctgggtgcaggattatttaattttcggtaactgttacatggaatgccgccgcaaccgactcggccagccgatcgagctgcggcacagccaggcaaaatatacgcggcgcggcatagacccggcgcaattctggtttgttccgcgctacgttgacgatcacgcgttcgaaccaggcagcgtctgccagatcaagaaccccagcccgcaccaggagatctacggcgcgccggaatatctggccgcactacaaagcgccatgctgaacggtgaagcaacggtgttccgccgcaactactacattaacggcagtcatgcgggtgtgatcgtctacctcaccgacccggtagcgaataataacgatgtggaaaagcttaagaagtcgctgaaagatgcacgtggcaacggtgcttttaaaaacctgtttgtctacgcggcaggcggaaaaaaagacggcctgcaaattatgccgttcagccaggtggcggcgaaggatgagtttaccggcatcaaagacgccacccgcgacgacctgctagccgcgcaccgcgtgccgcccgttctgatgggggtaatgccgaataactccggtggcttcggcgacgtagagaaagcggcgaaggtgttttccatcaacgaactggccccgatacaagaaagcctgaaagagttaaacgactggctggggatcgacgtggtgcgcttcaacccttacgcactgttgcaggcagcaatctga

SEQ ID NO: 143923 - DNA, 639 bp, Enterobacter cloacae
gtgattgttctttctgacaatgatgtcattttgaagctggcacagtgcaatcttttatcacaactgccagtggtttttaaccagccccccgaacagatcttcattaaccctgctgctcgttttcagcttctgccgaaaaaccctgataaagcgatcaggaagtgtggtagtcaggttgtttacgagcaggtgggtgccttcatcgaatctgtgcaggatatcccggaagttcaagattcccagcttattgagcttttggggagtgtgcccggaattgatgtaggcgagcagctattgcttgcgtcgtgcatagagaacccggaagccattttcatgacaggtgatcgccgctgtttgaatgcaattgttgcaaaccaaccagcccttgccgtggttcatcagcgcttattggatgccgttgttacatttgagtcgtcgcttttgttatgtgtccacggtacagatcaggctcaagtttatgaaaatttggtgagcaatcctaaacctgacggcatgttgaaattggctctttcaaacgcaggcgctgcaatgtgcgaatgtattttttcccatactcgtgagttttacgattaccttgccttcaaagatcgacttcctgatcgtgagtggggaaggtaa

SEQ ID NO: 143924 - DNA, 999 bp, Enterobacter cloacae
atgacgaaccataatcagatgagtcagatatattctaaattcggccgggccgggtttaatctctcttacatccgcaggttgttgcctgactggtgggatgagaagcttgctgacaccccatcagggcgccagtatgcgtgcctgcaccttgcgcgtatgtttagcattctcccggatagcctgaaagatggtagcgaaggggtatgctttaattttggtggaaaccataaatataaacatcgccaaaatgtagccgagaacgatttagatatcgctactgctgttgcctatactgcggccggtattgtcgcgtctaatttcaaagtcccttacgatgccagtgcagtgctggatcctttggcgataagaacccaaatcctcacaaaggaatcatgggtatcactcggtggcctggtatcgtactgccattcaattggcattcctgttgtttatctaaaatctttcccgcaagcggcaaagaaaatggccggactggcattaatgagccacgggcgcccggtgatcgttcttactcagcctcagaaatatggctacatgctgtttgatcttgctcacgagttaggtcatatcgccagagggcatctgaacgcagagaacgggcagtgccatattgatgcaaaaattgagaatgcttcgactgataacatagagaaagaagccaacgaatttgccttccaggtaatttcgggccagaagtctctacgtatcgttccaactgctggcgcgcttaatgctgctggtttggctcgtgctgcccagatgtacggcagttgcaaccacattgatcctacgcacattgcactcaactatggttttgcccagaaccgttggggtgctgctgttaacgccgttaaaatgctttgcgcaggcaaggagtctgatcaggactttgtaagagccatgatgaaaagcggaatggatctagacaatatccacgaagatgatcttaaggttttagaaaatctaatcggggagtaa

SEQ ID NO: 143925 - DNA, 456 bp, Enterobacter cloacae
atggaactcaatatcactacttgctataaaatctttgagaagcacttcaaccgcatctccgagtctcttgatgtaagcccatcaaccagacacgagttagagaatttcgttgcttaccgcgccctcatcctttttaagctggatctacttttaattgatcaccgcaattcaattgatgaagatcgctttatcctgttcgggaaaaatgctctccatcattatttattcacaaaaaaaggcgtcccgtactcagaagcaaaaaaactgaaccttcaggactcgttagttattctcgcggatgatatttcaaaatattcattacccgctgaaataattaacttccttaaaaacgaatttaacttctcatcaaataacattaagtatgttaaagatgaaatgcgtgtattcaaggattcggattgggacttcgaacctgccgatacacgattgaattaa

SEQ ID NO: 143926 - DNA, 462 bp, Enterobacter cloacae
atggtcatgaaacatgagggaaggggtgagggggtctgctgccgttatgctcctgcggggagcttgatcgggtggtttatgtatggcgaagatacgcagaacgttatctttgtggagtccttcgatagtggtgattttgtccaagcgataaataaagcaaccgctgatctgcaagagcgcttaagtgctgaaaggcagtttataaataatgctcttaatgcgatgtgtgatgcgggaaaaaacgataaaccgcgtatctttgcgggttcactttctgatgaagaactaatttctttccttgaggaagtaattgtcaaactgacgtcccgtagaaatctaacagggaagccagagtctctacgggaacaggctgaacaagccgagggaaagctaaaatctacgaacgaatttattaattcaatcgtgtatcggcaggttcgaagtcccaatccgaatccttga

SEQ ID NO: 143927 - DNA, 303 bp, Enterobacter cloacae
atgtcaatagactactcgcaaaaactaactgaactacgaaaggccgaagggctaacacaacgtcaattctctgaattaacaggagtttcattaggaacgatcaagaattatgaaagtgggcacggcattggaggaatagcaaccgtggagaatgtcataaatattcaacaatttcagaagtatacgctttggctaatgaccggtaataccgcaccagaagccggacaaattgccccggctctctctcttgatgggccagaagatgcggcaacgtcgcgccgctccgcccgcaaaactggttaa

SEQ ID NO: 143928 - DNA, 1215 bp, Enterobacter cloacae
atggaaaaagtaaaactgcggctttatcagctgacgctgattttgagccttatttcgcttgcgctggcgctgctgagttcaggtaaacagcgagagtttttctatattgcaatttatgccagcattatcggcttagcgtgcgaatataaaaaaatcacaatgcgtcctttttctatcgcactaccaattttgctcattgggttacttaatctttgctggtacatggtgtatgaataccatagcgaaggcctgaacgtttatagcgattatcttggtgcaagtaaaaaattgattctggcgagcatcctcattttctatcttgaccggtttaagttttatattgataaaacatccttccagaaatattttttatacgcctctggtgcagggtttatacttgcgactggctatggtttatggcaggcatcactgggtatgacacgtattgagatggccattaatcgtgcgaccgtgtcggcttatgtttactcagtcttatcactggccttcatatatagtctttttcttcagaaaaatactaagctgtattttatcgctggcctcactattttaatctcctggtatatcatactgctgacaggcacacgtgccgcaatgggtttgtatttgcttctggcgatagtactgacactctaccacttcagaagaattcatcttaaatcgacactaatattcttatgtattgtggcgggtattgctatcgtaagctacaaaccgttaatttccaccaagataacgcaagcacaagttgaagtagagaaatatcaaagtggcgttgacggtacctcccttggctcgcgttttaccatgtggaacgtgggtattcagaatggacttaagcatccgctcggccaatcactggaaaatcgttataactggacacagcgttatgttaatgatggacatcctaatttaatcactgcactcggctatttaaaagtacatctacataatgagtttattgaaaaatattctctgcaggggatccccgggctggcgatattattctttttctatatatcgatgatcgcttacgcgcttaaaaacaggaatggcctgctgctgacgaccatgcttcttttattactctatggcctgacggacgtcatactgttgagttctgaggctttaatcttctttgtcaccgtgtttgcgctgagcacacctttttcgcaaaccagacaacgtcaataa

SEQ ID NO: 143929 - DNA, 153 bp, Enterobacter cloacae
atggaaggaaaattcggcatctgcgatgcgaatcattttttcataaaaggctttgtcgttattcttatcgcccgcgcaaagcacaatggcctgacggacaggatcaaatgcgaagaaagcacgtatcggacgtccagcatattgaatacgtaa

SEQ ID NO: 143930 - DNA, 231 bp, Enterobacter cloacae
atgatgattaatcctcgattaaaacttttccttttactggtattactctggatgtcaggtctctttatcactatggcttcaggccgtctgataattgcagcggcctcgtatctcttccttaatgattttgatttcaagtggagcgacttgattgctgcgctcaaaatctctgtaggcgcagggttcatcattggaggggggcagtccctgcaggtgaaagagaaaaaatga

SEQ ID NO: 143931 - DNA, 456 bp, Enterobacter cloacae
atgatttatgtattattaggaattgcacttttcgcttttgcagttggaacggccgtgtttcttcgctttagtaaagtgacgggaagaagcgtccagtcaccttttacctctatgattttctttgatgcgctcttttttgggctgggcagtaagcgagacatgaatatcgcagcatgttcgtttatcgtctttttactaagcgtatggggattaacttatttaaaattaagcgcacatttttgggggagtcgcgaaagttattttggttttgtgatcgccggaattatgtttctggttatgcactgtcgctattgtgcaaaaaatttcattatcaaaaatgatgggctggcacccatgagagaattgaccagtatcaggttgtcgagcctcactagcccctttttatggttaagtcgggccgggtatctgggtttctttataggaatgatacgttga

SEQ ID NO: 143932 - DNA, 249 bp, Enterobacter cloacae
atgattactacaagggtaaaattatttttgttactggccgctgtttggatagcaggaatatttgccacgcttttatttggacgtttgttgattgccctggtcagcttctttttcatcggacaatttgattttccaatcagtgatcttgttgaagctacgacccttgccattagtggtgggatcctcgttggaggaatacagtgcgttatggcaaaagaaaagaaccgatccgaagacccaccccggtaa

SEQ ID NO: 143933 - DNA, 1068 bp, Enterobacter cloacae
atgttttctgaatcagaactatcaatgtgggatgttgaacctaaggatagacctacaagaatgaatgcgagtgaaataaatgaaaaatatgagcgaggagagcatagaattgtaactgagacgaataatgagaagttgccaaatttcgttcaggcgcttgatcggcaaaattacatggaaatcagaccattttaccaaagaagatctcgctgggatgaggaaagacaatcgaaacttattgagtctttcataataaatattcctgtgccaccggtgtttttatacgagaaatcttttggggcttatgaggtaatggatggtcagcagcgaatcacagccatttctgattattacaacaatcgatttaaattaactggattggatttgtggcctgaactgaatggtatgtattattctgatctacccaataaaattaaatcaggccttgatcgtcgttccatttcttcaatcgtcttattaaaagagtcagctccggatgaagaagatgcaatatttttacgccaattggtttttgaaagattgaacacaggcggagtacgcctggaaaggcaggaaataagaaattctttaagtaagggattggtgaatgacatgcttttcatacttgcaagagatgatctttttaggaaaatatggggacttcctatttttacggaagaggaggagaaaaatcacaaatctaaaatttatgaagaatctttttataaaaaaatggaagatcttgaggttatcttgagattttttgccttaagacatttgcagcattttaaatatgggattcagggttttttagatttatatttgatacgtacgaaagaatttacgcataacgacgttgacgtattgaaagatatatttctgaaaacacaaatgttagcttatagtatctatggtgatgatatatttaagttgtataagaatggcgagttttacggtcgtccagtgaaaggagtttatgatgcagtgatggttgcatttagcgagcgattagataactacgatttgataattaataacaaagagtcggtaatgactccaaattattga

SEQ ID NO: 143934 - DNA, 189 bp, Enterobacter cloacae
atgtaccgggtaaaacagtttttccgaggttcactaacgctgcgtgactacgatggtcaggttgcagaggctatggccatggtgcgagtgctgaataaaatgacgaaaacaggtatgcatgaaagcacaaccagctacggggattcttacccgaaatctgatttcttcaacaaagactgggctcggtaa

SEQ ID NO: 143935 - DNA, 591 bp, Enterobacter cloacae
atgctaaaccccggattcgttacccgcaaagcacttgctctctggcgggatgttcctgcttttttaccccagtttcagttccatgagaaacatcgagcggtcattcacacttccaggcctgaaaatattctgccgttgattgcaagctttgacgtccagcaagaccccgtaattcggcggctgatgtctttgcggaaattaccgcagaaatttctgcacaatcagcaggctaactcgacgggcaactttgggctgcacagttttactctgttgaaaagctcagcatccgagctctgctatggcttaagagggcaattctggcggatagatttcggtctggaaaacgcgcccgacgcgattgcttttcaggcaccctccgcgccgggcagcgcaaaactgttgctgcgctaccaggtagcggaactggcgccaggtcaacatgaactctgtactgagaccttcgtctattgtccggacaaacgtactcaactcaaaatggcggcctactggctggcaatacgggcagggagcggctggatccgtaaaaggacgctggaggctgtcaggtcgcatgttgaaaatcagaagtga

SEQ ID NO: 143936 - DNA, 648 bp, Enterobacter cloacae
atgcacaccatccacagcacattttctcttgccggccacatcgtccaccacgtcaccttcgatcccaccaccttcaccgacgccgatctcctctggctccctcaccacgctgagctttcaaacgccgggcgcaaacgtaaggccgagcatcttgccggacgcatcgccaccgcgcatgccttacccgatcgcatcgttccaggcatcggccccagcggcgaaccgctctgggcggaaggggtttcgggcagcattacccacagcggcacgcaggcgatggcggttgtcgtccgtcatcaagatgcgctcgtaggtattgattgcgaagccattcttccagaccacgaagcccgcgaaatccaggacggcatcgttgatgcgcaggaagcgatgtgcctgacgcactcgggctacccttttgcgctggcattgacgctcgcttttagcgcaaaagagagtttgtttaaagccctcttcccgcaggtgaagatttacatgagttttgagtgtgcgagagtcacagaggtaacggaaaaaacaatcacgctggcgctttcgcgcccggctggacaatatcctgagggtaaacgcttcaccctcgtctggcaacatgataacgggaacgtgtggacactgctaaatgcctga

SEQ ID NO: 143937 - DNA, 1155 bp, Enterobacter cloacae
gtgggttcctttgttgtcaacgttaaccaggttgcaaaggcacaagcactcactaccggctcttatgcaaacaacacggatctgctgggcgatacgacaggtacaacgcgtaaaatcaccatcacccagccgggtaccaaaacgcctttagaggtcaccctggcggatggcgatacgtctctggccgggatcgcgagcgccattaataaagcgaacggcaacgtcaccgccagcgtcattaaagcgaaagacggtgattaccgcctgatgctgtcatctaaaaccaccggtacggatggtgcgatgaccatcaacgttaccggcgacgccaagctgcaaagcgccattggttatgattcaaccaccaaaacgggcgcgctgacggtgaacaccgacgcgcagaacgcgattgtggtggtgaacaacatctccatcgagcgccagtcgaataccattaccgatgcgctgcctggggtgaccttctcggtgaaggccgagagcaaagccgatgaaactcttgaggtttcacgcgcaacggatgctaaccagaaggcgatcaccgactgggtcacggcgtataactcgctgcagtccaccattaacagcctgacgaagtatgttccggttgatgcaggcgccggcagccagtctaccagcaacggtgcgctggtcggtgatgcgaacgtgcgcggggttcagtcccagctgcgcggcctgctgaccgaagtgcagaccggctccattcagatcatggcccagctggggatcacccaggacccggtgaaaggcgcggacggtaccgtcggtaacctgaaagtcgacaccgataagctgaaaaaagcgctgaccgacaacccgaacgccgtacagcagtattttgtcggtgacggaaagaaaaccggtatggcgacccagatgaacaacacgctgaccaccatgctcagcaccagtaccggcagcgccggggtgatccagaacgcgaaagacgggatcaacaaaacgctgaaaacgctgggtgaacgttacgatgccatggatgctcaaattgaagccaccatggcgcgttacaaaacccagttcaccagtctggacgtattagtcaccaaaatgaccagtacagccaactacctgacccaacagttctcacaaaagtag

SEQ ID NO: 143938 - DNA, 1635 bp, Enterobacter cloacae
atgatttccaaaaataatctgttaattctaagtgttatttttttacttatgttggtgccatacctacacacgccagtattgtcagacgattattattattatttccatgcaagcttgcatgagcaaattggtcattatttagtctggagcggaaggctgattactaacatatttagctcgtatatgctcaaatatgtcaatcatgacatctatcaatctttgacagctgctgcgctagttgccagcgtttatcttatcgcagcgataccatctgcattatttgttggtaagcctaaaccaagcgccatttcgataataattatttttttatctttttggatatcaaatccagcccttggcgaaacttttttctggtttgttggtgcgtcgaattacttatggcctatattttacatatctttattttttgttattctggctcgacaaagaaaatcacacacattacttagttattctggggctattttagttggttttttggcaggttgctcaaacgaaaacacgtgtattgttgcaacgatactgacaattttatactctatttgttttagccgctttaaactgtcagcaccatatttgattgggattatcttaggctctgcggtacttttattcagcccaggctctgccatcaggtcgtcttattttaaagagtggcattcattaacattaatagaaaaacttgatcaacatttatttgaaagactgcctgcagcgctggatagcttatggccaatatttctaatcattattttcattgcactttcatttggagtgctcaaaatagaatcaagggcttcattaatttgtgcactagcatttttcattggtgggatattgtgtgaccttgcatttgttgcttcaccatacatgcctgaaagagctggtattggtgccttgtttatgtttttaataacactttcatttttaattcactctgctaatttttcaaatgaaaaaatatttaaaaactcgatatatggcattatcattgtgttcgctatgacttactttttaccatcttacggcttaatttcctattctaatttaagagcgtcaaagcaagatgcaatacgcatggccatgataacacagcaaatcgacgaaggaaaaaaagagatcgtaatacctgacttttatctaaaccgacttttaaaaaaatcagatggtttccctactttcaagaactcatatatgtttaattattttaaagtagataaaatcactgaagagccaattaattttgattactcaattattgactcacttcccaagagagacgttaatgcaaaattaaatgaaaacataacattgaaatcgatttatttttacactgacaaattatctggtaaaaataagcttatatatcgtatctcaggtgacataaatgcttatttgatgcataacaccgccattttttctcatgttactttaaaaaacaatgataataaaaacatggatactattgttaaggcgattaaagtagggagtgattggtatacttatagtgaagcaggaaagttagatttatccgaaataagtaaaatcaatatcggaatgtacactactgagccagtaaaaatactatctagcaattatttagaatttaaataa
